United States Patent Application Publication US 2011/0014706 A2 - sequence listing, part 20

SEQ ID NO: 36453 - DNA, 4476 bp, Arabidopsis thaliana landsberg
  unsure (1)..(4476): unsure at all n locations
agagtaaaagatatgagctccaacaatatgatagtatgaattatcttattcgcacaatagaatatatcgatgagactgccacatattcaatttaaaaccattcacatcaatatcgatctttttatctttttgagcagtcccttctcgaagacattcgataaaaaaaaaaaacgaaactgcataatttatgctatacctttcttcgtaaaggaaaagataaaaaattggtgatatttttatatacgaaatcttcttacattgattgatttggtcggtccattgtaatctattgcaatagtaacaagttttcgttggacaattatgggcccgattgttacaaatgggcctactcataaagaaaaagtcactaatgaccacggaatctctcgtctattaaatttagactactactagttttgcttttatctctggataaggatgnnnnnnnnnnnnnnnnnnnnnnnnnnnnaacgtcatatttcgtccatcattgaaatatgtattagtcaagtagcagtggctcaacttgctgaagattcgaatttatatgataagatcaaatgattcaatgctagtagcagaatcatgtactaaaatgcctagtagctatagatattacatttcttttgattattttttgtttaaatatcatatgtttagtacaacactaatagacttgcttaagaatcaacccatgaggacaactatcatggtcagaagacaaaaatgggcattttgatttgatatccagtaggagttggacattcatacatacgtatgtacatatacgaaaaaacgtcttctccggttaagtgagcactgttatgcttgctacaccggccatttaagacaactttgattcttcagcttttccatgatccgagtaaagaccttttcctacaactaaaatgacaccacttgctcgtctacaaattaacgaaggagaagatggttatatgagtttatgacttgtgtagcttccagcgaatccaccaaatgatgaagtttatgatcgaatttaatggaggaggtagatttaactcactgagtatgaagtttggcaggttggatgattctgatggtttagggttggtttcttcaatcacgatctcagttgaagaatcacttgagaatcctagcttctccattattttttctaatcttttcccgtttgtcagatacagataaccaatctggaaattgcacagataagtgacaacaagaagatttacattcaaaacagagttaagagcacaaagaagaacgcagtgtaagtttagatactggtgttacttactagtgtttccaatgatgatgccttgttataaaccgcattacctgcacgccttcttgtacgtgttctagcagaacctagattctttccccacctaagaatatccctggagcaaatacaaattcatcagatggataaaatccaatgagaagtgaatcatgtatctcagctcaatcacaggattctcaattatcatagtgtggcggcagagaaaagttggatgatgaaatagtggtttttgtgtactgacctctcttcctttgttagaaagtcatcatcaacaagtttattcagcaaagcatactgtataaaattacgagaaaagctgacagttaacatcgaaaatgaattctcaaagtaagagtgtcataagatgaaataaataaaactactcagcaaaatcatgataccgaacaatacactgtctcttcaaaattggaaaacaaggaggtcaaaagataccaaacctgagcttcacagggcaccacagctctaacacgatcgttataatcttcaatactaagcggagggaaaagaaaatgcctacgagcatatagctgcacaaccaagagaaaaaatggttaaacagagtagaaaattacgaatatcaacagagtgactgtcttaatattgtaaacactatcagccttacattcttgcatcctaaaacagcaaggcttaagtacaaaaacttgtctacaataagctaatcatgattatcttaatgctagaaacactaacataatcatcatctgacactattgcaacctaaaacaacaaggactaagcagaaaaaacttgtcaatatcacataacacaaactcatagtggctgccttaatgctacaatcactgaaaatgatcatcatttgacattcttgcatcctaaagaacaagctcatagtatctatcttaatgctataaacactaacataatcatcacttggtatccttggatcataaacttgtctaaaatcacgaagactaaatcatcagggattaagtacaaaaaaacttttcttaaatcactgaagaacaactaacctcatagattgaatcgccaatataagctaatgaggcagcattgaagacagatctaggtttctccacttttggtggacttggaaaccatttctcatatccaacacaagtatcatcaaatccatcaccaatatctacataaaaccagaaatttagtatgaatcatgaattggacataacaaagagagagttctaaacaattattcaggacccaattcgttacctttgcttgcaggacgtttgagtaaatcagaaacggagacgcttaagtttgtcgccggagaagatgaagaaggagacgacggtggaacaaaagaactcaaattagaatttttcttaacattgcgtggcgcattgggattgtatcggagcttcggctgcgtatctaaagcagctctcactatagtagagctcgctgatagaatcgccatttttgaaaaaacctttcagctttttattttttaagcttcccttatgttttgacggtaataagatcaggcggtgacatttatttatccacgtggcgtgtttttacttgtctgtttcacaaaaataaatacacactagcgtacctttagcattacgagctttgtctcgtctctcttctggcactctcacctttcgtcgtcccaatttgtaaaaccctaacgactagatttcagtacctgcaactcctttttctcaactttccgatcatatttctcaatcggagaaactgattcgacgaacatcatgagtcgctacgatagccggaccggcgattccacctcgtaccgtgaccgtcgaaggtaagtgtgtttcctttcgtatagactccatttgaactatagtctcgttgtttttggctatgtatttgaacgaatatgaagaaaatccacttaattttgatcaaattcgtggaatagtgcgttatcaaattctctatgggtgtgttggagaagaagagtttgcttcattttcaaatttgctttatcttagtgactcagggtttggtgggacttcatcatatggaagctcaggtagtcatacatctagcaaaaaggataacgatggcaatgaatctccaaggaagctagatttagatggtttgactccttttgagaagaatttttatgtcgagtctcccgctgtggcggctatgacagacacagaagtagaggaatatcgaaagctaagggaaattactgttgaaggcaaagatattccaaaacctgtcaagagttttcgtgatgttggctttcctggtaaactcttgaatttggcaatcatgtagagcttgtgattagtttcacttacatgtcttagatgtatgatgtagcatatatgcctgttttatttttggatatacctactgatatagtttcctgattggctcagattatgttttggaagaggttaagaaggctggttttactgaacctacgcctatacaatctcaggggtggccaatggctatgaagggacgtgatcttatcggcattgctgaaactggttctggaaagactctttcttacttactacctgctattgtccatgttaatgcccaaccaatgttaggtaatgcttgatttctgctcctggagttctttttttttttcgttcttgtttgatggaagttgtaaaaggctgtactgattgaaataaaatttcccagctcatggtgacggcccaatcgtcttggttcttgctcccactcgtgaactggctgtgcagatacagcaagaggcatctaaatttggttcatcctcaaaaattaagaccacttgcatttatggtggggttccaaaagggcctcaagtgcgtgatctccagaaaggtaaattgctttagttcagtgcctttcacgacatttctggaactattagtttttcttaattttttgttgatcattctgattgtgattgttggcctgtggatataggtgtggagatcgttatagctactcctgggaggttaatagacatgatggagtcgaacaacacaaacctacgaagggttacttatcttgttttggatgaggctgatcgaatgcttgatatggggtttgaccctcagatccggaaaattgtttcacatgttcgtttacttactcctgtcttcgtcatatatatgtgtatgctagttgctttgtctataaccttt

SEQ ID NO: 36454 - DNA, 6274 bp, Arabidopsis thaliana landsberg
ggaagctaaaaagctaccgtatatactgcaatagccttgttctcaactgttcaaatgcatccaaaatggttattacacagataggcgtttgtcaactaaccctgtacagacaaagacaccaatttgacaacacatagaaagttcattcgagatataacttataatcttggaacattattgtataacttttgttggcataaactttggcaaaaatatttttaaagtattgaaaacgaacttaataattggtttgagtgtgtaatttactaatttagcatgggagagacaatgctatcaattaatattttttaccctatagtattttttaagagaattgagagagtttggtacaagttctcttcacttgtctggagaatttggattcccgagaactggaaaagatgaaaagaaaaccaaaagattatttacttacttcagattttcatattcctttcatattttatgacaactcacaaaaacacagactcctaattcctctttttgttctctcctcttttttctttttcattgtttacataaaatcattcattctgtcttttgtcctctgtgtcgtcgttattaatacccaatttcttaaaaataaacaaaatttgataaaattcatatagtatacatgtaatggttcgtgtgtgtgtgtactgcaacactctgcacattcattaactacactttcttccaagttgcaagttattcaatttttacccatttctctcttttgtcctttctcttgttttgggactttcacctttccaaactcccaaatcttttatttattactccatcagcatttaattttgttcacaatcatattttttttccaatatttacacccaactaaaaatagttattttttcttaaatcatgacaaattgaattttaacatttggaaactttaggagtccctacaagtaatcaactctttagttttcgagtgtttggttgaaagtttggccttgatgtgatcttgaaatgtgattgagtttactactatagttggagttttgattgttgatgatatgatgataggttcctctttccaaatcattgaaatgttacaaaacaaaataaaacaaaaactgatattcaagaaaaataatgttttgtggttgtgaacgtagaaacacaaatgatcaacatcaacttcacgcattcaagaaaaaaacaaaaaaacaaaaagaacttttactttaaagaaattatgaattacagaaaaatacaacaaaaactcactggcttggactttctaggttcaataattggctttggtagtacttatgataatatgtgatgaatttgtcactggaacctataaagataacagtatcaagatcaattttttatatattaaagaatcaacagtaaaacatgagattcttgacattatcacttaatttaggaagaggaatcgtctttggaggaccaactcttgacacagaagaaggattcatggatcctccattagattcagatgatctctcgatgtaaagccttcctctgtacgcagcaaggtgagcataataagccggtggcacaatcgaaataggtttcgtgcacctcacgaaagtgtaacacaagttatacacaagtctctgcaattcgtctgaagtaaactcgttctcgtcccacaggatatggtaatgcgttggcctgctcgtgcccttcactcctaaatggctacagagataaaaatcaaactcttttggatgagctatcactgtatcaaccactgtgccaggagggatgttttcatggtcaggatcacaccggaacagcctcgtgtggtgtcttttctgaaccacggcgaatgtgatgcttggattgtaatcgtggaactttgaacaagctgtttttatggattgaagctcttcttggagaactttcttgaactgtgtctcgctcacaccgtctctgaagaatatgattcgattcggaagcttttttacagctttgtagaaatcatcaagaagttccttgaccatcaagtcaagatcttgtatgatctcttgcctatgagtctgagatctcattcttgagacgtatcggttagcttctggccagtttatgctcccgaccacagccgctactgaagggctacaatcatcgaatggatgaggatgcgttacatcagctcccatgaagataaccggctcatcaggtctaagcagtcttgggatgtgagaaggtattgagttgtagagctcggtcatggatccaccgatcttggcgtttatcttgagagctaagtttgaaacgaactgacaactgagcttagtgatgttagggtataagcagcattgtgtgacaacaccaattcttgtctctgctatcctctttagatctccataccctttatgttttttctccattacacagataatcagctgaagattgctcgatgccgctctttgaatctccttcagtttcgattcaagaagcgaaatgttgttgagtatgtatgatggctcaaagaaggtgctgcttaatgtgttcttgcttaagacgacacccaaatgctcacacttttgagtaagctcgtttatgaacttgggaatggtagatttctgatcagagctgcctccaatactcatcaaagcccatctctcaattctagttccttttaaaactttactttctttaaggttccttggccggtcaagtttaagctttggaggctgaagtattcttcctttcagtaatgtcatttctcttgaaacctcaaggttgaattctcttgtttggtttccgctgtcaaagtaaagaaccaaaatattaaacttttgtcgatgttttagtactcgaatatagaagctcagattaattgaattacctcgatggaccaaccgatcctgtcataaccttatcaataatagctttcctttcattaggtttttggcagcccattttcatgatctttgcagcttgatcatccgtaagcttcccaagaaacttttgaccttcacaaatcatgcatagctccataggaaggtaacaaggtcttgccctactgatttgcagacacggcaagttcttgaactgaatctcataaccataatgatctttgaagtaactcataagccttagatgcttcccatctctatccggaaaccatatattctccgtaatctcctctgttaacccgtagactcgatacctttgaactgtttctctatggcaaacaaagactcttatgttcttaagtgctttctctacttctctcttttcctctagactcaattctctacctttgttcctaggaaggtccttgagaaactcaagacgcttctgcaagtaagctattactccaatgctttcatggaaagctgtgattgagagatccatgttaagtgctaaaccttgctgagtctgtctaagactctggaaaaaccctctgagtccaacagctcctcctccaatctccttagatccacccatagaactcgagtaaaacgatcttccgatcgatgtacacttctccattggattctctctcaagataacatcaagagcatgaatgtattctggaggcagaggagcccaatcctctccttcctttctctgttctttaccatcaaacttggacacaagcttcatattaaccctaaacagtttctcaatcttcttctgaggttgcttctcacgcaagtcaccgtaattcatcacagccttgcaagatgggatagggagattaacaaagaactcaagcctatcttcctgtaactccacagggctgtaaatgttttgcctaccgtcaaaagccggaacaacaccagagaaactattccgttccgtctccacaagcttctgtttgatcatccgagcaatttcctttgaaggctgaggagagatctcaacgttgtaatggtaaatcctctgtgaagaatcaaacttgacaagaaaatggttggcgaggaggtaaataacagaaccatcttgaccaccaaagtcaggtcttttagcaaccactaatgctgcttcttctattgctatggatccactcactttgttgttagaaacttacaaaaagatgcaagtaaatcagtaccaatagagagagtattaaagggagacagagagtttgttttcagacattaacacattaaagaaagagaacatttaaagtaaagtgaatattgtacagactacagagaaggaggaccatttagacattacacaatactagagtctgtgtgggaaagcacaccaaaacaagaagaacaagagatagccttgaaaacctcgtctaataaaaataaactaattcagacataggtgaggatcttaaacctttaagccatgaaaaaacaaaacatgcaaagaataaaccaagaacaagaaaaaagatagattagtcaccttgagaaacagggagagatttttggaaacgggtcattgagtgaggaggaggaagaggaagtaaaggaggaagaggaggagaaagaggaagaagatgaggaggaggaggaggaagagagttgtgaaattgagagtagaagtagcagtagtaatagtaatagtagctagaaggaagatttgaggcaacaagattgaggttttggtgagaagaagggtgcaaaagaaaaggaggaggattggtttgaacatggtgatgataaggcttgtggggaagaggtgttcttgatttggaattagggatgtgtttgttggtactgtgatggtgatgatgatgagttttttcttccatggctgctgagaggaaaaggagattgagagagagacctttgttggctttggaaaagcagaagaaagaagaagaagaagaagaagagagtgtgggtttaccagagagagagataaaagaggcagaaagggattgtctgagtttttggtcagggaaaggtcaaagtctccttccttttgttttattttatttttttctgccctaaaataatgaaatgatgttatttatgctgtcataaataagctttaattgttggcaatattaaaagaaaataggcctataaatgtaaataactatattagtatagtagtgtaaatgatttgttgaggatattgagaaaagctacgagtaaactatagttcttgattatataatcgcaatgtgatttttaagaaagtagtgattaccgataatgtttggtgtgaatctaaccgatgatattagacctttatatgttttttcaacagcatgaatgatttgataagccttttatggtttcgtaaaccccaagttgttgttgttgttacacatgttttataaaatggaccaatacactcattaaatcgaattatggggaccattctgtttaattatttattctttgtactattttcttcgtacctcattaataatacacactttggactctttcatcaattttccgattttttttaaaagaaaaattatacacatgtttgcatatagctgaataacaccaaaaaaaaaaaatggatgaaagttagattaatgattctttactattcgtagtttattttggaaactattgaatagtattacatgaaagcaatataattcaagagccctttggcttctttcatttttgattgtgaccaaaacccataccaatggttcccacaattataggtcccactataatttatctcgttgaataattgtattttcgtgaaaaaaatctagagatgatgaacaagaacaatgggtcttaaatcataatatcaacatcaatattaggtatcaatcctagcctttttattaaatcctaaagattgcgaagctattggtgcgaattcatcgtttcaatgtttaaacaaaagatgctcaatagtatatattatagatgtatgtctttgtgaaaaatggtccgattcaaagagtttacttttatgtaatggaacactaaagattactgggaccaaagagatttggtcaaagctaaaagcaccctataaccccattgttttgggctaaaattgctctctacttttagcttaagctctaaccaatagtatttgccttcttcttttttgtataaaactatttagtgatgaaaagccgatgatccgacgatatttcttgttttaaattttgattttgtcttttatgtcaactacaacaaaactttgttaacaaataattttttgggaatgtggtgatggcgactgggtgatatgattatcgtggaccctaaaccatattatctaactccattacaaggtataatctcttattttcttttatttacaagttaattagtactattgattacaaagatcaaggttcaatcgcttgacc

SEQ ID NO: 36455 - DNA, 1580 bp, Arabidopsis thaliana landsberg
cataggaccaatagatgaataatatcgtttatgaaataaacagagtttctctgatctttattatgaacgattacatgtacatatatagtttttagagaacacgatctctatgctatcacaatattgtatcttcacagaaaatataaaaacaatattaacgatgcagattttatggaatgaatctgatacacattgctgatttaacgccaacttcctcttcacgcaactttgtagctaaaccaaacccgtttacctttaaacgaaatctccaactccaacaccccccctcaagttggagcatacaaatttcgtatgcctaacttgatcctgaatgctgagaaacaatcacgtcctaagggctttgtgaagatgtctgcgagttgagacgttgtgccaacatgtcgaggagtgattacacctttaacaaactcatcacgcacaaggtgacaatcgatctcaatgtgctttgtgcgttcatgaaatacgggattcgtagcgatatagatagcggacttactgtcgcagcacattatcatcggttgtacatgactacaccaagtgaaaacaggagctgtttcaaccacaacaattctgaagcaagaaacgacattgctcgatattcagcctccgcagatgatttactcactgtatcttgctttttcgttttccaagagataggagagtcaccaaactgtacaaaataaccagttactgagcgcctactcattggatcaccagcccaatccgagtcacaccaaccagtgatttgaaaatcacctgaccgtcgaagaaaaactccttgacccggatcagctttgagatagcgaacgacacgtaatgctgcctgccagtgatcttctcttggttcttgcataaaccgtgccaatatatgtaccgaaaatgccaagtcaagtcgagtaaccgcaagataaatcaatctaccaaccaatcttctatatcgttgtggatccgtgagaagtggtgatgttgacaatccaagtttatgattctgttccaagggaaaattcgccggcttaactcccaacaaaccggtttcggaaatgatatctaacgcatacttcctctgacagatataaattcctgtgtcactccttgccacttctatacccaaaaaatacttcaatggacccaaatctttcatatggaagcaagacgcaagatactctttaaattgttgagtagcactttgagaattcccagtgataatcaaatcatcgacgtaaatgagaattttaattctaacagaacctttgacaagagtaaataatgaataatcagcaagcgattgccgaaaaccatacctctttaaagccgttgtcaatttttcaaaccaacatcgaggagcctgttttaaaccatacagagctttacggagacgacacaccttgttcggatgagaagcttcaaaaccaggaggtagcttcatataaacctcttctctcaagtctccgtgtaaaaacgcattgtgaacatccatctggtggattacccaattgcgtattgctgcgacatcgagaaacaagcgcacagtggccatctttcatccggagcaaaagttg

SEQ ID NO: 36456 - DNA, 1119 bp, Arabidopsis thaliana landsberg
ctaattaagccatctccatgaatgtcgtgcacaacaagccattgttgctctctggaatttgtgcaaaccataatatgaaaaccatcctctctctgaaactgaggtttgtgaggtacattttgattgttccacctacacgaaattcaacatctcatcatcatcaagaattcttcatgttatgatctcctctgaaaatatggtttccttggtgtcatcattgtatagagtacatcatcaacattgtatcacatcttgggaacaatagtttgctgtctactttcttctacatctatgacgttctcgcagagtatgacatcgagagacaaataaacgaaaacctattttgaaaccaatcctccagtcaaatatgtattcaagctgctttggattgtgcatgatgtcatatgtaacctagaatgggaatcaataggagtctttactaaacaaaaaactaactcttgaatttgatttttgagtatatcaaaatgaactaatggtatgatttttttttgttttcttttgtgagccacacaagttaaaacttaaaaggaagcaattgaaatatcggttatataattttattaaaaacactaacataatttttttttgtttaagtcaatctagaggtcttttaatgaaagtaatttggtagcccaacatgaactaaatacctggtctcgtaatgagccgttgaagacttaaaaagtgtcaactaacttttcaataatattaaagaagaaaactagattgcaacaagaaaaaagaagaagattcaaatatcattttgtggtatgagagctaaaaatatatgtcccagtccaaaaagaaggccagatttcatcattcaaagtttcatcagtatttttgacaaatatttgcctgtctataatatcctaccccattccttttttctaatgcttcaatgagtaacattaagtatccatagtttcattaatatttccagctcttttcttggtcctgtatctcataaatattttagaggactattactttctcagagtttaatgagtttattaatggccctaaataagaaactttgacgttttaatgatatagacaaagcataatgatgatatttttggtcaagcgtggctagtg

SEQ ID NO: 36457 - DNA, 1929 bp, Arabidopsis thaliana landsberg
ggtcaacaagaaagctttgctgatcctactatttttcggagcttggctggtaagttacaatatcttactcttactcgtcctaacattcaatttgcagtcaatcttgtgtgtcaaaagatgcattcccccacagttgctgatttcaatctcctcaaaagagtgttacgctatctcaaaggaaaagttcaaatgggtctcaacttacacaacaacacggatatcactttgcgtgcttatagtgatagtgactgggcaaactgcaaagagactagaagatctgttggtggtttctgcacttttcttggcactaacataatcagttggtctgcaaaacgtcatccaacagtctcaaggtcctcaacagaagctgagtataggaccctctctatcgcagctacagaagtgaagtggatctcatctttgcttcgtgaaataggcatctatcaacctgcaccaccggagttgtactgtgacaacctctctgctgtctacctcactgcaaatccagcaatgcacaaccggtctaaggcctttgatgttgattttcactatgttcgagaacgtgttgccttgggagctttggttgtcaaacatgtccctgcttctcatcaacttgcagacatgttcaccaagtctcttcccctacgtccattctttgacttaaggtacaaacttggcgttgttttacctcccacaccaagtttgagggggtgtgtgaatcaaagagaacctcctctacaatcagaagctttgctttctgcgaatggacctgcaacactcaacaatactttgggcctcagtcaaagtgtcaagcccatcaacctcaagtcttctctaccttgcaacggtaacaagattcctcaatttccagcgcatcaacgtacgggattcacagctaatcatttgtcccttcataacaaatttgatcctctttgttcctctgtcgtgatgtgcagctaatgacgtgtgacctagtgtctcaccattttggggttcatatataaacccttctctgtcattgtaaaccttaagctgaaatattcaataaagagatttctcttcatcatcgttttatcaatactttcactattttagtctttcaattacttctttgttatagaatttaaccacaacattatcaatttattaactattaagtaagagtttgacattattcttgcaggttttctgtacaaccaaccgtatcaatggtatcaggttttgacatgacattacataattgaaggttttgctgtcgttacatagtagtcaaaatcaaagtgaattattttaccaaaatagttgtttagattttaaccaaaggaacaaaggacaccgataatgttatggttatatataatttcctttcaaccaaaaaacaaaaaggaaagaagaggattacataaggaattgtgatgaagtagagagattacaacaacataacagaaagctcagttaaaaaactttggcttgagagtttgatccgactaaacataataaaatgtatgttccaaaaagaaactcattacaaacccttccatttgtttacaagatttcagacatctttttttccggtggtgacttttcaggtgtgagctgacgctgcagtcattcccatggatgattctgggctaacgtactcctcgcttgcgtgccgtacaaactcctccggtgacatgtgcgagccgtggcaagcgcatacgattttgatctggtttgcgttgtaccggtatgtgacacctgagattgtccgtccgtgtgggcctgaaccagtggttgagacccacggtaagttgggacgtgccccggatcctccaaacttcacatctgctgccattccaggttttatggcagaaaagtcgaaagagaaagcggtttgagggtgcttgatgcttcccgtggtcggtctgatgccatcctccgatgaac

SEQ ID NO: 36458 - DNA, 1139 bp, Arabidopsis thaliana landsberg
  unsure (1)..(1139): unsure at all n locations
cccagtcacacgcctgtgatccatttgtatacagcacttgacttatctagacttcaaagcaagcatatgtacatacctggagaagcaactcatacttcgagttgaataaaaatacactaaaagccctgtgcagcaaattcttggcttcaatattttccatcagatgacctgcagatttgataaggtatcagtatcttgaataggggcatagaaaaagataaaacagcaatccagttcagtgagttcagtcataggagaaaggcaaacaagcacatgaattttactgcataacactacgtgataggacgagactagaacaaagttcacttacaattatacttgctgtcatgccccacgacacgatcagtttgatcaacaagaatgcatctgcaagcaagattgaaaaggaagagatggatcaataaattaaggtaaaattaagtctaaaacttataggaaacacttccatcaaagcaaaagatcaaccatcataatcgtaaaattaagtctaaaaggagaaaacaaaaaatatatccaaagaatccatttttggccaaaaacatagctaaacttgactatgttcctcccaaaacgatgacatctttcacaggacactaaatcgttgactttttttgcttgattccaattatcagaaaagaaacccctgacaaatactaaatccaaaaatcctttacttttacatcaaggtcaacaaatcaatggagccaagttactattacatcaaagtcaactaatcaacacacctaagttcataaaccattgttaatcgaaaaaaaactccaaatcccataacctaatttagtcaaatcatttctcaccgaccaaacgacgaagacaaaacaggttcgagaacacaacttgaaaacaaaagtacaattttggcaacacccaaaaactgaaatcaaagtagatagaatcagaaatgaaagacttactcatcctcaaacatgagacgtctctgaacagcatccataccagcatctttagtatctgtcatagcggtaccagagaaagcacgaaaattcggtaactttctcggtgaaatcgatgacagaggacgatgggcaaatcggnaagaagaaaaagaagacgaaagaacgagagatctgaggcgaatc

SEQ ID NO: 36459 - DNA, 1494 bp, Arabidopsis thaliana landsberg
ttgacatatataatgcctctatccatagcttgtgaggaagaccttggtcaacaagcaaggttcgtgccatctacatcaaggatcagttcatacgttttgtaacaccattttgctgcggtgagtatatggcacagttacttgtctctcgatcccttcttgatcacaaaactcattgaatccgcttgaagtaaatctacctccaccatcagatcgaatccttttgatctttttacccgactgcgtctacaccaaggccttggactttttaaacactgaaaaaacttcagacttttgtttaagaaagtatatccatgccatatgagtatagtcatctactaacaacaagaagtatctgcttccattaagagactctgtttgcattgggccacaaacattggtatgaacaatttcaagtttctcctttgtctttgtttgagactccgttggaaacgcttctcgtacttgctttccaagtttgcatactccacatatttctttgtttacatggaaatttggaaaaccatctaccatcttcttgttgtgcatttgttccatccttgaattccccacatggcctagtcttcgatgccataactccattccttcctcttcactagtcaccaactcactttcttgtgaagaattccatctgattggaaaacttttatttaccatctgtatttccatgatcttctttcccgtacgatccaagttggtgcaacacttgttctcaaacaaaacactatatccgacagatataatttgcggaacactgagcagattcttctctagtcccgacaccaaaaatacattccttatcactttctttctgaagcttgtgcacaccgtaatgtctcctttaccggcaatcataacgacttctccgtttccaactttgattggaaccttgatgcttttatcaagttttgagaagtatctctcttctctcgtcaatatgatttgtgcaaccactgaccacacatcttctttggtgattgtcgatgcatcttctgttgcactaaatagcatatgatcttcaatttcttcatcttcaacgctcatatgtgctagttcatacttctttgaacgactctctcttgaaaatgtccaacctggccacagttgtaactttcctttgaatctttgctgggatccgtctttggctttctccagcaattcgattccatgtggttttccttcttacaaaatccacaccattttttgcctttgttgtcacgccaattactcttcatttctcctagtcgcacaacgacttttccttctcgtgataaaacatgcaatgctccttcggtcatgctttcaatacgagacgacacacacttttcatgtgccttcaatgtgcctatcaactatgttacggacaacgatgtcagatccttcgtttgctccatcatagccactatgatgtcaaatcttttgggaagagaaattatgattttttgcactatttgatagtctgatttctcttctcca

SEQ ID NO: 36460 - DNA, 3641 bp, Arabidopsis thaliana landsberg
ttttgcgatctagagtgaggtgagtgactaaacattccatgagattttgtagtgaaagtcttccttctaaattgttctcttagcgcttatgtggattgtatttaatacagggttccaatgctcgaaaagcgtacttcatgatttttgagagaggaccaacagcttttgtgaacgagagtacgaagttcgtgagcaaaagtctcagtgaggattctgcgatgcagcatctttgtcagtcatcttcgtctcacatgacagagaggatgcgggtcttggtggagttaagatctgcactcgcgtcctttattgcccaggttctcatgaaaatttaattcctttttaacattataaagttctctgcatgagtagccttgttttgcatactaatgtcacttctttcaatgggctttctagctttatgttgagttggataaacgtggagaggatcttgtgaagattccagaaaaggcactgccatcattgttggctgttatcaatggattgttttcgaacctggagggatctttcagccatttgcatgctgtgcgtgaggtaaacatactgttttttactttttgttgtcactaccttcatttgtctgaccatttatacaatgatggtcccgagtcttacttttatgtcttgacttacatccctttgcagtgtgattcttctgttgatggaagttacccaatgcctcttgtatttgatcgactgcctgaagttaatgaagaaggatcccagtggactgattgtgaacttacagatgcaatcaacctggttcataaaaatttggaaaaacttaactcatatttatcagttatggtaggtgtgactgtagtttatgtagcattggtcataatttgttttagcagatatgatcatgtaaagataaagatctatcacctgaaatcaactgagtttttctacttgcatttctttttatataggtagggaaacatcggaagccaaggaggatgaccctgtactgggtccggtatacatgtggtgcagttgggctctctgttttctctatatggctactacgtcatagtagtttgatgggaagttcggatatagagaattgggttcatgatgcaaaagaagcaacgatgagcttctttagtgatcatgttgagcaaccggtttgttcttaaccttactaatattttaagtgactttttttcctgttccaacaaaatgacttgttgcataaaactctattaaaggatacaaataaagtagaaagtgatagctccagcgtctctcaaagtttggtctgagccaaaataatagtgtgtcgagttacaatgaccgagttattagtttgttacatgacattttgaggggatggagtttctgaattagtttcatgatccttgcagctgctttccgttcgcgatgagctttttgatacttttcggaaaaggcactagggtgttatggaatctgaagaagtgcagctgacgcaagattcgctccacaggttgatattcatttccttcttgattctttttatcctagctcggattttttgttattgtatatgtgcgttcgtcgtctccatttcattatgccttagcaattcacttgttctattcatatggagctattaatctcattttttggatctctgggttttcgcataccctagacaaggaacctctataactatttatttagtacgtcttacaaattctgtattatgcagaatgcttcggaatttctgcgagcaggctacacgtgaaaaggtcccggataatgcatctgatcaggagatgctcgaggttgttatgaataggtacaactctgaacattactctttcttaggcagttaagggcacatgatgttgcattaatgtaaacaatcaaataattgttagtagttccaatcttgggtaatgaaagacgtttcctcatgactatgttggtcattagccttgtttccaaccacgttagacttggtagaatgatttcctctgaaacttcctggtatgtatttgaattttaccttcttattgcaggtatgaaaaagaacttgtgcaccctattcacaacctccttagtggagagcttgcccgtggtttgcttattcagggtaatctaagttcttggcatgaagctatagtttatggtttgtgaaactctaattacatcagaatttttctatcttccaggtccaaaagcttaactgggatatagaaacgtaagttcattaattcagtagctctcagttaactagagtagatctcttactcattttgtatacaactgaataatcttcttctgcagagcgatgcttgaactggatcagatactccgtgcaaatgaaataaactttgccattctggctgcatcacctgcattctttctcagcattgttatgcttacagtgcttcggacctggcttaaaaaggtaaggagtgataataaaaggaaaaccaaatgtgacagaaatagatatatttgatccattttttatagtttaagactaactgtgtacagttaatgcagctctgttatctttattcagtttcatttcattggtatgaatcaggatagcaaagctcaaggacgaggaagaattgctcgtattcacaggagactacttgtcgttgaaattgaaaagagaattatgcagtatcagagctacattgaacaaggacgtgtatgatatccactattctccttttccccctttatcttaaatcattattattttgcaaatgggttctgtaagaatcctgtgaaaacgtttctggtcgtttcttgatgctgttaacaggataaggacgcagaaactgtatttggtttgctaatatacagccttgaacgtttgtaccgagttgttgagaaacctgcaagagcaaccgacgagtgggatttgtaagtttttactctgatcccatcaattagctgaaaacaattaattaaactgaggctgcgccatcagctttcagtttaccacaagtcctttatttgttaaagtggttatatgtgtgcttgaactgactgatgtgtttttttaataacagagtgaaacaagatctgatcgagttaggaaggccacagcagcaaacatcatacaagctaacagtgacacaacgactagtaacggtttatgactgcttgcttcccactctgaagcgacaataactcatctcggtttcttaatctactttatgaaatcccaattgtattcaatcattcctccaaaaatgcttgcttgagggccacttttggtactaagccaaaacctttttttccttgaaatggtataacaaggctacacatagaagatagttttgaaattcatgatctatgttgcaatttaagatatcaaaacctattttgtggtctttttttttgttaaaaggcattcaattaaaagaggtaataatacaagctaagctatgacatttacgtcatacagtttgagtagagagagagttaagcagtagcttaatctatacttttagaagctaacagagagagtagtgaaagataaaaagagaaagtgtagattgtcaagaagattctcaattttgtgggcttggatgctttggcttcaatattctctaaccaatttcgggctcatcccatatcatatacggagtcgagatgagatattttatgtcgag

SEQ ID NO: 36461 - DNA, 1908 bp, Arabidopsis thaliana landsberg
aaagctaatcaaaccctagaaaaaccctcgactgagtcaaaaaaaaggtaccaaaatcgatttggaaaaccttagatcgagagcttctggatatcttttcgaatggaaaactaaaaaaaaattcgaaaaaacgaaagaggtgagaggagagagagggacttacgaagaataacgaacaatttgcttctctacttatagatccgaagagatgagcagcccgccgcctttaatcgaatctaagccgttaaattccagccaaccaaatctagacggctacaattatcctttcgatatgtaccgtcgatatttagatctaacggctgtgaaggctacggcgcaatctagtgaatctggatctctaattgttttgagaaaagatcttggagcgcgtgagtattaatactccaaatcgcaagaattaatagattacacgtgttactatagcgcgtgtaatagacgcggataccgaccgacattgtctccactattttgactattttatccactaaacgcgccctgtaaatagcgcgattgaattacacgtgccatgaatcttttgattttcaggcccattagtgaatatcatgaggctacccattagaagactatttatttttctacgtaatgctcttgtatgggcttgggaagactgtttattatgttatcacctttgcaaacgaatgttgacaatttcatcttcaagcttaaatgacatgaaaacgaacaatgtgaaaaagaaaaactttaatgattgtaaaaggcatacatatatacaactttcttgtaatttttaagcaaaacaaaaaaaaacataaatttgagattagcaatttagagaaaacagcattttataaacaaaatactaactaaagaagaaagcaaactaaaaaataaaacacagaaacatatgttcaaggtgaaaattaaataaccaaagtttatcacttgctatatttttagttctacgaagggccatgtgtgatacgatacgatcgggaccattcatcattttcaccattgtaaatccaacggtggcgaatgaaagaacgtcacagacacaaagctgccttaacgtcgagcctccacgcaaaaccaccaccgtccattctccacacgtcacaaggcaccgtgacggatcctctttctcgatcttgacacgtgtactgtaatctcactctgcatgtgaaagctgggtacgttagcatcggcctctccttcatcaccaaccgtacgatcacgtgaaaactatcgccgctagttatcctccggtgcaccttcttccatcgggaataatatcttctctagccatcttccgatacgcgtcattagtccacgtgactctccctgaaccgtcggatatgaaaccaggacacgtgtctctcaactagattcatcttcctttcttcatctgacctccctaatccataaccgtcaatccaagcgtcagtcacacgctccaccgtcatacacgacgaaatcaccaccgtcctctgcacaatctccggtgtctgataagccggtgtgagcatccctccgccgtctttgaaactcaaccataacggaccctgccgcttctgcttctccaccggaaaagcattcagatctggaaaaactcgtttctcaggcgtctctggtaaaagagacaatgtaaccgccgtggtagtagcagcgtctccactgagatctctcttcttcttattgcaccttcgggagttcccaccggaactatctttttgatacttcctctttcctctcccagatttacctgagagatcggagcttccaccacttgtagttgtggtggagcgctcttcccggtgagagagacacttcaccgtcgctggccggtttaggagcaatgggacgaaaacgaagcatgattcgatctgctttggagagacagtagcg

SEQ ID NO: 36462 - DNA, 2129 bp, Arabidopsis thaliana landsberg
aatgttggatccggttttagtttcgtaccttttttttttgtctgtggattctagaagtatttaaccaaaatgactttggaaaatgaaactagaatagagtttattgtgttatttatttaatttgacatggtttggctttgaatgaaataaattgattcactaaaaaaaaaagagtttaacaatcgttctctgagtctcttcttccgatctagtgtggtcaacaaaaacagacgcgtatatatctttgtcaaacaaaatacttcaaatttggtaaagcaaaaaatgtgattgtttggaagttactatcaaccacataactatcaatgtgtagattcttgtagcgttaatttattatatttctatcattgaagataaagacattttggttaaactaaattgaaatgactaaaaccgaaattagaaaagctaatatttgatttaatttgtctgacctcttcgaccatcttttattttttgtataatgctttattatgcatctcgttcgtcatccaaccggcaaatggatgttgatatgttcttaaattataacctttggaattatattaagcctttattatcattatcttctaggggggagtcatcaaaatctacacaaattgtctcaattgtaacaatgattccatttaacaagagtgcaggctgcactaattaatatttggtttaacaaatatatccaacagctacacgaatattttttatattttttttgtatttaaatatcaatgttagaaaaatctacaaagttaaaattttgattatataatactttaaaatgttttataatgcaaatgaaaagaacttccacaagcttaatgactactataataatataaatgattttaaatcctgaaaacagatattatttgggtttcacaaaaaaaggcatgttaatcaatataccattttgttggaagaaaagattaaaacaaaatagaaaggcatgttaatttatttttgttgtgtcatgtatttgtcaataattcgtcgataaaactaatacatttttttaatacatagatatgtatagtgtgatggatccatcatgtgaattagattcgtgttctcgcttttgtctgctcatgtctttcatgatgtagacacaatcatggtgtctgacataagatgtccatatgacccataacccttctttagctatatgttatgtacattaataattgcacttacttgatctatttttgagttctgcatcatttgtgataaactatataaactgtacaaaccaactcaaaacaaacatggtctcatgaaaaatgaaaccaatgctgacatattggtagatatctagattaatgtctactttgatctaattttctggttcttctttactctcaattcgaaatttttctcgtccatctccaccaaataaccaattacttttgagcattatttttttcctctttcaatgttgatcatgttggataaacatcttccaccaaataaccaatttcttttaagaaagaaaaaacataagagaaaacttgtaaaccaaagtcaccaagatcaatatcacaatatggtgttgctacacaacataacaagtaattaagcaatacacggtttacaaaacaccaaaccatacgacttagtgagacaaaaacataaacgtttaaatcaaaggatggagcaccagccatgagggagtttagacgcagcagcttggtcaaggaaccaaaccacttcaacatccgcggttagtctacccgctggtaagtctttggtatgattaagagcagccgcagccgaatcagcctgctctttatcacatacggccataacattataggaagcacaattgataaccggtaaagtaaatgtgatcctttttgacggtggcttaggtgaatcggttatagatgtgacccatttcaccttctcattgatctgagcatgtccagggaatagagacgccatgtgaccgtccggtcccatacctagaagctgaagatcgaactgtggaaaaccagaagatttgtacgttcggattatgctttggttcactttttgtttgaggcactcctcgtacctttcagctgctagctcggcgttgccttctgccccgagtccgttatcgatagcgtatatgtttt

SEQ ID NO: 36463 - DNA, 1249 bp, Arabidopsis thaliana landsberg
  unsure (1)..(1249): unsure at all n locations
tttgccgttatcatcattgaaaacagagtatgcactgttccaatgaggaacatgaagttgagagatctctgaacataaactcatctctgtctgttacttaagaaacacagacagaaggagaaagttgttgagttcgagaaagagaaagctttttgtttttttttgattgtcacaagaaagctcgagagaaaagtataaagttctcttgctctctttccatctatttaaaggtttatttcaaaggctttgagtattgtatttttaacgatatgttattgttattggagttagctcgattctgactttgactcacgatcatcgnttgatcgcgttcttgactttgtcaacattttctgttttaggaaattctattttctcaaaccagaggaacaaaacaaaaaggattttaaaaaggaaagtgtcaaactagaacgagtcagaaacaaggcctaggctgaaggcctgaagctacgtttaaaagtcgtcgaaaaatctttttcaaatgatgatcctaaatgggcctttttgggcttcccaaccattacaagtaggccatgaaaattgtacgtcccattcccaaacgaaactttggaggcttgttttaatcgaaaatcaagaacgggacattgttatatagtttctgaagatcctatattatgtatgtgtattatatataaaagagtattacaatatgtagttcactgtgaaagagggattcgaacattaagcctccgtaaccaaatagaatgcatgatcatatgcaacatatcatatggctttgatggtctgtttatgacaaagtgtttccgaacctcaagcactcttctttgcatattcaagtactcttcttctgttattgcttctagaatcttctttatgtcaggcatctttgatattggaatatgaaccgagaatgtcttccaattcaacacgtcgctgaacgggaggacgtaataatcagctatgatgaccggaacacagccggagtaaagtgactcgacaattctcggactcgccacttcccaaccgctaggacataaacaaaactttgccttgtccatcattttcgtgtagttcatggttttggggagattctcgtagacaaggacgtctttgtctttttctttccagtgttggaaaagtatttttcggacatctccgtgagaaccgcccgcgaagaatgctaagagtttgcggctttgaggcggttctccggtgtgtacaaaccctaattggctgtgtggaatgt

SEQ ID NO: 36464 - DNA, 6280 bp, Arabidopsis thaliana landsberg
ggtaccaggttaaaaacccagaaggttaggcttgaggtggagcatcagcttctgtctgattcaaaaggtattcccattcccttccctatcatcattgtcacaaacatcaccattcttttgctctccatctttttttctgactattacagaatattataaaatttgaggcagatgtgtgttacttgtgactggtggtaacatgtgttgttattgtttgtttatatatggactctagattttctatattagttaagatatctacagtcaacaataatataaggtgtaattatggtgagataattcgataatggtaacaaaaaaaaaatccatccattttcattttgaagatgatattattctcatatatttacttaaatacatgaatctgttttattctttttttttctaggtgtcatgaatctgttgacatgtgctgtatacagctgtgagccgtgaagaaaaaaaatagaaaagcaaggcaattgttttctttggaaaaaatcgtttttttcttattttctgaatcaacaactaattttctttaaaagatataagcgcaaagactaatcttatatacttggagcatctaaattgtcaaggctgtgttctgttgaattttaaatactattaatttttatttttttggttcatagttttatgtatcgattaattttgcaagtaacaaaattaattaaataaaggaataaatattcatttgacttgcaaaaaaaaaggaaaatcactcattttgttttaatatcgcacaatacaaatcaataatttcatatattccgtttgaataatatactatgtcgatttttaacataataataatatcactttttcatctctttagaacatttttctgagcatgaatccacacaagttgcaattttctctacatctgtccatatcaccaaaaacaacaaaaccatataaatacataatcttagtaatctgcaatcatcatataaattaagattgtagcggcgccacagagaagttgcatatgagaattaaaataggaaaaacggtcatttcataccccagctaaagtagtatgttcaattcatacccaacgtttgttgttgtgcaaatccatacattaacaaaccaaattttcaaattcaaatcccaaactcacatcattcatgtcaatacatgcctaagccgtgacggtgttacgaaaccgttaacggttgctcacgtggatgccacgtatgacacgacgtcgttttagatgaaagaagagacaaacaaatttttgtaaaacgacgtcgtttttgtcatcttaaatcaccttcttcttttttctttctttttctttcacgacgacaatgttccataagcatctatcgtgaagagcttatattagtggaataggagttccagctcataatctctattgtgaggaaggaaaatgaggtaattttcattcaaatttatggtttataaaatttagtttttttttatcaaatcatcaaattgcgagtgtattgttataaaatgtaatgaattcctttggtatttttatagtttagatgagattgtggagtgtttttagttgataagcgatatgtcattttatgaacaccaagtgttcgatataatgtcacaaccaaaaactcactttatttctttcttattcagcactgaagatgcagtttttcaatgcttctacagtaagaactttgttgtagagaatgggattaaagttagttatgttgtaggaggtattctcagccttgaaagcaaaccacaagtagtattgactaatttgatggagtcattgatcgaatgtatttggcagcaccgaatttggtataagcttccatatgaggaatattcaaagcttaagcaattgtgcaatggagatcaaaactttcaaagaatgtgtcttgccgcagtttggacaaaagttgtcgatatttttttggagaaagaagaaaatggtgatgctggagatggttctcatgttgatagagttgttggtgatggttctcatgtggatagagctgttggtgatggttctattggtgatggagctgctggtgatggagctgttggggatggttctgagtgtgatagagtttttattgacatggaagcaagagttgagcagaacttagcaggctttgttgatgaagaagagcatgataatgatgaaagtacccctctgaactcagattgtgaggaaggtgaaagacgatatgttagatgcaagaaaggtagtggcgatattagaatagagcaagtctttgacagtatagctgagtttaaggaagctgtgattgactatgctcttaaggaaggagtcaatattaagttcacaagatggggatcagagaaatctgaagtaaggtgttctattggaggtaactgcaaattcagaatttattgtgcttatgatgaaaaaattggagtgtacatggctgaaaacattcattgatgagcatgcatgtacaaaggacgggttttgtaaagttctcaagagtcggatcatcgcagatatgttcttgaatgacattaggcaagatccaacattcaaagtgaaagcaatgcacaaagctattgaggagcggtactcattaattgcctccagtgaccactgtcggaaagctagaggaaaagcattgaaaatgattcaagatgaatatgatgagcagtttgctagaatacatgattacaaggaacaacttttggagtaagtaaaatatctttaaatcgattttgaatttgattcttgtttttgtttacaagcttatctaactttgaaatttgttgttgtagaacaaatcttggttcaacagtggaagttgagacaatcactattgatggtatagtcaagtttgataaattctatgtatgctttgatgctctccggaaaacttggcttgcgtattgtcgcccaataattggcatagatggatgttttttaaaaaataatatgaaaggacaactcttagcagctgtaggaagagatgccaacaaccaattctatccggttgcgtgggcagtcgtggaaactgaaaacatagattcttggttgtggtttattaggaagctgaaaagtgatttaaaactgcaagatggagatggttttactcttatttcagataggcaaaaggttagtttactatatctaatgttcttctcattttgagactatttttaacattgttataacaagtgccatttaacatgtcagggtttactcaatgctgttgatcaagagttgcctaaggtggaacaccggatgtgtgcacgccatatatatggaaatcttagaagagtttatcctggaaaagatttgccaaagaaattgttctgggctgttgcaaagagctttaacgattatgagtataatagagccattgacgaattgaagcagtttgatcaaggtgtgtacgatgcagtaatgatgaggaatccacgcaattgtagtcgtgctttttttggctgcaaatcaagttgtgaagatgtttctaataacttctctgaatcttacaacaatgctattaataaagcaagggagatgccactagtggagatgttggagacaataagacgacaaactatgattcgtattgatatgaggttgagaaaggcgattaaacatcaaggaaagttcactttgaaagtggccaacaccatcaaagaggaaacaatctatcgtaagtattgtcaagtggttccttgtggaaatggacagtttgaggttcttgaaaataatcatggctttagggttgatatgaatgcaaaaacatgtgcatgtcgaaggtggaatatgacatggattccttgccgccatgtcttgcgaatcatattgaacaaaaaggttaatcctgaggaactcgtcaactctgattggtacttggcatcaaaaaatttgaagatatattctgagtcaatctcaggagttaatggtattggattttggataagatcaggtgaacctaggattcaaccaccaccacgaccaacaagtaccaaaaagaaagaaaaaagaaagaagggcaagaatgagtctccaaagaagaagaagaaaggaaaaggagtacaagagcctccagaaaagaggaccaaagtttcaaaagaaggacggagcattcgttgtggacgttgtagtaccgaaggtcataatacaagaagttgtcctagtgtgggagtcgttaacaaaaggtggccaaagaagacacctgatggagttagtcagtctatgagtattggtaccaatgaaggaacaagccaacgaccaagccaaccatcacagaattctcattttgactaaggtaatataggtttttttcaagataattgtgcttgtcggttgctctagttaatcatgttttttttgggattttggcagaatttaagtggaatgaagaaaagtaatgagacgtaagaatgtaggcttttgtttaagtctgaagagattgaaagtttttgttataatctcaagtgaactcttaagttgtgtccggattaaatgataattgttcgaaacttggtattgctatttaaggtttcttttggtctgttttaacaatttcgatctcattccaatttcaagtgatgaaaatactaccagacaatctcataaatattacaagttcaagacaagacaatacaatctcttaacataaatattactagatactcgtagcttaatatatagaatttagtgggttttgttaccaagccttagatgcttatggaacattgtcatcgtgaaagaaaaagaaagaaaaaagaagaaggtgatttaagacgacaaaaacgacgtcgttttacaaaaatttgtttgtctcttctttctaaaacgacgtcgtgtcatacgtggcatccacgtgagcaaccgttaacgatttcgtaacaccgtcacggcttaggcatgtattgacatgaatggtgtgagtttgagatttgaatttgaaaatttggtttgttaatgtatggatttgcacaacagtaaacgttgggtatgaattgaacatactactttagctcggatatgaaatgaccgtttttccaattatgctaacaacttttgtttgtctccccgaaaaatttcaatgctatagtcaaaattggttaacgtgattggacgaagagtcaaatttctgaggaaatatgggagttattgttttgagttttggtgtaaaactctgatttgttgtttagtagaacgattctaaagactaaacagtcatctcttggagtaggggtataactttccaaaatgtaatttttaccgtgaaaaattcaagtagaagaagaaatagaagaaataggcaacaaggccaagatgatgatctctttgacccacttatctatgattttccggattgatctttcgatgagttgctttgagaatttcagcatgattgtttgttccgaatatataaaatttatgttatcttgaatatgatcgtttagacttacatatcttctctttattcactagcagaaaattacctttaatgaagtattcataagatctttttgtttgattttcagcatttaggaacaacaatatattgtaaaaaatttatacgtttgtcgaaaaatcgtcgaaaatattccgaatttcgacaaaaaatttccaatgattttttattgtttcttgacgaaattccatcaacatttcgacaaaatatttttgacgatcaatttcgtctggaatttccaacgcttcggttggtcaaaatatactatgctttcttgtagtgatgaaactagaagactgtattcatttgaacagcttggcagctgatactcgtttggtttttcttgttggtcccaacttggcaaatcggtactattttcttcgccatttggtaagattcgtcggaaaaacttccggactttgggttctgatgaatttcaacaatgttttctgttaacaatttttttactattttttgacaaaaagtttccaacgaattttcaccgtttgggtaaaataaccaaaacccgaaaaaccatactggaccgaatcgaaataaatggtttggttgagttatgatttagcataaaactcatttggttttaatttttataagtttttggtttatatttggtttggttaaaaccgtaaaaccgagtgttttttatttgtttttgactaaaaataaaaataattatatatatatattgtccaatctatattgcggttaaataatagtataataattgtttctttattggacttataattattggtcttttttggaatttaaaaacccaaaaattaatattactaaatcttttttctatt

SEQ ID NO: 36465 - DNA, 1914 bp, Arabidopsis thaliana landsberg
atcatagtagaccttgaattagagcctattgatgagaactttgatgatttgggcgattcctctcgcgattttgggaacatcgaatagacaaaggatcaatctgaagagttcatgagagattgatgttctccaacaacataatctttgttcttgtctacaaatagttcagtctgataagtgacctgaagttgaacatcaaatcagtcattacaccacattgacatttttgccattacttaaagacaaacatttaagcacaaacttctgtagtaaattaaatcactaacatcaccagcataatggcagatggtaaagtctgtacgagccaattttggcttggtaaaacgcttgtggctaccaaatgtctggtatagcttttctgcaagtgtatcatgtgttgatcttgggaacatactgtagaggcatacacaaactcagccacttattgaagaagtaaaaagaaatcagtgaagaaagaacatgacgctttggtacattaccaagcctcatcaagaagagcaataattccaccaggtttctgacattgaacaattctgtattaggtgctagaaatcaataaatatgtatgaaactggaactgctagaaaacggaataaagattccaacaccactcattgtgatactacttaccttttctataaggtcaaggacatcttgattatcaatgaactctatgtaactccagtcaatctcttctttagtatattcttcttgctccatcttgaacacatgctgtagaagagaggaacatatgcatgaatatggatcagcataaaattagatcaatcaagaatcgaaaatatgaaaagaacgtcagtctgctggtgtgattgaaatgatgatgcagcttcttgtttgtcaggtttatacaaaagtgttcaaaactgcaaaatgtgaaaagagaaagagaacgttgtaattgtaacacaagcattaaaactgttatcagttgaaccatataacagctaggaacaatcaattatgagaataataataatattggcccagaccagaaaaaaatctctagctaagtagctaaaacttaagaaatccaataacaaaccatctgctcaatgtttgaagaagactaaatcagagagcatatgggcagccatgcaggaagcagtatagggagtttataaatcaactcgaaaaaggaaattgaacattttggtagcgtaccggttaagcacctgtttgtcttgaaactctcaaatccataaatatccaggactccaattatgtacttagaacttgagtcttggccaatggaattatttatcttggtcacaagcctgggagcaataaatttgttagctttcaaaacttcatatcccaggattgataataagcccttaagaaagaagccgttattgtaaacctaccaatcaaacaatttagaatagacaatcttggcaagagcatctctgcttagtgctgcactaccgggatcaagaggctttgtaatgctttcaccacgagtcaccatcaccctattgcacaaggagttctctagagctttctcatcacacctacccaaaaaagagcaatcagggttctacctcccattgacaagaaacctataatccgagaacacataatagtgaagcatatacatgaaaagttttgcagcaacttttagatggaaccgggatttatcgtccttgggttctgcaccatctgattcttcgctctttgcaaactcaatgtttcctagatgaaggatagcagcaactacccgaaagattgcatcctacaaaagtaaaatgtaagaagagttatcctcattgctgatcatgtcaatgaaaaaacaaaaggtacctgttcttcaggactaattccaacaacgtccatagctttcctcgagctaggtattctttggaatcatcaatt

SEQ ID NO: 36466 - DNA, 1899 bp, Arabidopsis thaliana landsberg
  unsure (1)..(1899): unsure at all n locations
aagactaaccgatgaatattcctccaatgctcatgcccggagacagcttccttccccggagcttctccctgttctctcagacaatgcattaccaccattttgttctagctacagataatatcttagctgcatcggttgtggtctcatctgctgttcaatcatcttcaaaacccgagaaaattgtcttccatgttatcacagacaagaaaacctatgcgggtatgcattcttggtttgcactcaattctgttgctcctgcgattnnnnnnnnnnnnnnnnnnnnnnnnnntgattggttaacaagagagaatgttccagttcttgaagctgtggaaagccataacagtatcagaaattattaccatgggaatcatattgctggtgcaaacctcagcgaaacaacccctcgaacatttgcttcgaaactgcagtcaagaagtcccaaatacatatctttgctcaaccatcttagaatatatctaccagaggtaaaagaaaatatgtccttttactttcaaaaagttcgcctttctcgtctaaatgaactatatggctcttaatgattaggtttcaaaattttgccatttcgtaaaaatgaagtaggtctaggatgaaattttctgtccttttatttttaatgttcggattgaggatataaatgtaatgcttgctttttttgcctatttggacagctttttccgaacttagacaaggtagtgttcttagatgatgatatagtgatacagaaagatttatctccgctttgggatattgaccttaacgggaaggttaatggagctgtggagacttgtcgaggagaagacgtatgggttatgtcaaagcgtcttaggaactacttcaatttctctcacccgctcatcgcaaagcatttagatcccgaagaatgtgcttgggcttatggaatgaatatctttgatctacggacttggaggaagacaaatatcagagaaacgtatcattcttggcttaaagaggtaaagtatcagagaagcctgtaatgttttgagttttagattcgaaattggcaaattattgatcatgcttactggttttgctttgatgtgcagaatctgaagtcgaatctaacaatgtggaaacttggaacattgcctcctgctctaatagcatttaaaggtcatgttcagccaatagattcctcttggcatatgcttggattaggttatcagagcaagaccaacttagaaaatgcgaagaaagctgcagtgattcattacaatggccaatcaaagccgtggcttgagataggtttcgagcatctcagaccattctggacaaaatatgttaactactccaatgatttcattaagaattgtcatatcttggaatagcaaacagaaagcttgcatataatctcgaagcagactggggattttgcgggttctgcagatttactcggaatttagctggaccatgaaagaccagttgcagagcagcagagaaagagaaagatagaaataaagattcattcttctgtaaaaatagaaggtaccctttttgagattctttttggttttgaagtaaagattccaattttggatctgttataagaacaaggaaggtttaaggacatcaccagaagaaattggattttggtcatgatcacaacagtccaaggaccaacaacacactgttgcatttgctccacttgtactctttttatttttttggttcgatttttgacagttaaaattccacattttttttactaaatgatttagttttagggattttatatggacattattgttttgttaaggtctctaattgatcaatcataagacttttcttggtgcagaagatttttggtcagatgcaatgtgcttatctcctcctctgtcgtctcctatctctctccgt

SEQ ID NO: 36467 - DNA, 2809 bp, Arabidopsis thaliana landsberg
cggcataccgaaagcagaagattggccacgcttgggatctgtgataacgcccccatcatcgtataaacctgatctcgtttcgatgaaaggacaagtgattgagcctcagactattgaggaagcatgtgacatggtggtggatcaaccagtaggagcaaaattgcatgtgttcaagccacacattgaacttcaacaagacgcaagtgctataactgttagttaagattcaatataaaacgagagagagagagacatttgatctataatatttgtgtttttgtgtggtagggcatttactgtggcacgtcaggtgagccagccagctatgtcggacttagagatgccatcatcgttggagtcgagaagatccaagggaagtctattggaactgtgaaggtatggtacaagaagttcatatttctgaaagtggctatgagcaggtggtttcagttatactctccggatggcacacacacgggcataaagcgaacagattaccttgttgatttttgtgtcccacgcctatccatggattaagcaagaagatgttttttatcttcttaataagtatctattctatctagagaacaatatgctactagtggaagacttttgtttaagaataatgtttcaggagactttttaagatatgttgtaagctcagaagttgatttctacttttaattaatgttatatgttccaccaatttgggatttgagctcctgatcttagaccccttgaattgtttatgtttttgttttgttaaagtcagtcctcgtttgcaggaagtagccatgatttgataacaaaacatgttattttgattgtcatatatgtgaataaaatccaaaactaataaataagcttttggagtcccaaattatggcttctgctctggattgttgttgtttgaactggactgtgagtgtaatcttcaggtctgattgttgttgttgcagaagccgaagaacttcagttttaacgatacgttcacctcaagtcctctctctttgaacaacagggcggtgtggctttggagctaaaccccaaataataaacaaaggatctttcaagatgttttatcaaggaatagaagtgtacaagttaaagggagagctattaccgttgggattgccttgctcatagaaacatttgaaaagagagacagcttcttctgccattattcctcctctgcacttgtatccttttcctctttgagcttcctcactacctaagtgaagcgacaaaatggaaccacatcccccaaatttatcatttggacatccataatacacttccttgataccttcaattaagagcagagtatatcacctctcatcagaaacaaaacagaacaaacaaactgtctaattcagcgtaaggattcataccgagaaacgataaggccgatgcacacattatgcaaggttcacatgttacataaagaacacatttcgagaatttctcagcgacttgtgaaggtgagagtccatctttctgccactgtccgacaagctgatcaattgcttccatctctgcatgtcttgtggcctgttcaaaccacattgtaacaaatgccttaatatagatgaataaaccgaagtaacaatcatacgtttctgagtcactcaataaaacaagatagagagaaacagtgaaaaaaatagactatccaataaatgaatgaagacagtagcttataactagaacatgtataacaaatcaagcttagttacttgtaaaggtttgaataattacattgcgtgtctcatttgttcggtttcgccctgaagcaatgaccttaccgtcctcaagaaaaacacatctggtccacacaaaccagaaagaaaacgcattagttatcctatatgacattaattgatacactggtacgaaacacaaattggtatgaagccaaagcaaaaaaatagagaccccacgggaacttcaagagcctccagagcaagtttagcctgcaggcatagggaaatcaactcaaaagcaacaaactaacttttgcagtattatagaaccaatactagttttacctgatgcagagcaaaacccatataattatgagaatcctcacaatggtcctcttccattaacttttatagttggcttggccagagaaagtaaataacaaaacctgatagcaaagattcaaaaatccctagttatatagctaagtagaggatcaggatactctttggcatatccattctaaagagaaatttctcaaagaaaactcttttttttttacttgcaatgttctcagtttatatgtgtctaccaaaactgaaactaaatagtaaaatacacgtaacagaggagtgtcaggaatacaactaatcacattatgctctcagggatgaatcagatcaaaaagaaaacaatgcttgtgaattcaacagaagagctatgaacataagagtcacaaacaccaaaaagaaaggtaatagaattggaactgtgattattctggatgaagcaaagaatcgaagtaagaaagaagagacaaaccaatgatctactcgcttactcagaccgcaacgatcaacaagcttcctcacaatcgtctctgagaataaaaaactaaaaatatcaatcctaaattttgtgaaaaacccaaaccatatgccagccaaaacgtcgtcgtttatggatataaaaagtttaaaagaaaatcatgatttattgaagagtgaagtaaaacataatttagggtttttgttcatttcggttattcgggccaatagtttccggtgtaaggccaaccgaccaaaccaaaaaaatcaattctttttat

SEQ ID NO: 36468 - DNA, 6301 bp, Arabidopsis thaliana landsberg
  unsure (1)..(6301): unsure at all n locations
tcaacacaaattaattactctcatgacaacaacatcgataccatacacatcaattttttccacagtaccaaaaaagctagtgctcaaaatttaccggagtagatgactttctgcctcattcaggtcgtcttttaactgtgctggttgtgttacttgcactgtagcaccagggacacaaatattaatatatgcatcagagtgacatagtttttatctaaaggggacttaccatagtagatgatcttctgcctacttcctatacaggttcgtcaacaaagtttgtctattctatgatcacgccatgctatctttgttttaaatgcatcagccatcacaaactttttgggatttggtctccacaaacaagcatcaggtttaaggactatgtcaactttcaggataattgcattcacacccaaaggtatgttattgatcaactcaactttgttgcttgaacagataacaccctcagctataacttcatccattttccaatccaaaactctacatctaccaagttgaccatcatctacaccagtatcctatagtagagtagtatttattattaatcgtttgatggaacaagtgaacatatagttatagttaaaatacattaccttgcctccatttgccgtttccgagtcattctgactctccaatccagcgtccaatgtaactttatcaactggccatgcaattttgactcctaaagcttgttgaagtaagaacacatctggcgttggcctccaaacagatgcttctggaactgatacagacgtgacgattacagctgcgccatattcacccaacggaatacgacctatccgatagttaggttcagcagatcaaaactctccttcaccaacaacaatatctttacttgaataccaatccagtatctaacacctaactcctttgctaacatcactgacctccgagtgagaagtccaagtggagtttttctaataaaaaaaaaaatagaattgatgcagtcatatttaactatagacagttaattcaacatagaaaagtgagagaagaacttacattctttccagccatgtcacgaacaatattcttcaagtcttcaacctcgttttgcaattcttcaagtctcgagtctctagcctgattgaaagctagcttggtagcagttatccctctgcccaaccctttgacacgtcctgatttgtctttttccaaaacttgactcacaacatcttctcttatgttatcacctaaagtggagtccatttgactatcatgtgattgtatctgttcctcatacaaaacattgagtataatttggttatatagaatgcctttttgattagtgatagggatattaataagataaagactgcttacaagtgtttcagcaaaatcaggtctcacgggtctaccataagagtgagtgtgtcctgctatccaaactttactccttgtgatctttttagggtcatcactgttttttctacaagtaatccaacttacttacttatcagaattttggtaccttctattgatttcagtacataaaagatctcaccatttcatgagctaggcgaaacattcccttgcgcctggttgtgtgggaaatctgagcctttctcaattccctaaacttgttgcttttttcctgcaatagcaatgacattgactgttgagcagactccaatacataataatagtaggtacacacaatgaaaaaaattcaaacaatttcaccttgaaagttgtgctagtcctacacttaatccaagaattacaaactcgaatagatggtatattgcttggtttcagtttcattctctttgtgctactcttagcatctcgcacctgagttaggagcttaggctttgaaaacctccatatacaactcatctgtttgaaaatagcatcttttctaccactcttccttcaagttaaacctcccctataaaaaacatggtatatgttaatcttgatcaaatacgtataacatatgaatttgtaaattgaaattcttaaacctgaatttcctcctgaatgattccatgtctggcttccagttttctccaatctttaggttttaccggaacatgttcacgcacaatggcaccgggaaatgatgatagtgtcactgaaccacatcctacatgttcacctagctcagtgaagtaaacttcaaccttttcctgaggatctttggccactttacgcatcttggttggtcctcttctcttctttacaggattagctgactgggatgtttggaattctgaactgctattcatctctgttccagnnnnnnnnnnnnnnnnnncctcttccctatcattagattttgcttcctaatcagtaggttctgcttctttatcagtttgttcagcttccatatctacatattcagcttcagactgtacttgctcatcaggttagtgacttgtgtgtacatcttctttttcagcaacatcttcctctacaacttctttctcaacagctacatcttcttgatcaccaacaaaaacctctataccatctttctggacatttttcttcaccaacccgcaccttaacaactacttcctaagcatctttttcaccttctagaatctcaagattatcttcttgaacatcaatcatcagttcggcaatttttgtcttctttgttttcatagtttttggccactttgtgatctgtctagtctacaagcctcgctggcgttcactgggacggactaatcctcctcttgtcctcatccatcaagatcctgaaaaaccatgaattaacagttaaaaatatttttcaaattcaaaataagaagcaatgtcctactctgccattgtgaacccttcacaatcatgcctaacaaagaaactctcatcatcagaagattgattcccaaatcatcgactaattggtaagataaaggtacaccaacaaactcttcctttgtctccaactcgtgatagcctctcggaggtgccatcataacaacataccaatttaaattatcatcttccctagaatannnnnnnnnnnnnnnnnnnnnnngtagaatgaatggatttttcaaataggctatttggttcatatgaaggttaacaagggtaaaaccatcttcctccttcacaccattccctgtgttggcccaattgcatctgaacagcggcactttgaacatgtgatagtccataagtaaaatctcctttatcactccataatatgtaagcatatcagcgacttgtctcatatctcgagcacttgatatacacatgctaaatgcttcataagttactccactgttttgtgtcttccgcttaatagcatctatatgaaaccgtttcccattaacgataaatcatttatgtgctaaggcaacatttcttgatccaaatgccaaccaccttgtctccttagaatgatttgttgagtctgaattaatctaccacagtaaattcagaacttgatcatgaagctgaagtactaaaatgattatgaagctaagcaataagctaacaagtcattaagcaaaacatgatcatgaagctaacaatctgtgccacggaaaccagtcatcaagctaagcaataagctaacaatctgtgctaaaactagtcatcaagcttcaagataagctaaccagtcatcaagcaaaacattatcatgaaactaacaatctgtgcctagaaaaagtgtcatcaagctaagcaataagctaacaagtcattaagcaaaacatgatcatgaagctaactttctgtgccacggaaaccagtcatcaagctaggcaataagctaacaatctgcgctaaaactagccatcaagcttcaagaccagcaaaccatccatcaagcgaaacattagcatgaagctaacaagctaatcagtcaatataaattaacaagatgtgtaacaaataatcaagaatacaagctgcagctggaaacctttattttaagccattgtgcaaactgctcagtaaggtttttccataaaaatgtttcattttttgcacatcgagcatcattagcttgtaattcttccaaatgcatcctgattttacactagataacagttctcagaaacaaattatactaaaaattagtagatcaaacataaagggtaacctcttactcgacagaaggatccaaagatgccatgttcattagcacataacgatgtgcagtgtccctatctttatctgatagggtaacttctacacccttctgtagaggttgaccttcaaccacgcttctatcagcctcaatatcttcattgcgattaactatttcttgaactggtactgaatctttaaggaactctaaacaaaatgcaacgcattctccagctaaatacccctcagccatacatgcttctggccttccatgattcttaacaaacgcttttaatgttttcatgtacctatatctcagtcaagaaatgaatattagttgaaaatcattgcagaaaatacatatattgaaccaaatgagtacatcaaacctttcgaagggatacatccagcgaaagtgtactggtcctcccaaacgtgcctcttttgatagatgtattggaaggtggaacatgatatcaaaaagggatggagggaagaagcgctcaagttgacacattgtttccacaaactctgtctccattatcaaaagtttctctgggtcgatgatgcgctcacacaacctgttgaagtaactacataatctatttatggcaatcctaggacccttatgtaacaagcctcttaatgcagccggtaacaagttctgtactaggacatgatgatcatgcgattttaaactacctatatttggaggattaactgaaacactattcgcaatattaccacaataaccatcaggacctctaaatttagataaccttttgcagaaaatggtcttctctttcttggataaccaataggctgctggaggtaagtatgttttctttcccctgacctctgtgtgcaagttatttctgattccaatatctactaagtcttttcttgctttcaaaccatctttagacttagcactttaaatcaagatagacaatatagcatccgacacatttttttctacgtgcataacatcaatattatgacgaacaggcaaatcctaacaagagaaatcagaaactgttaggcttattcagatccacaataacagaatatcattcaattacaaatttactttaccttccagtaaggtagatcaaagaatattgaactacaagagaaataagaaactgttaggcttattcggaaccacaaatcaaaattgttttccattccaaagaacaaagaagctatgattgaatgagaacatacctattgaagaatgtagggagattgtgataaatccagttgagagactgagaaatcgaattcagatactgataaatcgagtgaaataaagtgcgaattagatggagagacagagaaagcgagtgagattgagagaaatcgagtgagagttgcagattttgtgctcaatacctcaagaaattagaatgatacctcaagagagaaaatgagaaatccagaatgaaaagttgattttttagatccaaaaaaaatgagaaagttattttttaggattttgtttattttgccttagccaaaatttcacttttcccacttacaattttcaatagcgggatactaaagattagaaccacaaaattgccccgcgtcaatttcattatcccgctttaataatttatagcgtttacaatatacaaacgctatctttaaaatacgattaagtcaattatagcacatagataaaaaaacgctatcttattatgctatcaatacccacatttcctgtagtgccagtttcttctttttttgtttggttcggggcatctttgctcgcttgtctttatttacatcgaatctggcttcgttgcgatgttagaggtgttgttgttgttggaaattctgaacgatgcctattaaatcaccaagcacaatattttattgttttcaaattatatatgatttctttttattccattatattatacacacatatatcccttatttcctactcccttattttgaaaattttgttatccgaaatcaaatgttttctaaaagtcatcaacttatcgatcaagacttgggtattaaaggttcctgattaaaagtgtgatttcatttatttatatggtaagaggccacacgtactaatgacggctgtgttgtgttagctggttattgcttttatgaaaaaatcgagtacgtcgacatcgacgacaagccaatttggattaaaggggggaagagcattcatagg

SEQ ID NO: 36469 - DNA, 3325 bp, Arabidopsis thaliana landsberg
agcatacaaaaatactagtaatacgtttcaaattccaaagaatgaagaagaaacagaagaaagcagccgttgactgttgtttgaaagtgaaagaagacaaggaggtatatcagatgctctcatgcttgtcacgcgcgtgaagctatatattagtactattttgcatatatcccttcattacatttacaacgtaccatatatttctatattatatactccgtaatattacaaactatttgaccaaaactgctagacatctctatacgttcttataatttatagttatataccaataaaaaatggaacaaaaaaaaaaagtattagtatttgcagcattagtatacattagtagtatttgcagcattaacaaaactacaaaacctcgaccttgtaaaactatgacataataatgagtaaatatatttagggaaaaaaaaaaaaaagggagtgcgtagacagtcaacgggaggataacgtcagcagcgagatgaggcaatcaaaggagcaaagcctgaaaaagtaaagccgtcttgtcggttactcctttaacggccccttctccttcttcttcttcttcttcttttatttttatttattacagtacatctttaagatacatagagagagttaatattgcttctcttcttttcttaaagctgctcttctcttatttaccattttgccctctttctttaactatatagtacgtactacattattaattagtaaattaaaaaaggtaaacacacaaaaagtacgcgtggaacgtgttaaaaaaaatttaaaggaacaccaattcagttcttaaaataacgaataaaagaagagaggagtgttttgtgtacgaataaaaaaagagaggagtgttttgtgtattaataaacaatagtcgaggatcattcggagtgctaaggtaaaagtctattaatatactcctcttgtatggaagataatactcaaagaataatgtgttcacgtaaatacgactagtactacataaaagcctttcagttatcagtggggactgcaaattccgtatcaatatgatccctaataaataagctaagggatgattaattgggtttaggtctgtttaagcgagaaagagaaaaaaaggttcagggtatagggggaggcgaggcggctcgcgtggggcacaaaactctgtttcatctcttcttctctctctcttttttttcttttcttttattgttgttgtcttcttaattctacttctatttaccactttgttgccaatgtccctctcttcctcccgatggtcaatcaccctctctcttattttgaatttctttttttctaatttaaatccgtatgattcatttgtgtctatcccattccttaatcactgatttatttactctatttccatttctttttttggtcctcttatattttacaacgatatatacaattaatattttatttacacgataaattacttcgaaatatactaaacacaattgtgaatattcagtttgaccattgtttagtactaattatactaaacaatatttcagttttataaaagaaagctttctgaatgaggaggcttggattgatatatagttataactttggtgtcgatcggcattattatatttatactatattttttttgttaaatattatatttaaaactatttactacgacttttgttactcggttatatatttttgttccaaaattaactacgataaaagcttagaacattaatttcctagattaactatgcacacatatgtagcggtaaacaactgtatataataaatgaattgggatatacaaatgttgtgaagcctaagttaattattaggtggcaatgagggataaacgcagttcgtgaatgtgtgtatcagactattagtgcgataaacaaacaattaaaagaaaaaaacaattataagtgaaatcttatgttgtaaacagacaaaaacttgtggtcgacaaaaaataatagagggccatgcacctgcatgcagaacaacatatcgacgtatatctcgatgaaatacttttatcttttggcgaaataataagatagttagtggtagtgataaagatgagtgggattgcagtttgcatgggcttagggttatatactaattataaatgaggatttttaggggaattcgtgagcactcccacaataccctgaccgccttttcgccgcgacaccgacatgcgatatcttcctttttcttttgccttcttttttgtttttacgttttccatttatttttttactaactaaagctttttggaaattcaatatacattataacatatatacatgttccatagcatatacagctacaccacgcgcatacataggcacagatatgtaccttcctctgtatcagtgtattacagatatatatgagccagatgtttgtatatatataatatatacattgttttataacccgtagggacatatcttggtcaggtgttggaatcagactcggaccattatacttcgacgatagaactctctaaagcttattttagggtttagttcaaaccccacctttcatctccctatcggctttgtttcaccgtaagaggtaaaaaaaaaacgaaatttgaaaatataaaaatatgaaatgaagatatatttataacaaagcacaacattaatattgtgcaaagagagacatacacacagatatttataaatggcaaagaccagataaagctgaaaagatagcatcacgctcgtattctttctattttttattttgatatcaatttatatattttgttgtactaattaatataggccagagggctctcgtttcctgccatctaaccctacccgtccgatcgatcaaaatctcttttttcttttttttttctctctaaaatgtttttttttacaagaagaaaatcatctttttattgataatcataaaacgaaagatttttaaagttttgtataatgatagccttgtatatacatatttaaactttgaagaataaaaaaaaaagccaaaaacagaaaagagctagatcaatatacaaaggaataaggaatgttcaaagtttcaagtttcaggcgttgaatacgaacttcagaaatgttcaaaatacccttattgaaaagcatgtacatacgctactcgaaagggttaatatcggagaatcggttgaacagatcaaacattgtatgacaagtgttacgtaagtcttctgtcaggaaaactagattttaaaaaaaaaaatcaaaaatcaaaggtaaagcgatccgacaaccacaatccgacaagattatttatctttacgacttctcatgcaagatttttt

SEQ ID NO: 36470 - DNA, 1388 bp, Arabidopsis thaliana landsberg
  unsure (1)..(1388): unsure at all n locations
aatccagttaaactatgatgcaacatattcaaatatatttggttaagtagcaaacaatataaatagtgttatggttttagcctttatttttatgaagtataccaaaaattaaaatgttaaaatcgaaattaccacccaaccattctctaaattttttaagtaaagtgaactattaagcaacaaaacatatacacatggaaagagcaaagaaatattaatgctaaagcaaaaagactactactttacacaccacatattgtcggcaaagcattaaactgcgaggaagatacaacaaaatcttcctcttcttgataaaaaaaacaacaaaaatctaaagtaaataaaataaacttcaatcactgaataatggaaatcaaataaaatccagcttatcaagaatcaacacaagacaataaaacaaagttttccaatttaaagtgagacaaaaagtaatgatagaaaattcaatgttggaaaagtgagagtcccgacacaagcatcttgtggttagagggggtatggggaaacgacacaatcagcactcaagaattcatggaattggataagctctttctgggtcccatattctcccaactctcatttgaaaaaaagaagaaaacacactttcttaaacaataattattactatccaattataaaattctcagtccccattaagtaatcagtaagcatctcatgctatatataagaccactttgaattccccaaaacttaaaaaagcaataagctaacaaagccaagataagcagagagaacagactttgatttaaagctttttcaaagagtaaaacatgtctgcaaacgagttacctgcttcagctcaatccttgcaagaacaattccttggcagttttgtcactagaaagcttcttctgcacgacccatttgaccacaactctcttcgagtatttgcggttgcaccatctcctctcataacacatgagaacaacctcaaagggaatgttctgatgcttctctcagttctcatctgtggcatcatctgttgccttgggttacattacatcattcgctgtgcattcagacnnnnnnnnnnnnnnnnnnnnnnnnnnnnnnnnnnnnnnnnnnnnnnnnnnnnnnnnnnnnnnnnnnnnngaatcaagaagaaagctctgaggatgttcccagtcgtgagttactcacgtgagatgaacttgcccgggattggtgaagagtgtgtcatttgtttgtcggattttgtttctggtgaacagctcaggctgctccccaagtgcaatcatgggttccatgttcgttgcatagacaagcggcttcaacatcatttgacatgtccgaaatgcaaacactgtctggttgagacatgtcaaaagatattaggtgacttcagt

SEQ ID NO: 36471 - DNA, 864 bp, Arabidopsis thaliana landsberg
cataatcgttttattgagattttcacatttggatttccgacatacactaacttaacggattctggggtaattggtgggttttgcacaagtgaatcacactgagtcagcaagtttcgattttttggttttgttttgtaatgattgattaaatgtctaaagatatcacgaagtagatacagaagaactgtaaaagcaattgtgaccaaccattatgaatcatatatatattcaatgaagcatgagcttatttcttctttaatgaagcaatgtacatttttctccaagagaaagaatacacagactcagatagatagagagacatgagcgattgagagattgagagagatggtggattcaagggctattgtgagaagcattagaacgagaagcccaaataccaaacacaagaaaccagaagatgaataagattgcccagtagcgtgcaggaccatacctgattctagtgagcacaacctgttcacaagtttttgtgtgtttggattactaaaaagtaggaactacttatctgttagaatggatcttatcacttgagagatttacttacaaatctgaagaagatgactattgttaaagcacagagaccaccaagaagtatgtgaagtccgctcctagcagttttctgtacaaattcaaaacaaccggtaaccaaataaacgttatcgatataccagtcagagaggcttagatatacaaggttagatcgatggcatacctttccaacacgaggggcaatgagccagaccaaagtaacagtgagtaaacctgtagcaagtagaatcccagtaccttccacagcccatttagttgcacggttttccataggtaagatgtcgaagttcacaa

SEQ ID NO: 36472 - DNA, 910 bp, Arabidopsis thaliana landsberg
  unsure (1)..(910): unsure at all n locations
ccctaagatcctccttttgtttagcaactgtcgtctccaatgttacaattttctccttaagatcagtgatttggggttccgtgtcatgcaatttatcattgcttccttcaagctgtttcatcacagattccaaagatacagaagcagacctctccaacttgttagcttcttctagctgttcctccagttctttggctttgctctgccactcgttagacaagctgtgtgcattagactcagccatcttcnnnnnnnnnnnnnnnnnnnnnnnnnnnnnnnnnnnnntctctttttctttaacctctgcctcaaaacctctcgctgactcaagatctcttttcaaaaccacaatctcgtcttctagcttggcaaccatctcgttatccgatatggcagtcttctctcgggttgaatcaagcaaagctttcaacctcgttaactccgaagacaagatgtcaactttctctgcatgaatctcagccgtcttactagcatcctccgcttggctcaaggccttactcttagcatcaaaagccgcagccaattcttcattgattttctcaagctcctgtctaaccgcaacaagagcagcagaatccgaagcatgttggttcttaacagtctcaagttctttcttcaattcttcttcattgttctgaactgcctcgatccctgcctcaacagcctgaaatttttcaatctcagaattctcctctacatgcttctgagcttttaaagcatcatcaagcttcagagtcacttgttcagcttcttttttagcttgtttgagttcatcaagtgctttagctttatccttctccaatgaagatatccgctcattagctttcttcaaatcttccttgatctgactcaaccgtgtggtcgtctgcggtgattcatgatcctttca

SEQ ID NO: 36473 - DNA, 1715 bp, Arabidopsis thaliana landsberg
ggtggactacgccggaacttcacaggtgactgatcatatggatcatttggttgcggtgactctttcggtggttgtggtttgtgaaccggtgatggagttgaatggactggtggtgaggtaggaggagacgaagctggcggtggagagtgaaccacatggtgatgtggttgttgtggtggaggcgggctacgccgaaacttcactggagactgattatatgggtcatttggttgtggtgattcttttggtggttgtggtttatgaactggcctagttggcacaggtgatggagacttcgacggtgtagcttggctagaaccaccagcacacttgtccttactacaatcaactggacggctaatcaccacagcacattccttggccgatcgttgcttaggccgatctggcaagcagttgcgtgtatcatccaatgcaatctgcttctgactacctggaacacatgaatcaccttgtccgttgaagtaattgtaggcgtacgtcaagttaaccaatttaggcaacttgcatatattctctggtatgaacccggtgagtttattcccagagatatcaaactcttccatactggtaagcccgacaaagcttggaggtagaacaccagtgaaggagttcatgctagcgtcaaacacgttcacattggctagcttcccaatctctgacgggaaacaaccgccaagactgttgtccttaaagataatctcgttgagattcttcatgtttccaatacttctagggatacaaccgctaaatttgttgtgagcaaaggtcacaacggaggctgatgattctccgagggaatcaggaatggtagacgtgaatctgttgttgttcaggaaaatggcgtcgagatcctttttgaaaagctcaggagggacttgaccttcgaaatcattgtatctgacgtcaacgaacttaacagccggccacgagaggacaacagaagggaaaggtccgacaaaccggttgttgctgacatcaaactcgtgcattaggctcaacttctcgaaactcttaggtatgataccacagaaccggtttgaattcaaatgaaacatcgcaacatctgtcatcaaaccaagttcagccggtaaatgccctgcgatatccgcaccattcaaatcaacccccgccacacccgcgacgtcaggatcatcaagagccggggcacagaacacacccgtatagccacacacatgagggccatgccagtttcctgtggtgttaaacgggtctgaatacaccgcctttttccaggcttggagagcaatatacgctctcttaagcctatggtttgcaaatgtcaccttaagatcaacctcatactcaatatcatcaggaagttcaccattttcaggtaacgtcaagagctgtcgctgtgcaataaatgaaacttctgcatcggtgagtgctaaaacaacagaagagaagaagaagaagaagaaagaaaagaataagaagaggaagcagccaaagggcgagaaagaaaatggaggtttagtcatgacttggaacaaaaccttggaaaatacccaagggctgcttatagatatggggcatagaaaaggtttcgatgaaaacaccaaagggttattattaataatgtcaaacaattttcatctttgcatcaccaaacaaatcttttccctatatttagaaaactcttgttttcctttccaagatttaggttctgatcc

SEQ ID NO: 36474 - DNA, 1568 bp, Arabidopsis thaliana landsberg
tatactacttgtggtgccaaaactgagtgcctctaatccatttgtcaccaacggttcttaattgcaaatatggagaactcaagtcacacacataagtaggggcggaccatgtcgagtttgaccatgtcaaaatccttcattgttcttctctttgtgatcttgcacaagtcccatatacggtacacatcatctctctccccttcaacagaaaaaacaaacaacccgaactgtctcctgcaccattgctcttaaaacctctctccgacacgaatccctccaaccctgcttcaccaccggaacattgagaaatattctcggtgacactgaggttgaaaaacccaatcgaaccgcagacgtaccaggaatcgaaccatgtattaacgccattgaaaaagtgaaaaacgaaatattgagaatttgtttgctttggacacgtgtccgcctctctcattttaatttagttttgattaatttttcatcgaaaatatcaagagagcctcacaaaaattgcattacagcctcccattggaggtgctctaaataccccatagcaaaacaagctgctcagaaacactttgtttttaccaaaaaataaagctggtaagttgttggtaagtacataagagtcgggtcagtccaattgataagggattttacttttcttgcaaagaaaaacaaaatatcaagttatctagactggattataaaaaaaaaaaatctcatatgtatatgtaattatgtatacacaaaataaataaaattttcattcttttcttacaaactcttgacgtttctcatctttcataaccagtgctacatgtagcaagtccagaccaaaacatatatagttcaactaagtaaaaaaagaaaattaacgtgctataccagaaattagatgcatctcgtgaaaagagtatgaatactaataacaagagccgttgcggttgcagtttagagggccagcgtctgcagttaaagaagaaaccaagtttccgggagcgactgtgaatcgctgagcagaactgtacggtagcggaattctgccataaccagaaggtacgaagtaagctccgttcttgaaaacatcgtttgaggttctccatctccaatttttccaccctccttttacttctctcttcgtcacctgtttattttagttatgcttagcatttattttcatgaattaatcataagtgcataatgatctttagaaattaatcattacataaccaaaattagacgtttagataagtaggcagtccgatggttagcttagctaccatcatttatttgaaaaaatcagcggattaaattttggtggtggaataataatggtcaagcagttattcagtccttagaaacagatatttaaaaaaaaaaaaaaaaaaaaggatcagaaaaatgtaatgtctacttacctttcttgtttttgagctaaattcattcttttttacaaacaatttaggaattaatctatcatatgaaattgggaccaaaatgtccaaaaaaactttcggctaaaaagaccaacatgactctctttttatgtaggtcaaagtagtattata

SEQ ID NO: 36475 - DNA, 1205 bp, Arabidopsis thaliana landsberg
gcccactcatgaatgacatgaacctaagacaaaaatactactctatagaatcagcactcaatttgtaaatcaatcgaatcaatatacatcgagatctgatgtatgaccgtacccctttattgaagccggcgacacaaattccagcggcaacaccaataagacagccaatgagaagcagagcccactcaggtggagcactatctccgagaacttcttcatcaaacccgtactcgtcatttcgatcatcaacgctatgtaaattactgataccaccaccatcttcttctccagcagccgaaaacgctgaagaagaagaaggattatggcgctctctatcgactctgatattctccatccgtttaaaacttaaacgacgaccggaaagagaaaatctccgatctatatgcttgaacagatccctaactcctccagctccacttctgatagccggagactgagattcaacatctagatcaccctctcctccgccaatgccgacttcatctccgtcggtggatcgtaacagatgtctgtcttcgttgtactctccggctcctcccgatgacataactgatttcaattggctcttttaccaacaaaccatcccttcgccgtgatatttcactactgcatcaatttaagtctccccgggatgaaatctaaatctacgccgcagagattcgtcgccggtgttgttcagatttgatcggattcagattccgatttttttttttactaaagtcgataacgaaacacgcgccggagtcgtaaagagaacctttagtgtcaactagaagattcaagcgaagccaccatttatgggcctttattgggctggtttatttttgtaacaattatataaaaggtacgttcgattctttacaacaagtcgatatgtccgagtggttaaggagacagacttgaaatctgttgggcttcgcccgcgcaggttcgaaccctgctgtcgacggatttatttttgtagacccaacacagtagttaaaattacacggtaatgccacaatcaataaaaccacattatcaaccgtatacaacgttcgttgtcttatacagccatcataagttttacaaataaaaaaaatcacaataacaacaaaagagaaaagatctgatcataaataacaatgttgcaaaagcaaatagagaatgtaacggaaacaaacattatctttttgggctcacat

SEQ ID NO: 36476 - DNA, 1402 bp, Arabidopsis thaliana landsberg
gttgaaatggccctcctattctgccagaagcataccttgatatttcaggtgagcaactaagaggtcaattattccattgagatctctgaagcaatgtttcatttgttcttaaaaatgtcaattccttatattgataggaagttcaatcaaccccagtgaaagaacctatcctgaagagatgatacagacaggcatatcgaccatcgatgtcatgaattccattgctcgtggacagaagattccacttttctctgctgctggtcttccacataatgaaatagctgctcagatttgtcgtcaggctggtctagtcaagcgtttggaaaagactgttgatctacttgaggtaatcctttgtaacttgtacaaatatatctcttatttctctataccaaagctcttatttgagttgtaactgtttctacagtgtgttgatggatgtgtggctacataaaggtcttcattattagatgttctaggcttataactcagcttgttgtcacaatgaatctcttgttgtagacattccttttcacgttggctgtctcataatatcaaggattctttctcattcttgtgtttttccaggatcatggagaggacaattttgcaattgtgtttgcagctatgggtgtgaacatggagacagctcagttcttcaagcgagattttgaagaaaatggatcaatggagagagttactcttttcctgaacctggtaaatttgacttctatagctgattgccatatcatggagttttttcaagtatttagatgtttcttagctttaaacagatttaatcttcctttattccaacaggccaatgacccaaccattgagagaatcatcactcctcgaattgccctcacaacagctgaatatctggcttatgaatgtgggaaacacgtccttgttatattgacggatatgagttcttatgctgatgctcttcgtgaggtaaaatgaatatttgataccggagtagttcctttatttcataccatgttttttcctcttcatgtttgataataagattgagaaactgtaggtttccgctgcccgagaagaggttcccggaagacgtggatatccaggttatatgtacgctgatcttgcaactatttatgaacgtgctgggcgtatagaaggaaggaaaggttccatcacccaaattccaatcctcactatgcccaatgacggtaaaatcatctttcttaagccaatccctagattctattttttatcttaagaaaactcaattcttactcgttgatgtttgacaaattgatcagatatcactcatccaactcctgatcttactggttacattactgaaggtcagatatatatcgatagccaacctccaacccaccggggagctaaaactaccgctgaggccctg

SEQ ID NO: 36477 - DNA, 5303 bp, Arabidopsis thaliana landsberg
tcacaggattggacgaacaggtagagccggggctaaaggaacagcttacactttcttcacagttgcaaatgcgagattcgccaaggaacttaccaacatactacaagaagctggacagaaagtgagtcccgaattggcttcaatgggtcgcagtaccgctcctcctcctccaggtcagttagcagaaacaaagatctttgtcagaagatttcaatgcttaatttgtcaactgatgatcattctagtcgagtcttgatttttttagtaatgtgtggttcattgggaaacagggcttggaggattcatagaccgtgggagcagaagagggcggagctgatcactgattctgtatcttgttatggctttagggctcagtgattttctttctccagttatatctgttgtttactatttcgtgcctcaaacatttgacatttacagcaaaacattaaacatgtaagataacatttgatctgattatccaaattaattagagtaagataaaccgaaaattttcagaaaaaattggtgtagatgatatgggcttagtttaatcaattatgtcatggatttatagaaaaagtgttttgaaaaaatactattagaagaatgatttacttgtcttttttttcacaaatgtaacattatattaaacattcgatgcaatacatagccaaaataaaggccttttaagagattacagaaagttgaggccctacctagagcctaccatagtaacaatgccgactgaagaagaaatatcaacttttgacccaatctgaaaccacgtgtcatcaagaggatataacctcaacacgtattagacaagtaatcggaagatttccgataacaacttttgccgttgagcaccgatcacggtgagagaatcagcgtcgataacaatcgaattgtgattcttttggtaatcatcgaagttaaaccatcgaagctccaatataatttaacagcataagaatatccgaataagcgtcggaaaattcttcgtttcttcaaccaaggacgccatctcttaataattcttgtaactctaaaacctcaaaagattgaattggagattaaaaaatttaagccatacaaacctaaagattcatcaccaactcatatctaaagcatttattaaaaaaaactataagaaactaaaaacaagagaaacaacgtttagaactcagtcttaaactgatttgcggtggaagaaaaacagcaaaccggccaaaaactcatgtgggagcagaatttgccgggcgaaagccaaccatctccgctaacagaaccggaagatgtcggaagagaaaccgaccaaccatccatggatgtcgggctaaagccaattgaaaccatttggacggccttgccgaaaaactccggacgacggagaaagggacatgagagcaatcgactttctctctggaaaatatgaagagataagagagataaccgtggcttctgaaatcgccctttctgggcaagagagagaacggagctttttggctatgaatgatttacttttagaatgtaatccgagaaaaaaaataataatcaaattttcattaagagtacaattaaatttgaaaacaataaaaaaatgattcttaataatataggataagcaaaagtaaatccctaaactaaacttgaagaagaagagtaaaagaagaaacctgggaagaagtgagaaactcatctgatcgccatgagtgaagaaactccgaagcttttcaccaataaacccaagaagaagggtaacaactaattttcattttttggtttcttcttctccgattcactaaacaaaaacagaagaagctgtcgcttttttcaacagctcactcaacgaatctttcacacaattttttggatttaaattattttgactttttgtgttgatctccatttcgatttgtgatctgtatccagccattatcgctcagcttaagcacgttgaagccaatttcaacaatcccaccgttcctccatcatctaaaccgtctccagctgcagcagcggcggcttcgtatacgatgggtggtgggttctgttcctcctccgcctcctcctaaggaatcattcgctcgtaggtacaaatatgtctggccgcttctccttaccgtcaatctcgccgtcggaggtaatctagcgttttcactggttctcaattttgtatgccttgtcccaaaatcccaattagggtaacgatttgggaaagattttactggttactagtagtagtaacgattccttattaagttaagagtttagaatcattaggtctttttgatcaagcactaaagcttggaccattgagatctgcttcagattatgccttctctgctatatgagtgtttgtgaatgtctgagtttgttgatacactttcacttcaggattttgctcatctttagatgaaaaccgtatcgtaatgttgcagactaatatttcttaaggttcgctgcttgtattgtgtgttctctgaagcatgactaatccttgttttatggataacctttttccccacatctgattaggtgtttagttttatctttatgatgttaagagtcatttacgatagttatatggatccctcgccatcgagattcttcctttagatagtttctttactcatagaactgtgttgaagttacaatcttgatggaaatgctgtcacagagactttcatcacagatactgatggttctttgccttattcgttttgcaggttatctgttctttagaactaagaaaaaggacctagatcctgtagttgaagagacggctgctaaatcgagttcagttgcagctcctgttactgtggaaaaaactttgtcttccacagtggttgcagagccagtggtgatcaaggcacgtgagccaattccggagaaacaacaacgtgagctcttcaaatggatgttggaggagaaaaggaaagtaaatccgaaaaacgcagaagagaagaaacggaatgacgaagagaaagcgattctcaaacagttcatcggctccaaaaccattcctactttctgattcattaaagtgcagattctgttgatttttagtttggtttcacttcttactttgtggatatcacatgttttgcttttggaaaaattgttcgtttcattgttgaaaccagtcactttggtatcttcagttccaacattgatccattgtccggtcttgtgtttctgtgtcattgtgaaacgttgaatgctagagaaaaaggttcgactttttatgggctaaagaggttgagtttgaaatatacatgtcgcactatgattgcatagtgcagatcaagaactagtagtagtacaaagaaatatcaagttattttcatcacacagcataagaaacactttctactgatttgcataaatgataaatctataagaaccaggtttaaagcccatttaaagcccaaattcccactttctactgatttcaaaatgaagataacccatttatttatttcaaagcccaaaaaaggatgactctcacacgcagacatctttaaaatgctaaccttgttcaaggcaccaattcaaggtagaagacgatatccgctctgaagcagaagaaaaggttttgactctttttttttggtatcattctccaattgatccaatatcaagattaatttctctgaatataaaattggttgttgaagctgtgatcaatccaactcgaaattgatctatatacaattttaggttagcttgaatttgccttacttgatgaatttgggttatatattgatttttggaaatgaatatttgttgcttgagaaggtaattctgaatgtctggaagaaaccggattcacagagatatccgaggcagctatcatgatcatcgtgatttacctccggagagaccttttctccgaggccctccattgttacaacctccaccaccatctttgttagaagatcttcagatacaggagggtgaaatcagaaggcaggatgctgaaatcagaaggcttttgagtgataatcatggactagctgacgaccgaatggttctggagagagaactcgttgctgctaaagaagagcttcaccgaatgaatctgatgatttctgatcttcgtgctgagcaagatctgcaattgagggagtttagtgagaaaaggcataaacttgagggggatgttcgcgctatggagtcgtataagaaggaggcttcacagttgcgtggtgaagttcagaagctggatgagattaaacgtgaattaagtggaaatgttcagttgcttaggaaagatttggctaaattgcaatcagataacaagcagattcctggtatgagagctgaggttaaagacctgcagaaggagcttatgcatgctaggtatctaaagattcaaccttttttatcaatcgttctgttagtttttgtagtttggtgttttagtgcctaaacatctggttcgattgtatatgctatggaacagagatgcaattgaatatgagaagaaggaaaagtttgagcttatggagcagcggcagacaatggaaaagaacatggtttctatggcgcgtgaagttgaaaagctacgcgcagaacttgctactgttgatagtaggccgtggggttttggtatgatcctacatttttacttggaaacatttggtattttcattaaagccgctaactggtttgttgtgatatgttatgcgtccaggtggatcgtatgggatgaattacaacaatatggacggcactttccgtggctcgtatggcgaaaacgatacttatttggtactcatcatgcttacattcttgtgtgatctgatctatattgtggacttgtactttgacacgtctgtgttctttttcttgtttcttagggatcttcggaatggagtctatattacagccatgggtctggctcgcagaagaaacctcgtttggatcgtcattgaaatctaaaatgatctgtggaaaaagaatgaggtgacgactaaatagcccacttctcaatactcctctggttgtttgtgggtatgcatctactctaaatctaaatgttagttcttctgcttttttaataaggcgttatagttatgtaacttagatggctttttttctttctttctttttagccaagcttagatggctaatctatttcgtatgtttcaataatttgacgatttggttcttcttgcttgctattaattgtgttctattatccattttattcttcggccgaaacaccctggagattgattatttgaaaaagctaatccctcggatagatatccagacgactctatttttgtcca

SEQ ID NO: 36478 - DNA, 2013 bp, Arabidopsis thaliana landsberg
  unsure (1)..(2013): unsure at all n locations
aaacactctagtttaatactggatcagaattccggattcgaagcccgcagcggaaaaatctttttgttgctttttataaagtatattgtttgacaattgaagatactttctcgtattgttctttcttctctgctcattgttatggtttttatactatattttatgattcttgaagaaaatcgtgcttgagttttagatatgagaggttcatattttcgagaacaaaaatagaaaaggaaatgaatgggagaaaagaagcaaatactctcttcaataataccttcaaataaaacatatataccgtataaattctaaattctaacaaaagatccgctgtagaacattgtctaaagcaaccattctagtttaatactggatcaaaattccgggttcgaagtccggccgcggaaatatccttttggtgctttatatactgtatcttgtatgacaattgaatatactttttcatattggtctttcttctcttctcattgttatggttttaatactatattatatgattcttgaagaaaatcgtgcttgagttttagatatgattgggtcatattttcgagaacaaaaatagaaaaggaaatgaaagggagaaaagaaggaaatactctcttcaataaaaccttcacataaaacatatataccgtataaattctaaattctaacaaaaagtccgctgtagatcattctctaaagcaaacattctagtttactattggatcaaaattccgggttcgaagcccggcagcggaattatctttttggtgctttttatattatatcttgtatgacaagtgaagatactttttcatattgttctttcttctctgctcattgttattgtttatatactatattatatgattattgatgaaaatcgtgcttgagttttagatataaaggggtcatattttcgagaacaaaaacagaaaaagaaatgaatgggagaaagaagcaaatactctcttcaatacaaccttcacgtaaaacatatataccgtataaattctaaattataacaaaagattcgatgcaacacattatttaaagcatacattttagtttgatactagatcagaatgccgggttcgaagctcgccagcgaaaaaatgtttttggtgcttcctattctgtatcttgtatgacaattgaagatactttttcatattgttctttcttctctgcttattgttatggtctttatactatattatatgattcttgaagaaaatcgtgcttgagttttaaatatgagggggtcatagtttcgagaacaaaaactaaaaaggaaatgaatgggagaaaagaagcaaatactttctttaataaaaccttcacataaaatatatataccgtataagttctaaattctaacaaaaaatccgctgcagtacattgtctaaagcaaacattctagtttaatactggatcattattccgggttcgaagcccgtccgcggaaatatccttttggtgctttttataacgtatcttgtatgacaattgaagatactttttcatattgttctttcttctctgctcattgntatggtttttatactatattatatgattcttgaagaaaatcatacttatgttttatatatgagggggtcatattttcgagaacaaaaacagaaaaagaaatgaataggagaaaagaagcaaatacactcttcaatacaaccttcacataaaacatatataccttataaattctaaattctaacaaaagatccgctgtacaacattatctaaggcaaacagtctagattaatactggatctgaattccgggtacgatacctggcagcaaaaaaattcttttggtgcttttaatactgtatcttgtatgactattgaagatactttctcatattgttctttcttctctgctcattgttatggtttttatactatattatatgattcttgaagaaaatcatacttatgttttatatatgagggggtcatattttagagaacaaaaacagaaaaggaa

SEQ ID NO: 36479 - DNA, 1130 bp, Arabidopsis thaliana landsberg
agtatcaaccatcgagataattttactaacctttaattttgcaaacaatcttttcgggtttagatttctagattacttccatgttaaaactaacattatatccaaaaaaaaagaatcatcgacgtttcggtgttcgagtttttttgtttaggtttctaggcctcattcgagtattttatatatttaagtcaggtttgggtatccaaaatattataaaaacaaataagaaattgtttaaattcgaaaaaactttagtttaagttttgataaatataactaatagtttggatattttggttattttgagtatttcagttattttgatttaaaaataactgatattttttattcataattgcatattgtatcattggattacatcaagtgtaaaataattaattttttatatatataattacgtttcggatatttcagatatttattagctcaaactttcatgaaactatgcatgtattacataccaagtacgtaatacaatcggtctccgtttgcatgtgaacatagccacgagccctactgatgaaccttgaaaatatgtgtgtccatgcttcatgatttctctttgtccttgatgtaaacacctaatatatgggcattcggacaggttcctaatttttttggcaatacttctccacaaccttagatttatgaaattcatatgtcatcaagtactcaactcgttgaacacactctaaggcgacaaattgatggtaccatgagagaacgacccctccatcgacaactagtgaaggctaaaccaaaccattaggcacaatgtacaacaaaaaattcacggggttttcgtttgcatatttacatacattggattcttttaaaggtttattaacataaaggtgtacaacgactgatatcataagatcaaaacgaagaaattaaacaaaattaatcacatatagttcaaaaagcttgccaaaacgatggtacgtactactctaacatatagaactaaaggactcttttctgtatgaaaactaaaggagtctgtcacaatctagtcatgggataattatccccagtaaacctagtaattggtcgttctttttctccaacatatatttagtaggacgtaatatgacgcatcgttgctc

SEQ ID NO: 36480 - DNA, 1425 bp, Arabidopsis thaliana landsberg
  unsure (1)..(1425): unsure at all n locations
tctttttaaaaaacattttttgtttccttcttcttccccgttaatttgggaaaattctgtcgggatctccggcaacaaacgcgccggagtcaagattttgtctctcaactgcttctcctttctttccccattgtaaatttctaaactttagccagaaattgatccaaaaccctaaaatttgtgtttttggttctccgacctaataatggaggagtctcgaggatcttctgatcaagaagatgaacaaattgttcaagtcagggaagctttaatgtnnnnnnnnnnnnnnnnnnnnnnnnnnnnnnnnnnnnngaggttcttaaactacacaacggcatctatcgacgacgatgtctttgaccttcctctcgatgcgtttgtgtgtagaccaccggaagggtttgatccaacggcgaagatctcgtttccaggttggggaattccgtcgttgaactggattgagtgggttaatgtaatggctgagtcacacgccacggtgtggaagaaatctggtgtttacgatgcgattttggcgtctaggtatcagattaagaggcatgatgatttgattgtggcgttggtggagaaatggtgtattgagacgaatacatttgtgtttccttggggtgaagcgacgttgacgttggaggatatgattgttcttggaggattgtctgttactgggaacaatgctttggctccggttaaacgagaaggtatgaaggaggtggaggagaagatgaaggaggcgaaacgttatattgaggtgagtttggagaagaaatgttgtgttagtatgtggatgaaagagataatgaattcagggaatgagattgagcatgaggcgtttatggtttcgtggctttcgcgtttcgtgttcactagttcgggtgatgtgttgagagataagctgtttccggctgcggctcagcttgctaagggtgttaggttggctctggctccggcggttttagctaggatttaccgggatcttgggggtttgaaggagtttcttactggttatagtgagaaagagacagtggtggtgaagtctccgatccagtttgtgcaggtttgggctttagagagaatcatggcgttgcagccaccaggccagccaagccagttaaaggctggagaaccgctgatagcgcggtggcaccatcatggtggtggtcaggatgtgtatggctatcctgagaatatcagagcggtgttggactcggctaaagagagtttcgactatcgtccatatacaaaacctgtgaataacttcagattcccaaagttttactttgaagatgactgttgggttcgagtaagacctgatgagaacattgtagcctttggtcggtgttaaaggtatgctaaactggttggtttggattgcattgaaccttattatcctcaccgtgtggcattgca

SEQ ID NO: 36481 - DNA, 6408 bp, Arabidopsis thaliana landsberg
  unsure (1)..(6408): unsure at all n locations
agtcacagagtctgcgacaacacgcagatagagttgagtctctaagtcatgtttgtacatatacatacaataactagacaagtcttttctgtaagacttggtatgaaatgtcgatatatccattatgtacgtcttgttaaaactggtttccacgaaaatgttgtatctcatgactaaatgtccccgagttcgttcctcaccaccatagttagactgtgtggccgttaagctccttactactagttgttgtatcatgtatggcataacgaatggaagatgcattctaagagctgataggttgtttcatatattacattagaaggtgatctgcttgagaacttgatctgtttgactcttaccagattatactaagaatacattcaagttcggaatgatctgcttgagaacttgatcattctcggtgaccgtaagggttttagtggctgtgatgaaggaaagggctgagcacaagccttgatgtacattgatgtccttgttgatgtgatagtggaatggttttgaactactgattcgagagtcatggtggctgagatatgccgaacaagatggccgagagtcttatagcaaacttattttctccattggtaaccaaaaaaatccggcctttgattgtgccttggattcataagcattttagaccgatgcccgaactcgtgattttgaagactttctcgtgattctgcaattctcccatgttttttctaacttacaagctgcaagacgacaagaaatacaccttattttagggaggcgtccacgtaaacccgaaagcccacccggtgcttttcttgtttgtctttgcctttgcctctgcttgctaggaaaaataaataaatatcacaagtccctgattttgactggctaagattcaacggccattttccatcttacagacccaattcttgttttctgttttgctataacaaaccagggtcagggttttatcttccatattcttttcccactgattcttacaatcgatctaagggaatctacgaactgtttggtaatttctggtagggaaaagtcttgatcttgctgtttggcttggagaaatgacgagtgcttgatattgttgacggctcaccggtgatggactcttcgagcagtccatgtttatgtctggatgctcacacgacgggtaccatcaggaggaagaagatccttggcaaagcaagaaatctggaattaggaagctctttcactggctcacgcattgtttttaggctttctccgaagcgtgtatcgagaattgcgaatcgaaagagcaaaaagctcttgattgtgaatgaggatgttgctggtaattacgacgatnnnnnnnnnnnnnnnnnnnnnnnnngagaacttttgcatgaacccttgttttcatagacaaagatttgacctttggcaataaccttattatggatggctggctttcgattttgtagcaaattgttaattattttacatacaaagctgtgaggacggttcttcatcagctgtacgaaatgaatcctcctcaatacacttggttctataagtaagtttcttatgctttatcatttgattaaagttctgtataggattagatttaacaaaaacactttactccgatcatttttgccttgtggtcttaattatgtttctcctttgttgtaaaacagtcatatcataacaaacagaccgacggatggcaaacgtttcctccgtgccctcggcaaggtaaacaagtttagtttatatctcacatgaacaagcatcatctgtaagatgcattaggtctagttgaacaagttcagctggtatactataactagccgaggactgaatgtagcagattgtagctgtggtgagttggttaatgagcagttagtgagggctgaagtttataagacttgtctctgatttggtgtattgcaacagagatagcagttccatagatttgttcttattacaatcacactgtgttgtgataaattatgtttgattcaaccttgtttagagcttggtatttaaacacagacaattgagtttgattttttttgtcttaactacttgtaggagagtcaggagcttgcagaaagagtgatgatcacgcgtcttcacttgtatggcaaatggatcaaggtaaaatcgcttgctatatctcgctccagttttggtttatgtgtttttcccttcctgccatgggaaccagaaaagactcaaaagttaatattgtatagtttgttgtgtagaaatgcgaccatgggaagatataccaggaaatatcggttgaaaacttggcgttgatgcgtgaacgcctgatggagaccgtgatatggccttccgatgacacaaactcaaggtaataggctgaagaagacagcgcacaccacagcacaacatttgctttgtcaatttgcttctcagtttttaggacttcgagttttttagtttgattacatattactatagtgaaagagcagtgtgtatatgatgtctattcttggcatgtactatatgatattaggggcaaaaaacaacacccttcttgtgctcctaaacttactttctcagtcatctcttacgctcacaccactcacattaacattggtaggctcaaaatgataatcacaatgccaatcttctcattttgcaaataaagaaaagaaaataataaaaattgattactagttttgagtattgacaaccttaataagcaagcaacaacaggcttgaatgcaatgacgtggtcatgattaaggaaaacagcggttggtccaaatcggaacacttgtcctcgtaacaacttcaaaacctggtttgacttatattacagtcctcactcatcacggaaccacgccgaaaattcatggcgaagactagcatttttgcagctctaccctttaccaacttcgaattcccgtcgctgttccgtgtcaagaactcttcgattatcagtttcagcgaaacccattttctccgacaatcaatttcgaccgcaatcgtaagatctccgactaagaggggaattgtgtccgtctcatgttcttccgtcacggacgaagcttcttctgaagagctacaagttcgaaccttgtaatatcaccttcctgtttcttctgcaatctatgtatataaacttatagctaacgattggactggtctttcttggtttctgattaaaatccgtggattgacgaaatgtgggtatttgcaggacatggaagtggaaaggttattcgataagatatcaatgtgctggaaccagtggccctgctttggtcttggttcatggtttcggtgctaacaggtctaaatcattgcccctttagctgatagggacttgagaaccatatgtttaacagtaacatttttgttatgttatcagtgaccattggaggaagaacacacctattcttgggaaaacacatagggtgtactcaatcgatcttatcggatatggatactccgataaaccgaatccgcgtgagtttggtggagaaccattctacacttttgagacatggggtgagcaactcaatgatttctgtctggatgtggtcaaagatgaagctttctttatttgcaactgtataggaggtagagctctgaagttccaacgctttcagatttaagcttttttcccctttcggttcagtaatgacagagagattggtgttcattaggacttgttggtcttcaggcagcagtaagtaagccagagatatgcagagggcttatgcttattaacatatccctccggatgcttcatatcaagaaacaaccattcattggaagacctttcatcaaatcattccataatttacttaggtattgtatagctgtttcaacaagatcctctctggggttgcagctgaatatattatcatgtcggtctcaggaacactccggttggaaaattatttttcaagagcattgctaaaccagagacagtaaagagcattctttgccaggtattggtggttgcatctgaaaacacaagaatgagttttatattttatagtgagcttaaggcaatcttgttcgttgttgtgaatttgcaattagtgttaccatgatagctcgcaagtgacagatgaactagttgaggcaattctacgtccagggcttgagcctggtgcagttgatgtcttccttgaatttatctgttactccggaggaccacttccagaggatttactcccactagtcaaggttcgttactctggtctcctccttggccatagttaaaactaaaccttagtctaagttctctaactgttgcagtgcccggttctaattgcatggggagagaaagatccatgggagcccatcgagcttggacgagcatatagcaattttgacgcggttgaagatttcgttgttcttccagatgccggccactgtcctcaggtatctctctctacctcccctgaagatcgaaatgcagcaaggaacctttgttttcatattattatgtttctataaaaaaattgcaggacgagaagccggagatggtgaacccacttattgaatcattcgttgcgagacattgaaagtccaatacatccatctccccagacatttgatctttctagtttttaatatatctgtacagaaacagtatacctgcacgaacactcagagttgtgcatgaacagtcacaggtgagatttttcagtagtgacaaaactgtgattgtaaggatacagatgttgatagagtaaagaggtcgataagagaaacaaacctttttcttccaaactcaatggaaatacaagactttcatgtttcaacacaagaattcatgattggtttccatccaacacacattttctagcaagacctatctaacaaatttggaaaccatacattacttccttaattccctaaccaaaattctgatgttgtcggctgtaatattcaaaagctccctccgctattggccatgcaaaaatgtaggaatcctattcgatggtagaaggtaaggccaatgagagttaacagagcagcttccaatctcagcaacattttaatcagtttcccaactaagacgacactacctttaccatatcaataccaacacgctctctcttgcccgatcacatacattttggccaccacagacgaccacacccaagacccttcaaatgtttgttgttggtgaagcaatgttgacccccaaaaacttgtctagtacattcttaaatgcctgtataacaaatgtaattaaaaatttatgtccatggggattttcaaagactttggtcataagttttttctgcatcagctagtcagataaagttctcgggtaaggagaattccgagttaacaatgttgattcatgtaactgattatatgcaagtatcagcctaatgccaaaacatttatctccttccatcttacgttggttcacactcaacaaagagatgctagagatttatgtaaccaggtttacgcagatatcagtatgatgccgaaaatttctctcctttgagtttatggtaggttcacagtcgacaaagtgatgctagagaacatacctgaaatgcaaaagcctctttcctacttaaaattatatccatcgcagctgcttcatcatcgaatgcactataaaattcccgaaagaactgggtcctaagaattggaaacgaaaaaaagaagagagataacaagttactctccagttttaaagtatggaaataaaaacacaacaatgcttcagaacaaacctatcttcttcaccagtctgttggtcaatctcatcaaacttctgtgttagaacttccgcagcaatgggtgagagcatgtggagtattaatgcttctaaagttcttgggaaataacgctgaaataagttacatgataggaccaaataaattcaaaggattttcactcaaaaatcttatgtaaaactaaaacgaaaatctccattttgaccaatagttttaggtaacttaactccagctaatgcaataccatgtgaggataaacacagtaaagtaaatgccttttagagttaacttactgccattgcaaggagaacatcccgaagtctagaggcttcaagattccaaagcaaatgggcaacgtgatcatcttctaaacaagacattgcattcaccaggaacttgcttttttcgccgccctctgaacaactgggtgaagtgtgttggagtcccttacttgtatcaacagcattaacgtggtcatggactaaagaaataagatcatgaagcgcctgggaagcagaaggatctagatcgtgcagcgacgctttttcatgcaatgtgctgaggccctttttaatgctttcattgcctatattatcattcccaccttctgcagtttcaatcaccggccaagtcaggtaaacaattataacgttttctcaggatttatccatcaaagtattcc

SEQ ID NO: 36482 - DNA, 1914 bp, Arabidopsis thaliana landsberg
cagagtttcaacccatctcttggaaccacagattcgattatcaaaatgaagagctcctgtaatcatctattcccttgttccaagctaactcaagccattgctggagcgaaggaatatcaggaacaaaattagaaccaccaaagagaactcttttagcttcttctctatgagaaagcaaatgagagcattgcattcgaatgttcttccatccacatccccaacctttatcctcctttgaagattgaaaatgatcaacaaagcctgatagtaaactagtactacactctaaaggtttcgacttcagtttcagttcagactcaagacagttcctcagcaaacaaatcaaaccaccatgacctacactgtagaaatgactcttggtctttaactggaccaacgaggcaacgttgttctgcagaaatgaaacaactttctcaattgggttttctttactcaacctaacgcacgagtggaaagaagatttaagggttttaagaaagcattacagatgatgaagcagaggaagacgaagaaggatcatcagaagcgagttgcagagccaagtggtgatcggtttcgatttgtggattgatttcatcgtcttcgaagtgggaattcacatggctgagtcaaaccatccaccataaccagacaaacacatcaagactaagaagcatatagaaataagggacacaaagctaaaattagggattgatacctttggattagggagagaggaagcgtgagattgcagacaggacacaaagctgacatctttataacccgggacaagaaaaaagtcgcctttttttttctcttccgtttgttttctcgccggaagaaatcagaaattgacctcctccggtgatgatcaaaacgcctgcgtttaattggagtgcttgtggtgcattgattatttctctttttttggaatttttaattcttactgatttttattttatttttgtgttaaaagataaatttaaacgagagaaagtagaaaataaagaatcttaattggccaataattatggtaagttttaacgtgaggaactaatatttctcttttggaaatataaatcagagatgcatgtatatgttttacgactcgacaagtcacaacgttggtaacaaaccaatttatgagaatctcttataaatatcacatgtgtgtttagtaggtctctatgtctcaaaacaagaatggagaattcaagcttccttatgatctacaaatgaagattctgttaccgatgcctctaaaagtcttggcgaaatggttctgcgtctcaaagcaatgtgcatcatttatccgctccgtagaattcagagaaatttacttgagtcgatcgatgacaaagcctcgagtgttgttcgtcaccaatattttaccaatctaccaaaacaaacccgaaacattgtttcattctgtttgtcaagaggaggaagcattgttcttgtcttccggtcaacaacagatgtgtaccaacgaaacaccactttgaaatgtttctaaacccatccaaggtttgatttgccttcaagatactgaggttgcgatttaatttgcaacctggctacgcgaacgttacggaaattaccgcagatcgaaaggtctaacggagcatgcatgaaaagttttttcggatattacaaagctaaaaaaagtaatcaagttgatatgtataagtttaactaataataacaaatatcatgtattcacggtcatgtaatctaagaaagtaaccaaggtgcgtaccaacgacgcaccactttggaaagtttcatgtgttctttagtcgaaggattgatcaagtaaatgtgcctaaaatcgtcatggatctgaatcaagaccaatccatcacaagatcccaatactttgatagtttgttttgagatttgtcgattggatca

SEQ ID NO: 36483 - DNA, 4481 bp, Arabidopsis thaliana landsberg
  unsure (1)..(4481): unsure at all n locations
aatccgacccaaatgtttgactaattataagacataccgccgctataccatgatattgtcaaagaaaaagtttctaaccaataaccactatagactaaaagatttcaaataatttgattgatactgcattgaacattctacaattctacttatattgtgtagttcaaataatgagaacatatccgaaagactagccgctgttagattatgaatgcgtatgaatacattatacattatagtatatatatatatacacatatattaaaatgtattactatataataatttgtcttagtatagtactcaaagaaatagagttttcttacgtagatgtcatatattttagtcattttaggcaccttcctaactcaaatcacgaatagaacttatgtagcaaaatgtaaacacatgaaatcatttattaattcgggtccaacgtaacccaccacaccacagaaactcattaaatagtatttttttataaaacttaagttatatgcatggatacatgaacgatactcctatataaagagaacagcattcaaaaggtcttatcatcttcttcactaaacaaaaaaaaaaccttcaaaacatttccttattctttcttcttcatctacaacaatggctggagttgcctttggttcctttgatgattcattcagcttggcttctctaagagcttacctcgctgagttcatctccactttactctttgttttcgctggtgttggctctgccattgcctacggttcgtatactcgtagttaaataaagggatctaaataattttcgtaatttgtaaaaattaatgggttcaatacttaatgaatgtgtcacatttgtgtatatagcaaagctgacgtcggacgctgctcttgatacaccgggactagtggccatcgcggtttgtcatggttttgctctcttcgtggccgttgcaatcggagccaacatctccggtggtcatgtgaacccagccgtcacttttggtcttgctgtcggtggtcaaatcacagtcatcaccggagttttctactggatcgctcagcttctcggctccaccgccgcttgtttcctccttaaatacgtcaccggtggattggtatgttctcatcacctttacttactttctcgtaaaataaagagaatcatagtataggtctacaaaacaacaaaaataaaataatacagaataaaggtatttaaggacaatcttaacttgattgaaaactaggttacaaatttataacatagtttacaaagtccaacaaccaataatattctccatgttttaatatatagttgacacatgatttgtatgtttttggacaaacgacacatgattttgtttaaaagtgaagttatagaatattgtaggtttttttctatttcaagctagcattttatactgtaggtttcatttcgcactagtaggcaaattctggaggcattttaattaataaaaactaatgaacgagcgctaaaactattgaaaacgcaggcggttccaacccacagcgttgcggctggactaggatcgatagaaggagtagtgatggagatcatcatcaccttcgctttggtctacactgtctacgccaccgccgctgatcccaagaagggttctctcggaaccatcgctcctctcgccnnnnnnnnnnnnnnnnnnnnnnnnntcctcgccgccggtccattctccggtggatccatgaacccagcacgttcctttggaccagctgttgctgccggagacttctctggtcactgggtctactgggttggaccactcatcggtggtggacttgccggacttatctacggaaatgtcttcatgggttcttccgaacatgttcctcttgcttctgctgatttctaaggaaacaagtgatgattcttgattcatgtttctgtgtttggttactttgcctcgatctttcttgttttgtttggagtttggtccggtttcgttgtaatttttatccaatttgtatgaatattatttaatggatggctgttttggttataaattaactaatggatgtatgaatatatagtttcacctaaataggtagttgtaatgttgtatagctaattatcgatccatatatataaaaaatagatcgttacaattttatgatatagtaacaactaacaacannnnnnnnnnnnnnnnnnnnnnnaagtagaagtttcgagatcatcgtcattaggtatattcttagggatgttccactcatgagctttccactctggcaattgttgtatgacaacctatgcaataatttattaatatcaataaatcacatgcatgtatagaaaaaaatgaagattatattatagacagagaaaaagagaggttatatattattaccaatccggtagaatctggatttcccacgttggtttgacaagctagtctccaattttttggtttctgtgaaaacattattcgattttactcccataaccaagatgatacaagattactaaatactataggataatttcttaaataaaactatacccttttgagtttctccttctcaatatcagttcgcggatttagaagctcctttccatttacaatctgaaaagaaatatccatcaatatctcataaaccatcattggactgtttaatttagcttattgactatatataagagagagatatgtatacctcgaccatgcaagtagcgcaagttcctactcctgcgcagtttgacaaaggcttactctgcgaattaatgagacgttgacatatactccaaagtccaaactaactagattagattaagagaaaaaatcaaaccgagggagagaaaatatcatacataaggaccatagagttcgatgttagaatccaacattatgtctcttagtttctgtccaccgttcgctcttctccaatgtatgtccggtgtcccgtccggcaacaacaccgactaataatcaacattattaccaattaataaaatttattattaatccatccaaaattcacctcaacatttttaaacagcacaacgacttatttgattaaaaaccattattaatcaatatacaattttatctaatcactctagattacctacttttccacgattattattcatccttgttaccaatgtagctaatgataagagtgtagataatctgtcaagagtaaacatcccttacatggacgaacgcaaaatcgacagcaggaggttcgtcgggctcatcagcggctggaggctggctcgctggtgcggtgcttatggctcggacggttttggttcttgcggcattgtgttttgagcgaaagaagtacgaatttggcttattaagtttggtcttgtggctaaagctatgatttgcaggtagagaagctactaggccggaaccactcaactgtacacttcccatagtcttgttcttcttttttaaacaataagatattaaacagaaccaaaaaaaaaggttgggtccttaattgggataatgttttatatgccatgaggtttctgtggaggcgagtggtgcctctttttatctcttatccaatgtgtgtatgcgccggtttagtctattgactaaccaaattaaattagttaatagaaacgttgaaacgttttcccccgtatataggaaaaatattggggttgaaccttcgtattcactcctttaatttaaatcaataattttgagaaaacaaaatttgtagatttttaattaaataaagttaattatctgtagaatttgaactttataatcaaacgaaattatatatcggttttgagtttatatatatgaattaggttttagattttacaattaaataaaattttatattggtttgggattacaaatgtggattagggttttgattttacaattaaataaaacttatgtcggtttaataagtgttatggcattagttacttggtctatgaccagaccaccctaatgttgtgtcctggcgacgatgaaactggaccggcttgcatctatattgtcacgggagattttttcaagaagattcaaattggttttggtttctggtgttttcattgtgtttattctcccagttttgtcctagttcctttaggttaagattgcaagtctaataattttatcacattttcttgaactttgttcatgtctctgttttcttagtcttaagtcagtttgtctaaaattttcttgatgataaaaatatagacttacgatctccaacattgttgatcaacacactttcactttgaacttaaccaaaaaggtttgtcaccattgagtaaaaatgttacaaaatatatacgtaagtaatgtaagagttgtgaataataaggtgtagttgacatttgatgggccggaaatgtaatacaaaggcccatgggctaaattgacaatttcattaaaaaaatcgatcctcgaaggagaagactctgagaaaaaaaaaacgggaagaagcttgagcttgtcactcactagacttgag

SEQ ID NO: 36484 - DNA, 3724 bp, Arabidopsis thaliana landsberg
  unsure (1)..(3724): unsure at all n locations
tgcatgaagtatgcaacggagacaggcactacgacgtcgtttcctggttgtatgacatggcaaggcactgacacttgtcccaaaatctctctctcgtcgctaccaaacactatcttagctaaggcaagagctgtctcgggcttcatcttcttaagggacttctcgaacctttggaccgagagagagtctctcgggtcgaccacgaatgaggagaaatcaaccgcccaagcttcgtagttggagccaatgctggtaatgatcgtgtcaatgtcttttgactcaaaccctcctttataatcctcagtgtttatatacctattaacatttcaatctagtaacgttactaatttgatcatctaaatatcattttctttttacattataagtacgttgcattagatatatatagtcaaacattattaattgttgcattaaattatggccgactttctcacctataactataataaatatctaaagtaatcagtcaaagtatgatacttcaaacagttaactcccattcgataatttctatatataggagaatatagtatgttagtggtccacgtgatatataaagatgggttaagttttagtacttctaactttaaaaatgacaataaatatattgattcatcatatgataataaaatcataacacattttttctaattttcgatgtatctgtatgaaatgaatgtcttattgacatattgatagcatatgtagcatgtttacatatattcatctacgtatatatgcgtagactgcagagaagtaagagaagatgtgatcatatgtcatatccatccaacaagctagaagctgatcatgtccacatgttcaacacttggcaacagttactcttcattacatatagatatcaaccacataaaaactatttttatttttctaatatagcatattattgcaaatcattatttttattttgtctttttcctcaaacacatattcacgaaggaatcttgtacgatcggccagactgtataaccctataatttggattgcatgtgcttagatttctctttcgaacgtaaattataaattctaaatcatcggtcttcatcttatttacagatatattatcatattttataaatagattcaatatataggcctaaatgatgttatacagaacagaaatagattatacatatgctttgatttttacttccaattatgattaagggtaagtgttatactaagagtgaagcgtaccttggagaagcagcaataaggagaagatttgtaaacaagtcgggccttttaatagaagcagcacaaccgatcacccccgacatggaatggcctacgaacacgacagggccaaacttcaactcctccataagagcaatgagatcgtcagagaagacgtctaaggagttatactttgaagggtcatagagagtttgatctttaatggctccagagaaaagccagtcaaagaccaaaactttgaaggattgggacaagaccggtattattttatcccaaaccgactggtcgcctccgaaaccgtgtgccaagaccatcgatctctctcctgaaccgatgattttggcgttcatagcggatgcaaggccggatatcttctgattaaccaccatgcttaagtacaagagttttgttagatgggacaactttgataagttgtgtgcgtatatataaaggagaagagagatggattaggtttatggttctttaattgacattcaaccaccgattttattaggctcgcattttggtacatccaaacatttatggccttttcaacaatggctgtatttgtattcattgtccatctacatagcatcttagaggataaaacaatatccatcataaataacaatatactactccatgtgaaaacgaaactctactttttggtagtattaaaaaggtaataattatttggactcgatatgaagtatatatactagttttgtttgtatgtgtaaagtttagagtatcaaagtgtctttctttttttttggtgtgtatcaaagtgtcttttttttctatcaaacaatgcatttgttgtaaaaacaatatttttttcttttaaagctaatttattattattttcgaaaaaataaatgcattaactaatctgacatttagacgtcaacatgatctcaaattctcaatacattaacataaccataaatcttaattaagttatagtcaatgaagaataaagcacacggcaaattctaataaattgattaacatcaatccttgctaatcataggagtcatctacgaaacgtataaaatgaccttttgtcttacaataataacaacgcanattaatataattctattatatatacatcattttcgtttctctcccttagactttcgcatatatagacacatcggaaaaatataaaatacaagcaactaattgtaatcaagtttctttctttaataacaaatcttcagaagaatggatatgaaagaaaacgatatttattggtattaaatgttttcaatttatatagtataataaaacacatatattagtatacgccaatgactcattagttatatttgatatttcaaaagcagaacctgtgcgtgagttcaatatctcgccaccaaccggggaaattggtgtttgaaagtgtataaaagcggagataaaaaaaaaaggtgtacttccttgacttctcttgaaacaagattttctagctagctgcaaatccttggtttatatgactgaaatccatgctctttaaatttctgtgatggagaggaaaagcctaaaaacggaataaaaaaacagtacacgtgagatgacttggaaaatcttaaaagactcattgaaaggactgaattaagtgtgaaaatattgtgttttatatgtataaaccatatatatataacttatataacaaagtaatgcgtctgtgtaacttttcataagaaaagatacccaacaaataaaaacaatgaacaatcgtcgaaaacctaatctagggatagccaataaaaaagcctctaaaatatcgaaaccagaacgtgtaaggtccccaataacttcgcttaaaactcaaaagtactcaaatttatgtgaggtttaaattggttcaaaggtaaaaccagagatatctgggcgagaaaaaaaaaagacaagaagcacacaaccgcccatgaggaatctgaaggaccagaccccaaaagttttgttttgtccataccttgtcattttcttcttccaaatttggaccaattattattttacattaaactcagaaaaggtttgaaattttcctttatcttcacagttaatgatttagagtaaatgtgtaaagcattcgaatataattactgttttcacaaaaagaagaagaaaaatattttaggtgttgtttttgcatgtatggatacaaaagctagcctctatgcctaattgtgttagtatagagtgatcgatactatagaagctgtacttttttcgtagataactaaagacgaggggcaaagcgattctccacaagaagagtaattccatcatatgtatagcataacttatatgactttttgacctaaagaaaaaaagcatacttatttgactaaataaattcggttctgtataaaggctgaaatactggagaaaaagcttagttttgtcgtgtagtgatcaatgtatattgacaaaagagaagagactggaaaaaagtctacgaccaacttttcct

SEQ ID NO: 36485 - DNA, 5291 bp, Arabidopsis thaliana landsberg
  unsure (1)..(5291): unsure at all n locations
aatgttcttgaaagaggtgtgatgatagcaaaatgacaatagagaaatgagggggtaaacaaagattgtttagattttttcgttaactcaatggtttagaatttttgaagaattctgaaaaataaaaggaaaagtagtatagagaaaagattgccatcaaacgaataacttacaaacaaagaaaaaaaaagaagggaggagattggttttgtaaaaatattttctatttagatttgttttacaagcctatttttaggatactaaatttttggatgcttttatgttttgtatagctttctttttgtcgttaagttttgtattactaattcatattttgtttgaaataaattgctcatgaaagcatcttttgatcaattcaaaagattgtttacttatcatagttttcttggaccattctctaccttcgtgcttagattattttattacagttacatatctttgaaaaaattatctttgaaatatgatcaaaagacaccaaaagcaatagagtagtttgagatggggcttatgaaaacatcatgaatttcgagaaacggcacgcaggtataaattctttagcacacattatcaacaaacgaatttataagatacaacagtgaaactcaaatacataggaacagaaagattacagaaatgaaagaacaaaataatcagagcattctcatcgatacctcccccaatctttattagaactatcgacctcggctgtcgacccaatttcatgcgaagatcgatatagacatcggtctaacaaaatcggatagttaaaggtcaggcaatgtcattccttaatgcttactattagcctgcaagaacatttaacatatcagtaaggacaagtagtagaagatgaagaagaagatgatcagaaaatagtagtcacctttttcaggaatttttcatgaatcttcaacgcttctttacacgcttttctcgcgtccaaattacctgcaatacctcccaatatctgcaaaccaaccgaagaaaataaacacaactaaatcgccataaaaccagagaagagtgaaatttcttaaaagtttttttttggcatatagagagagacctgaacaacgtcatctaggcctttagcttccttcaagagacgtttgttctttgtttcaagaacactagccacaacaaaaacagcaagcgtgttgtgttgctcgttctggccactctttatatattttctctcaaattttccatactgcttaagtaacctcggatcctgtcctgaggagttgttcatgttctgtggttcttcgtatgatgcaaacttgtttggattgtattccatagcccacatcagctgaaacaaaattctatctcacagtcttattatcagctcaaatcaagacaacactctaaaccctaaaagaacatgaattgggttctctcaggtgaatgaaaatcaaattcacatccccatcatcagcttatgacatcaagaaatgcggacagttattgtaaccaaagtagaaacataaacagaatcttgttacctcccaaaggtacaaagcatcaaggaaggaaaactctcttctgaacaataccatcaacattcgtatagcaaacagatactctccaccgtcgagatcctctgttgtgggaaaaagagtataacgtcttaactaaccatgagaagtgcaagagaaaaaaacaaagctcaaaatggaaaggcaaaaggaaggagtaccaagatgttgatggagccgaggatcaacggttttaatgacctgtgagagcatacccagctgagtctggacgcccattgatgttgctgttgtcctgaaattttctctctgaaattcaagaaaaaaaaacccatgaaaaaacaaaaacaaacccagagatgaaacagaacaagacagaagctttagatctttactagtcttcgcattgcacgctcaaagcaccagaaagcgtcggcttcatcttcaagtaggattatcatgggggaacatatgtcgttcattcctatacaaaatggatgattaattcctattcttttacatgttctcctgtattgaagattcagtattaagaccaaggtggacttaccctgaacatagccaatatcaggatttaaccatgtatagatggaaagaatatcccatagtcttgcttgattactttcactctcataaaagcagagataccgatccgttctaacaacatcgagacctgcaacaaaattgttatcttattagcagttctttaagagcacttaacatatttctgaattctgacacttgtacagaatgctagagaagataaacttattgagtagttaacaataccgatttgactcaacacaagcatccactggagcacacgcttgtctgttatagcggatttcacaacccattcttgattgtctactgaggattcttctaatggctgcccatcttccgcaacaactgccatcgtgacaaactttccgctaccaacaagaggaaccatattcttacattcttctttccaagcataatactgctcccttagataataagtacagcaaaattagctacgaagtgcaatgtcaagagcagaaacaatacaccagtaagcattcagtaagtaccttctgtgattcctcaacttgttccgttcttcaaaagtgctgtctggatcgtaagctcctaacaaaaactcccaaacctctcctttgattgagggatgaattccctgaaaatgtagcctagtgagcattaaagccatagaccaaaagatgagttatcacaccaagatagacttacccctcgctgtatacggcgaagaactctttccatatccaaatgtccatctccagtaaacgcagcgtgccattttctagcactaagagttttaccagcctgatcatatcccaaaatgaaatactcaaactttgaaacaaatttgattgatcaagaacatagatggtctaagaaaaagacaaacccttgatttaaatcgagtcctgggaacatctgctacacattcttctctaactggatagaaaccttgcaaatcttcacctccggatttccacataaatccacaacaaatcatacaaagcttcacttttttttctctgggtcaatccagattcagagcaaacctattatagactatcatccctgtacaaattcatcaaaacaactaacaacaatcaaaattgacccttaaaaatcttatgtagctaaaagtcaagtttctccaacaaacaaaaactccaattttaaaggaagtaccagacttatgagaatacaatctaaacattgtcccagttccggcaaaaacataacctttaagcaatcaagtttgtaccttgtcggattcaacatcatgaactagaatgctaaatcgatcttcgtgcttcgtactccgtattgatcaatcgaaattcagagaatttaaatgttggagcgaggaaaaggccctgcgtcacgacaaggtcaccgacggaggctgccgttaaacttgacggtttcaaacgacgatagttggcgtacacgttatacacttggaaacgacgtcgtcgaatttaaaggtataaattcatatgtaacacaaaattaaaactgtaacattgaattaaactcaacaaattgtcatgattacaataaagtgtgtaaaaattgatacaaaatccagagaatttgataatacatgaaaaattgggagtttcgtggaaacaaaggaccaaacaacatatgtaaagaagaatccaatttacagcaaannnnnnnnnnnnnnnnnnnnnnnnnnnngatcgaaagaagctcgaagcttctgagagcctcgtctcgtgctgttcttgaagcggctactcggtcgcggttaaaggcagatgctgtctttgactcgtatccactcacagcagctgctgcttgggttctttggaagactgatggtcggacaccgccaccgcttgaggctacgcggctcgagtcccggctctccctttgttcacctgatgagcttggtctacttcctgaggctactgctctcctcgaagcactgccgtatctggaagtgtttcttcctttctcagataccatattctgacaatatcaaataaattgatatatcaagaacgagcaagattgatttcttgaaaagtgttaaaatcactaagcacgttctataatgtaataacaatatatcaaaattttgatatatataagatgatgatattattttttaccacagcaggtttcattgaaggaatttcgtcaagagttcgatgtctggtatggttttgatggggactgggtcctctaacgttccttctcgcaaatgcttcgaccgcacctgagaatttatcgcggatgttccctactgtaagacatagacaggatcacaaaatcagaaccgaccaccgtttagcgaagaagagttatatgattcttaactgtagaaaaaagtcaagggttacctgaaatcctttcaggtttttcagcagacggtcccgcacccatccctggtttaccggtacgatgctgaagaagagatcaatacgaaacgaaagtgagtatgtatagtcatactcgatagaaaaatctacagacatgtgtactcaccctttcatgtgtactggaatgggacctggcactactctgagggtgtttcaatgcagtccagtcgaatacataatcaaactgataacctgataccgcgaatccattcgttaaaagagtgaaacatttatagaaatatcaaggaagatttcaatatctagaaaatttgacagtaactagtgagggcaatcaaagataaaaagcaattccaggcataaaaaaaaagcattggtataacaaaatgtcacaacacagaactgtactgtgaagtcccttagggaaaaaataaccaaaacagagcaaatgcaaaccttcacggataaacaagtctcggaaaagtctctttagatatgagtagtctggtttgtcttcgaatcgcagagatctgcagtattgaaagtatgatacgaattcgggtggatatgacttgcacaagacctgttaaagtatggtagaacaattaacccttcatttatgtgacaatgagatggctgatctaacttcagtcaatggtatctaagccatattatgtctttacctctataggagttgatactttcttctcgctaattctgtcatacttttgcttctttgtgccagcttttagtccctgccacggtaagctgaacccgaaaatccagaaaagttagaccagaacaaacatgtccaaagatttagtcagacaaaaacggatctgtatgcaca

SEQ ID NO: 36486 - DNA, 5653 bp, Arabidopsis thaliana landsberg
cgcctataccgatgaatcttccaaagacttatcatcagctgcaacctgtatacattacaaaggaaacaatcagcttatcaaccataccaatagcgcgcaacaagtaaagggctaatccagggactccaatttcaaaaacagaaatgaattaacacaagaatacgagacgacaatcaagtataagtaccggaacccattgctcagatgcttgagaacgtccccgataacccttatggccaccggaacccctagcttcgctgtgattcatcgatttcactcgcaggctcttttgaaaagactgtaactttagcaggttaaagtactacaactgaagcgtcaacgatgatgcccactcccttttacagacagttttttgtgcaagagagactcttgggtttctgacccaatttcgtgtacaagttagtaaaaactctccggtcgtcgtgcaccatctttggcggtgctgactcagcatgccaggtcatcgttgtataagctgacacgtggttcagatgtgtccgaattattttgggctgatgaatttatcatagtaaagcccatgggctgaaatccttttctgtaacgacaggctatgcgagttagtagagtagtactgtgtcattacatatttacatcttacaaaagcgacaagagtagattttgtcgtattttgtcatcgaccgggcccgtaaagatcaagatcaagaattatttccccgacagacagtgtttgacttcccttatcttattcggtttcatttactagagacttgaaaaagttagcctgacattcttggttctgcttctggttttcttctgctggcttcttcaggtaagtgagtaacttctacgatcaactcttatgtagtgagtgtttttacttctttttgttctgagcctcttagtagtgaccgcagccaatatatttatttttgtaatttaaaaactcactattacaggcaaattagtaaagttggcgaatcaacgcccctgaaagatttctgttttagtttctggtagagctagtaatgttgtttgattcgtaatttctttcctttatgtgtgatactgtagatagattagatggatcaaatcgttaatgtggatgagtttcaagagctggctaaacaagccctccctaagatgtactatgatttctacaatggaggagcagaggatcaacacactctcaatgaaaatgtccaagctttccgtagaatcatgtaactagtccatatccattgcctttttggtaacactataaccttgttgtgatttcctcttttacatgtgcttgattttcaggtttaggccgagggttctcgctgatgtgagcaaaatagatatgtctaccaaaatattgggttaccctatctctgctccaatcatgattgctccagcaggaaatcataagttggctcatcctgaaggtttatctagtctatcttcataaattctgttaacggtatgcagttgttggattcagaagattagtttgattgtcttttatgttaggagaaaccgctactgcgaaagctgcagctgcgtgtaatactatcatggtactaaggggttgtttagtgtaatacatgttttgtacacttttttggttttaaggtgatgaatagagtttctttttaattgttctgtgaatttcagatagtatcatacatgtcttcatgcacttttgaggagattgcttccagttgtaacgctgttcggtttcttcaaatatatgtaagttacacagtctttaatttacacctgctttacttatccttaaattgtacttccttattgtaggatttaggcctcggttcttaattcgctctgatatcttttataggtgtacaagagacgggacataactgctcaggtggtgaaaagagctgagaaagctgggtttaaggccatagttctgactgttgatgttcctagacttggtagaagggaagctgatataaagaacaagtaacactctccattactctgagtttttgggaacttatatcttgcaggaataagcttccctatcttataaaatgtagtttatgaaatgaagtttcatttttattctatagaatgatatccccgcagctgaagaatttcgaaggtttattttcaaccgaagtccgacctgtaagtagagcttgaattaaggttcatgtaaaagtgaaaccttaccagttgttgacgtgataacttttttcagagtaaaggttcaggggtacaagccttcgcctctcgtgcatttgatgcttcatttagctggaaggtgaaatactgaaatcaatctttagtccttgattacttaacaaaaagttcccatgagccatgacaatgtgagggaaattcttataacattttcactgcaaaattttaggacattgaatggttaagatctattacagagttacctattcttgtcaaagggatactcacccgagaagacggtgtgattcttgtctcatactcatgatatatattgcccgtatcaaacaatcttgaaacttcaaggcatataagagacttttctcaatgcagctcttaaggctgttgaagctggtgtagatggaataattgtatctaaccatgggggtcgccagctcgactattcccctgctacaataactgttttagaagaggtaaaccaatcaaagcttgcttttaaacaagcttattcttctcaatgaacaaacaagtcttcttatggtactacactactacaggttgttcaagttgttagaggtaggattccggttttgcttgatggaggagtaagacgagggacagatgttttcaaagccctggcacttggagcacaagctgttcttgtaagctttcaatgctatctagcatacaattttcaggttgctctctgttggtattatgacactttctggttggctgatgcagatagggaggcctatagtctatgggcttgcagctaagggtgaagatggagtgaaaaaagtgattgatatgctgaaaaatgagtttgagattactatggccctttctggctgtccaaccattgatgacgtaaccagaaaccatgttaggacagagaatgagagaattaaatctatgctctgatcctaaaaccaacagatctagtctcagagacttaatcagacagctgaagaaccgtggcaaccagcagccatgttagaagaacaaggactgaagcatggattcaattcaacactcatcttttgaaaagtacatatgataaacatattgaatgcttgtctgacacaatgatgtggttagtgcataaaatataaatataaaggaaagagctgcagcatcaatcatgagtttgatcctatctctagtactgcctaaaagttaaattcagacgacctggttgaagatttgtttcctgaagaagagccttgggggcagtatccttacgaattgatctgacgccatggaagacatttcttgatctttcaccgaatattagaacatctccagactccaagattaacgtgtctgccttgtcaacatccttctgatcaccatacaagaattcggctgaatctccaatagaaaatgatacaataggcaatcctttccggtgggactttttgctctcccctttgtcctgagccatgaaggattcaataagttgatgatgcagaaacttaaaagaacaataatacaatgaagagcaattcttacgatactgtattgaggtaaccacctttatactttaagaaatcaaaacttgttttgtcgtaaacactaacctgatggagaccaagtttcgcggtggatgtgtagaagttaacaacacatatgtcaggcaacaaaagtggtatttcatctcctccctttgtctcatttgaatttgtagcaactagggactttgattctttaattgctttctcaacaagctgactgaattcaacgggaattcgaggcggaacagaaccatcaattggtcgaatctctccatatcgacgcgtttgacagtcccagtttttgccaaggcacatcattttcaaatgcaataacccgccatcttgaaaaccaggttgatagaagcctccttcacccaaaccaagttgacgacatttgttcacaatcatcacctacaagcatttttaagaaacagagaaagcacaaatgatgcatataagatcagatagacacataaacacagaaatagtgagagagagtacttacttgattattgattgacaagtagttcttgagaagtaccattccaggtctaataacaattccactgaaacccttagctgctttctttttttctctgttcagttccagaaaggagggttttagtctcatcaccttcttcttgaggaagatatcaaaaggacttgaggagttttcatttgaagagttccctggcccatcagcctttggagctatcttatgattctcaacactagaaagctcaacattcttatcacttgtagaagacacagactcatgccaagccaacgtaacatctttcatcctattcacaagatcacaacgcattctagcgccaaacttcacatacttgttctcatattctctagagacaaacaaaccaccactaagatttatgttctttgagctagacaaagtagattgtaaaatatccttgttatctccagaaaacttcaaagtggctttcctcttttctctgtttagttgcagaatggagggttttagtcccaccagcttcttcttgagaaagatgtcagaaggtctcgtgttgctttcatttgaagagtttcctgcagtataatgatcttcaacactaaaatgctcatccttctcaaaaatgctgtaagacatatgctcctggcaagacaacgagaaatttatcaaactcctcagttccacaatatgtcgtaaggcttcatagcactatccttgttcaaacattctctagcgacaaatgaactgtaatcagaagattcatacaaagaagacctatcaactgcaacttgtaaattaccaatgaagatctaatcaccaaccataacattagcacgcaacaaagttacaaaggtaagaataatcaaaggattaaaaaaaagggtttaaaaacacacaaaaacacttaaaaaagatgacattatataatataactaccgggctttctattctctgacgacgacgatacacattagaggcttccccgtgattcgtcgcggaacataggcatgaccattgagtaattggtcgttgccatttttatagacatatatgttctgaggtaaaaatttgcaacttttcaagaaacgcttcggtctctgagactgagcattggtgtcagaagagaagaaataaaagctcccgttggaaaatggctctctgaaatgatgatgactcggtacgccacgtcctcattgagttgaatagtcaacgtttactgtgggcgaagactctagacgacttagagggttagcaggtgttttgtcgttttctgtcttggtctccgacaggaccgactctgttctcgtgttcttttttccctgtcatttccagatttcataaagctaaaagatatctaatttctttgtttaccagagacttaaactggtttctgtatcttttactgggttctttcagatatgtaagtacttctaaaatcaacttccacttctacaatggttttagttctgag

SEQ ID NO: 36487 - DNA, 5243 bp, Arabidopsis thaliana landsberg
cactcattacattatttaatgaatctgagggttgtgttagttttattaatatgttattatatgattaataggatgggacttcgaactatatgaaaggcttggttctgctcttgtgttattttgtcatagcggcctgcttctttgtctctaactcaccctcaagtaagcttctcttttcattatgactgttttctacgatgaataaatacactatgatattcatttgctttgtatttctccaattgcagccgaaaccaatacaactaatcatacaataacgaaaaggtaagttatgtttaagggtatcaattagtgcattaacttggttcttcttattgcccatccatgcaccatagtaaacaaaaatgtaacattttaagaaatctatcaaatatattgatgaatgttagttttaactgtcaactggcaatcatgataatcatagaaacccaacttctagaaagttaaatcatttttagattctcggactacattatatatatatatattatgatatatggttcttgtttattttttttaattgcaggtaactcgaatattgttttgtctttcttttagtgtattgttgttttctttgattacatatttagtttttgaattattgtgtaagtatatatatttttaagaatttgttttttacatcatttttttttaaggaatatgtaaattaaacgtaatagataattctaacataatcaaaccttgttcatacatgtcagaaatgcatgtctatataggaatacaattaaattaaaactaaaaatataaatgccttctcatggaattttttgattcgtatcagaagatatttggcaggaatttattttcttagtgattaaaaaataaaaaacaaatgttcgaagtatcggagaaggcccaactgagcccactagtttaaattgtactttgtgattcccttgggccttgtggatcccattaagtactaactgttatttacaagaatgccatcatcggaggccatttataaattttggactcaattttgttgcaaataaaaatctgaaattctcaggcgagattccggaagcaaaacattcctaaatttcgccaagtgatccgccatgggagaagagaagtctctgcttcagttccgtagttttccttcactcaagacctctgatttcgctctcaccgaagaaccttcatggaggctggagaacaacgtgtcgtcgaatcgccggagaggaaacaagagaagcggtggcgtttttaccaattttgcgtccctttccgtagcgattaggagagatcggagagaatctacatttaacggtcgtaatggcggcggaggcggagcgttcgcgtcggtttcggtggtgattccgaaggaagaggatgaattcgcgcctacctcggcccagctgttgaaaaaccccattgctttactgtcgatagtaccgaaagacgccgcactattcttcgccggagcgttcgccggagccgccgcaaagtcagtgacggcaccgcttgaccgaataaagctcctaatgcaggtaagggctctctctcctctccttctcaacaacttttaaggttttctggcacgtgtgttttctccattttaaaaagtaaaataaaaataaaactggtgactggtgagcacaacgaatacgctgtcgtttcggctagttgttgcttgtgggacattgttgattttcctcttcttttttcttttcctaagagactcttccatgacatggtctatgataaaattgatcatgtatttatatctcattatttcaagccaagccccttgaggggaatctatggagtatttgtgattgtgttcttgttacaggcttgtagtaatgtacattgattcttaaatgatgtcttattaattcatagacacatggtgttcgagctgggcaacaaagtgctaagaaggctattggtttcattgaggtatatatactctcaatcgtgtaatttttaagaggattagttagttgttcttattgtaaaagtcttgttgatttggttttgtttgggatgactacaggccattactcttatcggaaaggaagaaggtattaaaggttattggaaaggaaatctacctcaggtacgtcacacaatttcttgcatccttttggaaagaatggtgttgaattttgtagagtttgattgcacataatcttagtctgaatgttccaggtgataaggattgtaccttatagcgcagtccagttgtttgcatatgaaacatacaaggtatataatctttctatatctgattctggtttcgtttcgaaagtttttgaaaccgtgtctaatcagtaatcactttgttctgtacattctgccttttttatgttgtttagaaactcttcagggggaaagacggtcaattgtcagtcctcggaaggctcggtgctggtgcttgtgctggcatgacgtctactctggtaagtaacgttgtttataggcctgagtgagtttgtctaatcgtaaagtaacttaagactcttactacttaatgcagattacataccctttagatgtgctgagattgaggttagctgttgaaccaggttatcgaaccatgtcccaggtatattcatcgcattatacaccaactttctgttccataaattaatcaggttttaaagcagacatgtcatatctaggttgccttgaacatgctgcgggaggaaggagttgcatcattctacaacggtctaggtccttcgcttttaagtatagctccttacattgccatcaacttctgcgtctttgatctgtaagtctactaacagttcaaacattacccctgaatatttttaactagattgtttacatattcgataatacaatatatgcacagggtaaagaaatctctgccagagaagtatcaacaaaagacacaatcatctttgttaacagcagtagtagctgctgctattgctactggtacttgctatccattggataccattagaagacagatgcaattgaagggtactccatataaatcggtattagacgctttctcaggtaggaacaaaaacatcattatctgcttttattcttccagtttccggtgactgaccttattaaacccttaaaccgttgtgcaggtatcattgcgcgtgaaggagttgttggcttgtaccgtggctttgtccccaatgcactcaaaagcatgccaaacagcaggtagttatagttttgataaaacaagttcattttttcatttttcttgtttcagtattaacattttggaatcctctttttgtattgtttcagtattaagcttacaacattcgacatcgtcaagaaactcatagcagcgagtgagaaggagatccaaagaatcgcggatgataaccgcaagaaagcaagtcctaacacaaccgatgaacaaacctgaagacgcaattttggatttccacaaggtcatttttgcccgttatcttatgacctttgtttgtgtgttttgtaatttggaatgtaataagttgtatgttctcctcataattcaaaatgtgcttgaattgaatcctgaagccagagagggtaataaatggctgtttgtgttacgtttggtcgcgctggttttgtataaaccgaatttaaccgggttgctacactcgaaattatatcgttttctggaattgggtcatctatctatttcgcggttgcagagagaagttgtcgacgacggtgtcttttgtatcctcctcctccagaccaacaaactcagaaccctaagccctaactccgtaaaatcattttcgtcgccatgtactgtactttgcgatttcctttgcctcttcacattccccaaactcgaacaatgacgtcctgtcagccgaaacgacgccgtgttgagcacttgcggtgctctgctcagcctagtagtattcgtgaagatgacgaagatgccgatgataggaggtgaccatcgattctctttatttaacttgttcctgtttgattctaattgaattattgtttttctgcaaatgtgatgttgatagagttggagttgaaagacgaatttcgattgtggtggagagatacggaaatggcacttcaaaaaggtggtcaacttaggtttctgttcttatcttattacccgaagaatcatctgtataaacacactacctcttgttccttcttgtgcagatattttctagatgatgatgattcccctttacaaggcattctcgaggagcgtgaaactaagcctgataacaattctcagagctctaattcctccgaaacgaacattctttggcttccagatgttgtcaaggattttgttttcccctcaggctttcctggtacttgtacttgtcagcttcaaattccatatgtatctttctgtcatcttcctttgtcaggactctcagaatgttaagcttgcagaggttttgtagatccaattatgattcagtgagttaatctcgtaaaatcacattgtgcagggtctgtttcagatgattacttggactatatgctgtggcagttcccaaccaatattactggctggatttgtaatgtattagtcacgtcaagtcttctcaaggcatgttcgggaatcccctaaattattgctaaggtcttcttatgactggacttcttctagagacaaatgttgagaatgctctgcaattttttttcaaaattcttgtgctacaatgcaggcggttggggttggctctttctcaggaacttctgctgccgctactgctgctgcttctgctgcagccatcaggtttactttcattctaatgcaaactttgtttgtttgctgctgcatattttttttgttcttatagtttttccaaaccatgtgttgtctcttcagatgggtgtccaaggatggaattggagctcttggccgtcttcttattggtagggaaaccatcggaacgttaataaatgttcatggagttatctaatatcctctacaataagaagggtatgttttccaggtggacgttttggtagtctttttgatgatgatcctaagcaatggcgcatgtatgcagattttattggcagtgctggaaggtttgtagtacaggatttaaattcttggtgagccatatttggttaaaactgtgtataagaatcacacctttttttttttttttctctctttttttcgtagattctttgatttggcaacccagctatatccatcccagttcctactgttggcatccacgggaaatcttgccaaggtgtct

SEQ ID NO: 36488 - DNA, 4111 bp, Arabidopsis thaliana landsberg
actttgtggcttgtcatgagtgtagtttcccgatctgcaaagcttgtcttgagtatgaattcaaagaaggtcgaagaatttgcttgcgttgcggcaatcctacgaatggtacaattataaatttacaaactttatacaaaagtttgattttttggttaaagagtatttataacttgttttgttttgttttgctttcatagagaatgtgtttgatgatgttgagacaaagacatctaaaactcaatccattgttccaacacagaccaataacacttctcaggtttgtgtgcttagctaagattagttgcttttatgtcttaattagattttacaaatttgagaacatttcttgactttttcaggattcagggattcatgctagacatataagtacagtctcaacaatagacagtggtaagaactaagaaacaaagccaaaatctttgtatacatttggtgaggttattaatagtttaactaacttgggtattgttgtttcttcctgaagaactgaatgatgaatatggcaatccaatttggaagaacagagtggagagctggaaagacaagaaagacaagaagagcaagaagaagaagaaagatccaaaagcaacaaaagctgaacaacaagacgctcaggttcctacccaacaacacatggaagatatgccaccgtaagcacatcctcgtacaaatctaatatacgttcaccaaaacgtatgagacgttgatttggtctctgccatttgtattctcaggaacacagaatctggtgctacagatgtgctttcggttgtgattcctatcccgagaacaaagatcacttcatacaggatcgttatcatcatgcggttgatcatcttggctctgttttttaactaccgtatcactcatcctgtcgatagtgcttacggtttatggctaacatctgtgatatgtgagatatggtttgctgtttcttgggtgttggatcagtttcctaagtggtctcctattaaccgagaaacttacatcgatcggttatccgcaaggtacgtagaaccgttatatgcttcattagtacaaatctttaagacttatgaatcatattcaaaactatgcagatttgaaagagaaggagagcaatcacagcttgcagctgtagatttctttgttagtacggtagatccgttgaaggagccacctttgatcactgcaaacacggttctttcgatcctcgcgcttgattatccggtggataaagtctcttgctatgtatctgatgatggtgctgcaatgctttcttttgagtctttggttgagacagcagattttgctaggaaatgggtacctttctgtaaaaagtactccatcgagccacgagctcccgagttttacttctcgcttaaaatcgattacttgagggataaagttcaaccttcttttgtgaaagaacgtagagccatgaaagtaagtaagcaagggctttaaaaccttaaattaatctcatatagcgttaaccgatgattgaattgaaaacttaatgtgtaatttctcttcttgtagagagattatgaagagtttaaaataagaatgaatgctttagtcgccaaggctctaaactcaccacaagaaggatggacaatgcaagatggaacatcttggcccgggaacaacactcgtgaccatcccgggatgattcaggtttgctagctaaaacatttgacctgaaatgctctgtcttttcttgttagtcacgtaatttctttcttgcaggtttttcttggatatagcggtgctcgcgacattgaaggaaatgaacttccaagattagtttacgtctctagggagaagagacctggttatcagcatcacaaaaaggccggggcagagaacgcattggtaaacttcaaaactttttcttttatcgttcaatttagcacaatcctaatgattttgttctttgtaggtgagggtgtctgcggttttaacgaatgctccattcattcttaaccttgattgtgatcactacgtcaacaatagcaaagccgtgcgtgaagcaatgtgctttttaatggatcctgttgttggtcaagacgtttgctttgttcagttcccacagagatttgatggaatcgacaagagtgatcgatatgctaaccgcaacattgttttcttcgatgtaagttatctcatactcataacttcaagcaaagttttgagatttcttatgatattttgtggttttgatatgatgttttcaggttaatatgagagggcttgatgggattcaaggtccagtttatgttggtacaggtactgtctttagaagacaagcactttacggatacagtccaccttcaaaaccgaggattttaccgcaatcttcatcatcgtcgtgttgctgtctaaccaagaagaaacaaccccaagatcctgccgagatttacaaagacgcaaagcgagaagaacttgatgcagcaatctttaatcttggggacctagacaactacgatgaatacgacagatcaatgctgatttcacaaacaagctttgagaaaacgtttggtctctctacggttttcatcgagtctactcttatggaaaatggcggtgttcccgactctgtaaacccgtcaacgcttatcaaagaagctattcatgtcattagttgtggatacgaagagaaaaccgaatggggaaaagaagtaagtgccttgttaactatacaatctcttgtgagtaaatcttataacctatcgttctgttttcgcagatcggatggatttacgggtcgatcacggaagacattttgacgggtttcaagatgcattgtcgcggatggaggtcgatttactgtatgccattaagaccagcttttaaaggttctgcaccaatcaatctatcagataggcttcacccagctctacgttgggctcttggctcggttgagatcttccttagccgacattgtcctttgtggtacggttgcagcggaggccgcctcaagttactccagagattagcttatataaacactattgtctacccattcacttctttgcctcttgttgcttactgtactcttccagctatttgccttcttaccggcaaatttatcatcccaacggtaactttttcatactactaattactttggttaggttacagcaagattgagaatttgatctttgtttctgttctttattgcagctatcaaacctagcaagcatgctgtttctaggtctctttatatcaatcatcttaacgagtgtcctcgagcttcgatggagcggagtcagtatcgaagacttatggagaaacgaacagttttgggttattggaggtgtctcagctcatctctttgccgttttccaaggattcctcaaaatgctagctggtctcgacacaaatttcacagtcacatcgaaaaccgcagatgatttagaattcggtgagctttacatcgtcaaatggacaactctcttgatccctccgacttcacttcttataattaacttggtcggagtcgtcgctggattctctgatgctcttaacaaaggttatgaagcttggggacctttgtttgggaaggtctttttcgccttttgggtgattcttcatctttatccattcctcaaaggtcttatgggaagacaaaacagaacacctactattgttattctctggtctatcttgcttgcttctgtgttttcacttgtttgggttcgtatcaaccctttcgtctccaaaaccgatacgacttccctttctctgaactgtcttttgatcgattgctaagagaagatacgttatgtttgtatttcgaaagattgatcatatgtgttttggttgttttataattttcatatggttgcttgagccacaagttagtaatgttcttactttagcaacaagtcttggcgggttccgcaagttaggtttctattgtttcaacatcaacatgtttttaaaaagcaaaatattttatatcttttcaaattattgaagtttggtggaatctgtctcgtgtaaaaagacaaacaaaaaacaacaaaactgaaacaagcaaatagaaaaatacaaatcagagtccatgaacaaaagcatcaatgtcaggctgaggaatgtc

SEQ ID NO: 36489 - DNA, 2029 bp, Arabidopsis thaliana landsberg
  unsure (1)..(2029): unsure at all n locations
gaactttctcttgatctgcccaatatgactccagaaataaggcaaacttcagaagttctctttgcccgcaatgtagccaggtagttccttggatttttttgttggctgttagttttttaacttgatctaagtattgaaaccagtcgtgcaaaacagagcttgcagaactggcaacttcatcgccttctttcgccttgcacggaaagcaagctatcttcaagcatgtctaatgcatgctcatttttcgaaagtaagggtgtatttgtggtgtgggttcaaaagctattattcgtaccatgttgatgtgtgattatttcactgagatttaaacttttattctgtttcatcagctaagaactcaggcgcttgcctctctgcactcgggtctccaaattaatcagggtctcccagtttcagatatgtcaaattggatagggatggaggtatttcttccatcactctgttacttggtgtgtatcccttttttggtttgtcacagagaagttgttagagatcttacatttttcttctggtaatggaatttaggaagaggacatagaagccctgttggagtaccatgggttttcgataaaggtttttgaagagccatacatggtaaaaaatgacctatttctccatgctgataaggattacaaaacaaaatgctcaaaacttgttcacatgaaaaagtcaagaaccatagtggaagatgtttctgctcccacagtagtggaagatgtttctactccctttccattgccttccttgatcacagaagcaactatcggaaatcaacagtgtattaccgcccataaacacgaaatgccgcctgcgagaagtcttaagaaacaaacatcaatgcgtctatttgataaagaagtggctgactccaagacttccctcttagcagaggaggacaagccaatggggacatttgttatgaatccaccagggccattcgttataaatccagtggtgcatcaagagaaacaaaatgaccttacatcagctggtggatttcattctcccgtgaagctatattctccttttggttcccctaaatttcctcaaactaaatcgtcgaatttggagaaacaacctaatgacgatcgcatcggtatgtctcctggggaaattaaattttcaatcataggggatgtatatacgaatcatgnnnnnnnnnnnnnnnnnnnnnnnnnnccgaagtctatgccaatggagattatgcctgtaactaccattgcagagtgtccgacaagtgtagaaaacaaatatgctttggaagaatcagtaccggaggctgcaatgatttgtaccttggaaaaggagttcaatgacattgacgaggaagacgaggatgaggatggggtcatcttaaatcagtatgatgaggaagtggcgaaagcaaaactcaagttgatcataaggtttgccagctcctcatgcaaattgacaattgatttaagttatttttaaattttctgtaataatatttgcagattatggaagcggtggtcttcacgtcaaagtgaattgcgggagcgtcgacagttagcagcagctgctgcactgaattcactatccctgggtactcctatccgatttagcaaaactgatgtaagtttcagttttcttccccataacatgctgatcatcagtcttttgtcaaggaagcaaaattcttaaaaggcatgtactattgaggttctaatatcagttctctctttatacaacagcaatcgagggcgtgtggtgagtttaacattgatcaagccatgaggaggagatttgaagaacgtgagaaatcatggtcaaggctgaatatttctgatgtgatagctgatatactagttggaaggaatccagaatcaaaatgcataagctggaaggtcgtcttatgtactcagactaaatcagtaaactcatcatcttctgcaagtcaggttacgcattcagcagccagtcgatggttatcatcaaagcttatgcctcatgcagaacatagtagtctcaacgatgataatctgct

SEQ ID NO: 36490 - DNA, 5750 bp, Arabidopsis thaliana landsberg
  unsure (1)..(5750): unsure at all n locations
aacgagactgcttttagtttgaagcaattgttgacattagtgaagtaaagatcactttttctagttttttgtttgaatatttcaatctgaaacctttttagaaattgaagatctttttagatttcgggtatttgatgttctaaacatggataatatctgcatcttgaccagagcaaacaaacagagtatatgattatgaaaattgaataccttgtataacaagtcactgagatatgaaaattgcataccttagaagcttctctagaagctctccgatcatcactttttgatctcatttcacctgtccaagaacagtgtttttcggtgattgtagtattcgatctataaaagctacaagctttttttatcatcctttcttttttgtctcggacttttggcaacacgctgtcttttgtcatccttcaactttccctcttcttcttccctctgtctcttcttctcagctattgctgcctccatcttctgcttcaaagtcatttctgactcctttttctttcggtctaaacggaaccgcttttgactagggtttcatttccctgtcctctcaaaccaaagggtgatacacaactagctccaacacatgacaaacggtcagaattttctgatacaacttggtgatcttcatcaatttgactcctctctacacttggctgttctggtttgaaggagcacgagccatgactcatcgatccagtttccttgagtaaataactctgtaaacatccatgttctggttaattgcacatcatatagaacaagatanatcattatggaactaagagcttgaactgtactgtagtttcatctcttggcggacaatcagtagagtcataaaaataacgacacacaaggatgagcactactaatctgagacttaattaggatttcagattttgaccgataatttttgtggagctttttatatacatgtgtagcttgagagatgcttaatactacgacacttagacctagaatgagattttctcattagtaataacaatagtacagcttttaattgaaggtttaattgtctatttcccttttagagcatggaacgaagatatctttttttttttaatgagcgattaaaacttcaggagaaagaggttactatttagaagacattaaacataagaatacagagaaataatgaacagacctcttcaaatcgtaactcagctgacgatgcagatccaatcattttttgtaactcaacactatagtgatgtgaagatgcagatccaatcaacttctgtaactcaacgtcatagttatcgacgttgtgacatgcggcttcctccctatgatgtactgcttctctaacataatctgactcgagaatgtctccctgcaacattataaaatcccatgattcaaaaagcatcttaattacatttagcttttgacccataacttttatggaggtttttatatacatgtgtagcttgagaggtgcttaatactacgacacttagacctagaatgagattttctcattacagtaataacaatagtacagcttataattgatggtataattgtctatttcccttttagagcatggaatgaagatatctttgtttttttatgagcgattaaaacttcaggagaaagagattactatttagaagacattatacataagaatacagagaaataatgaacatacctcttcaaatcgtaactcagctgacgatgcagatccaatcattttttgtaactcaacactatagtgatgtgaagatgcagatccaatcaacttctgtaactcaacgtcatagttatcgacgttgtgacatgcggcttcctccctatgatgtactgcttccctaacataatctgactcgagaatgtctccctgcaacatataaaatcccatgattcaaaaagcatcttaattacatttagaaggaaagagcagttaaagactctcatatattgagctgtcccaagacttagggaaagaatattcacccctggacttgacgaaagctctcttctagttggtttttccaggattcttctccgcttattctgccgcatggaaccccccatgggggaactagagcagaaaaattcttgaatcgggctctctagatcatgacattcatctgcttctgtacatgttacatctcttttaattgggggaacagctttttcagaggatgtttcatgttgaggtctctttgtcaatgcatctatatggccagtgaatgtatttgactctgtaggttcattctctcccacttttaagccagggtggcttgcatacgattccatttctatgtttaacccattgtgatcttcaatgtcattcatttcattgtttgccgataaatttactccagaatcagtgagagatgggacatcaaacacccttgcggtgggtgctggggtggggaccttctccatgcttgatttttctcgactattctctggaacctcatcgaagttgtccacaaaaacagggcgatcaggggttctcagcaatgaatttccttctctaacttcaagttgtttgtcagccgatttatgattagacccatcagaaagagccttgtagtcatttgctgattcctcttctatgagtgagcttcttgccctactaattcttccatggctttggttactccccacttcggtcaatgaacccagtggctgtacttccttggacccacaactgatatcacatcttttagaatggtcaatcaatttttccggagtaccactttcattaagaatagattccaccaccactggcaaaactaccgtgatgtcagtttggcttaaacttctagattttgaaataccgctaatttcagttgactcaccattgttatcttcctccactaataaagcttcgccattaacagtaacgggcttcaacaatacactttcatcgtctgattgcttgactgagtgtctcgactgcagttcaattgaagaggactcaacaaagctcaaaagctcgatctgggatatagagtcttggattgcacccgcaaatgtggtctcatctggggagataacagtttggcttaccctttcagcacttgaacatatgttagtgtcaacacattcacccgtttcttttgattgatcgctgctagtaatattttcaactactaagccttcagcatcaacactagagggattcagtgaatcttttacatggctaccttgcagtactggaattgaatctcttggctccaagttaattgaagaagactcaacagagcctgaatgctcggtcttggatctattttctcgagcattacttctagatcttgcaatgatttcagactgaaagatgctcgttcccgcatctgtcaccatagaaacttcactagtcgtagttattgcttgaggtaattctacttcatgatcagcccagtgagagggatttgaatttgttaacagaaaattaccagaaaaggagttgcttgatttttgatgtttcctcttggagttatcttgaattgagcttttagatcttgtacttccatcgagataagctgtttcatagcaacttctgcttttgggatcatccacttgctcatctactttgccagacgcttcatcaattgtctcaatggactgtaatatatcaatgtcattcacatgaccagactcgagtagacattctggtacaatagaagcataagcatcaccacttgaagatattgacactgaatccacttcatgatgcaaggtaaaagactctgtaggtacactaatcttaatacattgatctcctcttttaccttgagaattactgttctccacttcttctcgacactcttcatcattttcatcatgcttaaataactttatctcactaacactatcagaccttaatgaagcaatcccaaagcctatatcaccacccggagaaggtttgagctcatttctactgtttgaacggctttttgacgcttttgcactactacgaagctccaaagctttttgacgtgaccttgatctctgcatcttagcaagtgataatccagggtcaatgcaagtgtctggttcaatttcctcttgacaataatcaagagatgaagatttccgcttacaaccagtagttgagacacatttgggaaccttttccccttggctacatccaggagatgtagcatcaagattagtttcaactctctgattcttggagtgttcgggagatgaacaactttgattctctctgcaatcgattgagacactttctggcaatctctctttctcatgtacatctctaggagatgcaatattaacatcctgctcatgagaatgattcgaaacttgtctgactaagttgtgtgagaggttgtgttgcggttcctctacaagcaactgctcttctagcgggttatttaccacagaggtcaggtcttgtcttactacattgtcagctagaaacctgacagcccgttggtatgaaaagggacgactgctaggacaaacgatggaaggtcttgatgaaggaaatagaagttctgatataatctcctccttatttaactctgtatacatataaacaaacatcacaataagaatcgcaaacagaaactcttctattcaatcgtaactgaaacagatatacacgcaatgtacgttaatactagccttaacaaaatgctccttaacttatcacagaaaaatcaacatcaaagtgtgattatgaaccctaacaccatttctaatctttcaattccatcttctcacagtaattcgacatcaaatttatggtaatacgctttataaactttcaatccatttcccgtttaagtatcaaacaacttcgcagcatcattactcaatagccactaagactactaatcaattttgctctaattagccaaacaaatctacatttaccatcacggacaagaaattgagcactaaaaatcagatttaacaactaccggaagtttgggaaggtagagacggagaccagagccacgacggaggagatactccggcgagtaggcatttggaagctaaatgctggtcatagagatctacttgttgctgaacctgctcgacgattcgcctcttcctctcaaagatctgaacgaaaagattctcaatcttcacattcgccgtcttccccctcggattctccttgacggaaaacatcgccgacgacctactctagagatagagcgagagagagagagagactgttagcgcggatttgaatttcaaaattttggggataaagatttcattttcgctttcgtttttcactgaaaaaaatagaatgaagcttttttagcttttttaaccttcgttacctgaacgatgcgtttagttttaaacggcttcgtattgtgtctaatatctatcttctcgttaacgtttcgttttaacaaacctttttcatacgatgtcgtttctctctatcttttaatactttcgccgtcgtcgtcttattttcgctgtccctgatcattcgccggagctaccattaagagactgagattcaatcatcagagttcaatggatgtcccgttaccagtcgagaaattatcttatggatcaaacactgagtaaattttgaagcttattctcgattttgattcccttcatttgtcttttttgtgaaaattctgattttgtaaatttgatctgcttggttacttatgatgatgagattctcaccaggtttattattaaaaattccctccgggttggttgaaatatttttcaattggtttggggcgggaaaa

SEQ ID NO: 36491 - DNA, 1236 bp, Arabidopsis thaliana landsberg
aacggttctcaaactaaacactccattaaatttgaataacattgagctaattgaggtcaactaaacataaataataacttatttacaagaaacaatatgtcaaagaaacaaagttcatcaccttacttgttttgactaaataagtcatcaatttggtattgtaaggaaagattagagccaaaggtactttaatcttaacactcctttggatttgaataatactgaaactatttctaccacgtgattatgtatttttacttgatatataagaaatcaataattttgtttcttattctttctacgttgaagaacattgacgtacggtgatgccgtattgatgaacacctccagtgattacttatggtggtggtgatgaaactactctaacgtggagatgatgaagatgaatccgacgtgatatgatgctgatctggcgatgacgaattcaaatccgattgttaaccacacaagtttttttatgaacaagaagtttgaagagcgaccaagacgtgtcttttattgatggagatacaactacgatgatgtatttttcattttgttctacactaactacaaacatgatggtgactactttaacaccacaaccggatataaacgtcgatttgaaccttacgatcaagtataaacatcgatttaaactatacgatttggtataaatgtcgatgaactaaccgctaggttttatagccgatttgaccccacgaccgggtataaaagttgatgactcgacagccgggtataaaaccgctattataaaggcatgtccaatttcacatgtgttaccacatatgagcttgccggaagtattggaaaacatgtgacacaatatatatcatagatatgggataaaagaataaatgatcaaacatatgaagttttaatatatatccacattctttacaatcatagactttatcttcaatccactggcataatcccatcaagattgatttatataaatttgatttatcttttctcgaaatcccagcgagatcccaaaacatggaggccggccgagaagaaaacacaatatgtttcatgagttatatagttaatttggagaggtataaatgaaaaggtctttgaggatgtagttagggaaccacccgatataattagtcatgtgttaagtgacaataatttttggaaaagcccaaattatccacatacgtatatttaatgagatctagttacttagtaagaagtccttgaaag

SEQ ID NO: 36492 - DNA, 1530 bp, Arabidopsis thaliana landsberg
atttcatcaactatttgtttaaatatttgattcttaaagtacaattaatttatcaattctagaatactgaaacttgaaatattggaaatgtttcatttaatatagtgtccacaaaatttttacatttgaatcactattttagtattcaagtttgataaccaaacaatatttataacagaacgataaattgttattcaaacaaactacgcatcgtgcatatattaacctagttggttaatataatgtaatgatgcatgtctcatcaattccttttcttttcgctcaataattttctgaaccattttgccgatttctttggatatctcttacgtccatcgttgaaatccacgtaaactagtccaaatcggactgagtagcccgttgcccattcaaaattatctagcaaagaccacgcaaagaatcctttaacattggctccaattgatatagcgtcttgaaccatcttcaaatgttgagcgtagtaatcgatcctctcactatctttaaggtcgattttaccggtactagcttcatctctaccattctctgttatatacatgacaggatccttgaacttgtattttgcatagagaaggagatcacgaattccttttggatatatcaaaagccaatctgatgctgcctttggaccgataggcactccttctctttcacctgtgacgctagcacaaggatcagagaataatgtaacgttttcgcttgagcaaggaacatccttagcgtaagaagatgagtaataatttatgccaatgaaatcatatgatcccttcaacattttagattgttttgcagtaaatgtaggtaagcgaccgccttttacgtagttgaccatgtcaatcgggtatttaccggttacaagcggctccatgaaatagtcgaatgtgaaggccatagctcttgccgcagctaacctatcttcagctgattctgaataaggtaagttccaacccgcgtttaaggcgataccaacttgacctttttgagatgccttatatttttctctgtatactttgactgcttctccatgtgcaagaatgaggttgtgaccaacaatataaggctcggtagctccatttcccgcggtgcagttagggtttgtgaattttgaacaccttcctggagccattacaccagcaacatatccttgttgcacaactgttaatggctcgttcaatgtcatccaatgcttcactcgatctccaaaattcttgaaacaaatatccgcataatcacggaaatcattcacaatctccgcgccaaggaatcctccataagcatcttcaaggctttgcggtgtgtcccagtgaaaaatggtggcgaatggcttaattcctttagacaaaagctcattgatcaagttgttgtaatagtcaataccagcttggttgattcctccttttagattcccacgtggcaagatcctcgaccacgagatggagaatctataggcatcgaaaccaatttgatgtagtaaacccacatcttccttgtgaagatggtaagaatcac

SEQ ID NO: 36493 - DNA, 1285 bp, Arabidopsis thaliana landsberg
tcaatatagaccaataggggtgtggctaacattttaatcacaactgtttcaaagggttattaaaacgtgcatctttttagtttgtatcttgcttctatcaataaaaatagtcatagacacacaataataagagcatgattaattatttatgtatatgtaaatgacataattacatataaataatatgtgatttcagaaaactgcttggagtgaagaagaagatcaaattttgattgaagcacacaaagtacttggtaccaaatgggtcgagatcgcacagcaacttccggggaggagcgataacaatattaagaaccattggaacaccacaaagcgtcgggtgcaaaataaaagaggtggaactgtcaaccctgtcggcaataacatccttgaaaactacataaggtgtatcacaatcaacaacgaagattttcttaagaccgatggatcttatggtgaaccgacaaacattgagagtgatgatgactctaaagatatgttatatggggagatgaatttgagtctagagactataacgacgcagaccaccaaaccattgaccaatgcttctacaacattaccttatgttccgatgccagaagagaattatactgtggaggattgtgaatcactggaggacattctagaggtgctgcgttggtgggaataatttccagtgaaggaaatttctttgataatatgatattttcttactatcgtgtaagataatatatctatctatctatctattttgttaaaagcgatttataatttacaccgttttggtgtatatttctatctatctttttacaagacctatatatgttatgttatggtggtgtactattttaagtgagcgacatagtattttcttcatatagctaattaatcaacaacaatttcccaacttacaactatttgcgtactttaaacttatattgaaagagaactacaaattatttttttgcacaagagaattatggtcttcggatcaataatttctctagatataatatgtaaagcgaaccctataatttgtaaaatccatgatttgatataattttcttttaaaattgtgaattggcagacaaaaaaaacattacattttgatttaaattcataactttgacttggtaaggaaacaccatgattcattttttgtcatttgttacatcatcactagaaatatttgatctaactttattatgataatagactacatactacatatgcagaaaaataaaaaacactacatatttcagcgtgtttaaactgtaaccatatc

SEQ ID NO: 36494 - DNA, 2532 bp, Arabidopsis thaliana landsberg
ctatttcattctcaatatcaactaagaggtgctgcaggtccacgattagcttcttgttctctaatacagatccttcaagagcctcttccacttgctgcattatatcagcatatctcggacttttttgtagctttgaaacactatcgagatcatcgtaggtaagggtatttaattttgtcatgtccaaaccaatatcttcaagagttgcctacaacaaaacagatccaacgtatttagtttgcaagtttcaagcacagaccaaagcagagaggatttaaacaaatacagcgaaaaaaggaagaagcaatatctaattatctccgaaaccctataattgaaattgacgatgaaacttaagagtcaagacaatggcatatcaaaacaactggtgaagaaactacgattaatgaatgaaatagacaacttcagagaggtgtttggttaatgaaacgcttaccgtagcttcttcaatttggaacgcaaaagtttagtgattctcttgcagttagattaaatggaaatagaaatcatcatcgttcggcaaatccctaatatatagagaagtcaataagtcggcaatcacaattgggccaatttaggtgggccttttcgtatttaacttggtaaatgggcctctgcaaattcccgtttaggaatcatatcatcttactattacttttctagaaatattctatttacaatagttactcttttgagttcctttacttattttgataaatacatttatataaagaaaattctaaatcaactacttttaaatagcaaaaagttaataattttttttgcaacaacaaaaaaaagaagctaatctaaaacgaatagtcactacaatttcgttctaggtaatagatgggacaatgataccgtatagaagtttttatgtaataaaattgtaatgatcaatggcttcaatgccaagaagttttaacaattaacatacacatataatctggaaaaagagagaaagaaggaaagttcaaatcttcgttcaaacatcaattagacaaatatagaagtttcaaacgttggttacagctttattgtttgagcttttgaaatagaagcagcaaagttgaagttttgaattaacaaaaagaaatcaaagaagttggagaggaatcatcaacatgagagaatgaagaaagatgagtcaaagtgtctttttttatctcaaaagagttttatatgttccggtagctttctttcttaagagaaggcaaaagcaggagtggtcttgaaatcgagctcccagagatcaaacgttcctttgacgaaattgtagtgacctcctcttattgcaagtgtgttcttcaccacctcagctctcacgaatgggtacgaaagcaagtttccaagcgatacgttcacagcttcctgcacaagataacacatttattgataagccatttctcaagaacataagtaaacagagcaaagatagttattattaccttctcacacttgttgcattgatcatcgtagctcaagtctttatgttcctccttgatcttgttcctcgctgatgcgcctatcttcacccaattttcaatgaagtcactgccattgtttagaggatttccatcgtgttagagatcgattaatcttatcatctcaaagactcaaacttatcccacaagaaagtcatatatcgaacaatcttgattcacaactcaggctaaatcaagattaatgagttagtaattacctttgagttggggcagcatcatcttcaatggacatgagtcccttaataccaccacagcagctatggcctatcaccaaaatgttctccacctacaaataaattgatactattaaaaaaagtgaactgttgactctgaataaaaaagtagttgcaagttgatgcattaagacccatttctaatatcgaacattatccaaaaatgattcaaaaaagataatcctagtggctaaaaggaaaaggagaacagggtttaggtggatgaaatgggtccaaataacagagtgactagacatcaacttttagtaagaaccatgtgcaagcaaaaatgcataacaacgacttaaaataatgagcactatgaaaagagccaaactttggatgattactgataagtgataacttataagaatactaacaaagtttgcttatttattaattcaatctaagtgtctatccttaaaaatagggatattttgttcatgtaccttgagatgtacaactgcgtattcaatggcggggccaactccagagtgtctcttctgataaattatcaaaaccactttggtgttagttatttgatctcagacaaaaacaagaatgaaatggcttggtaatgaacctggtcaaaaggtggaaccatattggctatgtttttgacaacaaaagcctcaccaggttggaaattcaagatgtgagatggacaaactcgagaatcagagcacgcaaacaccataaactgccataatcaaaaaaaaaaaatcaacatctttttcaaattcattaactctataataagaaagtggacc

SEQ ID NO: 36495 - DNA, 2211 bp, Arabidopsis thaliana landsberg
ggttttactttccttttcttcttccagaaaagaattcgtaaaatctcacttcaaccttctcttctctgcaagaaacctaaaagcctatttatttcacctctctctctctctctctgcaactaatcacttgttcgatctcgaagctgaagctaaaggtaagctattctcttcacagcgctagttcttttccgaagattcgtgtcgatctcaaaaatcccattctatcaaattgtttttaagactctaatgatttaaccaaaccaaaacctgaatcgtttgatcccggtgacgttgaaaccctgaattccggggaaattgatcctactcgtttgtgttgttcacagctttcgctaatttgcttaaggagctatgggagatagtcagtactcgttttctctcaccactttcaggtacgaacttggttaatcatatgagtattttggttagtttttgctgcgactaatttgttgtactgtgtctgaaacagcccatctggtaagctggtgcagatagaacatgcccttacagctgttggatctggccaaacatctttagggattaaaggtttgtcaatgtcatgatgaaattgtttatagatcaatgaaaaatttgtagatttcttctgataacttggtttcttactgcagcttctaatggagttgtcattgcaactgaaaagaagttgccttctattctggttgatgaagcatctgtaagttgataatcaacaagaatattcgtatcattaccatatagccatgctctgtgatgctttcttcgattgtgtaatttagtcaacatctctgacattagttttctcttttgcctgtttcaggttcaaaaaattcagcatttgactcctaatattggagttgtttacaggtttgctcatcatttattttaagtttttagttgtttttgtttttgatgttatagcttaaggactaactttttctgcattttcttctatgaagtggcatgggtcctgattttcgagttcttgttaggaagagtaggaaacaggctgagcaatatcttcgtctgtacaaagtaatcctttctctctcttttctcaaatttgcttgaaatacttgctaatgtgatatggtttcacctaaggaagctttattgttacaggaacccatccctgttacccaacttgtaagggaaaccgctactgttatgcaagagtttactcaatcggggtgagtgctatatttaactgtaaattcaacctcatctgtcgtatttttacttcctcccatagtcctaatatgtttgaattgaactgaactatttcttcagcaaaagtaactgtcgagtggtagcttttcacttgcaatttgagatttgaaaattgacttggcgtaaattttgttgctttagcaaatttgtacccattgtaaatcctgtttctaatttgtattacttctctgaaataattttgctttagcaaatttgtacccattgtatatcctgtttctaattttggttactgtctcttgtttatagaggtgttaggcctttcggggtttccttgctggtggctggatatgatgacaagggtccacaattgtatcaggtttttcctccttaggatatgtgttagttgattgagcacaatcgagtctcccaatcttcttagctcaatttccattcttttcagcgctgaaatactaaactttagcaaaacttgtagcagagtatttacctttctgttctatcatgttacaatagttaccaccttatgtttctgtctaaactgaattaccatctcatcttgagaatataacctgagaattaaaactttgcttttgaatttccttactcggggtttaattcaaatcattttgtttttgcactaggtggatccatctggctcttatttctcctggaaagcttcagccatggggaagaacgtttctaatgcaaaaaccttccttgagaaaaggtaatactgtttacaatttgttgatatccaaagatatataaccagtatactgattttgaaaattttcttttactactcaaatttcgataatataggctcctgtcataacaatatgaaaccactcttcgtcgctgacaaaccttaaccaattacgatttccttgcaggtacacagaagacatggaacttgacgatgccattcacacagcgatcctgacatggcaagaagggtaagggcaaatctacattattattagaaag

SEQ ID NO: 36496 - DNA, 4551 bp, Arabidopsis thaliana landsberg
  unsure (1)..(4551): unsure at all n locations
ttttaaaagaagtaagtaagtaagttgaaaaaattgaatctttgatgcaacattgttttggttattgaattcactatcagattttgctcatgtttcttcaaaacttaaatgagaccaattatgattcttgtgttatatatcttttgggtgattcacattatattacaggtcaagaagactacaatagggttagaccattgagttacagaggagcagatgttttcattcttgccttctcacttattagcaggcctagctttgagaacattgctaaaaaggttgagacttgagattatctttccttttacttttaatttcactgtaatttaactttacaacactgatctcatgtgcatatggatcggttttctttcgcagtgggttcccgagctgagacattatgccccgactgtgcctattgttcttgtgggaaccaaatcaggttgaagataatgaaccactctgttatgtcttgaatgttaggaatctaacatcaatgtgtaagtgatgttatgtagtatataagatgaatgtcttgatattgcagatctaagagacaacatgcagttcccaaagaattatccaggtgcttgcacaatcttcccagaacaggtatgattttttaaagattcttcttcaatgtatatgatcaagaaccatgttaagaatcaaactcttttataactcaaagattgcttcttttatagggtcaagaactaagaaaggaaataggagcattagcatacatagagtgcagctcaaaagcacaaatggtaaagtaaccattaatgcttgagttacattttacaattagaccaaatattttggacctcaatctgataaagaaagacttatgatgatgctaaatttgcagaacgtaaaagccgtgtttgatgaagcgatcaaagtagttttacatcctccttcaaagactaagaagcgaaagagaaagatcggtttatgccatgttctttgactagtgtactcaagtctctggctttggtttgttttacatcttttttagtgtgtttcttctatgaaggactcttgcagattttagtatgattagctatcttcgttataaaagtttgatcttgtagtagagattcttgtaacagaattataagcgaattctcgtctatcagtctatgtaaaagaacaatgtttgtcttctttgagttcaagagacaacaacaaagaaccgttttagcgcaaaaagaaacaaaataaaccgattgaaacagaatcgaagaataaataaaccgggttttgttttttggctaataaccgaaaccgaaatagaataaatcaataaaatctcaattctctagtcttctcctttaaactagagtcgatgtctagctccaacgaaccaccgcgaaaaaccgaccaaccatcgtcgtcatcggcatcggcatcggcatcggcatcgccgtcattgtttttgtcactgccactggaaatcatttcgatgatcttagcccgcgtcccaaaacgatattacccaatcctctgctccgtctccaagaacatgcggagtcttgttcgctcgcctgaaattcacaaggctcgatctttactcggaaaagattatctctatatcggcttcatcgacgaaaattatcgccccgtatacgactactggtacactctccggagaatcgagaacagtacgaccgagaatctcttcgaatccattgagttcccttatccttccgagcctaatcgattttccatgaacgccgttggtccaaagatcttcttcatttcagaatcttgtactccttcatcaagactttcgatctttgacacccgatttggggagttgcgtcaaggaccttgtttgctagtgaagcgagggtacaattgcgtaggactagtcggcggtaaggtctatgtgatcggaggctatcaggacgacgagattgcagcggaaagctttgatctaaatacgcaaacttgggaagcagcgccgattcccgatgaaaaagaaagtcacaggtggatttgtaaagcaaatgtttcatttgacaggaaggtttgtgctttaagatctcgtgaaggcatgacttgttatgacactagagatggttcttgtcagagatctgagatgcctaatgatcaatggtctagagtaggattgtgcgtgattgacaatgtgctctttgtttacttctctagattcgggttaatgtggtatgactctaaactgatgctgtggagagtggtttatggttttgatcttgacaacgctcgatcagttggaatcggggaatactacggaaagttggcgtttatatgggaaaaaccaagtcttaatgttagtgaaagcaaagagatttggtgtagaatgattggtttgcttaggagtgaagtaggaattcatggagctgcagaaccgtctcaacttgtcgagattgtccctaacggttatagaatgtgtcattgtctgtctctttcaggttaaaacatgtctagtactactttctttggtgtaaaatgattgttttggataggagtgaagtaggaattcatgtgactaaagatgatgatgtttaatactttcgttagtctatatcaatacaatgtgttacaagattatgaatgtgttgcggcgtttacgtcttcaactctcgatttattcaattaatgttgcagtttcagcatcttcctctgttccacctaatcaagtttgtgttattgtaaactcactcagttaagtgtattttacatcggagttgttgtgtcgtgnttctcttgcccatcaaaccgattccatcgaaaactgaattcttaaaccgaataatgcaaacataaattataaaccaagacgatatctaaaaaagataaccgaaaatgaatgaaaaccggactgaacattggttatacaattagtcaaccaacacacttgaaacttcatacgagtaaaggcccattggggatgaggatatttgggccaatccttcttaccgtttttcgtttgttaacaattaccgaattaaaagcttgatcgccacgtctttttcttaatagaatatattgattttatttatcttttatttttagaccaagctcaggctatcatctctccgttaattagggttttcttctctatctcgatttcaataccattgttgatccgctgagctagggttgttcgatcccgataattgtgtcgcttagctctgatctctgttcatcgaatttggttaatttgttctgattggttaagatacattggaaagcgatgccaccgaaggttgtgaagaggggaggcgccgtgagaagaggtgggaggcttacgagatcggcgctcaaggcgcagaatcctcacgtggaatcttcccatgacgaatctgttaatatcggtgagctctcaggctccgatgcactggaagcaaaggaggtgactccggaggttgataaaactgttgaggaagagaatccattagatgtgccgaagtcatcggattcaattgatgattctgaagctgcagcgaatccgcatgttgatgttccgtcgaaaagtaagattcttttagccaggttattaattttgtttcgtttttgggattctctacgttttcgttgtttttgatggatctaagtttcgttttgacgaaagtttgtgacttagagttccaacatatctgaccatagagattaaatgaatgtctaaccgttgaatgtatgaatctaatttggaggatggatgtttagctgtttttaattctgtggaagatagacgtatcttctgaggttgttatctctgaacaaactttaggctacctggaatagtgtagatgttttactcgcttttactcgcagaggagactgaggtagaggaatctgtggatgattttggaaaagatgaaagattggatttagatgacaatgaacctgagtatgaggctgaggaatatggcggggaggagtttgaagagagggaattgggacaggaggaccatgagttggtaaatgaggagggggaagaactggaggaagagattgaggtcgaggaggaagctggtgagtttgcagacgagattggagatggtgcggaggaccttgatagtgaggatgatgatgatgatcatgctaatgaagaggtcaagcatggagaaactgttgatgtggaagaagaagagcatcatgatgttctccatgagaggcgtaagcgtaaggagttcgaaatatttgttgggagtttggacaaaggtgcttcggaggaggacttaaagaaagtgtttggtcatgtgggcgaggtgactgaagttaggattttgaagaatcctcagacaaagaagagcaagggttctgctttcttgcgttttgcaactgtggaacaggcaaaacgagctgttaaagagcttaaaagcccaatggtaattgtctacactttagtatttgatggagagtttgtgtagctttacattttatatcatgctcttggtcattgggactgcagataaatggtaaaaagtgtggtgtaactgcaagccaagataatgataccctcttcgtttgtaacatatgcaagatatggacccc

SEQ ID NO: 36497 - DNA, 4693 bp, Arabidopsis thaliana landsberg
  unsure (1)..(4693): unsure at all n locations
tgttaagggtttattttttttaactttaacttttattgtgacagttaaatcatcaatattttttatatcgagtattagttggacaagcttcatcctcaacatcattttcactctgtatcaggtggcggactttggtgtgtctgctcagctaacgcggacaatatcaagaaggaaggtgcttactctattatgccaatgatcactgttgattctaattcttgttattggttcattttcttctgtgaatatatcttttacatccccgtaatatatgcttagggctggtaatgaaatttctggcctctttgtttagattttgcttcttgcattgtgaggtctattgattttttaattggttaaattttctagggactaggatactcctgaatagtccaacgcactagtacttattttttttttccaattattattcaacctatctgcagcttcagttccagtttcttatctacagccttatatagtagaatcatgtctatgtttcagctatgggataatttatatgctatgttgaaaagataatcttatcaatttgaacaacatctcatctttacttctctgctgatggtttgcaattttcactcattcatctgggttgcgtgcgctgatatgttaaagaatgacagacttttgtaggaaccccattttggatggcaccagaagttattcagaactcagaagggtataatgagaaggtatctcgcctatatactgagcttcacttctcctagcttgacatgtgtgtttgtagaggctatacttgtttccttagcatatctaatattttttgccttctttttctgttgctgggattgttgtcatttaggcagatatttggtcgctcggaataacagttattgagatggcaaaaggagaacctcccctagctgaccttcatcccatgagagtgctttttatcattcctcgagaaactccaccacaggtttcacatattttcattttaaacatgataaaagttatactggtcactgtgctttgcctcagcagaattttaccttttctgggcagttagatgagcatttttcccgtcaagtaaaggagtttgtttcattatgcctgaagaaggcccctgccgaggtacttgcaatgcaatccttgtaatctttgctttctttattggcagcagtggcatttcaagatctcttattcaagtcttatactttcagagaccaagtgccaaagaacttattaaacacagatttattaagaatgctaggaaaagtccgaaacttcttgagaggataaggtttgatactttttctcttcaacagctttggcatgtgatttcaattatgactttcctaattcagttgtatgtcaaaagtaacatttagatggtttcccgtatgtttgttttgatcttttatatgccaaaagaaaatccagaataagcacgattgttattctgtccttttttcctctttaaagagagcggccaaagtaccaagtaaaagaagatgaagagactcctaggaatggggccaaagctccagttgaatcaactggtactgttaggatagctagagatgaaagaagccaaggcgcgcctggatataggttggatgaatgctctgcgctttggttttcttatgatgctcggttgaataaaatctttattaactcgtagctacagatttcaggggaataccgtcaaaaatgctggatgggactttaccgctggggggtcacagagtattggaacagttcgtgctttaaaacctcctcaagcaagggagaggcgccaagaagtttctcctaatcggatttcgcaaagaacaacaagacctagtggtaatcaatggtcatctgcgactgggagtacaatttctgaagcttctgaaggaggttttgtcagaagacacccttttcagaatgaccatgaagatggcttccacgaagaggtaagatcctttgcctcttgtgtgcgagatgcagtctgtcttatttgacacaaaatttcttgctgttactattaccctgaaataatcttctaaagcatgtcacgatatgtatgtttcatgttacttgggtaatcatttacagttagggaacttggttaagtttcacgtgtaggattactatattgtaactccttatatctgtgtattcttaagaatgagaacaagataaaaatatgtttaccttgtccttccgaatccaggacgattcatcgctcagtggatcgggaactgttgtcataagaaccccaagaagttctcaatcatcttcagtattccgtgaaccaagctctggggtatgaaatttctggcaccttcttaacatcttatacagaaattaattaggcctggtgtattataaatgactccatttctactttgtagtctagcggcaggtatgcagcttttgatgatgcttcagcaagtggaactgttgttgtccgtggacagtacgatgactctggatcacctcgaaccccgaaatctagactagggattcaagagagaacttcgagtgcatcagaagatagcaacgcaaatctcgcggaggtttatatatcccctttaatcattttattatctttaagggttatctcgttgaattgccttcattcttcaatatatctttatattgctttagatatcttctgttcatctggatttatcatcggattcttacacttgaatttaattcataattcaggcaaaattagcacttgaagcaggtttcagaagagggaatgctagggaaagacttggtaatgggaaggttaacaaaagaagagagcaagcaacagataattctgattacttgaggttagtgtgtttatgtatactaaggcttctgctggtcacaaggagttgtctggttatttctgacatgaaagctgttaccttgcagaaattcccgcgatcattctgataaacaaagaccagtcatgagatcacaacaagtgagtgatgatgaagaagatgactccaaattggcatcattgtctgcatcattgtcactattgctatacccatcctaaaagaggtaagctataaactacgctcacattttccatcttacttctctcaatgagttatgagtcatcttcaatttagagaaaaaaaagtttcggtcttgagttagaagctgcaaataatgtaggctgttgggggtgacgactcaaaaggaactgttggacatagagtttcgagatccttagttaaaatggaacgcgaaaagcctggttcttctgaagcttttattgccaaactgatcgaacagttgggaaggtaagtgtaactataaaagaacatatacacacacttgtgtatacagtatcagtctgttttatattggcaatactgggtttgatctaatgaacctcgaaaatggtcatacagtacaaaggaagtgtcagtgaaagaagtgcaagacatggcgatccgtgtgttcgctaagacaatgaacaatgatgcagagaacaaaagaaagcaagctagcaaagaatttagttctaatgcaaactttagtccacttgcaagattcttattctcaaggtttgactgatgtgattagcattaaacatttctcctgaaacgaaaactgagtaataacttacaatgtttatttaattttctgtgttttgcagatggctaggtcaaacatcgcgtgatcttaaccaaagttgagaaacgcacagaagacagaacataagaatgttgtttgtgtgtctcttacattgatttgatgcattgaattttggtatttatgtgtataatttttcttcagaaaaagggtgtatttataaaattttaagttttcttattttttaattggcattttctaccttattttggctctttttagttttatctttatttttccttcctggttttttttagagaggaagcatattcttagttgtataattaagggcttgccttttatctgtgataatatgtaatcactcttaccatttcattcatataccagtactcataatcattatttttgtttttctttctcttaactctctcatatgacaaaagtcatcaatcttttgttgttaattcttctacaaaagtggcaatttgtgtggttcatgaatcagacaactcaatgcagctgtaaactaaaaaaattgactaacaagggttattaccatgagaggacctgtagtgagtcaaacatatgctcaggaataccagctcggtcttggtttagatgattaagtcccaacctgagtatatctttcaatcgttactctggaaatagcaacatacaaagaaataaatagcaaccgtgactctctttctcacaatataaactcaaaagactaaggaccattatttttgatgaaaaattgaaaactcaagatctttagttttgctaagttttctatttgaggcctaaacataacaaggaaatttagcaaaacaaaagttcttgagttttcatccaaaataaaaggccatcgcccaatggcaaagtttctttagtcaacgaaaacatttgtttacgtacaaaataaataaaatttggggtcacactaaatcagcatttttgttttctcattgggtcactgaagcttcacagaggacacgtattcattaaaggtgataatacaatgtattatccaatatacgtagatgagtaagtggtccctttttggtcggaaaaatggaaaagaccaaaggncctagta

SEQ ID NO: 36498 - DNA, 824 bp, Arabidopsis thaliana landsberg
ttttggagtattttctttatctgtgaaacagagaaacattgaaaatgcaattataaaacaaccttaagtagagaaagtaaatgcaacataagattcaataaggccaagaaacaccaaacacctaaaccaaaaaaatccaggcaaaaacaatacaatttgagacatcaatcttatactagttttagccaaaatcagtaactagagtgatcttaacacaacaacaactaaacctttcacactataaaactataattatctattaaagcctcatactttacaaagttcaacacctagactagcccaaaaaagttcatcatacattcaaatcattgcagaaagaagacaaatttaatacaatcaaacccaatggagagtaaaaagaaatacatgaagcaatgaatcaaatgagactcaaccatcaaaaccgtgaaaagctgtagaaagaagcaaaagcataactataagtataaaatacctttaggccattgagaaatgagtttctctttaagagaagaaacagtcatagattgattatacttgcttggacctatgtctgtaccatctgctagtctaaactttagttctatccaatcttcttcacctgccatctcttttcaatttcccccagaaaacaaaaaaccccaacaacaaaaaaaatctctaaaaagagaaacttcaaaattcttctctggagaaaatcatcgaacacttttgcaggattattcaccaacccaattacaaaaacccaaaaaagaaagaaaaaaacaacacaaacccaaatcaattctcgtggaaagaaattaggaagacgaaaagagagacac

SEQ ID NO: 36499 - DNA, 2245 bp, Arabidopsis thaliana landsberg
gtctcactgtacccagctatcttttgcaaagtctgaatgaggcagtgcctgcaggtgggacaagatgagtgtgaactgagccatttgtctatacaccggacatggaatccatggtggcacttcggcagaagcttgactcgctctcccgatgcaaactccgagagacatatggcacactctgtatctaggccaggtagcttcagttctgctgtgtagcttaccgtctggaaactcttcaaggctttttgtttgacccctgtgttggccaagcgaactgagaactcgtcactagcttcggatgataataaattggagtaccttagtgcacatcttatgatagaatgcagtccaagtgagcaaactagtgcacataagaggactgataggaccatgacaacatttgcatcaaagctcatatgactttggtaggagtgtgatgcttcatgagcatctgcgaacggcggtgatgccgcagtaggtggttgataagctgtatgaagtagcagtcttcttgagtaaaaatctccccgaatatcttggaagagctcagttggtttggtagtgggagcagaagttgcggtcgacatgataacctagtttgaagagttagattgatagatcttctgtgtttctgttgcaggttctatatatagtggaaaggtaaaggtttccatatactttcttacatttagtgagaaaatgttttaattgaattttctgaattatggttggtggatgctagcaaaattagcaaggtcctttagtgttttgttttatttaatagtctgcatcttatatggattctccactgaatttgtataatcttagtgtggtttcatatggaaaatgggcccatcgtaccattttctgctatggtagtgacatgtggcagtggcttttgcaaatcaaatcacctagaattgctcacagggacccatgagctttagctagagccgccatgaactttccaatctttggaatagcattcagatagtacattacttgggtcttggttcatgtcacttgcctctctctttctttgttgtttcaatttttggtgtttttgtggtgaatagcgaaacgttcatggacttttgtttggaaaacaggaagccagtctcgtccgtagtaaaccaaagtttgttagcagccagaaggcaaaaagccccttccatgattcctgttaaaggctacttttatcgataaagatcactctaaattagtgtccagctctgctcctttatctaagccagtctcgtacatatgatttaaatcatagctaaagcagatgatctatatagtttccttttgcttactttatgatatgttgtcttctactgcaaattgccagcgcaaactacatgaatctagattcaaacgttcttactgtggcacgtaactaaagcaagatttttcgatgataatagtttatctaagcattcttttggcatagatttttttgtattttggggaaaaagttgatgttgcgaagcagggaagatctatccttcctcactagtctctctctgaaaattacagaaaagctttaagccaatctgaaaatgatttgtctttccttttgttcatgccactaggttccatatagctggtaagaacatatagtggtctgtttttttatccctgcctgaaagtgataaactttgcctttattgcttttatgttgcttggaataccatgtgatactcgtgcgttctttggttgacattcttgctttggtgctcttcctaccttgtgattactaaagtaaaggaatatgataagcaataattaagttgtatcaatactgtatctctttgaatgagtcgagataagttgtatttggaacactttttccggatgcatttgattttgatttggtttggccgcattcaatgtgtttgaagagccatgacaataatttcaggagcacactaattaaatcttttcttgtgctagaatttgcaatttctaatacagagcttttgtactttttaattatttgtctaggttcattattgatgttcagtgtctgacttgtccttggtgggacagaattattgccattcacttgcatttctcactgattgtcatttggtaacttctttcaatcttttgctactaatgttttttcatgattatgcagagaacttcaattttggcttggatgaatcggtaatgccgacagacttttgttgccagctatttttctctacaatggtatgccgacagaccttttcgatttttc

SEQ ID NO: 36500 - DNA, 1534 bp, Arabidopsis thaliana landsberg
  unsure (1)..(1534): unsure at all n locations
gtttttaagtacttatgacctcacattgcggtaaaaaacccgccattaaaaccttgagtatgaagactaaggatacgaagttctcatcataatccgccttaaagttggataagtgtatcaaaaccaaaaggtagagaggaacttttcacaccttggtgtagtaccgacagccttcaggaccttcagtgacaagtagtagtttcagcttaggatgaaacaacttgcggacaacattatcatcatacggatcttctcctttcgttagaaagacaatctcctcttcacttatcttgaacattttatcaaacagagacaacaagtttcaggtcaagaacaaaagtgaaagataatatacgcaaatgtaaccatacatatatagaaaaaataaacctttataatatcagcagtctcccaaatgctcagaatctcttccctagcattgtctgcagaaggccacaacggaagcctaaggttagggtcataagagagtataacaccagcctccttagccgccttagctgcagaaatatgcgcagacttgcacggttcggtgataagacttatcgaaccgtaatgaaatatctttgcctgacaaaagatcggttaacattttgaagtggttgctacatgttttgcagtgtataaaacttcaaagcttacctttttgatcaaatcaaaatcaagctcagactcctctaacaacatatcagcactcgggtttcggtaaaacataaactctctttcaccttcattagtcaaagtcacaaaagctaaagcagttcttgctcctggatcaaacctcataccatcattgttcacattattatctttcaaaatattcgcaagcatataaccaaactcatcttcaccaacctatacacaccaaagaatcaaagtttcaaaatgttacaatctaaaaaacaagaagaacaagtttttgccattcacctttccaatgaaagctgaagaaccaccaagacgagcaataccaacagctannnnnnnnnnnnnnnnncctggagcttttttaaaagccggtgcatcggctaatgaaagtccacttgtcgtcggtacaaaatcgattagcatttctccaaaacagactacataaggagattcttgtgttgaaccatcactagacaatgctcttcctttaaacaaagaacacaaattgtatcaatcagtacaaagcaaaatctctttctcaacaactatatacaaattcatgtacaaagactatataatatacaaaaatacaattctataagattaatgcataaaccaagcaaattctgcaatttcaacattttatgagaatttatctgagatttaacctttgagattagatcgtgaattggcgagtcttgaagaagaagtagctttgatggagataggacgttttgaagtgagtgagtgaggagttgatcggaaagttgacccggagaagcagaacgtagtagtagtggcttggagagccattgccggaaaacgcaaacgggaaacgcagagtattgggaaccgcgttttggagaag

SEQ ID NO: 36501 - DNA, 4417 bp, Arabidopsis thaliana landsberg
tgactgatgcaagtgaatgacgttgaaggtctccaaatcaagaaagatgggaaatgggttcctgttaaacccctcccaaatgctttcattgtcaatattggagacgtcttagaggtaaagtttaatcaaatacatagggttgtagatcattgtaatttcatcatgacgtttgtttgggcttaatgtagatcataactaatgggacataccgaagcatagagcatcgcggagttgtgaattcagagaaagagaggctctctattgcaacgtttcacaatgtgggaatgtataaagaagttggtcctgcaaaaagcctagttgaaagacaaaaggttgcaagattcaaaaggctgaccatgaaagagtataacgatggtttgttctctcgtactctcgacggaaaagcttatctagatgctttgagaatctaaagagagcaatgccttgtcgcccactactctgtttctctgttttcttgatttatgcaataaaacaatctctataatcttatcttcattgtctctctatttgcttcatttcgttaaagacaaaaatctcctgtagagaatgcttctacgtattgctacaataagacaataagtttgttcttagcaaaaaaaaggacaataagtttgtcaaagtttcttgacacgttcgttgttgctcaaagatatacctaataatatgatcacatgattcacatactctgttatcttagaagtctatggtttgtcgcaaaatccaattttaattttcgactcctaaatttagtaacttttgtgttgttagcgtgcgctgtgagaaaagacttgctcacgtacaagatattttagataagttaagaaacctcaaacgtaagacatacattgcacttaacgtattaccaacctcttgctcaatcttgtggataacagcaacagtaacgaatgtcgattttattcttaaacatgtatttccctaaaaatggacaaacaacaataacatagaataaaaattatggttaattagcttccacaattttttaaaaagaaacaatctgttgacaaaaaaaggaattaatttatagatttgcttgggatcaattagctcgcatgtggattttcatatatatacaataccatatgaagccaaatatattataaagaaagaaatcttttttagattttgagctctggaatggagaaaagtatcaatggatcatgcagactcatcaagagactcgtgattatactttcttgtctttcatattcctttgttcgatcagactttacagagagaacaaatatcaattatgtatcagctgtgggagatcccgggatgagaaacgataacttaagggtggctatagaagcttggaaccaatgcaacgaggtcggtgaagaagctacaaacatgggaagccctcgaatggcagattgcttcgatatcgataactctagctttcccggtaaaatcataatgttgttatgttcttacttctctgttttaggccttaattccgcatttacgctaacatatagaaaaacaaacttcatacttatttcaaaacattttcttaaagttgttaccttccgggacaggcaaacgaaacagagacattaaacctcaaactgaaactgatttattgtgttcatgggacttttttagtgaagataatccacaaagtcgacgaaagagacaacaggcttggggtaggaaatggaacctacggaggaataagcgctggagacaacgcagatatctacgcagcgcaaaaggaggtatacttaggaaacaaatgtcaagttgtggacaagccaaatccatggcagttttggatgataatgctaaagaacggtaatacggatactttagccgcaatttgtcccgaaaacgggaaaaaggcgaaaccatttcctcctacggggaggtttccatgttttgggaaaggatgtatgaacatgccatcgatgcatcatgagtacacaagcttggttgataacgaagaaggacatatgagtgggagtttttatgggacttgggacttggataacgaccaaaaagatccggttggtaataattcgtattataaggtgaaatgggagaagaagattgggggaaatgagagttgggtttttcatcatttgttgaagacttcttctaagtatccatggttgatgctttatctacgcgctgatgcttctcgaggtttctctggtggttatcattacgacactagagggatgatgaagatggtaagtttctaatccgcattttagcaaccaaaaccggttttactctgtttctgaaacgcaaacgcagaaaataaccattttcagcgatttgggactaacatactctgttttcaatgatctttcatgacgcacaagacgctaaaatcgccagattttaaagtaaaattcaagctagagattattaaaggaggcggttcagggagccaattttacctaatggacatgggaagttgctggaaaaacgacggaagagactgcgacggcgacgtcacaaccgacgttacaaggtacagcgaaatgataatcaacccgggggcaaccgccgtttgcacccgcaaccgcctaggcgcttgtccgccagagcatacttttccaaacgggactaaagttcacaggacggacaaggagaagttccctttcgaagcgtatcactattactgcgttccgggaaacgcgcgttttgcggaatctccgtacgaggtttgtgatccgtacagtaatccacaaccgcaggagattctgcagatcttgcctcatccagtgtgggaacagtttgggtatccgacaaagaaaggacaaggttggattggagatccaagaacttgggaacttgatgtcggaaaactctctcagtcactcttcttttaccaggtattttttgtagtcctcctttatatatatatatatctgcatttacattatcacgaaaagagtattaaaatttcgaacatgttaaaaaatgcaggatccagggacgaaaccggtggagagacattggtcgtcgatagatttaggaactgaaatatatatgagtaagaatcaaattgctgaatggactgtaactgatttcgacattgttataccaaatgccgatatttaagtggaataataagattctgttataagctgctaaaccaaaccatctcgaaagcctaaaacacaattgaaattcttctataaaccgacgggttttgataatataaatccaaaacaaaatcgagttttaggtaaccgaataaattcgttttattttaatgttataaattttcttaattaatatgaaaccaaatctagactaaataatataaaccatagtttcatcaaattaaaataaaattataaacatttttcattttctgtaaaatcgaaatcaaaacgaatttgttaaccagctaactgcagattttatccaaagaaaaaaaaaatggtagtcaagaccagtcaatagatcaaataattatgattggctaatttagtttagtttcgtggtcgcgaggcagtagattgtttgctgatcgtccctatagagtatagactgaaaccaccggaagacgacggtacgaaccgttaattaacagccgtcaaaagacgtgacgaaaaattcctcagcgtttcttttcagtttcctttaagctctcgattgtgtttgtttaggtaacgagaaaaaagcgagacaaacgaaaaaggttttactttttttttcttcatctgtgtgtattttcattttctgggttttaagggtttcgcttgcaaagtcgagagctttttatctgggtgtgttataatggcgggtgattgtgcgattgacaccgagaaatactctctgctggaggattttaatgtcgatgttgaagtcgaaaacaaagcatttgagactttctcactttgtttttgggtttatctcttagattccaccacatacccttctgcaattatcagacaggtgagttctcagaaatgtccatctgttgccttctgtgttataatcgctttcatatatccatgtcttgtgagattaacttgttttgcgaattgggggaaaaggttcaaactttgtgtcgcttctttgattttttttttttagtataaccattgttgatttatgagttttaaactgaaacaaccagcttctgattaaatagtggctttcttctcaggttcactcagacatgagtgttagtgcacctttccttgtgctagatgaaaacaagaagatgatgcttttgccattgactctccttcacaaggaagctcctgatcctgtagacacttcttcctggacacaagttcctagcgtttctacaaaatccaagtttcctcttgaaaaatgagttcatgtgggttgtgaggtacggtttcctctattttctcaggaaaatgcaagatcctatgtttccattttc

SEQ ID NO: 36502 - DNA, 3895 bp, Arabidopsis thaliana landsberg
ctcttagtttgtttgtgtgcaaattcttgcggcgttttacatttgcattacgaggtgtcattatttaaagaaatcaacctcagtcgacaaaattctattataattgttccatatatcaaaaacttgtcgaaaaagttagcgctggaagccaagtgaacataaccagggttcaaaatgattacaaagctcaaaatttaagataaaccctaaaaccctacagattctaaagagaccgagacaaagcaaaatctgaggtactgggaagagcgtagagtagaaaacttctaagcagcagtagcagcctttggcttcttaggcatacggtagccaccaacgacacaggcatggtcacgctcaaatggctcaagcgtcacttgctcagctggtttgaattgctcctgttgaagcttcttcacttcagtctggaacacagcttctgctggaacggtggagtcgatacagtttgcctgcaaaaatgagacaatacatgttcactaatctttctctcttgagagatcatggattaaataaatgtttcgattgctacccacctttattgagatcacaaagtgtcctcctgacttgaggaagtatgatgcattcaaagccaagatcctagcctgcacggttttaaatggcacagaaaatttcataaacaaaacagtataaagtatactagaagcaacccacaagctgaatggcatttagaaaacaagtaggtttaacatcaggagaaccaaaaccgagcaataatagacatttaaatttagtattgttcttaaaaacgaaattgtaaaacaagtacatagtaaaataagattaagcttaacaaaaacaaaatcaagaattttcagtacatcagaaacttggagattgcatcacccataatgatctgaaggggaatccaagtaagatcatcatttgcaattatcaaaacaccattttaaagcaaaggacacatataatggtattgggtcaagctttttgaggcaaatatttagacattcattgtgagttaaacaaaagaagcaaacctgatctggctgagcaacatcagagaagataacatcaaccatgcctacaagcattctgtatttagctgggtgtctagcatcctcgatgattggaataacattggttctcttctttgccatgttcaccaaatctctaccacttctatgagaaaactcaacagcataaacacatccctcctacaaatcataaagcaatagaacaaagataagtctcaaacataggatagaaatggacctacggataagtaaaataataatttagtgaaagacttacagggccaacgaggtcagaaacatgagagacagtggtcccagaagcagcacccaagtaaagaactttggcaccaggtttctacaaaagttttaacaaagaaccaattcaagcacatgtctttcaatacaaaaaaagaaaacagagtcaatgtggtatgtgtatagatggacttacgatccaaatgttgtcgacaccaccaagaatcgcagcagctaacttagatctaaacggattccaaactctgtattcaaccttagttccatcttcattctgcaaaagtgaagtagctataatataagaacaaaaacaaactcaatttaattataaagaaaacaatcctcaaacttcatacctgaacagagattctcttctcattgtaaacagcttcaccaggaaccaaattcttagtgacaagagcatcttctttacccttagcaataaacactcccgcatgtctgtgaggctcaacaatcactttgcttcctcctttcattcctccacgaggtggtcctccacgaccacgaggcgcaccacgtcctctgccgcgaggcccactacggcctctgtcaccactacggcctcctccaaagcttcttccacctccaaaacctcttccaccaccatctcttccacctctgaatcctccaccaccacgtcctcctgattataacaataccaacatacagaaaattaactaaacggaagaacagagtgttattaaaaatctctacttttatctttgaactttattgaaacagtgaagatacaaaaggctcatgaattaaaaccctaactaccaattcaaactacagaaaccgtaatgatacgaattcagatttgatacggacagggttatactctagaggcagacagaacaagaaagacataaactttaactaaggttcttacctgtaactgggggtctcatatttgcttgtctaaaagtgaagaacgaaagacgagaaccgaaaaaaaacgagggcaaaggagagagatgtgcggtggtggctgattttagagtctctgtgagttggtttatatattaagattttagggcttttagggtttatgctttggtaacatttcttgtattttataaataggcccttctattatatatatcttaactacattagtctactacattggtaacgatgggtccaaactccaaagtatggagttgggtttgatccggattgggtcaagataataatgggccgattttattggcccaaagtgggtttgtttatgtctcacggaaaagataagttagggttttatttttgtgagacaagaagagttagttattcacttattctcaatttctcatagagaaattacgaatatatctaaggttctcgatcatctaaagtttttagggttcgacttgctcctcctcgtctctgcttacctatatttgaaatctttatcacaaactcagctagctattacatcactaatggccgaacgttgtcaaagaattgatgaagaggttgttgcttctagagacgagatcagttcgttgcccgacgatttgcttatccagattttgttgcttgtaccgatcaaagatgcagttgggacaatgatattgtcaaaacgatggcgttatgtctggacgttgttgcctaaactcgagtacagtgatcctggtgatgaatgcgaaagcgtgtggaagtttcttgaaaagttattggaacttcacaaggcaccttttctagaaactttgtgcatccaactcggtgaaaattttctattgaggtagatgttgggaaattagttgcaaatgcagttgatcgctttgtgcgcaagctagagttagagctccactggacggcagagcctaccagcttgcctaagagtctttacacatgcaaaacacttgtggaattgactctttcggacaagattatagtggatgttccttcttcggtttgcctcccgtcactcaacatattacgccttttttatgtggtgttcaaagatgaaaattctctagagaggcttatatcaagttgctcagttcttgctagatcgaaagtgggcctcgccatcagtgataaccgggactaccgtttcgcgaaggtgcataagcttcgccttgaaaagccacatatcgacgttgtatgtcatactgatgacaagtttctcaaagctatttccttggtcacgtatcttgtgttacctttggaagatccaatggtatctatcctttttattattattgtttttttccttcttggctgttaggtttgatcacattgatttatattggcttttgatttagtcattgaaggctctggattttcgtggctttaccttcactcgacttggaaaattagtgatatgtccacatggccatctctgattggatataattccactaattctcaacaactctcctaaactaagatttcttgctatcacttctgtaagtaacaagtaacaacgcaatctccttgttgtataaactgattctttgattccacctcataaatttttatgtacttgcatccaggtaagtggatatcgacccggaaatctcccattgtcatggtcccaaccaaagtaccgttcccagatgctt

SEQ ID NO: 36503 - DNA, 1870 bp, Arabidopsis thaliana landsberg
cattaattacttaactttgtgtgaagattttaaactggaattttccgaagttaaaaagttagttggggttttcttgtgttggcgcgacttcaatcatttgtataccacctgtttagtatgactgcaagacctgataaatgaccagatatgtagtaaataacaatttctaccagagggtggacaatacttagcagtaccaaaatgctcaagtcacactcatcctgtatcatctcgtacaaggggactgtggccccagaatgaaggatctacgtttatatattcctaagatgctactgaatctgaataaacagtgtcaccatttgttgttgagcctttctctgcacacaacaataattgcctcagattttgtcccgtcccgttctcccataagcatgacgccttctaaatttaggaccattatttatatccagtttaacctgcatgtctacaagcctacaattgacagacagaatggataatcaatatctgttttattgataggggattccctgtagtaattttttttttatcttgttgtaaagtttttttcagctgcaaaatcttctctgggggaccaaaattggttgaagacattgcagagtaaacacactggcagccaaagtgtaaagggatcatctagcgagaaaccttcagtggaaaagtctcgacagaagagaattcaccctggaatgttatctactctagatcgtgctacggctcattatggtgttgttactggcttaaaggcaactaacgatgggatgtatcttcttagtgctggtgagttcttattgtcctggctaatttctttgttctttaggttatttatttgacctctgtcacaacctggtataggcagcatctgctggttatatgttataatacatgcctctctacgaagtggaagtgatgtgttaggggttttagcatcaagtgaactatatcaatttgtggtagcactaattactaccgtacacatcagtggtgatacaacagttaagacttaagagtctattactattatgtttcagggtcgtattcaagaataagattgtgggatattgaatctggacgcaataccctggtgaactttgaaactggacgcatccagacagacagagcgattcaattagatacaagcgatgatccagctctcgtatttgttccgtgcatgaagactgtgaaggtagtcaccaccttactattgtatcagcaaatctttccattccagtacttgcattatttgatgaattgttgctgcaactgtatataagggttttggcatgtggtcgggtagaacaacactgatgcttcgtggacactacgaaagcgtgaacacttgctgctttaattccaatgatcaggtataaactcaatcctcagaatcttcccgaatttcgcgagtgatttgagtttgtaagtttgcttgaacacacctctaaatccgaattacttgttatacttgctcataggaactatacacaagtggcgcagatagacaaataattgtgtggtcaccaggcggatccgtggaagatgaaatggttgagctaaattctagtactacttcaaattttcataatttagaggttaggcagtcttgttgtggatgtctctttaatcaagatttgtctatttgcaggcgcaaggtgaagtagctgaagataaagacaactggagcgactgagagaaaacaagacttctttctcaatctgtgaatttctatgtcttcacaattacttgaccgcagcttctgcagtgaaagatgtgttcccatcgcagccatagttaaatcggtatttagaaatttcttctggtctctctttcaagcgttttcagttattggatacattatatttgatcaatgtgt

SEQ ID NO: 36504 - DNA, 2804 bp, Arabidopsis thaliana landsberg
tactatatatcgttagatctgtccttaggttccatgtgttctcccttggcaaatttctccctttttccctttctgaaattagaaaaggtttttttaacgggtcgggtcgaacggagaagagccaaacccacacgttgctagctgacatgcagctagacctagcccgctttttctggccgagccgtcgttctgttgggccaaattttccagcaaaaaacatgtttgttcagctagtctttatttggaccgaaatagatataaaaggcaaagcccatactccacgatccacaaaatgttaatataagaatcagcaaaatattgtacccacctccaaagaaaatctattttatgatctccaccaattttaaagggatagtgagacttccagatttggtttagttaacttgcagattctttatggaactttcgtatgtcgaatgaactttttaagtgcaggtatatgcaaaaccttgatagtattagtctctaggttttggaaaaattttctttataagaaaaatttccaacaatataaataagaaaataaatatgttacaagaaaaaatgaaagagagttacatgacctataaacgattttattgtgcgagcagcggaaattaatattatggaaatttattccgaacatttctgaaggcactgcgttacaaactcaccatggtttatttataggcatatagataatacataagcgtatatatatatatgcaatcatgcatggtagtgaagatattatatagttttaaacacccggcttagtctgaacaggttcgtttagcccgtggcctcctcctacgtggtgtactactacacctccgtatcctcctccaccacctccgtagtgtcctccacctccgtgtcctccaccacctcctccgtagtgtcctccacctcctccgtagtgtcctccacctcctccgtagtgtcctccacctcctccatagtgtcctccacctcatccgtatccgtcaagtccgtggccccctcctccgttgtgtcctccatgtccgtggccttctccccctccgtgaccaccatgtcctccgaggccaccgccataaccttcaggttgcacagtttcctcactctctggcttcaccatgcctgcccaaaaaaacacgttatttcaaagacatttttaagcacgtgaaaatgtgaagccctcttcctgacttcaatttagttttccacctcaattttttttttaaagtacatatataaactcgaaattatagtttttaaatatacgttcgaaacataatttacacaaaacttcctaggattccacatcactcaagtgaagtgtgttctgactttactatattgtaagtccataaaatggaactggcgaaatagttgtataaatttatcaaatggtacgttagttcaagtttgaatagctagcctcacgaacatatcttcgttttttgtaagcaggctgaaatgtataatattttacgtacccgattgccttgcggcagacacttcggagacgacgagaagaactgagaagagacctaacagaatcaaagccttggaagccattttttgcaagttctaataactctcttagtatgttaagtaagtgatgagtaatatgttacgttgcatgccctctatttatagaaacgaacagaataggaaatgagaaaagtcaaaaaactactccgtagtagaataaaaagaagacaatattttatcaaaagtaaagttaaaggaaatttatcacagtagaaacaaattaagtagtaattaagaagataagtatcagagtattatacgtgttgcgtcgggccccttatggtccgttgttggattcattgtaactagatatgaataaacgtgaatggcaactccagtccactacgcttttttaacaaaacgactatattttgtagtttataaaacgacgttgttttattctcttaatcgaaagttaattctatttatgaaaatttagcgatatattcgaaatggtgaattcaacaaaatttgactattttataaaaaatatcaaagaaaactttatgatttaaataatattttaaaagttcaagttttttcgtatcaaatttgaaaattgacacattttttccagtttttctattgtttaagtttgttactatttggatagttaaggcgtgcactaatgatacttgttaaggatcttttttgaaatctctgccgacagagggatatatagagacaaatctatatgcactgaacaatagtaagtatagcataaaaagagcaatgcgttatgcgtagaaactactataggactttcattttagagggtgcaaaacttttgcttggctatcgtgaatacaaatattctaattaaatttctaatggagcttttgactgacaaattgcttggctatagatacttaattcatgccgaccgcgatcgaaatatctatccatgcaatttatttaatcagtatccaagtcactgagtgtagtcttgtaggtaccatctttctacttgcattttactcaaaagtgaatttcttagcgttttcctttggcaaatttgaacaaagtgcggtcatttcatattaaagtaaagtatatgtatttaattctaactacaaaaatttctatgctaatatatatccaatatttcaataatttaaactttatatctaaatttaattgaatcgtgtgaaaccatatatcttttctcatggctactgacgtggatgccacgttttttacgacgttgatgtaatcgttgccacatatttgatgaagttgttgcccatatattaacacataaaata

SEQ ID NO: 36505 - DNA, 4282 bp, Arabidopsis thaliana landsberg
  unsure (1)..(4282): unsure at all n locations
atacaaaaccggtcagagaagacttttattcgtctctttccttaacaaggaaaaaaaaagagagagagaacgaagcaaaaaacctcgctcgctagctatgtgaagaaactatcttcgttataaaactttccggcgacgttttccgacttccgagagcaggttcggtgttcatcacttgtcctctcacatgcttaattcttttcgattttgttatttagttttttttttagtttctattttgggtaatctcgacttggtttgcaagtcccttggccataatatcggatctgtttaatgttagttatgtagatattgcccgattcaatttctatttttagtgcctttgagaagatttttcattttggattttcttagtgaagaatagtcatcacagttcactcacctacatgttagtcagcaatggattactggatttgattctctctttattttcattctactttgaacttcatttatcttggccatggccagtttaagttattgtgtagattaatggtaagctcttttttttagtgttattgttgaggttatagtcataattgattctgattgagttcttaaattgtgtttttttttgttggaaggttttgaggtggttttatttgtccaaaacatctaaccgaagtgtcgttgtacggtgcttagtagttttcaataacacgcttcagttatggggaatgcttgttgtgttgctactcgagacaaaatggttgtgcctaatacatcagcagtcgagaattttcaaagaaacaatgtgaggtattctcctaactggagcttccgatgggataatagaggaggacgcgtggcaggggaagagacctctgttagtttgttatctgatcggattagtcgtaacgatgtctctgatgtcaaatctgaaactgctcttgtatcatcacaaggttctcctttggacaattttcagacgcagtcatggcagaaatctcctgcttctggtaaattcctttattgctgcttacaggcaatacctctttgatttgtcaaaaaatgtagacttgatgggaaaatgtaggcaccttctttttgaccaacccgcttagaatttaggattacttttctacagagactgttaatgagtgaaaatgacattgatatgtttgttgacataaactgttctcttgtttgtttcttgacttgcttttattgttaaactatgacttttccatgttgtgatatcacgttattgttgtggcagatcaatcattttcaagaattgcctctattgactctgtctctgaacaggttaaatacttaaaagctttgtttcactgctagctatatatttgttatgtatctctgttaatatgactcctatgttactgttttagatcacccaaaaaacaaatgattcaaccgaccctacttattatccatctcctgcaaaactgtctctttcattggcttctcaaccatcatccttctcagtgtcaccagtgtcaagtcagtcccacttgccaatgccacctgcaagttcatcccaattaaagctgacaccgccccctcgtctatcaaagcaagtctcatatggtcaaatctttggattcacctcaccgagcagaagctcangcaactgaagagagattggggaatgaatctcagtctgatggttcgtccatgcaagccttttctgaaatgatggcgtattctcgcacagagtcttgctcttacgataacgagtgctttggggttcgtcgtgacaagatagacaatcttggaagtagaaagtccaatgatcagcaaaactgcggtgcttgctctagacccttgtcggagaaatccttgtggagcagccaaaagatctttatgaccaacgagctctctgtatctgcaattctagcttgtgggcatgtctatcatggggagtgtttagagcagatgacgctggaaattgataaattcgacccttcatgcccaatatgtacaatgggtgagaagaacacagcgaactgtcagagaaagcgttgaaagtagagatggatttgaaagcgagacacaacaaaagactcagaaaccgagttttggacagtgactttgattgcgatgattttgtaatgtttgaccacagccacaggacagcagcagcagcaagcaagagccctagactcgtctcaagttcgagtgctaaaagctattcagcaaagcctttcttggctcgacacttctctttcgggtccagaagtaactataaatcccctaaagaaaatcttcctgtgaaaaagaaaggcttcttctggaccaaatccagcaaaatatgaacttgtaagcctttctctctctgtctctttttcttgctatatatatagttgaaacttgaaaatcaaatcagtgagtcgcaagtaagactttgtggttgttgtatcagatttcgccgtgctctgtactttgactgctgtctgaagcatagaagtcgacacacaccggggcacgataccattcagttaaaagcagtctatttgctgttacacacttgctcaacaaagtcttctcattgtttttttttttaatgaatactaaattttcacacatgtaaagttacaaatttagattacaaggttggggacaaaaaaaaaaaaacattggatcattaatctattgatttgttctggctgtgcatagatcagaactgggctctgaaggcagccgattgggtatagtttgttatgtattatatctaccagcttgacctctcaatcaaacttcttttatgtaaattttgatttgtttctccctctattcctggtgattgtaataaatagacagatcgataagcttttaaaatattatacgtgaattattacaccatcatttctctactaccaatattaagcaaatattgaaacatgggttatatagaaatcagagaaatcgatttcaagcaatcattatcgactacggtcgttcgttaaagatcatgcatgtgcttagtggcaataccctacgcatcttgattcgttactgcggcacgtgtcatgaccatgcacatgaatgatgattaatgtttagtacatataatgttcacgcaaacgcatagtgttaggaaaagagaatggcggatctgaaagacgaacgaggaaatccgatatatctcacggacgcacacggggagccagctcagctcatggacgagtttggtaacgccatgcatttgacaggtgtggcaaccaccgttcctcacctgaaggagagcagctacacaggtccacacccaatcactgccccagtcaccaccaccaatactcctcaccacgcacaacctatttccgtgtcccacgaccctcttcaagaccatgatctccgctggttcggcaccagttcggtacgattaaatatctattacatagttgtattgagattcaatatctgtatcactcgtaagtaagttctaaaagcatgtgaacgcaattgtctaatagtttgcgagtagaaattctacatccatttcatttttatttatgtatgcgtgtatattattttaaaaattattatcaagattcactgtccatggtacgtataaaaatgtagacggaggagaatggcgaaggagtagggaggaaaactaatataacggatgaaactaaatcgaagctaggcgtcgacaagccatcagctgcgaccgtaacaggatcaggatcaggatcggttcacgagaagaagggtttctttaagaagattaaggagaaactttctggccaccataatgatctttgaaagcttccatacggatggtcatgattacttgtgtaatcacaatcatgttctaatttcttgggaacaaaaaaaaaaaaaaaaaagaaattgtgtaaaatgttgttggtaattcanagttgattacattatacggtccaatatcaaaccgacccgaaccgaaccaagtttgagagatgtaaagttgatccaacgaatgagattgcataatcgtgatctctctattcaaaccttttccgtcgttgatgactggctgttccgtgaacttcccactcatagcaaaatgttagctcagtcgcacttcttctctaagtccttcgatctgattccgccacagtctccggcgttgcggtctgcaaatccttctcttcgtatctcttcttcttatagtaacagccgcttatcctttctttcttcttctgcaattgctgttcccgtctgccgccgtcggttttgcctgaaaatggactcaaactcaaaacggcctaacataagcancatgtctccttcggaacttagcgcccctgagctg

SEQ ID NO: 36506 - DNA, 1271 bp, Arabidopsis thaliana landsberg
  unsure (1)..(1271): unsure at all n locations
agatagaagagaaaggaaacctgaagagctaagtaatgacgaggaaagagttgatccataagctctaagatcccagcaccatcacgataagttctaaacaaccattgccctttctgatccaaaacattttggaacttctccttactgttaccaatcgttaaaagctcgtcttttaaaatcgaaactctttggaccaaatcagtgtgatgagctggtaagctagttactcgggtgagtttgccgataaattgactgccgagtttcacaaaatttgatgccatgaattacgaatttccttggagctgaagctccggggattactactaatagacagaatcggatctgaggatctgcaaattgtgcagagaccccaaaattagggtttatggtaagtacttaggaggagaagaagaagaagagtgataatgggcctgaggccttaaacttcggttaagtagaccggtgcatcaaaccgtatgctaattgtacttggtttacggtttacccattcacaattttaaaattaaattgcatttttcctatgtattttagactttagagaacctatattttattggtaaatatggtttattgatataaaataatttaatcatattaaatgtaagactcggtaaatttacgattttataaatttttacaagttttagctaattggattactgattatatagttttttttactgattacatttatgcaactctaaaatgccttagtttttgaacctcactttctactttctctcttattgggaggctctccagtaaccatgttttatgtttatatattcgttgggttcacggtcacaaccctaatattgtgcttagcaaaatttgaatttgtctctttccagtgtttccatattcaacgttgttgaatattattaagattttatgttcttgcgcacaccaaaatgtgtctacgtcaacgtgggctcgcgaggtctctgagttgaaaaaaaaagagattttcttctcatattttttagagagaaaaaacaacaatagaccatgtgttgtgacacacctccaccacctgcttaatttggcactaaatggatttaatttactactcggcacttcaaaccggtgccgagtaaaaagctaacatttatttttgtccaaaaacagcacaaaaatgcttacaacaatttcaacggatgctaaacttttgggcgcttttcaccattatgcattataanatatatatatagatcatattatttatatactatatatgtaaaacattccaa

SEQ ID NO: 36507 - DNA, 2173 bp, Arabidopsis thaliana landsberg
tgtcacccaaagaacctccaatcatgcttttctctttctcgaactcatccttgtatttgttccacagagatgtccattgaataacctccattgtcactacctgttttagaagcatcctgaaacgggtgatatcaaacaaagaaaaaaagactgagaacccatttgagtacaaaagaatcagttattgaaataacaaaatttatcagaaaataaaatatacttgaaatcagggatttctgataaattcttgtcttccagagttgcattgagcaagcttgattgcattgggtcatgaggtgccaagaccaagaaccagcagatcttcctcaggacctaatgttttgaagatcaaagaaagttattacactaaccctatagaatgtatactaactatacatccaatcaacggcatgagcttaccggaatccactgctccggagtttcttttactgaagggatatcatatatcgccttgtagctacggcagatttcaatgtactcattgttatgagaatagtacctacatagttgaaattttttatggttaataataaaaaagatgagaatgccacagaaatcaatcatggtacgtcagaattcagtggataacataatgcaattgatgtccaaaatcgttggccatgaaaagagagtcataaatttgacacaaaaggagattcatccaaatttcgatactgtcctccaggaaaaagttgtaatatgcatctctgagaaaaccatagcaagcaaaagccacacagattgatagaatttaagagacagagagagaggtccataattaaacagtcatataagaatttaaaatgccatgataaatgatggaaatacaaatcacgaacaatgtgatagagaagctcaagaaggccgtaccgaatcataagctcgtagtaaattcgcttaagctccaaaagggttggtatatcagcaggagcctcttctaccatgttatcaccttccttaggtttcttcttatctttttttgtatctgcgtcaaaaactctaggattgatcttcctagataagatttgtgcacgaacaaaatcttgacgatccaagcacaagcgaacctttaaagtttgaccacaatagtttgatagttatcacaatgaaagaaaacaccagcaaattattaattgcaacgtaactacacaagtccttacttgttcaaggataaatgcaattttctcagtttttgccatagcaccaaatgtctccacctatagttaattatttatcaatgcacattgcaggggttaacaagggaagaaacgatttccaggagatttaatagccaaatgcacaaaagcttacagcaacttcttgcataagatctgcagcttcagctatcaaaccctgttcttccttaatcttagcaagcatcttggtcaaacgagctctctcgatttcgacatatatctacacatgctcacacacacatattcatcaagaaaaaaactttcacggagtgatcaagattcaagcaaatataactacaacaacaacaacaatagccaactctaatccgcacctttccagcagctacattgtttagagtcttaataagctcaatccgagtttctatgtctagtgtctgatcaatatactgcattgcttgttgcaccatggattgtacagcctgcaaatcaagagacctaaccactttcaatatctcactcagttcttcattcaatttctcagtaagattcagaactcagtagaaaccgttccaagtaatcgaaaaccttaaactaccacaagcaggtttcaaaagctaaatcgatagaaagtagtgtgacctgcttaagctgaccacgtttcttcgagagattcaaaatctgttcgttgagaagtttccaatccttagcttcgaaacaaagcttaagaatctcggtagctgcttttctagttccggcgacattttctgcgagcctcatctgtttctcttcgttcagcagccgatcaatcgacgattcgagttttctactttcttcctgcaatcaaatcacgacatcgaatttgacaaaccaaaattcgaacggtagagataagagagagagagagttgaaaatcagatctgtgaaatcggagacttgccattgctaaacgccgggaattaatactccgagagagagaagagagttagtgaaacttt

SEQ ID NO: 36508 - DNA, 1171 bp, Arabidopsis thaliana landsberg
gattatattaaaaatattttcagtacaaataataactgtgatttttatgattagaaattttaacttacgcatttttttatgttgaacgattttatgattgacggcttatcgataccacactcacgattaaaaaattttactttttagtttttactgattgaactatagcgatcaactctgtatgcactatgcttagagatttttggtcagcttgtctttgttaatacgagaaaattgtattctatgaaatgaacctcatattcatttatgatatacaatcactttaattttaaacttaagtgttacaatagaaaaaagcataatttttagtagaatatgatctagtgatgatataatagacggtttgcaatagaaaatgtgtttactcatgattaaaagagagaaaacgaaactataaattgctcagctttcacttgattagaattttactttttaacgggccaattcatgtccaaattataggccttttaacggcctatactttttgatatgcttagcttttttacttatccactccaaattcccaaaaagcccctgagtttttcggattttacattttctaccagagtggagaagaaaaacagagaagaggaaacaaagcaagcaaaaaagagttgccatggaagctcttattgcttccacttccttcttcgtccccatctccaactcttcctcctcacacattatcaataacagattcttcccttcattttattctcccaacttaaatttcgggacttttcggaaaacttccttgtcatcatcacacctcgtcttctcatcttctgcaatttccgcaccgccttcttctactgttcttactcgaaacagctattggatggtgttattggataaacctccgcattgggtttcttccaaatcagccatggtagattattatgtcgagattcttgcgaaagtactgggaaagtgggttctttttcattgcttgtttgtttcttttgagctttgtgcttcaactttctgcttactattggtactgattctgttgtttgcagcgaaaaagatgcgcaagtgagtatatatgatgcttcctttgatacccatttcgggtttggttgtcatatcgacgaagatgcttcacgacagctcgctagtgagtattctatcacagagagtttcagattct

SEQ ID NO: 36509 - DNA, 4229 bp, Arabidopsis thaliana landsberg
gcaagctttatatctactatgctgaggattcaaggaatgtcggtgttgtgttcaataatatctatgagctaagcggccttatttctggagatcaatacttctctgctgattcacttactgatagccaaaaggtttgctccatgttgcttaacttataacaacattctttgctttgctgcaagttatagtttagtttaagttaagattcactatcttctattaaaagtttattagctatgattcaccatcttcttttgaatccacttaaagaagagagttatcaaatttgattctttctttcacttctgtgttctaaaggtatatgttgaggggctggtgaagaaagcatatgaaaactggaacctagtcatagagtatgatggaaaatctcttttagacttgaagcagccccagaggttgagtattactcacactaatctggaaaattactcgactgctgccattgaccatccaatgcagatggtggcagggcattcgtcttcaatgccgcctaaccagtctccagtgctttcagattttgctattggaggtttgcatattgaaatcaatctcttgataatttgtgttatagtttaatactaaatcttatatatttgttcgattcaatcaatctacagggtatgatcaaactctggcaacaagatatcattcgcatccccagcttttaaactccaacccgcgagcacaatttgaggttgcttcatgcagtacatcgcaagaccagttcatgggaaatctacatcaaactcaaagcaccataaacaatcaacacatgaatggcctggctctcggtcctccacaatcatctacaagcggataccaaaacatcaacccttcttctgttcaccaggcagatctcaaccatttagaagactggtcaaacccccgtgagagaggaccagatgatttcttctcagaggaagagatccgactcagaagccatgaaatgctagagagtgaagacatgcaacagttcctccgcctattcagcatgggaggaggaggcaatggctctgcaacacacttgccagaagatggatatactttcccatcgtttctacacacgcctatgcaaggttatgatgaagaccgtggtcgatcaggcagagctgttgttggatggcttaagataaaagccgcaatgagatgggggttcttcatcaggaggaaagctgctgagaggcgagcacaaattgtagagcttgatgatgatgatgaagatggcgaatagtgtataaaaggaagtgtacagttagattcagtggatctgtggatgtgtgttttatgaagcaggagacttctaatatgcttgattgatgataactcatttagacagtagcattcttaagaactgattctacagtcttagatatgtgattcaacaagtagaatttctgtatggtccttttatttgatgatactcgagttactatctgtaaggcttttgttccacgaaactttaacgtcatgtctccttggttattatttattctgtttgtgctcttgcaatctctcaatgttaaagtttgtgagacaccaaaaagaccgatgctactgtcttgtctctaacattactaacattagttcctaccagtgttttcaagaagagtagttatttatggtgagaagaaagaagaaaagaacttgtgaaaaaataaaataaaaataaaatctagtaaatgaaagataaagtggaccgggccaataattacgtgggtcgggagtcataaatgggccagaactatgaacgaacggggggaatggcctatgcaaatgacgtaaaagatggcctcccgaatcagaaaaccctaagaatttggggttattttttggtgaagataggaatcgattgttcaaagtttccatttatgggattatgaatcagagattcatttaagtaaaaatggaaggaaaaaaaacatatttatgggaatttcgcaaaggaaaggtgtgtccttttttcataagagagcgtcggcgattagggtttttcttctggagtgagcaagcaaactgagtagcaaaatagctatgggaattgcgagctctgtaagcatggcttatagcgacgaggatccgtcggcaaatcagggacaattttcgcgggatgaggacgaatcgagaactctaattgaagatttgaatgaaacaggggaagggaaaggggaagaggaagagagtggagagtgcaggttgtgccggttcataaagggaggtgagtgcaaggaatcattcatagcattggagcaatgcgtggatgaagccgaggagagcggagaagaaagtgacttcacaaaatgcaaggaggtcagagccaagttcaagacttgtatgaaaaccctgtttactacgagcccattcttgctggggaggctagagcgattgccaagatgttgatggagttgcaagccgaaaaggaggccattcttgccggtgaggctgcagccattgctagggcggttagcaggttgcaaacagaggaatccaatggacgacgtcacgggctcacggcgagtctcccacaccggctttcaatttaagttcaataatcgacaaaggaatccgcaaccgtcttagcacattggccagagtaggatccgagcacgaagggctcctcagatattggtttcagacccacggtcactaatctcttcgaaggctgattaaataaatctttctaaacaattcggttagttgctgcatttattgtacaacagtattttttaattgtatgttaacacaaatggactggaagttagaaatatgtttgtttaattgactaaaactggatctatgttaataaaataattcatcaagactataaacacataagttgtaatctatattactaaaaattgaaaaacaattttaaaatcaaccattaaactaataatagagaaaatacgttatactcactaaaatcatcgttttaaaatatttcttctttgtaaatgcgataatatccttgattttcgcggatctttatgtttgatgcgggcatcaaagaagggatagtttggtaaaaaaattgttcgtagatttggaccgccaagactactttcttgaactttgctaataagtaacgagaaaataaatttaaaaaagataaatgtaaaaaaaaaaaaagaagaacaagttttataacataaaaaaaaaaaaaaaaagtttaagattcagtgaacctgaactttaacggcttgaaatatgggccggtaagcaccagctgggctaaaaaatgggtcgagcggggaatgttattgtttagttatttttaaaagaagttaaaaccgtaaacgcacataagaaaaccctaaactggggtttggtaaatcttcgattcattagagagtttcaaagtttccatttatggaaaatgatttagagaaaatgaaaagaagaacaattgatgtgaagttggcaaaagtaaatgtgtgacctttgttttgttaataagagaggcggcgattagggttttgggagtgagcaagcaaattggataaatcaagagtccgatctctctcgatcatctatgggagttgcgagttctgtgggcatgacctttagcgacggggttccgttggcgcgagatggggacgaatcgagaatcctaattgaagatttgaaagaaacagaggaaggagaagagagtggagagtgtgagttatgcgaatacataaagggaggtgagtgcaaggaatcattcatagcattggagaaatgcgcggatgaagaaaagaagaacgaagaagaaagtgacgtcacgaaatgcaaggatgtcagagccaagttcaagacttgtatgtatgaaaactctgtttactacgagcccattcttgctggggaggctagagagattgccaagatgttaatggagttgcaagccgaaaaggaggccattcttgccgtcgaggctgcagccattgctaaagcgttaagcaagttgccaacagaggaggcggagttggggaaagcagagagtaaggagtgatcatcatcccaaaaggtaatgcgtgtggccctaattatatcaaacctgaagagattgagattgataatactatatgtatgttgtttgtctcaatcggtatggatgtttgcttgtcaggaaccaaaacctatcgagttacatgatgaccgatgatgtatctatagtatcattgtttctaatcctagcatgaacggcttcagtcattgatttatgttgtttt

SEQ ID NO: 36510 - DNA, 1711 bp, Arabidopsis thaliana landsberg
tagttttgaaggctcttcttaatgaagatggtgtttgaagcagagaaacctttgaagcactgaaacactttagagagatccttaaagaacagaggctggtcactgttctcaagcgttttatatccactgtccgtacacttttcttgatcctaacaagaaaaaagaacacgaaagtgtatagatatatatatatatatagacaaacaaacacacactcacacacacacatgtatatatagtataagagtcttacccacacaaacaaaagcttatcttctagatcttcaagaataatgtttagaattatgtcaacatttttcctatcagtcaaaaaccatggaagaaacagatcaggtactcttagtctcttaagagaaaaagattgaaattattgaaagttaagcagagactaactcgcaagcagaggaccaaataccaacttggaatctctcaagacaaaacttcataaactcttcagcaaacggcctcttatacactaaacaacaaaacaaacacaaataaactataaataaaaaaaggtagcaaaattaacaaaagaataatgaaacgttaccaagatttggcccacaagaagcatcaggagagcggttcttgggtttcttacgcaactcttttttgtggactctgtgaagaagaagaccacttagactcaagaccaagagtttctttttctccgtcttaggttctagactaagtttatcaagaatcgaactcagttctgtctgatctgaaactgtatcacctcctgagtactcatcgtcgctgtcgtccgcagcaagcaagctcttcttgatcttttcttcagccattgtattgaatgagattgatcaaactcatatggtgcatatatatatatactaggtgagtcatttaaggtggtgactaatggcgatttggcttcacgagatcaaaagacatttatttggcgtttttcttcaagcggctctttggatactcacaaatcttttttgtacttatccttaatttctctcttttttttctttttttttttctgtatccaacttggtagtgtgaatcgacttacagcgaccaatcagaaaattccacctgtcagcagttgttatacatggacaaaagtcgatacatcaattaatcgacgctgatttgtcgagttatatttcccgtttaccattttgttttcttgttatgatttggggaatctctcacgaattctatcaaaagaaatagcactaaaggctcggaggaagcctgatggaacatggaagattgtgctctgttttcttctgacaatttttacataagtaaaacgcatttgtttactattttttttcatataaaacatgaaaaacttatatttgaattaatcgaaattaaaattattaacagaaatatctaagtttatatgaaccttttaacaaaaaaaaaagtttataagaacataaaaatcataatagtttagcaacatttaaattattttcaaaaattagtaacttagattaaaataaatattagatcacctcataatcttgagtttgaaactccaaagtccaaagagcatccaaaaatccgacgcaaacaccacattttgataagaattatagaactagtgatttgcattttaaatgttgatacatatagaataaagcataatccaaaacaatgattactggaaaaaatatgggtccatttaatattcggaataaaaaaa

SEQ ID NO: 36511 - DNA, 2596 bp, Arabidopsis thaliana landsberg
tctaaagatttcagatttcagatttcacatcgacaaagagcaaattatgaagaaagaaaaaatgcttgtagaaccaaccggcatagtttttttgatttagttaaatttatacgactcagcaacgcaaatagaaaaagtttaaaaattgatattgaccattatatattatataagacacaaatccgcaaaaagaaatcaaaacatgagaacaagatgacaataatgagatatgaaaatttggtaaaacgtaccgatctctattatcgtgcaaaggtattaatgtttggattagcatcaaatagataccaacttgctcttcactcttcttatagaaaaatatggtaccatatcgacccaccaaactaatcatcatcgaatctagctaggcgttaggattgcacattactcagaaatccaaaatataataagtaatttaacgaatttatataaataataaccacgtacggagtcaaatcttgttaaaccaattttttgacttcacctattacatatcattcgtagaatcatatcttcgtaagtacaaaaaataaatagggagtttttgatttgagactgaaaataaattaaattttgttaactaaaaattataaaattaatctgtcgatgaagccaaagagagaatctaccgactgcaaaatactgcataagaagaatctaaaaaataataataatcttttttttttttgtttgaatggttttttatttaaaaaaaaaaaaaacaatccattttgagtttgtgttattaccgtgcaagtcaccacgtgaactcacttcttcatctcaggagagaaaagggcccactatgattctccgtatccaaatgtggaccctgctctttcactacacacgtgtgacctcatcctctcccacgtgaatatccacgtggcgttcttccgttccgtttctcccatccctcccatgcctctccccatgactctatttatcccaatcctctcttcctttcattaatttatcagttaaaattcctcttttttcctagtagtatttggagtttacatatcaaaaagtttagactaaccctaaaaacattgatagaaaaacttatcattttaaacgttcttggggaccaatcaaaatggttaattgtctagtgcctgttcttgattcttcagacatggttgcaaaagtccatagtcaaatcaaggttatatgtagctttaacacgtttattaacaaaaccatatcaaattggttgttttttgcattttcagtcttgacgtatacactgccatttttgaattagtcaaatcgttacgtagttggtctacgatgtctcgctgaaacaaatacatacgtgtgtatatacactatgcaagtagtatagttaacatcataattgaccctaaggaaaaaagttaatgtaaacagtgacacgtagatatcacacggttcttttttggtttttgttaaagatgaacttgttaataaagaatatgacgtgatcttctccggtacaactctttgtcctataaatagagaactcttgtcttcatattctcgacacacacatataaacgcacaaactcgttaaatttgtacgaatataatttttttaaaaacactcgttataatatattaaagtttcacccaaaccgaaaaaagagagaatctgtgcatgttgctcagaaaatcttcaaagcgtaatctgggcttacgttagctctcacgaacccccaaggatcttctatatatgttttttcatttccccataaaatctttcattatctaaaaaatattattatcgtatcttttttcttctatatattcttcctcctcaatcttgattcttgtttcttgagtattctttgatgaatcgtgaaatgacgtcaagctttcttctcctgacgttcgccatatgtaaactgatcatagccgtgggtctaaacgtgggccccagtgagctcctccgcatcggagccatagatgtcgacggccacttcaccgtccacccttccgacttagcctccgtctcctcagacttcggtatgctgaagtcacctgaagagccattggccgtgcttcatccatcatcggccgaagacgtggcacgactcgtcagaacagcttacggttcagccacggcgtttccggtctcagcccgaggccacggccattccataaacggacaagccgcggcggggaggaacggtgtggtggttgaaatgaaccacggcgtaaccgggacgcccaagccactcgtccgaccggatgaaatgtatgtggatgtatggggtggagagttatgggtcgatgtgttgaagaaaacgttggagcatggcttagcaccaaaatcatggacggattacttgtatctaaccgttggaggtacactctccaatgcaggaatcagtggtcaagcttttcaccatggtcctcaaattagtaacgtccttgagctcgacgttgtaactggttagtattaaaacattcaagttcatatattttaaatgcttttgtttgaagttttactaataacaagaaattgataccaaaaagtagggaaaggagaggtgatgagatgctcagaagaagagaacacaaggctattccatgg

SEQ ID NO: 36512 - DNA, 1752 bp, Arabidopsis thaliana landsberg
tatgatctgtgagaagaaatagtggtcagtagacgattcagggccatcaacaacatcacttgggctggaatacgcagaggtttcagttttctcttgctgttttcgcctcaattcattgttgtgaaactctaaaaacttctgtatgttgttacgtaactcgacaaactcttgctgtttttgcctcagctcttcgtttcgacattccaaaaacttgtctaaatcgttacgtagctcaacgatcttgtgaatctcttgtctaccagtagcaatcaaatgtatcaaataacaactcatgccaatgctgaacaaaaattcccttctttgcaattctacaagaccaaaagttataattaggacacaattagattaattaaactgatctattacaattcagttcacacataaaacaatcttagttctccatgatcgttttcaattcgacgagaccaaaaaaattgttaccggaagggatggttggtggcggtgaatctgaaaattggccaactctatgatgatcatcctccgagtaagttctgatcctcaccgtgtcagagtctctcacccttggttccgccataggtgttttctttcctttgaccttcccctgtggggagagccatcgagacacgattctccgtggcgacggacatctgatccggatgcatcctgctctcactcctacaccgtcatccatcggaggattcaaaattcgatcgttaaggagaagagactccaaggaaagagaaaggtatttaaatgagagatcagaatcgggattaaagaaagagagagagagagagacaggaatgttattaatgagaatcacgagaaacagagtgttctttcgacttcgatctccaaataaaaacaaaacaaaaaaagcgtttggagggaaacttttgaatttttggaaagtctttaaatgccaatcacctctccttttcccaatttataacaaaatctttagttattggtatgtgactaaaatctatgtataataattggtataattcattcactctttttttcttttctcttgacaagtaattcattttttacttaaatttagtgattttaggtcaaaagtatgtttagagatcaaaataaagcatattgagagttcttttagccataaatggtaaacgcgtaacgttgaccaaatgaaatggcaatgaagtaatatattcactttttttaacggccagtcagtattgtagaccatttatgaattttaccaaaaatatcgttgggaaaagaccataataaattcgagacaagtgtagtggtactactcatttgatcgaattagaatcttcagtgggaatttgccttttcccaagttaattctcgatgtagtaagtagctggtcattacctttttgacagagagcaatttgtaaaaacaatgcaattctgattgataaagttacaaaaaaaaatctcaacaatacgatcagcacaaggtagttttcattctcaaagcaaatgtatgtttttttttttcttttcttgttttgagaaaaaaatgaattgatattaataaataataacgaaaagctaaaccaacaagtattacagtgtacagttgatttctacagtagtaaagtaaattggagaacaaaagaaaaatacaaactacgagcaaaatatttgggtttgggtctcagtaggtcagagcgaagatgacatttggcttatgacctccaatgtagctttcgtcttcgttaaatgatccatctacgtttgttcaaaa

SEQ ID NO: 36513 - DNA, 1230 bp, Arabidopsis thaliana landsberg
aagtttgaatcagtcaactgtctcaatggctagaaagaaacgcattcatgctcaggtttgttcctccttgtctactcaacatctttatgctgaaatggtaaaaggacaatggcattaaagtttaagatatttgtctattaaagaataagaataattactacaattaggccccagtgattgtgttacagttactaccatgcctagctactcagctcttggtcatctggattgacagctcgagaaattgaaagtggttgtgggtagaagatgaatcttcttacggaaaagataccttagattaaggcccacatttttggtggtctttataaaaagccgattggacttcagagagattgatttcgtattgtttgcacgtaaaagtagaaatagctttctggactttatatctactgcttagtgatagtagccgcttcttgtctctctggtactatagcaacaaaaagtcactatgttctctagacacactaacagttctgtgaatactatgcaatcacaattatagtagttttcttgaaaaaacctgcatggtcctttaatctctctgtaactgcttgttgatatatgcacagattgcctaattctgttaaagtgtcttgtcttgtagttcaatgatttacaagaatgttacctccaaaagcggcgtcagttggcagaccaaccaaatagtaaacaagaaaatgataagagtgtagtacggagggaaggctatagcaacggccttgcagattttcaatctgtgttgactaccttcactcgctacaggtagaggagtgactatcccttttcaatcggtctagccgtacataaagagtgttttcgaattagttggggttttaattgcactctttattcacagtcgtctaagagttatagcagaaatccggcatggggatatatttcattcagccaacattgtatcaaggtgaattttctattccttgttcgttgatcagataacagatgataggtaccaaaagaatgtctccgaatatatcaaaatagacccttaagtgattaagttttgtttaatgtattgatagacgcaattattactatgggattcgttgctgtgtaattctaagccagtgaatagtatgaagataaaactgctgacatggtagggagaaggttgtgtagccagccccccacttgaggagaattttctaaaagatagaaaactatgttatccttatccatgtcggaatatat

SEQ ID NO: 36514 - DNA, 3826 bp, Arabidopsis thaliana landsberg
tcctgcagtttttacggcgacggaaacgatgaatccaccggataattatgttccgtctgtttctcactctcaattctctactcctcctcctccacagtcgagctcaaacaccaataccgaaacaagtttgaatccatttccgaattcgatctctacctcaatctctaaccctagttttgagcagatggtctcattctccgcaccaaagaaacgaaggagaggacgttctcagcgctcaatgtcttcgcttaattcccttcccgtccctaacgtaggtcttcttcctggtaacagtaatttcgtgtcatcttcagcttcttcttccggtagatttaacgtagaggtcgtcaatggatcaaaccagactgtgaaaagttatcctgggattggtgatgagatcattacgattaacaaggaagctaccactgaagctttgcttgctctcactgctgggtttcctgctgattcgcttaccgaggaagagattgaattcggtgtggtgcctattgttggaggcattgaacaagtcaattacattttgattaggaaccacattatatccaaatggcgagaaaatatatctagttgggtcacaaaggagatgtttcttaattcgattcctaaacattgtagtagtctcttagattcggcttataattacttggttacacatggatatatcaattttggaatagcacaggcgattaaagataagtttcctgctcagtcaagcaagtctagtgtgattatagttggtgctggtttatctgggttggctgcagctaggcaactgatgaggtttggcttcaaagtcacggttttggagggtaggaaacgacccggtggacgggtttataccaaaaagatggaagctaatagggtaggtgctgcagcggatttaggtgggagtgttttgactggaacattaggaaatcctttagggattatagcgagacagcttggttcttctctctataaggtacgagacaagtgtcctctttatagggtggatggtaagccggttgatccagatgtggatataaaggttgaggtagcgtttaaccagcttctagacaaggcaagcaaacttaggcagttgatgggtgatgtttccatggatgtctcccttggggcagcactcgagacattcaggcaggtttctgggaatgatgtggccaccgaggagatgggtttgtttaactggcatcttgctaacttggagtatgcaaatgcgggcctagtatcaaagctttctcttgcattctgggatcaagatgacccatatgatatgggtggagatcactgctttctgcctggaggaaatggaaggctggttcaggctttggctgaaaatgtaccaatattatatgagaagaccgtccaaacaatcagatatggttcaaatggtgtcaaggtaactgctggaaatcaagtgtatgagggtgatatggtgctgtgtacagttccccttggtgtccttaagaacggatccatcaaatttgttcccgaattacctcagagaaagcttgattgtataaagagattaggttttgggttactgaataaagttgcaatgctctttccgtatgtattttggagcacagatctcgatacctttgggcatcttactgaggatccgaactatcgaggtgaattctttctgttctatagctacgcaccggttgctggtggtgctctcttgatcgcgttggttgcgggagaagctgctcataagtttgagacaatgccacccactgacgcagtgactcgtgttcttcatattcttaggggtaatagatttcactatctattgattgtcatttaattgaatttcaatttttacctgtcaatatcaatcttcaagaattattagttgaggatttgtattccagatttgttaaagttgatgctagcgtctgacgcaagttccattttaatgaatatcaggtatttatgaacctcaaggaataaatgtccctgatccacttcaaacggtctgcaccagatggggtggggatccattcagtttaggatcttactctaatgttgcagtgggagcttcacgcgatgattacgatatattagcagaaagtgtctgatatggaaggcttttctttgccggagaagccacaacaaggcgataccctgcaaccatgcatggagcttttgttactggtctgcgagaagctgcaaacatggctcaatctgcaaaggcccgaggcataaggaaaagaatcgataggaacccatcaaggaatgctcattcctgtgccattcttcttgcagatttatttagggaccctgatctggaatttgggagtttttgcataatctttagtaggaggaatccagacccaaaatctcctgctattttgagggtaactctaagcgagcctcgtaagagaaacgaggaccaaaagcagatcagcactcaaacaagatactgtttcagcagcttcagtctcatttcaaccagcagcaacagattcaggtgtatacattattaactagacaacaggctcttgacctgagagaagtcagaggtggtgatgaaaagagactatactatctctgtgagacacttggagtgaaactggtggggagaaaaggtcttggtgttggagctgattcagtcattgcttctattaaagccgagcgaactggtcgcaagctaccatcatcatctacctcaggcacaaaatctggttaggctccgtaatttcctgatttgattactccttacttaccggatagaaccagtagcaacatctctaacttcttctatattgagtaggtatattaaaagcaaaatccggtgcattgaagcggaagatgatcaggtttgctacgaaatcatatgtgcaataatttctctcacttatcaaaaacaacattacagagaacctttctgttgcacagaaggattaaaggaccgttgctgctgaagcaaagtaataacaatggcgtctcagagagtataaaatcagagtctttaggtaatggcaaatccttagagcaacaacaacaacctagaatagtagagtcgataggaggaggtagcagcatgcaaggggaaagcaagtctttgagcacaggagttgcatctagttctggtattcatttttcgtaacttctttgttccttttgaaattctgatcatttacatcgataataactcacacgtaggtggttccttacatgttggtggtgagacgatgaaaaagattgaacaatgacttttggagaatccctgtttgatacaacatctgtagttcacaaattttgtacttcataatccatttctattgtaacaactaacaaatttaagttataaattttttcctaatgataatgtctggtatgtttccagactttttatttgcaaatgtaaaaagaaaatatttgattttttcttgcttcattacatcgaattttttttgtttgttctttaccaatataaatacaaataccctttgaaagctcagctttcaaaactggaacacaaaaattgaaattaagtggaaatgaagaagaggaagattcatcatagcgacgacgaagaggacgacactttctactatcgctattcctccgtcgcggcaccaccaccttcgaaccctaaacaccaaccttcttcctccgccaaatcatcagctcccggcggcggatctggcggcttagctccttcaaaatcaacactctacgtctccaatctcgatttctccctcaccaattccgacatccacactctattctccactttcggcaaggtcgcgagagtcactgttctcaaagatcgccacactcgccaatctcgtggcgtcgc

SEQ ID NO: 36515 - DNA, 3538 bp, Arabidopsis thaliana landsberg
tttctgttcagatattttcgtcaattaatcaagatgtcattcataaagtaaaaaaaaacaaaattcaagctaaaaatacatacccaacaaaaattccttaaaaaaattacttagggggcatctggtaatttaattttcttatagaagatggcaatattaattcagtttttttttttaatttaccaatatgatactttaattatatttcttacttgttagctctactaatgcacacatacttatttcgacgactaaaagaaaaatactgaactcaaacaatagagaaaaaaagaaataatcctactcaactatgttgaaaataacatcaaattcagagaaaatgcacatacaccaataatataaataaatagggatatttaaaataataataaaattgcgaaaatatcgagcaccaccagatctacagaaatgacacagagcccaacgatgatgtatctcgtttattttcgctataaataaactcacacagcccactcttcttcctcgctctctctttcgccttctcttagcctacccttcttccttcctcctctccgattcttcctccgtcaggttcgtctccgactttctatgtcttcctttcgtctctcttatttagctccctttccttccttctccacgttattattaccacttgtgttagtgtgattcgtttcattctcgtttttttttattcctcgatctgtttgctcatttgttgagatctatccgctaagtgagttcatttgactcagatctggatatttcgtgttgttcgatttatagatctggtttctggatctgtttacgatctattgtcatcattcttttggaaatgattggtgtttctgtgttcgtattcgtttagatctaacgtttttgatcgatgaatgtcgcatgtgtttttatctgaaagttttcgattacagtatcaagtagtagtagtagactcaaaaagctgcataaactttttatacacttgaatcgaaattttatcagtttcattgatgctttacggttttcttggagtttgttaactaaaatcatttaacattaccaattcattttatatggttttagatattgatttttggtttgtgttttaatgcagtaaaagaaaatcaaaatggcttcacacattgttggatacccacgtatgggccctaagagagagctcaagtttgcattggaatctttctgggatggtaagagcactgctgaggatcttcagaaggtgtctgctgatctcaggtcatccatctggaaacagatgtctgccgctgggactaagttcatccctagcaacacctttgctcactacgaccaggttcttgacaccaccgccatgctcggtgctgttccacctaggtatggatacactggtggtgagatcggccttgatgtttacttctccatggctagaggaaatgcctctgtgcctgccatggaaatgaccaagtggttcgacaccaactagtgagtcttcattgatctcttgtgttctttttgttgacattggtctttttgagttgtggactaatttgattatgcttttgttgatgcagccattacatcgtccctgagttgggccctgaggtcaacttctcttacgcatcccacaaggccgtgaatgagtacaaggaggccaaggctgtacgtatcattctttactaatattcatttcttaagaaattactgtttgctcgtttaattaattattagagatcataggctttagtttgaggatctagtgtttaagcttagatttattgagtggtgtttcactgaggattctgatatgatatgaatatacattgaatataaaactgttagaattgtcatctgccactggttgtttaaagtagtttttttttcttctaagttctgatctgatatacttgatgtttttcagcttggtgttgacaccgtccctgtacttgttggtccagtctcttacttgctgctttccaaggctgccaagggtgttgacaagtcattcgaacttctttctcttctccctaaaattctcccgatctacaagtaagaaatcactttattgtttttctttattatgctatccgtatccttgatgttatcaatgatcctgtaacataccactgacatgatgactttgatttgtgtacagggaagtgattacggagcttaaggcagctggtgccacctggattcagcttgacgagcctgtccttgttatggatcttgagggtcagaaactccaggcctttactggtgcctatgctgaacttgaatcaactctttctggtttgaatgttcttgtcgagacctacttcgctgatatccctgctgaggcatacaagaccctaacctcattgaagggtgtgaccgcctttggatttgatttggttcgtggcaccaagacccttgatttggtcaaggcaggtttcccacagggcaagtacctctttgctggtgttgttgacggaaggaacatctgggccaatgacctcgctgcctctctcatcaccttgcagtcacttgagggtgttgttggtaaaggtattatattcttccagaatctcttatgtggattactcaattagaagtgtttaatttgttatctttctctaactcgttggttttgttatttgtgaattggtgcagacaagcttgtggtctcaacctcttgctctcttctccacactgccgttgaccttattaacgagactaagcttgatgctgaaatcaagtcgtggctagcttttgctgcccagaaggttgttgaagttgacgcattggccaaggctttggccggtcagacaaatgaggtattgtaaaaatcctacaaacatgtttcccaagtgaaccctttgtttgaaaaagacttcaagtctctaatatttctctctttcagagtttcttcactgccaacgctgacgcattgtcttcgaggaggtcttccccaagagtcaccaatgagtctgtccagaaggctgtaagttcttgctttcatactcaagctttctttactattatgatggttttctctgtacgatatatgtttctattgatcctaatgatttgtaattcctgcaatctcaggctgctgctttgaagggatctgaccaccgccgtacaactgaagttagcgcaaggctagatgctcagcagaagaagcttaaccttccaatcctcccaaccacaaccattggatccttcccacagaccgtggaactcaggagagttcgccgtgaatacaaggccaagaagttagtctcttaatcataatttttttgcattgatcatttaagcatgtttagtaagttgattgtgatgctaactggaactctttcttctactagaatctctgaagaggattacgtcaaggccatcaaggaagagatcaagaaagttgttgacatccaagaggaccttgacattgatgttcttgttcacggagagcctgaggtcagtctttgtctctaactagaccctaaaactaattacaacgtcctgtttctgactcagccatgctttgacaatattatagagaagcgta

SEQ ID NO: 36516 - DNA, 1439 bp, Arabidopsis thaliana landsberg
aaatgcaccagatccaggcaccaagatctagcgacagtttaccaatgattattatttctaactcggacaatttagaagagttccggggattcaaattcattccattttttaaactaaaagatatatgtctataagttttgtcaattaaacctcctcctatccaatgtcatcacatacatttcctttcaggacgaagaagtgtgtatatatacacacttacaattcaatctttttataaagatcgagagattaacaacgaaagaacaacaaaaaattcttacaattatcctaaacaatagtatataacgtcgacgaccaccgccgtttccggtcatttacatacacgttacattaatttgaaccataacaaaataagtcaaactctcacaaagaaaaagctaagttcgggtccattattcccttcaggactcaacatataaaaagtctctgaatctttagacccaataactctctcaaaataagctctcatatacgccatttcgccgtcggggtccttccgactccgagtttcccggcaaaactccggcgcccatagacaccggacgtaacaactccatcacgttaagatcttcttcgcgtcgcttctcggtttcacaccgtaacccgttttctctcctttacaatacattgtccataacgggtcttccaaaatatctgtcttcttcttggtctcagaattgctattatcagctcgaggctgtatctcagtctcgagagctactctcaccattcccgtgcttaagctcatttgaagcgccgtggttgcatggcgagctcacgactaaaaaaggtaaacattagggttttcttgaatggaaagacttactcggccttacggtatccgaaataacgttcggtgatttcttgacgtgttgtgatgtggatccggtaagcctaaaccgggatgtataaccgggattttgcatgctacggatggtgttgtaaagattgggaaagatcgaaacacggtgcgtaagactctgaaaacgtttgttctgtttttcttcttttttgaagatggtggctggaggagaggatgttgacgtggcggagtggttgtggacgtcggagagggtgttggagacgaaggaggaattgaggaggaggaggaagaagaacttgtagccattggatttgatgattctcccattagacgacgatcgtacggcgaagaaagaaggagaagatctttcttcgacgaccgacgacgactaaaagaaccaacgtccttgtagaaatgtagtcttttttctttttctttagctctctattcctcctccttattgaattgataattttctcctagtaccaatccttatccttgaatttgatttttttgtttttcttttctaaatttcgtttttgttaatttcttttttaagagaagttaattagggattcaatgtggttaaacgaag

SEQ ID NO: 36517 - DNA, 2109 bp, Arabidopsis thaliana landsberg
ggtatgacttcagttaagtttggggcacagtttacctgaaagctgtctgatagtgtggtgatcatgtttcatctacttaagcaactgtctcagatatattatactgttgattagaaagacgatttattctaaatcctttacattgattatttcgttttggggatggtcagcagaaaatggacctagcaccaacctctcaatttggaggccgcaggctccttcaaactatgtcatattgggagactgtgtgacgtcaaggtaatatataacaagttactcatctggttgcatgtgtatctcattgttatgtatcttttgctttaattttttcatccctacaacaaagaatactatggttatagtccttttatttgtatatttacaaaaaaagtatttaagggtcatgacttatctaatcagactcattaatagctttgaactgcgtccagaaaattcatatcgaaccgtttccgtaacagagattagcagctcttgttatattagagttgatagcttaacgcgtaattgggggtaacatgttggtgccagtgcttacaactgtttaacaagagtttggttcagtgtacagatgttttcttcttctaaaagttaaagctatattatctcattaattccttgaaagttttttcttacagggcaattcctcctacacaagctgtaatggcagtaagtaatacatatgggcgtgtgaggaagccgattgggtttaatcgtattggcctgttctctgttattcaaggtttagaaggggataatgttcagcattcccataatagcaatgagtgttccctctggatgcctgtagctcctgtagggtacactgctatgggttgtgttgcaaatataggaagtgagcaaccacctgatcacattgtttattgtctaaggtctgaccttgtatcttccagcagtttctctgagtgcatatacaccgttccctccagttcgttatttgagtctggattcagcatttggcgtgctgataatgttcttggagcattctatgctcacacttcaactgcagctccttccaaaaaatatagccctggcctcagtcattgtcttctttggaatccccttcagtccaagacatcttcatcctctgacccatcatcgacaagtgggtcccggagtgagcaatcaagtgatcagactggaaattcatcaggatgggacattctcaggtcaatttctaaggcaactagttatcatgtttcaactcctaattttgagagaatctggtgggacaaaggtggtgatcttcgaagacctgtctcaatatggaggcctgttacacgtcatggttttgcaatattgggtgatagcataactgaagggttagtaaatatttaacgtttactttgtctctatattagccaccgtgaaaggactgttttttatacaaatgttgtataatcttgagtttttcttcacattagattggagccacttgcactgggaatactcttcaaagcagatgactctgagattgctgcaaaacctgtacagttcaataaagtcgcacatattgtggggaaaggtttcgatgcagttttctgctggtttcctgttgcacctcctggttatgtttctatagaatgtgttctctctaaatttgatgaagcgcctcatgtcgattcgttttgttgtccaaggattgatcttgttaaccaggccaacatttatgaagcgtctgtccccagatcttcaagttcaaagtcctaacaataatggagcatttggaaagttgacaatcaggttggacaacccatttaacgtttgatgatgtgtctcttttctttaaaggctctcaatagttatcattgaattgtaggaccttctgtttctgtgaaatagctactatccacttttagcttaactacccccatagtgaaaagtattttccaatcgtgatagcgctgctgattccttgtgtaggcatgtacttttcttgcacgttctgatcttaaaagacctccaagtcgaatggctttcgctgttggagaatctgtaaagccgaagacacaggaaaatgtaaatgcagaaattaagctgagatgcttctccctgacacttctagatggatta

SEQ ID NO: 36518 - DNA, 4420 bp, Arabidopsis thaliana landsberg
  unsure (1)..(4420): unsure at all n locations
gttttcaaacactcatcttgttcttgatacacacaattgaatgcgttctcatcagatcctttatgagtcctgcccgtaatgaacaagcttatacttggatcgttttcgatccaaaggcttgttcgaaagcaaaacggcggaaccacgaactctaactaagcaattagggatcaacattgctttcttgttaccaaaataccaattctgagtgatgttctcagtactaaccacaagagcaaaagtgttcctatggatttgtaacatatcactagctagatctaccgcgataacaccagcactacatcccattcctccaaggttaaagctcttaatgtttcctctaagcttatacttgttaacaatcatggcggataaagaaggcgtagggttaaacaaactacaattcacaacaagaacaccaatctccctaggattgatttttgtattctcgaaaagattgtcgagtgcaccgaagattacctgctccgcttcttcacgcgctgcagccatagtaggacgcggagggatagagtgaatagaatccggtaaataagtctcttcaccgagaccagagcgaatcaagatcttcctctggaactcaagagaagtttcgctgaaatcttgaatcaaactagagttgttcatgaatttctggtagctaactttttgactcgaaggcgggaggtagcaagagtaatctagaaggtagatggatctaggtcgagacatgaagaagacaatggatccgacaatggcgagagtgatgacgaagatgaatccggtggaattgtaatagagctgaagatggtttaggcttaacaatgagacattcatgaacaaaacagccattagagggaggaacatgagtttaaaaaagtgagtgatcagatagtgataaccaagcttgacgtagttttgggtccggatctgtacaggtcctccattagcatccatggacagtttctaaagcagaatctttgatatttttgttgatgatactgatgagaaactgaatctgggtttgtgtgcgtatatatagatactgtgagagagatagagaagaaatcgtaaggggatgtgtttatagacaccattttttcttctgcaggttgggtgggagtttgatataactaaaaaacagagaagagtcgccattgatgtatttggcgtcatgtgtatcggccaactaatggaagatatcaagaggaaaagtgatgaagaagcttctggtttttcagatttttatgggaaaaaaacagagagagtagatttgaatcgaatttcaaattttcaaatttcaagaaaaaaaggaatcttaatgataatggacgttgatatgggcttggggtttaggcccaattgtttttcttttgatcttgtgtaaatctatgtatatctttggagatcaatcacaactcaaagaattggcccattatgatgtaacctaagtttgactattttactattttcttcctcaatttttttaagatcccaaagcaaaaatatggtattattgtccaataaacatgtcggaagcaccaacattatatgctaaaacatttatttaactaatttcgattaccaacggcgtacgatttaatgcaaatccagctatattacagatcctcattattcttacaaaattctatttcaataaaaaccaaattttagttagactatcattaacatactatacattaatatgtactcgttcggtggcattctcgtaataaacactaatcgcatgccttaaataggaaacactctctcaagtctcacaattctacccgttgagctctctcattttatttttttgttaaagctctcatcagtcatcatcgtcttttctcttttgtttgtttgctcctaacgtttctctttcttggaacaatctccagcaaaccaaactaatccgtctgagagaagtagttttgactttctctactccgtgatcgcgatgtcggactctggtggtggttctcacaagtcctccacaacaaaaccttccgttttcggactaaacctttacttagtcatcgcgatttgttctgttttcatactcttgatctcactcttgatcttccttttcgtctgcttgaatcgcgtctcacgcgctcgtagaatgcgcgttaaacacagctccggctcgatcccgctcgtctctaaagaaatctcggagatcaagacggtcggcaaattcataaactccgacgattccaagggtaaaatcggaaacgaagttgttgttgttgtctccgccacaagcaaagaagcgacaagtggttttgatactttgtcggtggcttcgacggctcacgttggtccttctcaggcaatggcatggggaaaatggtacagcttgaaagatctgcagattgcgacacgtggcttctctgatgataacatgatcggtcaaggagggtacggtgtcgtttacagagctgatttctccgacggttctgtcgccgccgtcaagaatctccttaacaacaagtaatgtctttaatgattattactaattttgattaagatcattttgagcaaaattcaagttttttgaaatttggatcttatcgggtagtatattaaatatatcattgcctcattcctaacaaatgttcatttacttcgtttcacggactccgtaattcttgggtcaaggtttcattggtacctactccccggttttaaaaatgcttttaatgttgtcttcttcgttgctttcaaacccaagaaaatggcgaaacttagattttttatatttctccgacaagtgtttaattagatagtaccactttctctgcattgactttaatatatcaatgaaattcttgagttctgtattgaataagggtccaactgtaaccattttatctcctgaattagtaacttaaagacatttcagagtatatagtaaatgtttttccgaccattgaactatataattgctgtttttttaggtaggtgtagtgaagctaaaagagtaaaacaaaaggaaatagtattaattagttgtgctttgttctttattctctattaatgctttctttaatcttttccttttcttttgacctctatcatctcttttgttttagtttgtcaccttttttagatgatgagatggtcttcactagtataaaacttgctggaacatgagatatcattgaaccaaatagcttgcaaagaatcttctctgtttgctttgtgggattgtcacttctttgttctgactttgggattgattagccaaagctccatggattgattttatggttaagaaaatgaataaatcttttatctaggtacagaaatctattatattcattgttaggttgagcagagtcaggttgttggttacaggacaaccactggaagtttgatgccatttaaaaaaaaatatatataataattttttggtcctgaggcatggatgaaactttttctcttcttgtttactcttatattattgttttataaacagttttgtagattttgatataagaaatgaatctgctaaatgatggtaaaatataattctattcaggggtcaggcggagaaggagttcaaagttgaagtagaagcaattgggaaagtaagacataagaacttggttggtctgatgggatattgtgctgacagtgctcaaagtcaaaggtgctaatccaaacaaactcaaatgaattagtaaactctaatttggaattaatctaacagttagttctttctttgttccttgattaggatgcttgtgtatgaatatattgataatggaaacttggagcagtggttacacggtgatgtaggtccggtgagnnnnnnnnnnnnnnnnnnnnnnnnnnngatagccattggaacagcaaaagggtgcaacttcttttgttttctacttcttcttttcagttcgcattttagctaagattggcctttgaaactctgccttttgatgaacagattagcctatttacatgaagggcttgaacctaaggttgtgcaccgtgatgtgaaatctagtaacatcttgctcgataagaaatggaacgcgaaagtgtctgattttggtttggccaagttattaggatctgaaacaagctacgtgacaactcgtgtgatgggaacttttgggtatatatatagataccctctcttctttcagttatcaggctcatattgtttctttacattttatcttcttacacctttttaactttctgcagatatgtttcaccggaatatgcaagtactggtatgctcaatgagtgtagtgatgtctacagtttcggtgttctgctcatggagatcattacaggaaggagcccagttgattattcaagaccgactggcgaggtaattgaaaacgcttgtaagtaacaaaacctttacctgccaagaccatacgcaaataattgtttgatgaaacat

SEQ ID NO: 36519 - DNA, 1840 bp, Arabidopsis thaliana landsberg
caacattcttaagactagtgttttcttattatgcagcttgacttacctgctcagtcaccttgtcttcatcatttagcaatgtgttcatcactctgcaatgactccatcttgcaatacaatccagataaggattcttatgaaaaaattggagagtcaactgaagttgctcttcgagttcttgcagaaaaggtttgtgtttctgtgaagtctttctctagtagactttgttaccacaacaacaaaatccgtggaacataccagacggtttctctattgacttgagtgaccatttacgggctcatattgtttagcacgatgtttaggtgctgtgagcatccatttcttgtcatcttactatatacccagcatagaggttgaacttactatttactaagtctggaatatctgattaactggccaagttacttctgttacttatttttcaggttgggctccctggttttgattcaatgccttctgctctaaacatgttgagcaagcatgaacgtgcatcatattgcaaccattattgggaaaaccaattcaaaaaggtgtgactctagtaaaactaaactattctattatgttgaccgtcattttacatgccattggataatgtaattcttttgctcctattgttttctgaaaactattatattgagaaaattctagacctggaatttgtagtagccaatgcgatacacactttttatctatgttgatctctgagaagaagctcataacttcctgagtaaatctatataatgttttcctttcgcactagatagctattttaagagctccactgcaccagtataattagaagttaatattgacctgggaacatcatatttcaaagaatataatagtaatttagtatgagtaactgattgctatcttcatcaaggtttatgttttggagtttactcgtgaccgaaaaatgatgagcgtcctatgtagccataagcaaatggatgttatgttctcaaagggtgctccagagagtataatagctaggtgtactaaaattctctgcaacggtgatggttctgttgttcctctaactgctgttggccgtgcagagcttgagtcgaggttttacaggttcgacatcaacttgtttaatgaatatgattacattttcatattacttcgtgatggttatctttcgatgcttgtattttcacttcttatagtaattttgctgttaaaggtttgaccgaagtggtttttccattttctaaccatgtctatctgcaacagttttggcgatgaaacattgagatgcttagcattagcatttaagaccgtgccccacggtcaacaaactatttcctatgataatgagaacgacctgacgtttattgggttggtacgcctttctttcaaatatgatggatttaattaggtttactggaagattcaccatttttcttttactgttgaagactagctcatcttgtgtttcctttgaaggtgggaatgcttgatccaccaagaaaagaagtgagagatgctatgcttgcgtgtatgactgctgggatacgtgttatagttgttactggggataacaaggtactagaaaattgagcatgcggtttgttgattatctccatcatttttgtacttattctgattagcatgaattttcagtccacagcagagtcactatgtagaaaaataggggcttttgacaatctggtagacttttctggtatgtcctacaccgcttctgaatttgaacggcttccagtagtttagcaaactctagcattgcgacggatgacactttttttcagggatttggtcatctctaggtttaattgaaagtgcttttgga

SEQ ID NO: 36520 - DNA, 3063 bp, Arabidopsis thaliana landsberg
  unsure (1)..(3063): unsure at all n locations
aactccatggctctcctccaagcctaaaacaacttcaaacgacctctctctcttcagattcgacggtgcgttcccgtctatctcgccggaaggtgacagattcgcgttcgtctctttcacaggcgttttcgtggtgaacccagatggttcaggtctacgtcaattgcttccacaaatgggatttggaacagtttgggatcctattcgacatggaatcgtctacacaagctcaggtccagctttagctccaggaaagtctcaaatcgatattctcgccataaacgtcgatgcacctagtccagcaaccgccgttaaaaaactaacgactaccggtgaaaacaacgcttttccgtggccatcacctgacggtaaacggatcgtgttccgttctgcgcggtccggtactaaaaacctttacataatggacgcagagaaaggtgaatccggtggtttgttccggttaacgaacggaaactggaacgatacgatagctacttggtcacctgatggtaattggattgtgtttgcatccaaccgggaatttcccggtacgttgttgatgaatatatatgtggttcatccggatgggaccggtttaaggaagctggcgcaaaacttgaccggtttggtatcgatgcatccgatgtttagtcccgacagtaagagaatcgtgtttactaccatttatgctggaatctcggcggagcagatcggtaatccgcattttaacgtcccgagtagtgagatttttaccgtgaacttggacggctctggtttgacgaggctaacgcataactcggtggaagatggaccacccatgtggttccctaagatcaaagctactggtgatgtggcttggcctaagaggtttggccctagttgctctatccaagatttcaagacgcaaaatactaccgtgaaaatgaaaatgaataagcccgcaacaatgtcatcaatgtgtgttgttccttcacaatgatttgttatgtaacttattcttctaataaaaaactccgctagttcatatcttgttaagtatttggttagcctaagaaattatatagcttgaggtttcacattttcaatattttttaaaaataatttgggtcaatattgatgttggaaatgaaatcaacggttgaattattgtcgtgtgctgcttgcaccatggtccatgctagatggaccgaccactatttttccaaacagtgcctatcctatcaagtagatattttctgaatacgtagataattgtagaatacaagaaaagaaatatcctctgtggaataaatgaataatatacttttgtcagaaacgttacaagttaaaattccacgactgattgccacgtgtaagcttatctcaaaagggccctacagtaccatgatgacgtcatctcttacaccactctctgaaaaattcctccgccttataaaaaaactcgattatcgtcttcacttagtagccaaccaccgaccaatccgccatgaatatatctcagattattttcttcgcgtcccttcttctacggcttcacttatcaacggcggaacatcaaaattcaaacgctggtgatggagacaccatcatattcaccactctaggacgatcgcactacgaatttgacatattcgccctctccacgactcaaccgccgtcagtttccggagagctccgaatcaccgatggggaatcggtaaatttcaacggctatttcccgtctccttctccggctctattatctctccttcccgacgaaaccctaattcaaatggaagattcgtctcctctgcatctcatatacgtcaccgagagaaacggtacttctagcttgtactacgatctagtttacggcggtaattctgattctaaaacgaaacgaagatcggtgttagaagcaccgtctcgagtacaagttccgttgttatcccgctttgatcatctgagtggcatgacggtaaattcttttaaagataagcctagtttgagtggtgagtttattgtctacgtgtcaacccatgagagctcaggtgagccgagagcaagctggaccgccgtttactctaccgagttaaaaaccgggttaaccaggcggttaacaccgagtggtgtagctgatttcagcccggcggtatcgccttccggaaatttaacggctgtggcttcatacggagagagaggctggacaggggaagttgaagagctacgtacggacatctatgtattcttgactcgggatgggtctcaccgtgtcaaggtggtggagcacggtggttggccgtgttgggttgatgagtcgactctgtatttccataaaaaagtgaggagaatggttggatcagcgtttaccgagccatcttacctgaaaacggaccgttgactacagagtcggtgacaattcagcgagtcacaccaccgggagttcacgctttcacaccggccacgtcaccaaacaaccacgagttcgttgcggtagctacaaggagaccaggctcggattaccgccacgtggagttgtttgatctaaagaggaatgagtttatagagttgactcgtttggtggcgccaaagagtcatcacttgaatccgttcttgtcccctgactcgtctcgagtcggatatcatagttgtagaggcgatgctaatggacggagaagtcctctgctcttccttgaaaatattcaaaccactacaagggacctctctctctttagaattgatggttcgtttccttcgttctcacctggaggtgatcgtatcgcatacgttaagatgcctggtgtgtttgtggtgaagccggatggttcagggcagcgtgaagtgtacaagggaatggcgttttcgacagcttgggatccggttcgacctggaattgtgtactctagctcaggtccaacgtttgctacagagagaacagaggttgatgttatctctattgacgttgatnnnnnnnnnnnnnnnnnttccgtgaggaggctaacgacacccgggcagaacaatgctttcccttggccatctaaagatagtaagcggatagtgtttcgttcgggacggactggtcac

SEQ ID NO: 36521 - DNA, 5173 bp, Arabidopsis thaliana landsberg
  unsure (1)..(5173): unsure at all n locations
ttaaaattcactctcaagatatcggaatgaaagctgaagagggtaaatcatctttaggtgtatgcacaaactgttgaatcagaaacggtgagagtttctctacctgctgtagattctgtagtgttgactcaaatgctgatatgagcagtgcagcgaacaaaactggtttagttgatctcgctggtaatgaaagtgaacttatgcaagcaaatgttgtagctgagaaggggaacaaaccaaaagacactttgagttctgaatcctcttgttatgcttctcctgtgtctgttgtatttgagggatctgatgcaagtgatcagatcaaaagttcaacagaaacatccaaagactccgccctccaaatcagcgctgaaagtaaagatgaagtttgcagagagagtaacaacggaaggcttgtggaggaaagcagtttcataaacgaaccaaataaaacggaatatcctataagccattnnnnnnnnnnnnnnnnnnnacctgacactgttaatacagctaatcagacgtcactggaaatcggaaggacagaattcaatagagttgttggtggcttgggggtaattcaagcaaatgaggtcgacggtaatgtcaaagcacacaacaattatgctgaggtcccagtgacaatagaatcaaacgatcatcgagattttgggagattgcagaatctttcagaagctcacattagatctctggtttctagtccgctagtcactagaaataatacatctaatgcttctgagtctaacttgggaccagtttcaggtacttatcctatatatcttgtatgagcgaaaaaacaaaactctcttcaagatataacactcattaaaatgaatattgtgtatctctgtaatagccaagtcgattttgatggaacaggtctaagcgctggagttaacaaacaggaagacgcatctcagaaccaagagatcaccttggagaagacaacaagctggggcacagcaaaggagcaacacgtccctctaaagaaccttctgagtgaagcaagatcaccaaggctacaacaacaagcaaaggatcacgagagtaacaacataccgagagtgagttcgatactgggacaggagacatcccctgaagatggtcactggccagagaaaagagaagtgagcgaggaatggaattcaccagcaaagtatccagtggacttaaagagagaggagaagaaagtgaaaggaagacccttttgggtgccatttgtttgctgctccaatgttaaatagaccaccactctattgtataatgtgtaggagatgatgaatggtttctgaagacttgctagtacaaagacgtgttagtagtttggttcttgtaggcgctactgttgcttaggctttgaatacttttatgcagaccacttttgaatttgacttttttcaatttctgtttgcgtttgaatgcctagtttgttgaatgagtgtaccagcttgaacttaaaccgaattgatcaaaccgaataaatgtttggtaagacttaaaccgaaatcaaactaaaccgtaccagaaccgggaaaataatccattcttctggaaaaggttcaaactttttgcagagcttcgaatgtaatggagaatctgacgacggcgcaatttctccacagagcgacgctactgaagaagccacctcctcctccatggaatttgaactcaagctttctcacatctacctcctattcgatacctagaccttcttctctccgccgctctttgcccttgtctatcaatggcgacgcgacacagcccacctctcttctccaccaccaccggtttctcagttcattgacacggcggctcagtctttccggttcgtgtcctctacggcttcttcaggaggatggagattggagcaaagaccatttctgggccgttattcgttttctccgtcagtcctcaagactccacgagattcttcctgtactttcctcctctgtatctatctctttcataaaatttcagaacatgaagatgactttttgtttcttctttcaattacaggtttttgatacgtggaagaatcttgagccttcgcgaataagtgagaacaattacgaaaggattataaggtttttatgtgaggaaaaatcgatgagtgaagcaattcgagcttttcgtagtatgattgatgatcatgagctaagtccgtctttagaaatctataattcaatcatacatagttatgctgatgatgggaagtttgaggaagctatgttctacttgaatcatatgaaggagaatggtctgttaccgataacggagacatacgatggattgattgaagcatatggtaaatggaaaatgtatgatgagattgttttgtgtcttaagagaatggaatctgatggttgtgtgcgtgatcatgttacttataatctactcatacgcgagttttcccgaggagggttgcttaagagaatggagcaaatgtatcagagtttgatgtcgaggaagatgactttggagccttctacgttgttgtctatgcttgaagcttatgcagagtttgggctaattgaaaagatggaggaaacgtgtaacaagattataaggtttgggatttctttggatgagggtttagttaggaaattagctaatgtttatattgaaaacctcatgttctcgagacttgatgatttgggtcgtggcatttctgcttctagaacccgtaggactgaacttgcttggtgtctcaggcttctgtgtcatgcccgacttgtgagtcggaaaggtttggattatgttgttaaagagatggaagaagctagagttccttggaatacaacttttgccaatatcgcacttttagcttactcaaagatgggagatttcacgagcattgagctgttactctctgagctccggataaaacatgtgaagcttgatcttgtaactgtaggaattgtctttgacttgagtgaagctaggttcgacggcactggagtttttatgacttggaaaaagattgggtttcttgataagcctgtggaaatgaagacagaccctttggttcatgctgcttttggtaaggggcagtttctcaggagctgtgaagaagtgaagaaccagtctcttggtacgagagacggagaatcgaagtcatggacttaccagtatctaattgaactagtggttaagaatcagaaaactgtaccttagtatgtaaatttgaacctatacaaacactagactgtatgtagagactaacagttgtaagcttctcttaagtctgctcttctacacgattctctctgtttgcatttgtcttgttnnnnnnnnnnnnnnnnnnnnnnnnncttctcttgttgatattagctcggagaattgttccatctcatcaagaatctgtttcttcttctgggtgtatgtttcgctttcacttgggtgtccaaacgaattagataccatcaaatgaacaagatagttgcagaactcactatgatcatggattgagggaattttccgttgcacttgttcttcaactgtctcatctcgagttccattcctgtgcatttgttttctacattcctgcaggaccagagatttttatgaaatcaatttgatgtattcaaacctatgtcgagtaaacttatctgcgttactaacctggaatgcacgatccaacttggtcacttgctgggaattcaataactcagcctgcataagttctcgaaataatattacaatctctctgctgatgtttatcccattcagattttgaatcatgctagagatgcaagactcatcaaaaacagttctcagccaaactggcttgttcttgagtcttagcatggcaacggttagatagactgccggcttgtggtggttcacgtatgtacttgatgctgaacaaggcatggccaaggaaactgacatttcttctgcaataaacctgtaccatgagctggtcttaagcatctctgttcttccttccatgtcttcccatcctaaaatcatggaaagacaaagcgcagagtttgtcgctactcttatgtcatcacagaatacaagaccacctaaaacagccttcattgatttcaggtaactcgatgaacactgtagttgctctttttttatgtcaacctgttctgatagtccagtgagcaactccaaaagacaataagaggcgataagcttgatttgtggtgctccaaaatgcatcaacctgcacaaattatggcaatggatgcagactacgggtagtgtttccaggctggtcgacgtgccaaagaaagtttgccaatctactgctccagctagaacaatctgcaaactagtaggccaaaaggaagtcagaacggttagaagtaggatctatcagtgtgaacaatttcaaatgctaccttcttagtgagaaaaaatagagaagtaacgtgaatgctagagcctctccgatgttagtttcatcctgacactgagtcaatgctggaccctttgagcaggctacatcaaccacagtgttgattgctgataccaggtacgaattcgacacaatatttctggaagcttccacaagtgctccatctgacgagtggtacagaaccaaagaaagaatgccaatcaccaccatatcttcatggcattgttttatagcagtgtctcgcaagctcaaaaaatttaacaactacaagacaaagaggattcagtgagctctttgataacatggcaatgttggtggagaataagtctagatggccttacctttatcgatacagcataccatgattcatcaatcataagcactgccggttgcacagaagttaaaatgttgaatactagcagaaggagtgttttaaacgatgttcccaaggatgagttactgaaaccagaaacgagtctatgaattacactcccaattccattcatggataaattgttggaggcagttgggaatatagaaacaattgtgttcatgagatttaaaattgagataacatcattctcttgctcttccttctctgcaagctgtgtcaacaagttgactagaagagttgcggcatagttgtctccttctgatatcaactttgcaaaccaatatgtgagggatctctgtctgccatctccatatacattgtgaacttcatttccaattaaaatgttccgggagatcttttggatctggtaaattaaactgttg

SEQ ID NO: 36522 - DNA, 1440 bp, Arabidopsis thaliana landsberg
  unsure (1)..(1440): unsure at all n locations
cttacaagatagatatcaaattttgtcgatggtttcatctgtcacaaagtttggactcctcggttgtgattcagaagggcgcataggggaaaaacggttctcatttttctcggccaattcacttagggtttcgaaagtctctgtctcatcaaagcttcgaaaaggtagatttatggtttcttactctcctttctctatgatattccaatttcttgcgagcttgctcagtgttcttaccttatatttaccgaaccagtgcctttatattctatcacattcgaagttattggtttctggttacttatattgcttattgttctatgactacgacataattatcccaaagatttgttcttttctccgaatttggattagaaatggatatactcaaattctgaacatgcccagaagaatccttgttttggtcaatgttgggttctaattggttgtgttcgttgtttgctgttgatttgttttcttttcagaaagtgattgcattaagagaaacattgggataaaagatgagctttactcaggctaattgttttcgaccatcctactatcctgcaaggataacacgaccaaattgcatctccagtgtacctattaggtcttcagtacgctttgatcacttcccgcgtgcctcgtttactcttcgagctactgctgcagtgtctactcagttttcgcctcttcttgatcatcgccgtcgtttacctactgggaaatcgaaacaaagttctgctgtgtgcttatttggtgggaaagataaacctgatggtagtgatgaggtcagatgctttttcctcatgttaagttcttctgcctgtaaatgaatttactttgcaactggagagtgatttcttttgtgtttgtttctaagaactttgctgtnctgtttgccttctataagtgtgttcttcttattttttcaattttgttcttagtgattgttgcaatgaattttgttatcagatatcgccatggaaagcaatagagaaagctatggggaagaaatcggttgaagatatgttgcgagagcagatacagaagaaagacttttatgatactgacagtggcggcaacatgcctccacgtggaggaggcagtggtggcggtggtggaaatggtgaggagcgtcctgaagggtcaggaggagaagatggtggtcttgctgggatcgcagatgaaactttgcaagtggttttggcgaccttaggcttcatctttttggtaaatgacacaaatttcaggaaagatttgaacttcaaatatcgcatcttgctttgatggaatatatctttgtttttgcagtacacatacattatcactggggaggaattggtcaagcttgcaagggattacattaggtttcttatgggaagacctaagactgttcgattgacccgagccattgatagttggaacggattctttgag

SEQ ID NO: 36523 - DNA, 4620 bp, Arabidopsis thaliana landsberg
  unsure (1)..(4620): unsure at all n locations
agaacgttctaattatgatcagatccaccaaccacattacagttaatgcattcaaactcaacaaaatcttcttatgctttatcaaataaacaatcaaacctaacactcgcgaaattcagtaaaatcagcaccgaacgaggaagaggaaagacttacgacttcaggctccaattgagaaatgattcgaactccatccttgttaacacgtagatctccatccttaaacgtaccgttttgagtcctacagagagaaccaaaacctttcctccttcaaaaacaaaaccagagacatttccacacacaaatacatctatctatccacagatccatggagaaagagagatcgagaaacatacaggaatttggtgatggatnnnnnnnnnnnnnnnnnnnnngcgagcttgagattattgctgaatccacctttcttcatcgtcttcgtctacttcgttcttcgcttcttcctttttgttgtttcctcgtcattatatattaagtaaaacacagttgtaagcataattcatgtacttttcagccagaaattggaatttggaaataaaacagccattaattaatattagtcaagcacatgttcacgacgttgaccaacgacttagagactttcccatttactacttctttttcccggttttctttgaccgaaaagttttaatccacattttaaccggaaacataccggttaattcagtgattcttcgttctttagcttgtggtttttaaacgctcccaaaatcaccactacaacaaaacgctaacgcagaatgcaaaactaacgtttgatatttatagaaagttttcaacatttcaaatattgtttgatcaaatacaattaacacatataacaaacagtaaaatctttacttatgtttctcggtttcatgtttgaagataacaaggttttcttcaacaaggaatatactaataagcatacacccctatatttgttttactcatgtatacattcaattacacatcgaaattatcacacaaagaaaaattgtttcgatttgattaatttatctatcagtatacttcatgtctagtctctataaccaacaagaacatgctattcttcaacattgtctatatattataagccctatatacattatatagtcacagactcagagaggctccacaaacgatttccccaaacataatcctatcacgaattgcggggggcaagagctactagaggcaatgatcatgaggttcgttcatatctccatcatgttgaaggagaatttcgaaagaagcttaggaatttgcgacatgatcggcccataagtctgcaacgcataaatgaaacatcacaacacataattaaatacagcttgattgactgaccctgttagttttaccaggaacatcgattaaaagttcacgatgagttaagggcaatgcaagtaagatagtacataccttttcattttcatggagttgacacaatggaacagcgaggagtttgaagttcttaggcacaacaaactgttgatgtaccggtaatctcacaagaaaaagctttgtgcattcctacacaaaagatgaggatagagcagagcttttagtataagcgcaaatcttcaaaagtctcaactttttcttacaatgaaagtgaaactaactaaccaacctttgggtgtttaatattaggtggcaagaaaggatacatcaatgtctcaaagttgggtctccaccacatcccaatacattctcctacctacaacaatgttataattagagagaccattcttaagccagaaacaatcagatacaaaagcactttaacaagaagccatagttcctacctcataacccgaaacacccacattttcgttaaccgatagctttgatgctagtttccgttttagaccttcaatatctagaagattaaggagaaacatgactttagcgtttagaattgagacagcgatatttatgcataaagatgcaaggaaacagcatactaaacctgattctccaggtctcaaacgaccaccaggaagcttgaaaatggagtttctatattgaagaagcaaaacatgaggatgcttgaacaactcaacctgatgtgtcccaacattagattttaatcaatcctttcaaaccaattttccctgtaaaacttttcaaaatccctaatttggctaccaactataaaattaccagaagaacagcttcaacgcaagttctcaatccatgagcagcataacttcaaaagaaacaaaaaagaaactttagctatagattaaaacaataagaaaaaaaccagatgatctaaatcacatcaaaactcgatttacttggatttcaatctgatgactcgatcagagataatctcgtccttgacgcgaagagcttcttttgaaccgaagtagtagctgctaagcgggtataaatcaaccatcaagtcatgaacgacatcgtttcgtctcgtcgagttgtcgacactgatctcctccatatctaacgctcgagcttcttcacccatttttttggcccgtaaaattcaaagacgagagctaaaagcgatctcaatcgattaaaattaaataacagagagaccacgaaagcagagaagacgcaagaagaagagtgaagaaaggtgtcgtagtcggatcactgagacgtggcggctccagagagtacttctccgcaattagctgacgacggcgggagagtgaggaagaagatattaatgggcctgttacgatattaatgggcctttagtagtaaacaagaatacggaacgatgttaaacactctattgtttccaactactaaaaacgacgcgagtttctattttataactaaaaaacgagaatcaaagtctctgtttcaaatttgggtcttttgcttcttcttgctcacttgaggaaacacagtaaaaacctaaaaagagaatgaaactcgcaggtctgaaatcgatcgagaacgctcacgaagattccgtttgggcagcgacgtgggttccggcgacggaagatcgaccggcgttgcttctgactggatctcttgacgagacggtgaagttatggcgaccggacgagctggatcttgtgcggactaatactggacactctttgggagtagcagctttggctgcgcatccttctgggattattgcagcatcttcttcgattgatagctttgtccgtgtgtttgatgttgatactaatgctacgattgctgttttggaagctcctccttctgaggtttggggaatgcaatttgaacctaaggtaattgactcaatgagattgcctccaattttagggttttgaaggattttgggttgttttgtggtgaaagaattcgattgcttcattgaatttcacttcttagttgcgagtaatgcttctcctgatctatataacaatgcttgggtactatatggaattgctgagtatcgtttgaatctgtagctctgatcagatagggtcatctactctgctcggaaaatagatctagatcatcttctgatttttcattgagtcttatatagtagattaagaacaatttattggtgctttgatgataaatcttgatttggtatgatagaattttgacctggtgactatcaagtatcagtgcaatgatctctcttttagtttgcagtggtgtttttatttgcttctgagcttataatttcaacattactctttagaatggtgctctgctaacatagtattttacatgttccaagggtacgatccttgctgttgcaggtggaagtagtgcctcagtcaagctttgggacactgcaagctggagattaatctcaactctatcaatcccacgcccagatgcaccaaaaccttccgataaaaccagcagcaagaaattcgttctctcggtggcttggtctcctaatgggaaacgacttgcttgtggttcaatggatggtacgatctgtgtttttgatgttgaccgctcaaagctacttcaccagctagaaggtcacaatatgcctgtaaggtcccttgtgttctcccctgtagacccgagagtcctcttttctggatcagatgatgggcatgtgaacatgcacgatgcagaagggaaaacgctgttggggtccatgtcagggcacacgagttgggtgctgagcgttgatgctagcccagacggtggagccatagcaaccggctcaagcgatagaactgtgaggctatgggatcttaaaatgagagctgcgattcagacaatgagcaaccacaatgaccaggtttggtctgtggcctttagaccaccaggtggaaccggtgtccgggctggtcgacttgctagtgtctctgatgacaagagtgtatcgctctatgattactcatgaacaattcggttttttgacttttttctttgatgcattctccaagacgcatctagttgtaacaatataatctgcaacaggttgattttgaccggagtctttagatttatcgcttacacaaaaaacaaagaagataaaatgattcaaactttgcgatagaactttattggaaaactgagaaacagataaagatcacagagagatgagttgaagagtaacacaaacaaacgactaaaagttttcaaaaaacaaaacagcttaagaatatg

SEQ ID NO: 36524 - DNA, 1470 bp, Arabidopsis thaliana landsberg
taatttagtaatttgcttgctttagtggaggagaaaaatagacggctgtgatttgctatgttttatctagaggagaaaaatagacggctgttttttgttacgttttatctggaggagaaaaatagacggctgtcatttgttatgttttatctgtttagatagattttctgtcacaagaaaagttatatgaaacttttgtggggtcccggtggagatatggtggtaactctttgacagcgagtgttgtagactgtagagagcctaaataggttatgatgacgtactatataaatataacctaggtagtagttgtacagtgtaaaaaaaaatttgaagggtataagaagtgaaggggttcgtccgtaaaagaaatcgaggtattgcaatcatctgattcatataacgcatagttttcgttatgaatcaaaatcattgtttctgatagtaatgacgtatctaaaagctatattgtcaaaaacgtaacaagaggtctgaaaaatattatataatccaaatcgtcatcgttttattgtttatttaatctagttttgctaattcaaccagtttaataatcttgaactattgcattgaaccttgtttcattggaggcgatactaaatttggaaaactaaaccatcaatttgttttgcactatatgtaagttatattttttgttataagttttattggttgattcggccagcctcggtagtataaaatattcgtagtattcaaaacatggaattactgttcaaaatattcatagtatgaattggtcatgtgtatgtatgtgggtattatgataaaccaataaactacatgaagtagtatttcgatcagtaacaccaaacaatttgaaaaccttagtggtaataatgatttgttttattttttgaaatttaaattactatttattggtaacgtcttcgtgtgggacttagaaaaaaaatgttagtaaaaaatgcaatcgcctggtagaagatttttaaacatataatccagacgttgattctttgattttaggttgatcaagcttcggttatttctgcaagttttcgtcctctgcctcattcactctccagacatgggtggttttttggttttaaacagcaggtatcttccaaagtttcaatacatatatttttcattctctctgtttttgtattagtaaactttgtaatgtattttaggtcttaagattacagtttgtattgcttgttgatggggcaaagtcaaaatcctgataatccccaaaacttaatttctcctgactcttgtgttgtgttttacattcaaactagtggaattttaatcttgctctaacatgatggatgatcatattttctgtcttacagtaacaattgtcagaggaggacagtactttcaccaacggagaggatacatcatcgatatgatgagagcaaggttagtagtgtggtttaaacctttgctctgtaatcacatttttta

SEQ ID NO: 36525 - DNA, 4767 bp, Arabidopsis thaliana landsberg
acatagtcatgactcatagtatctctatggaaaatgaaaacacataaatataacttcatctttacattcacttctcttccaatctagccaggatcgactctgcgaaactctgttgcctgtttagtttaaagaaaaccaaattaccatcaacaggcacaagaatgtgaactgtaaatacttcgtatagattcaaggatcagaacaatttctgcaagttccaagtatgactttgatctaatcagctaatagataaccatgctactcaaaattcttttaagagtttcaaatagaaagaataatgacagtagaatctctagaaagaacgacatacttgcgttcactatgcttggggcttggtctcgaatacttcaagtatccatcccaagggacctttttgagacccgcccgaagagatatcatgtctctgaccctgtcacaattatataaagtggatgcaaacttcttagtatatatgacttctctgatgtagatccaaaagaagagtgttttacctctctgcaaattcaattcctgtttcaccgggccttatggtttgtggttccaagtaccacacttcacatacaacagcccatgatgtcatgagttgcagcaagtgcatagtaaatgattgtctgcaaaaagcatgcaacatatttagttaccaagacaaagaaatgaacctaaatcgcaactattcaatataagtgaaacaaaaagtcgtatctgtcccgtctaatatgaaagtcttaaataaaatacgcttactttctgctattccagaaggcgtcaacaaaaatcttgttgtatttaattgcaattggacaaacagtgcagtccaattcaaaagcaccctgacattgtcatgaagcgaatcagaaactatagtgtagtagtagtgcaaatcacatcaaagttaagtccaaataccttcttaaacatcactgtgtaattattatttacacatgtcccttcgggaaatatgagaagaggattactgtcagctccttggacatggtcccttaacctgaatcacgtgattcatgttcccatgattagtgtgagtagatcacgtaatgacacttaaagaggataagaatcatgcatacttttttgctacaatttcacgatcctttgcctctgaacgattgaaccagatacatcccacactctctaatattgtgctttgcagaagaccttcatatataaagcaacaaaagtcaatcatggctttcacaataatgcacaaagggcaaaccaatcactaaatcagtcacaagcctattaaaaactgagcaatcataaaaggttataagcacacttttcgctctctaaaagcctgaggacttaccaacccaaccaggatgcttctgcattataacagcaaatgcggtcatctgctccaatacgatgaaatcaatcattgaagtatggttggcaacatagacctgtaaaccccactcataaagtaagcatgtgtatcatggagacacaaaataacgttttttaaaatgaagcatgacctgcttaggacggatgctaggacgtggcccgtgatatttgacaactccggtccatgaggcgacaaaaaagctgcaaatcatttccaccaagaccctctggtaacacagcaaaagaaaggaaaatcttcctgaattctagatggaagaataacggaataacatagtgaaaacgaaattatacaagacaaacgagagaatccaacctacctctatctttttcctcaacctatcttgacctttcagcaacgcatttacagggataaacaatgaaaggaaaataatccacccaaaagctaaagtgaagcacctgcaagttttaaaacaatgaaactgctcagtacaaacatgcagatctaaactttgagctctggagaggataagagccatatataattgaataaataagaggaaccaacctcaagggaaagaggatacagtatctaacaacaaccccaaagcagtatagtgggaataagtaaatattccagttccaaggttctggaggatttgatttgaaacatcttgtgaacgagtcctgcaacaatcaaacccacaaaacaaaacatcttatactcaaaaatctatcctttatgtgataaatttgaagtcttttgatagagtaatggtgagacagatttgggttttagtctgaaatatcttacatcaacaatggcaccagcagcttcagtgagcgttggagagatgtctagcaaatcacgcctgcgaatcataaagaaaggtgaatacttaatcagcggatcaaatcgaattcaaattcaacggaaatttcggagagagttttacatacaggctgagcttgccgcgaggttcattgatggaagaaccagaaggaaggtaatcttcgatgttagggtgatcgaggtcaagctcggattttgaagtcacgagcctccctgccgtactgctcatagcttacgtcgccggtttccgatcgccggtgatttgttttggtgttcccaatccggaattttccgatgaagagagctttaaccactcacgaggcttgactctctcggattgataatgtatcaggcccattattataataagcccaagttgttcaatcatggtaactattgaatatttctttcaatatctagattcttaacaactttctttcaaatagtaaaattcttaattcatttatttcggatcgcattgcactttatttggattggttatatttcttttgaaaagtttattagattctattatacttataccacattaaaattgtatagattttttacgcaaaattaattgacaaaaaacaaaaaaacaaaaacggaactagccagaccattttttactttcaatatttataaaatttcgaatatgtataagatttaattttgacagcgactctccaaagaaagttaataagatttttgttttctttggtgtttgtttgataatgtgtgcataattttttgagacttaaatgatcttggacatattatgttttatgtttaatatttaagatgcttaaaatttggtaaaaaatatcaatgtttaatatttataattaaacctaagactttgtgtttgcattgactttttaagtaattttcaagtaatcaaagccacttctctaccgttcattctttcatatcctcaccaaatttagaagtaagaaacgatggctaattctaatttgaggagatttatttacttgtattgctatattaaccataaattaccttgactaaaactggtctactatttaaaacaaaacaaaattactatctttaaaactaaaattcacgtataaaaccccccaacatagatcataatttttcaaacacaaatttaaagttgaatatcttgcaatacaaaagataaaaataatctgaaaaatggcttcatcaagatttcaacttgttgctcttctcgtcgtcttctctctcgttattagtattactgcaaattccgtaggtacttatcttccaccccttcaaaataataacaaatacttttaaatccaaaacttgtttttgtggcatatgtcatatttttttgacctaataatatacatgcatgtgtgttaaatttacataaaaacagagaaagacgtaatggacggaccatgccgcttaagaggaacgtgcaacaacgacggcgactgcgacaagcattgtcacaggagcaccgacgctgcagccatggacggccactgcctcttcgacaaacccaccggtcctgtttgttgctgcttatttgattaaatcatatatttatatttttttatccttcaaatctgcaccgtatatatctaaactacaggaagtaaaaataaaataaaaatggtacgtcccaattatttgaaggagaaaacaagaagtgattttgtgtttcttatgatttttttttcttgtttgccatattgatacacttgtatgtcatgagagtgttataattgtaagagaatggctatttgtaaacaaatgtataatatatttataactttgaaaatgttgactttttgaggatgtaagttgactacaagaaaacatcacgaatttacaaaatttcatgtttcttgtatgcttctgtttcaactaaattgtatttcggatttatttgaaatattttaaacaaacataagactgcgacacacacacacatataaccagatcatagaactaagtcactaaccacatgataagattaataatctacactagtttcgttcttaagcaagttccatattcagtttaaaaccaaattgtctttggaaaacaagattcagaataaaatgcgatagctctcaagtttcttatgttgtggtcaatgcgagattgatgaagtcttcaagcaacgagcttttttgaagataaaactcaagaaatccctctcttctggccttgccgtgtaccctgcaaactccaaagttttgagactgctcttcaaacatttaggaacagatctttgtatattcttccagttatcctgttcatactcctcataacgttcataatcactctgcgtgggggtgagagagagacagagagactcagactcaagattacaccatagaaagcttttagcaaaaatagtcaatgaagagacttacatcagcgtcaagattgagaactcgcagattgggagaattttggagcaaccatataactaactttgtccaattatcactgcatatggatagctccagttgttcaagctgtttgaagacaataccagcacgacgcttatctgcacaaatcacatg

SEQ ID NO: 36526 - DNA, 1012 bp, Arabidopsis thaliana landsberg
tttcttttgctaagctgataattatatgtattcttaccaaaatcatggctatatactcgggaacccaataacatattttgaagtcgaccaaaactatcgcattccattttctcatggaatggcacttatttcagatgaactatacgaggtatggaatatatggaatgctcaattagtaaaaaatgtcgtttgagagttttatattcgactagtctagttatccatgacatatttcaaaactctaaatgatataacaatttatgttttattcttgttttaacagtcaattaggagagactgcaaaggaaattatttcaacgtggatccacgtaacacaaaatgtttgaaacttgttgaagaataccataaggtacacactgatttggtccatgttttttttccccttggtaataaatatcatcactaattcagattcttgtttgttttgtttatggacagtgcactgacaaaataaatacgcaacatatattaataccagattgcgataaaaaaggacatggaataacatctcctgattgctatgtaagttttatatatttcctccatctactgatttttatttgtttctacatttgttcatctttaaatagagacaaatttacgcaacatgtccaatatgtacaaatggaaaaataatggaccgatagatatagttcacacattaaaaattgtcatttttatgatacttcaaagaacatttatacaaggttgcttttgcagtattatctgtattttcttattgaatgttgggccaacaacgagagagttcgtgaagctcttcatgttactaaggtatagactaagttgaattaagatcttttaactaaatatttcagatcattgacgaaatgtgatgatatgaagaagtttttcaaaatctaaattattgactacttataagtacaggggactaaaggacaatggcagcgatgtaattggactattccatacgataacaacatcataagcagcgtaccatatcatatggata

SEQ ID NO: 36527 - DNA, 5644 bp, Arabidopsis thaliana landsberg
tgtaacagctggttagattaaagaaaaaaaaaaaattgaattaaaataccaaaaaattgttatcactttctaaattgtgattattattcaaccccttaacccattccccactattcttatctttaattttcatattagcatttttattgttatcaccactctgattctcacgttctactcatgcagcaaaaatctcttggacgatatacaccacatccatctacgtatttacatcgttgcccttatcaccaccgtcgtccggcgccgggatatacggcggtctagaaaccaaaatcaccttttcccaaactactccactgaagaaatcgtgacctttaatttcctcaacgttaatcctacggctaggatctttctccaacaatctgctaatcaaatcacgcaacgacgtcgtttcaccatttagattcggcggtttagataaaatccggtaaaatgtctctttccggttcgatcctctaaacggcgtcgctccatacaacatctcatataaaacaacccctaacgaccaccaatcgacggcaaaatcgtgaccgtccccgcttataacctccggcgcaacgtattcctctgttccgacgaaagaatttgacttctcacctgaagaatctgacacggccaatgtagatgatgagtgaaccgagatagattcttgcggcgagattcctgagttgcagaaactggtgaagcggaagagacgtttctttctcttcatcgtcggcgatggtttagacagtgacggtgacggttgcggcgttcttggagctagatttgtagaaagatcgaaatctataagcattaaatgtccattttcttggatcatcacattgtctggcttcaaatctctatacacaattccttgattatgtaaatagtcaagtgctaatacaagctccgccgcgtaaaatctgaaatcgagacaagaaaatgagtaaatcaacaacagaatctaagacaaatgtgtggttgacaaaaaaaaaaaagacgtatacatgaaagatttaggtcaaacaacaacaaatttacctgataatctcgtcggaaaacatactttccgattgcattttcctcaaagaattgagattctgtcccggacaataatcgatcgcataaccgatgactttatcggtagctaaaacaccgtgaagagacggaaagagaggatggtcgaatctgcttaatactccttgctcgaaactcacgcgtttatactcatcatcttcactttctctacccttctttttcttctcgatggcttccttaagtataacttttaaagcaagcaatttagcgtcgtcgtcgcggacaagaaacacaactcctttagctccacgacctagtaatgacaaaacctcgagtcgattaaaatccagagctcggctctgtttctcatctccctctagcataatgtcgacgttagttaactccgttagagttaagacagcaatgaaagtgtatttttgtctctcttttggttctacgtagtaggcgacttcttatattataaagagagagagaaaaattaacgaatcttcaaaaacgtccactcgtttgctttgccttgccggggaagatttcaaagaagcaaaataaaataaaaataaaaataagtcaataataaagaaaacgaaaaaacgcctgagattcgttgccatgcgtttgaccaatttagccttgtttaaaaagtgttttgttggtttgagtttgaccaaatgtgtaattactcgtcgtgtttaagacaaacacgtggtgttctagaggatgtgacgtcaggggtgacgttttacgtggaggcgaaagaacctagaaggcgtggaggagggacgttcaatgccttggaagacgcggcggccttcgagcgttaaagctttttgaccggtcagcgaaagagtataatggaatacttcaatatttctaaagcccaatggcccaaaaattgcattgattatttgattaactaattttaagaatagagtaaggaaacagagatttttctttttttttatacttttttagtcaagactcaaaacattgtatacttttggaatgtaatctcatattatttggtgtgttaaaaaggtattttactggtgtagatagtttgtttaaaaaacaataattaaaactaaaatcaaaagttattttaaaattaacaaactgttgattttaatatttatcactacaaaaagaatctggatacatttttgtaacttacatgatattttttgaataattattaattttaaatagaaaaagttgaaaaaaatatatataagagaatatttacaaaattatatgaaaaggaaaaaaaaaagcgattcacaaaactagatgactgattgatcaaacatgaacaatctgatgagaatctcgtatcaacactagttatagtcttatagagtggaaacgattagccaaaactaaataatttcagaaatatattttgaaatgcacaatattcagggtttataatacataaagcagttaaggtcccgttcaatgggatacataaactatacaagttagtacatttgaggggatattcgactgagagattcagaaacctaaccgaatgaaccaaaaaccatcggcgtttaggtaatttctagataaacggcaaattctcattacttaagaaaatttaacgcaagcaaaacgtatattaactaagttctatgagtactatattgggatgaaagtttcatttcgctcatttggacagttgccataattgaaacatatattaagatattcagctttgagagccctgacttacaaactcacatatcacctcctaaagtgagtaagcactcggatgaaaataattatacctaagatattcacctttgagatcagcccagcggttgtgagagctcaaacttaactcacaaactcatatttgacttcctatagtctcggtcaaaatttggaataaagttagaagtcaaattgaaaatgaaaggaccttgatgttttggaagtttaattaaaaagtataagaagtaaagcttgacatatgagtctctagcctcccatcttttttttttttctagcctccgatcttgatgatctaaactcatattttttttttctttcttcacatattaactgtcaactgacactgttatggttcatttgcatattcttttttatatcacacatcaacattactagcgagatttcattgcaaatgaatgccacataatccaggttgattgatacatttaagtattttacattttggtctaattaatgataagatactgattaatagtttgacctctattagtctttaagttactgatttagaacaaatctttttttttaatattaaacgagaacatacatagtcagtcagattgaataaaaagaagtgtagtctccagctattcgcctacactttatactagtctacttcataccacatgcatatggatcatgccctgatgaacaaacgagtattgacggcgccgtcatcaaaccctaaagatcggcaactaacggcgtcactattcaacggcttcactcccaaactagatcccacctttcttttgtacggaccaaaccacttatgctgtaagtaagagcttctccgccacggtggaagagacaagccacggctcttcattgatcgcttcgccgcgtcgcatgactctctcacgatcgtccttagattctcttcatttcctacgaaaacgttaggcagcagctgcagcacacgcgtgtattcgcgcgttggccttgcgatctcgaactccgaagcaaagtctagatcaaccaagtaacggacggccttctgatcattatctgacggcttgtgaacgacgtcaatgaaatggtaactcccagcgatgagtttggatgaagaggtccattttgatacacaaaccgcggcgtcgtgaccaagctctcgcagaaacgaagctaccttatcccggaaaacagttttgttccttgacctaaaaccggaatatacctccacggctctcaaaacgtgagctagcaatagattccggtaaggatcggaatcgtagaaactcaccgccattctcacgatctccacactagcttcaccagaatgttcagctgaagaagtctcagacaggtcggggtcagagtcgtagaatgactcttcaggaccatcctcaagaaacccgtgtacgagctcgcagagtcgaggagaatcttggtctaggatgtaactgtggctgctcaagatccgagccttcgcgtcgtcgtcaagtggatcagtgacacgtttggttctggagaaaatcgccatagatttttgagtgatgattgctgagagctataatagtgtgattgatgagaattttagtgaaaaggtgagagaatcacatttataactaaaacttaagtagagaatttagcttggaatattcgtagctttctatgttttgtttttaccatttatgggaagataaagatttggtttaataaaaagttttatctcattatatttgaggtaagaccggtgcttaggaaagtatatccgatggtacctgaggattattccagtcgtcagatgtggtgacgtggacggacacgagatataaagcagttatagaatatcccttttctattcttctcacaagaaaatatatccaatccattgtaaaagcttgtccgaaaagtaaaaatatatttgatgcaatcaatcatttatgccctttactcttattcaaaatgagcgaagatttcaagtgatttctaaaatcatgtctcattacctaggcattttcagcaactttggtgagcttatttttttcttcttctggtattggcctagttgtacctttaccaagaaaagtgttgtagttgttttgatatttgtcgagatctcgtaagggaaggtaccttccaatgatatgtcatatgagattgaccccgtatcaatctcatacgagaagcctactaatccgacatgtacgagatggttagcgatcaacactactatctaatgagatctcagatggctcacccttacctcttggtggaattcttgaggttttggctacgtttggtctatgtctagcttacatataaatatgacaaaaaacttcactatatgaggagggctggctggtattgatcagtgggatatttacctattcaatatcttggatttcaacatattattaagtaaactaagcgacatcgttgcaataatcaataaagccttgtgcacattcgtagagctcttaaaaatttgttggagtgtgaaatacactgtacgcgtaccactaaagatgatctagttgtgattgattatttgctgcacgttgaaaccagtagaattagccgtaattgcgaatcagtggtttatgattcatcccggtggtataagtccaccaaaggtccaacacaacggcacaagcaactattttgtctcgatatcatatgaagaactcaaattaatctggaaagttaggttttttttgctatcaatagctccaagtttctaccaacaatcagacgaaaaaagcaacacattgggataatctctcactgttttataagtcttagtgtctcactaacgctcaggttgaaaaactagaaaacattgcaacaaaccaaaagagtagaaaatgaaaaatgcagagtt

SEQ ID NO: 36528 - DNA, 1935 bp, Arabidopsis thaliana landsberg
gttatgaaagtgtgatagtagcctagctaccatattgttaatgaacattaatccataccttcttatttcacagatgacggtccaggaatatagttgaaaacatatgctctgaattcaacatcaagattgaggtttgcatttgatttcttggatagatgtcaacagattcggaattacggagaataattggaaaatttgtgttgaatctgtaggttagacgattaccagtcggggattgtatatggattgctcggcataagtaccttgagactgaatatgttctagactttattgctgagaggaagaacgttgatgatatgcgctcatcaattagagataatcgctacagagaccaaaaacttagacttcaggtgtgtgtactctcaactcctaagtttttgacttgctccatcttttgttgatggttgtttcttattgttttcttaaaatgaaaatctaaatagagatcgggattcaagaagctcatatacattcttgaaggggatccaaaccattctgatgcagcagaaagcattaaaacagcgtaagattatctttataacgcaatattttgattggttgtgcatttttcgttgagatttggaaccaaacttgtcatcctttgtatgtgcttctagttgtttcacgacagagattctggagggatttgatgtgctgaggacacacgggctgggtgagacgctaagaaaatacggctacctcacgaaatcaatatatcaatactacaagttacgggtgaatgataatgaccagagcaaaggcgcagcctcatgtccttcttttgatagttttgtcaaaaggtgtcaagaccttgataaaatgacaatcagcgatgtatttgccattcagctaatgcaggtacgagtcctgctaagccttatttggttcttatatgtgaggatccaattcgactgataagttctctgcaacttttccaaaaccttctgttgcaggtcccgcaggtaacggaggaaattgccatagcggttcttgatatgtacccaacgcttttgtctcttgcttctgcctattctcatctagtaagaattattgccttttcctaagatctcgaaatccttgtacttcttctttaggaggaaactgttgaccttctagtctgacttgaactaaaacaatctctgcgctgttttgaaggaagcagatgtctcggcgcaagaagagatgttgagaaatagaagcaacaatgtaatatgtgcatcagctagtaagaatatattcaagttagtttggggtgaatgacttctattctagtgtgtgtccctttgacctttgtctagagagagagagagagatctgaaactgatgaagtgcatatgtataataagccatgtgttgttttagattttctgcttgtaactgaagcttaggctcgccaattgtataacttcaatgtttcaatgttttgttttacgttacttcacctaatcttactagacaaaaacgtcgtgacaaattgaactccatgattctatctaatataaactccccaaacaagagggaaaaacaaaaaggtaaaccataaaatttcgaacctcgtccataaactatattgaaactgtactaacttgccggtatattctttttatttattctaagtatcaagaatcatcatgtgactggtttcgctctaccttgagctcatcaggtgatcgggtttcagatcacgaccagttgtttaagggtcggcctagtccccttttttgtttttgttacagaaaaatacaaaagttacagagaatacaaggtcgggttttagatcacgacgtgacggatcatcgtggaatgtgggtagaaagactcataagactccatgagcccataccccctcaatggtggaggatcaggataagagatagttttgttgttgttaaagtttctcacctgtagcgaaga

SEQ ID NO: 36529 - DNA, 1298 bp, Arabidopsis thaliana landsberg
tatacaacatatgtataggaagtgagagactgggattttgatttccactacaaaattagtaactaaacgaatatcgaaaagttccaactcttaggagtatgattaactacttttatacgtggaactaaacttacacacacagttagctaaacaatcaaaagcaataggtatacttgcaatgattaaaggcagctacatcacctcagctatgaaattctattctagtagataaaaaggaggcactatttcaggacatgtaatggacttataaccttccggaaaaggtggttcataaggtcttatctacatttatactaccaggaaaggatatcactctagtgctaccaaatatctaagttctccaaagtgggaataaagagagaagtgagaatgcaagaacagcatacctcttcacagcctgattccatcatcgcttttatcgctcttgtgacaagctctgaggctgtaaaaaaacaatgacaagtcagcacacaaaattatcgaaccttaagagaggcatgttatttgcacgcagatcaaacacctactcccacagtcagaaatctgattctagaagaagttaggaagcactagctcaagtattacctatgcctcggccacgatatggtttaatcacaaccaacatagctatgtaccctatgaaagtctgtatatgatcccccatcttacaaactactgatcctacgcatttacctttgtgaaaggcctattaaaagaaacaaaacaaatgctactcataaatccatcaaaacataagtatcatgagggtaaagcaacgataatcgaaagctgagtgtcaaaataccaggaagcatagctgcggccagaggtagacgaagtaccggtaagtaaagatggagtaaggttcactaagttcttggtcaacaagagacataatcaatggcagatgatgctcaccagcataactcgtgtactcaatctcaccctcatcgaattcttctttatcttccatctctttctccattgcaagaagtgatcaagatcccgaattgtatacttacaaagagaaatatgaacttctgatcagttgtttatacattgatgatcttgttcctataggaagctgatgaaacacataatgcaaagttagagaatataaatcattttctgtgattcgaagttgagtgattgttttagaattgaaagttcaatgtttttataacaaactcagattgctcaaagcctcaaataaacagctgaagcagaatctataacactctactaaagcaaacgactttggctaaagcgagctatag

SEQ ID NO: 36530 - DNA, 3015 bp, Arabidopsis thaliana landsberg
tataaagaagacattggagacttgatagttaattagttatttgaaaaaatgatttttaaaaagtttatgtttgggggttttgggaagttgggaaatgacaagggaaagtgatgatatgtttgaccttaacgggtcatttagtattatgtgattttaggtattaaacaactattaatcacgtatgaaagtctaaaactatcactaatcttgggttgcaagcacatgtttattttatcaaacaccgacgatggtgcatattttaagaaaactaaacagttatacagttgatacagtcggtcgataataatcacgcatttacaattatatcatcataaatatatataattcataacaattataagatgcattaaaagagggggggaaatattcttgacggaaaaacaaaaaagaaattttgaattattttttcaattggttttagtttttaataggtgggtaagagagatggagtttatactgaaataaaataaaaactggaagtgaagaagaaacataaggtcagtgaaattaattgggggagtctgtgagcattaaagaggcagtaacagcttgtcggctgtaacgtttatcgaagttagcatcatcacacttacgtgtactcacttgacagtctactctaacgagtatcattaacatattacccaatatatattagactttgagtcgctaccgaatatattttggacataaaactactctatcttataacctattataaccaaaacaataataataaaaaatattaattatcaacgtattctagtacaaactatctcatgatttccatctatcaaaatttgatgtaaaagaaagagattacgaatgcatcatgcatgggcatttcattcttaccgtgtttgggaaataaattttattttaaaagttgtatgttaatgaccacattatgatattagtggattctgaaccaatgtatctttctttgtaaatgatttcagtatatttgttaaaaagtaatagttttttttttgtttttaacacctcatataacatgcaacagttttattatggaagtattttatactacaaatattaataatttttatttagtagtattaaaactaaaataatatcttcctttttttttttgtcgtgggtcaaaatattatgagggattcgcatgttgaagagaatatgggaaatggatccatgtgatgggccattactaaggcttcttaccgttgcgggacccacgtttgctcaaaaagtctaactttgtccgccacgtggccaacattggacccatctttgtcgcttttaaattagttttctaatcacatatctgtgggcctctgcttttaaactaatttataacttaggataataattcttccaataatttaattctcatttatttcctacctaaaaataatattttaaaatttttgaaaaccccttttcctttatataataccatcttaaaaaaatattttatatttccaatcaattattgaagttatcaaattattagctagtggttcgctgctcgttgatcaggttgattgatacatggagttactatctataaacaagaaacaggtgacattcgacgattagtagatgacataaccggccgcatagagaagagtatacatagattaatgattggtttaggtttgttcaaagaatatgcttatgctcacttaagaacaattttctattaggtgtcagacaaaagaaagaacaattttatattatatactcttttatttaatcgttgaattactactgtctacagatatataccagatcagaccggtacataaattacatgatgcaagttgcaaaacataatcgtgaaacataaaattgttaattaaacccaagatctcaggaaaaaggaaaacacgaggatcttcccctaagtagtatgtgttaaccggtaattgaacacaattatgacaatatataacattaagcgatttgcatttcaagtaatgggattcgattacttaaccacgtggtttggcatattatgttacgatgaacgtgataataacataattaatacgtccttatctttcatacttctgatcaagcagcctactttacaatatactagtgtgaataaacagtacaatatgaaatataagtattacgtcactattttatttcaatatatcactaaagaagtaattctcattaaagatttcttgtttttattcaatttcagatgctatgaataatatatatacactgtaaattgaaaacaacaacaagaacttacatagaaaataacaataataatagatgtgggagcaaagaatccaacctgtatttataattattagagaaaccattatttgaagacaaaagaatgctaacctttcatgtgatgaataattgcattttgccacaactacttgtaacagaaagagaaaaatcttctcatctatatgatgtctataacataatatatatattatatatgaaaaggtatacaaacattagtcactttatatagtcttgagattacctaatccgtgcctaccatgagaatgtaaatatataaaaaaactttatgtcacttattatttagtagcacattataaaacttcacatttcaaacttatagtacacataacggaggaaggaattgagaggactagcataaactctcgacctacatagacaatatgttaacgagtcttttgcaattcttcggaacgagactatggcattaatgcataggactcattctaacgaccagaaaatatgcattggcgtgtaaaccatagtttccctttcgaggtgcaatgcatcttagttagaattcttttatattacgatgattaaatttctttcaatgattaattatagctagtgtgtcctaatcaagctacctgattaatccaacaagtttgacatggtcatatcacatgtaccaacgttcattgagatcaaaacataacagaaggtcctaatcatgaccttggagcccacaacattttatctaataaaacaacataacatatg

SEQ ID NO: 36531 - DNA, 4033 bp, Arabidopsis thaliana landsberg
taattcctgcaaataagtattttatacgatgttttataacagcagtgaatttccttaataataagaagaacagaaactttctgaaatgactttctccttaacaccagcttcctcgattgacttcagggtgttttgatcttggggcgtgtcggaagcaactgtgtttgtggagaacaatgtgaatcatgtaaatatcagaattcagaaagaagaaagctacgaaattggaaagtaaggtcttgtggatgaaacaagtgttacctggtaacaagaaatgatggaggtgatgaatccaaaagctccggtgacacgaggagtgatcttcgttggagctaactgaagaagaccagctgctacaacaatgtccatagctgatttgatcaaagcaagtgacctctcgtttgatttttttagcttagcacgatactcctcatcctacatttttatacaatttgaattgagtctcttataataagattttgtagaattagaagtttcttaacaaaggagaaaactttacctgatacttgcttccattcttgagtcccttttcgatcttcttcattgatgaagaaagccttcccatctcaccaacctgataacagtgaaaaacgatacataagctggcgaaaaaggccaagatgacatgaggaatcgatcggaaaagcgaaagaagaggcggacctcgactaaagttgtgcagacagaagatcccatccagcagaaaagagatatccgtccaagtaactcagctcgttctttgttctgtgttgagataacacatataagacattagccaaacacacaaaactagaatacaccagtggaacataaacttgatgatctctctctctctcaccttatatattcctgatctcccaagccagacaatttgatccaggaacaagaatgtagataaaagtgcgttcttcgactgaaaataacaacaaagattgatacagaacaaagatataaaaccgaaacgaactctgagctttgatctctaaagcacctacctttccaagtaaaacaagaggaagaggagttcctttaggcacaggactgataagaccatgcaagtcattcacaaactgcaacaatgataatatttagttaattaaacaaagaggtaaaaacacactctaatcaaaatcaaaaggattaaccttgaaaagacggaagacttttctggctaagctagtagatttgtcaacattttgagcagtaccaggttgtccaccactcaagaacttggaaccatactgtatagctctgcataacttatctcttgcctctgctttgttcaaatacattaccacaagtgctagctctgctcttgatacatctaacgtcgtccccatcttcttctacctactaatcaaattccaaaatatctactactaatcacaaggcaggacgaaattggaaaatttctactagttttgatcaaagaaaaaaatcaagaacaccacgaaaaaatgtaaacaaatcatagaaagaaatcaaaagaatttcgattcgaaatacctttgggagagatgtgtgaacagagatagagagagagagcgatcaattaaaattcgcaatgcctctgtttttggcttgatcttcttttgattgtgtgtgtaatcggagatagggcttgtttggtcatcttcgtttcccgataaacagacaaaacacgttgttgggtcaacgcactcatcgcttcaatctttcattctaagccgttgatcatgttgactctttttatgtgtactgtgtacaccacattggatcatcctctcccactctgctttcggaagttgaggatatttcgcgcgtcccaaccacgtggcacacatatctaggacaacaagattgaaattccacgtggattttttacatttatttggggcaatagcactcttaaagcccaataatgtttcacctaaatgggctctaaccttggccttaattattaacatttaaaccgctctttatttaaccgacaaaacctttagtcgtgtagttagggttttacttactaatccgccattcactttatttgtaatcagaaactgaaaactaaccaaacataactgcagtctcttcttgtttcgatggaactcaataaggatcagacagtcatgtcggaggataaaaagcctcaagatccaaatcccagatttgcttgcgaaggttgcagcgttctgctcgacatcaacgatggtgaccgtatcgtcttcgctcgattatctagtggcgcgtgcgtcttcttcctcagtatcttaatttatccagattgattctcatccttaaaactattgctaaaatttttttttgattcttatctctccctcttcttgcagtatattaaaaattgggaataagaattattctttaaagccattgatcggagctccgtttggatctctgttccaagtcgaaaccggagaagatggttctttcctctctcgcattcttcccattaaacaaggtttgttattattgaataccaaattcacattatcctctatactgaatacaaaagaaactgagtttttgtaaattggttatagatggattgaatttggtctaattgatgtttgcttacacagaaagtaacagtaacaatgttatggacgattcgagagataatcgagaaatcgtcgacaataatgaagctcagaatcttactggtgaagaaattgaagctatgcggaggttagaagaattctttatatcgttgtgtttattatattgaatgcgtacattggaagatttggtaacgtttttctcttttatgagtagagagggtgcaaaaggggatgaaattattgaagctctaattgcaaacagcaaaacttttgataagaagtttcagttgtctcaggtaatgtatttatattgttaatgaatctctctgcttctacttttgaaagtttgggagacatatagttgatttttcttgttacctctttgtaggaaaaatataagcttaaaaagcagaagaaatatgcaccaaagctgcttcttcgacggccttttgctcgaaggtatttatttgttcggtttttttctgtcttttttttttttctgacttcttccgtttttcttatggatggatctctttatgtttaacagtatatgtgaagcttatttcaagaaatacccagccagaattgggtaagtacactttgtttgttttctttacttgtgtattctgaagatcctgaatccttttttctctgttgagattgaattatgtattgatggttctgtatatcttttttttttgtgtgttgtagattcttacgagtagatgcgttatctcttctgttaacgatggctaatgtcactgcatactcggatgtgcttgtggtggatatggttggtggccttgtcactggtgcagtggctgaaagattaggaggtatatagctttttgcaatcctacatcacattaataacaccactgcatattgatctgtgtgtcttatatgtatatattccttttaacaggcactggttatgtttgcaatacatataagggaagttctccttatcctgtggagatggtaaggatgttcaactttagtgacaaggttttaaagaggtatgttcgattggtctccctagtctttttttcttttctctctagcctctctaattgtagccgttctatatgatgtaactgtaattgacatttatgtgttccttttcttatgtgtaggatcgtgcagtcatcgataaacgagctctcgtcagccaaaactgcgtctactgaaggaaacaatcaacaagaaggagtttgcaaagctgagaacaatattaatgcaagttgccaacctatactgtttcacttgagtctttatttgagaaatatattgtgattgtaacagaaggttttaactgaaaaatgcaggaaacagctacatctgatgttatggttgaagaaatatctgtgacaactgagaatggagtagtagatattgttgtaccagagagcaaagttatcaaagccgcaaaagctggagccaaagcttcaaaa

SEQ ID NO: 36532 - DNA, 1380 bp, Arabidopsis thaliana landsberg
cattcttgtctgttctgtgtatgagtcttctggctagatcgaaatggtcctacttcaatgcaggtattgggaggccaagaagcaaaagaagaatcaaggaaagactggagataccctccgtgaaaacttccccagagatgaacagattagattcggtgatgtggtgcaagctccaccaaagttggctcttgttccaaaggtatagtctcgctattgtttctaactgtaagaaaaactcggctgtgctattggttcaaatgattatatgtatgttaatttggcaggcaagaaagtatactctaagtgctccgcaggcgaggctacaattagaggccatcgatgcttacagatctcgcaagggatgcaagaccaggtgttcccattcctgccatggtcacgcaataagatggaccacgagtgaactcttttttgttatctgctgtttttttgtactaggtggctgtaaaattatacaatattgtgtcttgttcatcagatataatatatgatagctgagtcatccaaagatctataaaagcagattatttattacatggaaatttcttggtgtcttgttccaccttcattaagaatgtttgaccaaaactcatggaggcactatgaaagtatggaaagtgttctggttaagtactcaagtgcttgtcctcgggattgcacagagatgtagtcctccatcgacatgaagtgtaagcattttcttgtaagacaccttgctgttctcatcagccattttgaagcgaaagaagtgaagaagtgccattgatactatcttcatctgccggtatgcgaaatccttgccaatacagattcttggaccagcctacatgcacagccaaagaaataaaacatctcagatattagaaaataataccttactcttgatcccttagtttgtcagcaagagagtgtacaaacatgaaagcttatgaatttgaattgtgattcgggttggaatacgccgtccttgagccatctctctggcttgaattcctcagcatcttgaccccaaatgtaagtcatcctacccattgcataggatatgtagtagatattatcccctttgctcactctatgtccatctggaagaacgtcatcattttctgcacacctcatgtgctttggaaggaccaagaaagataagaaaagaaaaaacttaaatccccattatttggtttgattagctcttgaaatgttcaggacatagaagaatcctttaagcgcaggttattttacctcaggcacaggtgggtaaagcctcatagtctcagacaaggccgcatggagatactgcatctgagcaagagcttcttcggttacactttcaatgaaaccatttacatcggttgttttctcgtgact

SEQ ID NO: 36533 - DNA, 3072 bp, Arabidopsis thaliana landsberg
  unsure (1)..(3072): unsure at all n locations
agactagacacctaactttagccaaacatttaatcacattgtcccatttttcaggatttttgttgttttcataagaaactgtcattgaaatagctttataaacctgcaagtcacaaatttactcacaaaccaaaaacaaagagagaaataaacaattctcactaacaacaacaaaaaaaaacaattaccactccaggatcgttttcaaactcgatcccaagaaccgtaagagaattttccgcaacgatttatgcaaaataaacaattttccactnnnnnnnnnnnnnnnnnctttcgctatcatccaagaggtgtcatgtatatcacccactgaatacttactccttacgacctttgcccataaacttgtatgatcatgaagcaccctccagcccaatttggcaagaagagccttattcatactgtctgcgttttttattcccaatcccccatcacctttcggtaaacacactgtcttccaattaactaaatgatgttcattcttctctgtagtgctaccccacaagaaatctctggaaattctgtccacactatgcagagtagacatgggtagtttaattgaactcatcgagtgaactggaatcgaattaagcacagttttagtgagagtaatacgtccagccaagcttaactgcctccccttctaaccagcaagcttcgatgacattctctccaaaactgagctaaacgtttctttattaatccgcttctgaagcaccgacattcccaaatatttacccaaatccatcgttgactgaataccactttcgtcactgatactcttactcaaatctctggagacatttcttgagaagaagatttttgacttttctaagcttaccttctgaccggacgctaggcaaaacctctccaacaccctgcgtattacacgaatctgtctcacagaagcttctgcgaaaaggatcaagtcatccgcaaagcatatatgcgaaagcttaggaccgcctctagatatactgattggtttccaagctttcttcccaacttcttcttcaattaggtgacacaacctctccatacacaacacaaataagtagggtgagagcggatctccttgtcgcaatccccgagccggcttaaaagctttcgtttgttccccattccacaaaacactcatggacggtcccgcaacacactgcattatccaggttacccactgagccgaaaaaactgctgccacaagggtgtcttccagaaaatcccagcgaattctatcatatgctttctccaagtctagtttaagaagcatccaacccattactcccttcttctttctcatggaatgaactgcttttctgaactactacaatgttatctgtacttaaccgccccggtgttgaccaattattttagttgatgtgtttatttttctaactggttcacttatttttcttgacatttttaatttttaaaattatttaaatactttaaaaaaaaaaactactctggtttatttgtcaaaagttaaatcgtagtaaacgtgaaagcccctttaacaataaacgaatgaacactttggtgaaccgataataaagaaaaaatcccaatttccctaaatcataaagaaacttagggttcgttatcatcgccatctcgattctcctaaatcataagcgatgttatctccgattgagaatgagagatccgaaatttcttcccctaagaagctgaagttagaggaggagccatccgacgatgaatctaagttctctaactatgattcggacgattgggaaactttgtctgatgatcttcgactgttagatgaagagtggggcaagagcggggtttgtaatctccaaccatttctttcttttgaagaattgtttgattcatttaattttgatttgtggtgttttcagggttttgatgtggacttctcgaaagtgcgtcacagatttggttgcggagctgttcatctcgacgacgacaatatggttagcgagcctcatgagaccaacagagatttgctcaacaggttgtccaacatggctatctccttctacaacgacaagacggttagtaatctctaatgaatcaaataacttttgctcttgtttgctgatgcatgaatctcttaattaatagcgtatatatttagtgtgttggttatggtgatgcatgtttgtcttgtaggattcaagtttggaacttgtcaaggttttgagagcaaattttcacccatctgctgcaatcacgctctacatcacgttcgaagccaatgatcctaaagatggtaaccagactaaacgttaccaggcagtggtcctctacttgtcctttgatatcgaagtatgctcttgcaagcctgaaccatcttcttgaatttatagagatgtgttagttatgcccatgtttacatgatgaatatgttataaaggatagcttgttatggatttctcaagttttccaaggtgagtttatatataaacaagcagaccttaataacctttgacataattggtgaagaagatgtgacatgagctacttttgaattaacaaacaaacgacgaaatacttcgtattcgtgttatgtccactacagaataagtgaatttgcggtgggtatgtagattttaaattcaaagtgtatcttagaaagcagaaaaaataattaaacaaaaaaattggagaaaattatacaaattaatgtcataatgtctatactaatttttttataaaaaaaatcaagttgagtaatagtagtttcttattaataagtaaaatggaccaattaagagatagtaacgtttttttttaatgtatattaggtgagtacccatgctacgcgtgagcttatgtttacctttgatgttttataatgttttttatattatcttgttcaatcgttctaagaacttatagatttttgaaattattttcatatgaaactattagattttattttatatttaatactgatgataattgctttcttttttcttataaaataggtagataataaattgtttatattcccatattcaatttctatattttttatattaaaacatttaaagatatggactt

SEQ ID NO: 36534 - DNA, 2127 bp, Arabidopsis thaliana landsberg
ataaccatgagcgttacccacttggtgaccttagcaagcgggcatcgccctattttgtcttgtcgggtggaaggtttgtttatgcttctgttctccgcctgcttgttctgaagcttattgtgagcatgtctgcaagtaaagatgtccttgcccttgcatccctcgaggttgacctagggagcatagaaccaggaactaccgtgacagtcaagtggcgtggaaagcccgtcttcatcaggcgaagaacagaagatgacatcaagctggccaatagtgtggatgttggatccctgagggacccacaagaagactcggttagagtcaagaatccagaatggttgatcgtggttggagtatgcactcatttggggtgcatccccttgcctaatgctggtgattatggtggttggttttgtccgtgtcacggatcacattacgatatctctggaagaattaggaaaggtcctgcaccatacaacctggaagtaccgacctacagcttcttggaagagaataaattactcattggttaatgaataaagcacaacagtccgagtgtcatggtctggatgatcttaaatctgtttttgtttttatattttccggcattttagcgtgcaagttcgctttcctcacactttgggctcagcaaaaattggcttgttttgctgaataatacaaacttgtcattgtatgacttagtatctgtctcatctggtgaaaatacattgttcatacttcatagtctctgtttattatttgaaaagagttttgaatagtatcattcctatttttcttatgtttgtaattttgtaacatatcgtttgtaagagagtttcctttccttaaagtctgtagccattatcacaattgagacaaaaacttggtaaggttcaaggtgtgttttcaaactttcgtgttcttactggagacgacatttcgaagaccttcaattctcaactaagccataaaccttctcttccatagtgagaaatccaattgtgaacctcgagactactactatgatgaaagatgtcatattctggttgtgcgatcttagcctaattttcttgttcagattgttttcatcgatgactacttctttgatgatgtccttctagctctttcttcgagtattgaaaagttcacacagatgtaaaacagtcttttgttggaaatcttgtttaaacattacaacaacaaaatatatcgtttaccaagtatagaacccctattattattattaaaaattacgatttttatacaaataaaataatttatcttacaaatacacacacacacacaaaattaaactaaattatatcgtaaaaccaaaagatattaattaaaattaaaaaaaaaaaccatgccatcaaaatcctgaagtaaaaaaatatcaagtagtacgcaaaaaccaaaaaaacaaaacaaattgaccttttctcaaagacaatttttaagggacttactagtaagtagtctcttgtgttttgttttgcatcggccgtcccaaacctgaggatttctctgttcagctagagcgaaaccctagattcacatttgagctgagagatgctgcgtgtagcagggaggaggcttttctctgtctcgcagagatcttcgactgcgacctccttcgtcgtctcccgtgaccataccctttccgatggtggcggcgactcctcttcagctcccagatccctcccctctgcagatctctcatcttaccaccgtagccttatcagaggtttgccgatttataaccctttccctctctctctacattgatttttcattttcggtggttctttgcagttttatttgattgattgatttttgaaaaaagtcttctttttttggttgtatgattcacgggaatgattgagatttcttgtattgtatctgcaatgatccgtgggaacaaacgtgtcatctgatttgaattccatgagcttgatgtaccatttggctacattcttctccttgctggatttgtattgcatttgatgattacttctttcgtgtggattgttcagttctgagataatcctttgttttactaggaaagtttcctcttttcggtgcgttaatcatagtatgattcaccactggcttcttgggttttga

SEQ ID NO: 36535 - DNA, 1726 bp, Arabidopsis thaliana landsberg
ccagcagcaccatcgtatggttcaaacatggctcaacaacagcaatatggttatgcatcaagtgcgcctactcagcaaacttatccttcatatagctctgcagcaccatctgatggttataatggtacacaaccaccagcagttgccccagcttatgagcagcacggtgctcagccagcttctggtgtgcaacaaacttcagttgggtacgggcaagtacctccaaccggtggctatagttcgtatccctccacacagccggcttatggtaataccccggctcaaagcaatggaaactatggatacattggctctcagtatcctagctatggaggtggaaacgcatcagcatatgctgcacctactggccaaaccgcttattcccagactgcacctcctcaggccggctatgagcaatcagcaactcaatcagctggctatgcagctgctccaggaacagcacagtgatatcattgtcgctcaaatcagtacgatgcagaccaggcttatgatgtggctcgctagaagatcatatgtaatgcaaggttagtagacttgcattcctaaactgcacatcctgattgagacagagcattagcagttcctcagctgttcgttatgtcttcttataatcgttggatctaaatatgcatgactcattctccctttagattatgtactgtgatctgagtaaaccctaattccctcctcttctgtatctgtactgctgctattgcttaaggtgtttctaagaagttgtgatcacttttacagtttcttgcttcagttttttttttttttttttttcagatagaggggggggggagagccttgttacagaaaatcttaagcattgtcgacagtagaaagtttattaacatttgcttctgtctataatcgtaaattaattatccaacaaatgaaataaacgcataaaagagggtcgcaaaaaccgtgatagagaccaaaaataagtatggatatctgaacagaacttggatgtcctgagacgcatagttaggtcgtggcctggcctataggcgaatcgtcttgaggaatgtctcatacgcagtctggaggcggtttctatggtcctttcccttagtgtttttcagatagtgagccactttgataaacccagcgtgttgttgaaacaacacagacgttgcatcttcctcttgtggcctgagcgatacttcttgttctctgttaggttttggcattgtgtgtgcccattgtataccccatatagctaaaggcctcatgtagcaaagtgacctatattcatcgttcgtggtccatgcctctggtgtctgaaatgcgcagctgcacccaaaaaaaatgttaatcgaacatgatgaatcaacaaaaaagattctgagaagagcttaccctagaccacggtcggaccaagcggcctcatagattccacttgctgtcctaaaacctttatccgcaagcccttcttgaatcatacaagccgcgaccgagtatgttgtcccggcccaaacctccctcgacaccatcgtgcttgtgtctactcgtccatcaggtaacatcccgttcacagcaccacgtgttccatctctcactctcatcacattgaagtcgtaggaccgtctccaacgctttctttatccattcttcttttcgctatcggctttcagtccacaagttctcgcatcctattacaaacactccaactcaaattgaaatttcaattgct

SEQ ID NO: 36536 - DNA, 3689 bp, Arabidopsis thaliana landsberg
atcttgattcactacaggttccatcagtaacttcagatggtaataatttttccttgtggggaagtggagaatggtggatgcttcttgcagctcagagcatggctattggcactgtcatggttcgatgggtctcaaaatactcagatccaattatggcaaccggttgggtaatgatgctcgatccttctcgcccctttcaatccttacttgtccccatttttgttcaattgcttgtcttcgagagttcttcttacaagaacttaactaaactaaacatgtctctcattttatctgcagcatatggttatcggtggccttcctcttttggcgatttctgttataaatcatgacccggtttttaatggcagtcttcaagatctatccacaaatgatgttatagcacttctctacacatccatttttggcagcgcagttagctacggtgtttacttctatagcgctactaaaggtccactctttcactgctctctcgagagactatcgctacttctggtttcagatctttgatacttttatgatgtccatttttgcaggaagcctaactaaactcagctcactcaccttcttgacaccaatgtttgcatcaatctttgggtaagaccataatcagcaacccataaatccatgattttaatagagtttcttcagtcattggttcatagtctgatattatttggtttgaccaggtatctgtacctcaatgagactttctcctcattgcaactggtcggagcagcagtcactttggtcgctatatacttggtgaactttcccgaaggcaacgactgagacactctttgagttcttacttcatttttaaactttgtatgaaggtggaaatgtatcatagtttcattatcttcaatcttattgtatataataaagtgaagcatcatagttcagtgttaatcaaaagccaagtttcataatcacataacaaatgttgcacaacatgatacagcagaagcagattctcttacttcaaaacatttacaatcagagatcaaccagtatggtaatacaggtgttagcagttttggattaagtggtcttctcatcttctggtttagcttccatctccgacatacaagccacatcagcaactagtctctcaacaggcaccttgctcacatcccatcgcatgcctatatctgaaactaagcgactggtgcagtacatgccatagccagccacagccaaaccaccaaaacctgctacaaacctgagtggtgaagaaagaagaacactggcagctgcaacaattgaagcagcttgaccactccttcccacgtcggtgtttgccactagcaaacccgttttgcaatagatggcaaaatcttcacagttgttcttgaagacattgtacacaccaaaaccattttgcaagagaaaatttgcacgataaatgacttcttctggaggatctgaagatgctattgtgcatacgccgcctcgaggtttggcaagaaaaatagcaggggaaacactgtactcaaagacatagagatcacctccagcaaggaaacattcaaggcaggaagatataacaccgccaagattggatcgatctccacaatcaggacatgggttgtctccatgattatgagatgaactaacaatgatgttgtccaagaaagttccagttccagtctcttgaccatcaccacgagtaaaatggttgacttgtccatcacctacatagattcctgaaaatcatacacatatacaagtttacatgatagattacataacaaagaaaagatgccaagaagatctcactaatcacattatcaaattcaggccttgaattttagatacatgcattgtgacgatcaaagaatgagctatgcctagtaacagagaatagctgttaaaatcacattttcctaaaccttctacgtatttggatcccaaacgaaagaatcacattattttccccaaatttgaaattttcgcaaaatctcaacagttgcacaaataatcaaattgcgacagctaaaattggaaattgaatcatctcgtatcatcatgaatgtaaaatgtatgtatctctctgtaaaaaggaaattacaaagagagagataagagtgagatcgaaccgtgatgagcgtaaatgtaggcttgacgccatgaatagatgtgatcgcctggtttcacatcgtctctggagattttattggaaaggaatcccatcttctccgccgacgaacggagaaccagaaattagggattgcgtcgtcagagagagaaagatcttattttttgcttagagtgtagggttttccgtcttccttagataacatcctaacttttttaaagttccataaagacattgatcttttgagtttcgagtttttgaccccagaaaaaatatagtttattacagatttaaattttaattgcttaaatctcaaacgacaccgttacatcattgggcctcaaatgacattgactcttcatttaataaaaagcccaaattaaaattcagactcgtcagtcgtcaccattatttcatcccttaaaccaaaaatcttagtttcagacggaaagagagagtatagccatggaagtctcaaatcagaccagaaaacggaaagcaatcgacgccggacatggctcgcagccgacggcgtatcgaggctcagatggtgtagatctttctctccttgaagcacttgagaagtcttcgcataatgcagtagaagcgcttgatcttaaaaccctaaaaaagcttgtcctctccttcgagcggcgtcttagagacaacatagctgctcgtctcaagtatgtggagaatccagaaaagttcgctgactcagaggttgacctacacgacgatcttcagaagctcaaggtgctcgctggagctccggaactttacccggaccttgttgcttccaatacggttccttcgattgtcaatctcctctcccatgaaaactccgatatcgccaacgatgttgttcagcttcttcaggatctgactgacgaagatgccttagaggataacgacgagcctgcgcgtgtgttagtcgacgccttggttgaaaacaatgtgctcgagctcttggttcagaatatgaatcgtttgtctgaggctgaccctgacgaagctacggctatatacgcaactttgacggtgattgagaatttggtggaagtaaagccggctgttgctgaattggtgtgtgaaaggacgaagctattgcggtggcttctgacgaagattaaggtgagggaattcgaaggaatcaagcagtacgcgtctgagattcttgcaattctgctgcaaaacagtacggcgaatcagaaacggctaggtcagatgaatggtgtagacgctgtgcttgaaggtgtggcgatgtataagtcaaaggatcctaaaactcctgatgaggaagagatgttagagaatctgtttgattgtttgtgttgcctcttgatgccattggagaacaaggagaggtttgtgaatgcggaaggtgtagagctgatgattattatcatgaaacagaagaaatatgcttacgggtctgctattcgagctctagacttcgccatgaccaattatccaccagcatgtgagaggtttgtggatgttatgggactgaaaacagcatttgctgctttcatgggtaaggcaagtttttcaatcccgtttcttttta

SEQ ID NO: 36537 - DNA, 929 bp, Arabidopsis thaliana landsberg
gtcgatctgtggaaaacatgaataaaacaacatagcaccatttaaaggtccagattcttttttcccctgaagacagaggataaaaactataagagctaatcacctggcctcaagtatatatcatcatcagctttgacatacaactcagaatcataaagcgcgtacgcatctttgaagaaagccaaactatacaacaaagaagaacaacgactaccacggattagagccttgtaattcatattgtgttgttagataagatctgaaccaaatcactctcactaacgttttgtaggggagcttactgtactcctcctcgatatcgagcagtataaagtcatcgtacattgcaacttcgcttctcagctcaaccattttggcctcgtctttggttttgcctataataaatctaatggctaatcctgttgattcttccaatctgcaaagaacaatggttttttcagtgagtgtactcagacgattgctaaattcagtctttaaatgatgcaaaagttcattactttgtgacaaattgattccagagaatcctaaagctatagcagaaatggatcggacggttgagagaaggttgaatcagtaccttcgaaggccttcgggatcggacggcatccatgtgttcctgagagctcgtctccggccagcagatctgaatccggtctggattccgacgaatcccatcactttgtgcctcttgacttcgccattaacgatactattaccagggacgtcccagacgattttaacagtcttcggtggcaagttggtgaggcaggaccggccagatacccggagaccagggaaaaggatcgttgataatccgaaaaggaaaccggttagaccgatagcgagagaggtgaagacgatcaaaggcgtcgatcggcgcgtgaagaatgatggacgcgcgtgaaaca

SEQ ID NO: 36538 - DNA, 2004 bp, Arabidopsis thaliana landsberg
taatctgatgattgactggttatactagtttgacatgtgtgtttccagtgatccctaaatgacataattcgattactaaactttaatgatcttcatcgtttctgttggtcacccaaactcaattttgtttgcttgtatgattgtatcaagccataaattaataatttttcttctttatctggggtcacatggaagagtatcatattactaagaaaaaagtgatgtctgtatcccaaaaatctactgaagaacataggatgacaatcttggtacatgtctactactcttttaatatgaggtagaagaagacaacaaaaatggcagccataacatgaccactgttgttgttgttgatgatcatgatgggcctaggctccgtctgctacagtcatgtttactgtactgatgtaaagaactgcatccaaagaaaccacacttaaaaagaaagatatacaaagaagaagattgagagaaggatgagtgtgagagattttagttaccgttgtttccacggataaaggcgtcaccatatttgttcttgagctgcccgtttacatactcctccgtctgctccattgctatgttcatatatccatcaagacaagtaagagtgcctgtgaaaagagtaataaaaacttgatcaagaactcaacatttagcttgaacagaacatagacaaaactgactcgggcacgaaaggaaagaagtcaacaagaatgatataagtagccttgataatgagagaaactgacttaaatattcaaatatctcagtcaactattgtaaccttattgcaggcagaaaggaacatgttcttaagaaaaccattgaacaatgttcacaaggaaaccttagaaaatgtaagaaaagcttcacatattgactttaaaagaatcatttaaaagctgaagacataacatgataattaagttacttaagtgggcttaatacaagcaactctttaattcccttaacatagacaaaagaactagtcctaagtcaaagcttctaacctaaagtgcagcagagatagagaacttgcaaaacacataagaacatctaacgagagagagaggcacctcgataatcaacaccagaattgagcttgacaacaacgggtctcccacggatggatttgaggaaatctgcaggtgtctttgtcgttccagaaactttctctccaactccactcatcttttaagctcgatcctttacgtaactgcagaaacaattgagatctgaaatcagtttggtcgctcttcgaactacaaaaactcaaaaggtaaaaccattcagagtcaatctctcgaatcacaaaaagactccgaaacctaaaaacctaaaccttcaacccaatagaagcgaattcgattgaaaatgtaaagagaaatcgaaactttaacaaggattaaaggaactgaaagaagaactccttacctgagacctactcgagtacgagacacagagagaaagagagagcgaagaaataacgaatcggtcctaagggcttttattatttatttccaaaactatatactatatgattattgttatttcgattcgatcgagttttcatattaaaactaataataattgaacattagtccttatagattttattattttactttggagggtgaaattaaatctccagtgcgtttcggttcgacctcacagtttcttctgttctcgtctctctctcgtttgctttctctacagatccctaaatcctctccctttggaccgttaatcccccaaaccctagattttacaaacaattcctctcaatctctctaaattctctttctcctgcaaggaatttgcggactgtttcttgtggggtaaatcttctattagctatggggaagaatcaagcttacaaggctatgcagagatctagggttggttccagctccgcccagccggatgaggttgaagacggaatggtttgtaccttttcattactctcatcttcttcattgcaaatgattctgtttttttttc

SEQ ID NO: 36539 - DNA, 1607 bp, Arabidopsis thaliana landsberg
  unsure (1)..(1607): unsure at all n locations
tgcatctaactcttcgaaagtagcagaaccacttagagtagactctggtgcgatttccgctttccctgtcactgagttactacatgcagctactgacctctctacagaatatggaagttgcaactgaggcatcaaagactgagtatcaaccaacatagatgattgaaaagagacagcctctggctcaaattggaatgacaaaggaccagagacagatatnnnnnnnnnnnnnnnnnnnnnnnnnnnnnnnnnnnnnnnnnnnnnnnaaggaggatcatttgatccaactaactccatcaaattcgtttctccaaaagcatctgaatccgctttcacagtctccagatcaataagctctgttcccatattactggacatgatacgaaaccnccgcagctatatcaaacattctcttcaacagctctgagaaaaaaaaaacagaaactttgattcaatcctataacatactccgatcaacacacatctccattttcatcatttccgattaggggaaaaacaaaatcaaaattcaaaattaaacaaaacccatttctaagaagattcaacaacaaccaaatcaaaaaatatacaccaacataaaccaaataaaatccgaaattgactgaagaaaaaaagctcgatctagcgaaaaaataaacatggcgaccatgaaaagtttacctgattaacaacaaaaagatacacaatttcactgcaaaatcaatcggagaagatatgtgcgaaaggaagaagaaaccctaaaaagcttctgaatttggggatagagtttgttttgttgcgaaaaagatttcagctggttcggtgacgaaaacagtttcttctagagattagtggaggatactcttgtgaattgtgataaggccaaaatcataaatgggctttaataataggctcataataataaatgggccttagcgaaccaaattacttaggattcctctctcagacaaatccaacggttggatttacgtgtcaacgtctcatcaaacggacgttaataatttgcatgcgagatgttttctaatttttatattatcggaaataaaactgaaacgaaaacgctgtcttttcgagacaaaaaggaaaaaaacaaaattaaaattaggaaagttaaaataattttcctgcaaatttcttctttctcagaaatctaaaaaaaaacaatgaagaaaacaccgtaacgaatcataaaatttctcaaaatccaaactctgttttttgttcttcctcttccagatttggtttctttttttgaaaaactctctagcttcagttttttttttctctctctctctctctctaggaatgtttttgttcgtggatactggaatcatgagaataagattttgaaggagaaagcaaggtaatgattagggttttcaagtattgggtattataaaagtgtcaaccttttttttttctctgcttcttcttcggatctaaacccacattacacgtttctctgttttttttaatggcagatccatgttctttgtcggagaatttaaggctaatatgtggatttgagcttctttgattcccaatttgtgaaagttctgaaatttttgggaaagagagaatgttta

SEQ ID NO: 36540 - DNA, 1643 bp, Arabidopsis thaliana landsberg
tcttcagtacagtactaatgtaggccaagagtcaacaatacctttcccggtgccaacattgtagattccaactttgcgtggttttgccttttgaagagctttaacatgagcatcaaccaaatcagtgacatcaatgtaatcccgtacgcaagttccatcagcggttttgtagtctgttcctttgatctggggaaaaagaaaagttaaatgaagatcaatgattagagaagcttgaaagcttatagccatgtgcatgtaacaagtagactaatttaaacactgctttaataaaggaaactcaagaattagttgtctcaattatgtattttgctcagctgtaaactataactacttatcagcttttttacaagcatgttctacagcatgtgccagcccgaagttatgaacaaaaacaaaagacagaacttgaaggaaaaggattaagaatctaatagtgccaatctgtgatgacttgtccaaggaataatactcaagaccctgaccaaaactgaaagtgaagcttgagaaaaaacctgaaaaaaaactaattggacttcagaaaaagttcatgaactgaagaaagtgattacctgtaggccaggcatgatgccacgtgctgcatcaaaacaagcaccggagatgcgtccatgctctcgcagctcaggtcttggggcttcacccaatctgccctctggatcggacccaatcacattgaaatatctggtagaaagagaaccttgtcaatttcatgggaagtgaaaaaaatgcattgaaccacaagatagaacttagtggaggatcactaaaacaaaccttaggatcataactgccatatctgagtttttcgagaaatccaaaatgatatcttctgccatcttcttggccttaccatatgggttgattggcacctgaaaggaccacgttctggggttagagcgcataaaagaaaaactgtggatactaaacagtttacaaatcaaaaattcacctgaggagtttcctctgtaattggcataatatcaggctccccatacgttgcacaagtgcttgaatatatcaaagtctttactccatgagcagccattgtctctaatactaccaaagtgttcgatgtaatattgtgataatacctacaattgacacaacacaatgttacttattttacatctacacaataggaaagatcacagggaacatagctcaatatactcacttaagagggaattgtgtgctttccccaacatatgcaacagcagcgaaatgcatcacagcgtcaaaggcattctctgtgaatatcttgttgacagctttggcatctccaagatcagcataaataaattgaagccttccaggttccggaaatagttcttgcaaaatactgactgcagcgagattgccccgtgatagattgtcctattaaacagaaagagatttactttgtgatatcgacatttacaataatgttgaacaaaatgacctaaatccatgtcagccacagaagataccacaatggttacacggtatgaatcttttaagagcctcgacgcagcatgtgatccgatatatccagcaccaccagtgactaacacatgagtcacaccttcctcgctacgagagaactgagaaaaccacaaacactgata

SEQ ID NO: 36541 - DNA, 1597 bp, Arabidopsis thaliana landsberg
acagggtcggaagaatacaatgcgagagttttgtttattttaaatcaaaatcacatttagagaaggagaaaggaaactcaacatcgaacacaacatcaaatcaacggagagataaaacttcacaaaatcatgggcatcatcagagtcatggctatttaacataactcaagcttgtgcctatgttgcaacaaataatccatttcccaagtagagtcatgctaacatattattttctgaaaaaagaactagtgcactaaataaatatttgatttcaaaaatcgtgttttcaagcattaatcaattaaaaaaacatgaatcaaggttccctaaaatcgactaatagccacttatttaaatttgtacaaattctgcaacaacagtaactaatattattagatggcaatcctaaattataaagaaaattttataatttgaatatgtggctacctcataaatacagaaagatcataacaaaatatttagattggtaattaaaaaaaaaaagatagagctacgaaaagattaattagagaaggtgaatatgttagttaccataactcttttatctcctatcggtattcattttgttattcgcattagcatattcatctttggcttatatgttttaatattaacatataaaatcgttatttaaactctttaaatcaaagatttcatcttttcaataagaaataagaaaatgcaatggtgtgaataagaaatattaatcaaatgcaatggtgtgaataagaaatattaatcaaatttcttttcaatacattgtaatgcaaaatggctcttatacttttcgatatatttttataattatttgtatggtagctaagagcaattccattggtgatttttaaatataagtttcttaacattaaaacaacaaaaataatattatttaattatgtgggtgtcttgaatagttaagaaattcactccaaaatttcttatataaagtattttggcatactttggataaaatttcttcactaattaaaaaactcacacatttttttataataaattttcttttctaaaataaaaaatttatgtttgggaactaacaatgggattgctcttacattcttcattgactttaatacttattatcatatccttgtgatcaaagtgtaagcaaagaaactcctacactaaggccaagtgtatgtttcctaatgcttatttgcttttgatgatgtgtaatcgacttgtgttaaaccagcattgacctaagcatttttttttttttttctgaattctatgttaaattagatttttaaaaaaataatgtttttacatcatcaagtatgtcgttatttcgagagaaaacagaaaatctgaaatctatctgaatacgaatcttaactttttagagtttaacttctggattcgaaccatacttctcgtatctcttgtcaccatgaccccaagcttccataaccatgacccaagcttgtagtatcttttatcgaccagaatgattcttgtttaagtaaatacgtttttatccacttaactcattatgagtttccgtgtgaaacaatcttccatattagcttcagacaacacacatcatttgtctctt

SEQ ID NO: 36542 - DNA, 4289 bp, Arabidopsis thaliana landsberg
tccttttctggattcgacagtttccttctttcgattggtaacattcaggagaccaaactctcggtggtatgtgacaaagttctcgatagatgtctggctccaaacacttcaggtggtgaaggctgtgataacatgaccatgatattggttcgattcaagaaccctactccatcagagaccgaactaaaaccagaagcaagccaggcagaaggaaaccacgatgagccgagctcatcaaactaggcccatcctcagagtcacggaagatcccatctagatctagtattttggttcagattgtaaatcattttgaaagacagttatatatctcaacctgacgttgatttcagtatatcaccatttcctccgtgtgcagacttttgtctcatgagctcccataatgtagaaaggaataattggtgtaaaaatgttgttggccttaaaagaacatatcatcatgtaaataaacaaaacaataagacatttacacaacgttatgttttgtacacttcacatggacataaagcttcacttagtgtagagctctacttgtattagctgcgtaaaatgtcaagctctattggggagctgttcgtatgttcctgtgttggggctaaaaccaccggtcaccattgtctggtacacagcgtaagcgtgctcaggttttccagacaaactgtatccgcggatcagagcgttaaatgtaaaaacattcggttcaagacctgctctttgaatctcattgtaaatcttcccagcttcttccaccatcccggcgatacccaagtttagaatcaaggagttgtaagtgtagagatcaggggtgattcctctgctggtcttcatctcgttgaaaagcacaagagcttcttcaagtctatgagatttcccaagtccattgattatgagattgtaacatactacatcgggattgaggcctgattcctttcagttccttgaagtaatgcaagccttcatcaactcttccgaccatacaaaggcaatctactagaaccgagtaagtcttgagatccggtcttactccttcttttaccatccttttgaacaatgcacacgctgcatcagcctcacctgcttttccaaacccgttaatgagaatgttgtagatagcacagtttggcctgcaaccgtagtccaacattccttcaaagagttgttttgcttcatatagtcttcctgacttagagaggccatccataaggggcccatacgtgcaggcagttggggagaagtcccgataaatcgtaaggtcgtagtatcaatcaagagcatcgtccacatttcctgccttcacaagcccggagatgacaatgttgtgagtaattgtgtttgcttcgcactcatgggtagacatttctttgtatagctcaaacagttcgtcgatttttcctgattttccataagcatcaagcaagaagttgtaggtcgccacatctgggatgcaaccagtgctcttcacctgtaggaacacgtcctgtgctatttcaatcatatcagcttcaagaagcccgccgattagcagattataagtcgggagtttgggttggacaccaagatcttttgtgaatttctcgaataaagttcgagcacctgaggcgttattatgtttacaagaatatctgattattggcaccaggatagagtcaccatctcgacaaatcccattagctaccaatctctcagaaaatgaaacggcattgtctattccagcttcagccaagatagagcctatcaagtcttcccagaaaagattagccggttggtctgcacaattgtaaagaaagttggtgatgattttgtaagcatcttcgattaaactggccttgacaacacctgggagaagagtgcagagtgtaacaaaatcagggtaaaccagtttcttcatctggtggaagaaacacattgcctctttgacttgaccattcttcaccaaaccaaagataatcgtattgtaagtaaaaacatctgggacacaacccatgtccatcatcttgaacaacatcttcaaggctagagtcacctcgtcatttttgcaaaggcaatcaaagagagtgttgaaagtaattgtgttaggtggacaacctttctgcaccatcccctcgaacaactcaatggcctcttgaatttttccatttttgcctagacctgcgagcaatgtgttgtaagtcacaactgtaggcttcagcttcatttccttcattctcataaacatcttccacgcctcatctactctatcagctttgtaaagtgtattgatcaaagaattaacaacaataacatcaggttcacaaccattctccatcatctcagaaagcagcttgatggcttcatctatctccccaaccttactgtagcacttcatcatcatgttataagttactgaatcagggaccagtcctatgtctttcaagccatagaagatttgtttcgcttctcggtcccttcccgctttagctagactgtagagagacgcattacaggctacaatgttcggagctattcctttggttttcatcttctcaaaagtctcaagagcactgacggaatctccagactttccatagtaatcaatgaaaactatgtacgtataggcagtgggcttcacgcccagagactccatattaccaaacagttcaagtgcatcatccaaccggtggactcttagaagaccgcaaatcaatgtgttatatgtatgaaggttcggtaagataccttggtccctcatcacatccaatgtatcaaatgcttcaccaaaattcccagctttgcacagagcatccacgagaatggtaaaggttacaacatcaggtacatgaccatccttctccatttcactccaaaactgcttcactgaatccagatctctgttatcactaaacctgtccagcaaagtaatgtaagttacacgatctggtttgtgtcttcctgttttcatcttttcgaaaacctccttcgcacaatcgagcttcctagcagtacacagagcatcaataagaacagtgtaagtaactacatcaggtccacatccttcatcatccatccgcttcagtatttcatatgcttcattaatcttccctgccctaccaagcacccgaatacatatcgtaaaggtgtaaacattcggctttaaccccaaagtctccatctctttaagtaaacccatcacagaatcaatatcccttcttttccccaaacctaccataagtgaagagttagtctgcaaactaggtctaaaaccttccaagatcattcttctataaacctccattgcctctgtgcaaaacctagacttaagcagaagatgaatcaacccattgtatgaatatgcattcaacacaaaaccaaattctctcatcttccgaagtgcataaggtgcttgcttcaatccacctttcacagaaagactcttgaagatagtcaagtaagtattagtatccctctttatgattcttttctgcatcaaatcaaacacataagccatttcctcaagtttaccatcaaccctcaaagcttcaagcatgtagttacaagtctcagtagtgtgaactaaattcaaattcccagccactgatttgaaatacgaaaatgaagaatcagtatcaggaaacgactttaaacccctcgttacttcttcactcgatgacaaatcaggttttgagctctttcttatcatagaacccgaaaagtcagaacttttcatggagactacactacatctcatactcttccttctccagtgtttcttccgagacccaatcttcaaagcgtggaactttaatcctccagtaaccaaattatcgcgacattttgctttgatgttactaacaagacaagcatcaccaactgatatatcaccacacaaactcgcagagcagagtaacgcgaccattctagagataagccaagcaagcaaaacaattcaattctccggcaaaaattgaaacgaaaacagagattaacgatgatgattcatcacatttcaagtggcgcagatataactaacaaaacacaaacacgtgctgaatagctatgagcattttgattcgtctccgttcaccggctgaaaagagcgcgagggagtcgatttcggtgaaccggagatttttgatgaaagaattttcgaagcagaataataaaaaacttgccgagaggataaaatcagactcgctccactcgatccttaccgttttgcttccctcccaaaatatctttaggcccaattcaggcccatttttaggcctcttttcacaacagtccaggttttcttt

SEQ ID NO: 36543 - DNA, 2331 bp, Arabidopsis thaliana landsberg
ttcccattttggaaaaagaaaccaaaagcgatcaatatcaattcaaacacttaatggtaaaacataaattcattagcatttcatttcctttaatttttacttacatttttgatagttaaatgcctgaactgttttcttttgagagtggctaaatgaaacagttgatctaatgagaagccaagattcgctaatgaactaattggtaaaagcaagcaggagttacaaatccaaataagacaaaaaagattatctagagctcccattgatggagtggaaagctttagccatggcaacaaacaatttttctacggaaaataagcttggacaaggtggtttcggtattgtttacaaggtaaacatgactcataacttgttgaaaatctatcactggcaatggtttcattgaataatcaaatgtgtggtaatagggaatgttacttgatggaaaagaaatcgcggtaaagagactatcgaaaatgtcttcacaagggaccgatgagttcatgaacgaggttagattaattgcaaagctacagcacataaaccttgtccggcttcttggttgttgcatcgataagggcgagaagatgttgatctatgagtacttggagaatctaagccttaattctcatctctttggtaagtgattcaaaacagctaatgttctaataattgagaatctttggaaataagttaacacgttgttggttgttttcaatttgtagacaaaacccgaagctcaaacttaaattggcaaaagagatttgatattatcaatggaattgctagaggacttctatatcttcaccaagattcacggtgtaggattatccatagagacttgaaagcaagtaacgtattgcttgataaaaatatgactccaaagatctcggatttcggtatggcgaggatctttggacgggaggagacagaggctaatacaaggagggtggtcggaacttagtaagcaatcattctccaacaaaacaaacaaagagcttttatctcaagtccaaatattttcttaaaaacctcataacatatgagtttatattttgttattcagcggctacatgtcaccagaatatgcaatggacgggatattctcgatgaagtctgatgttttcagctttggggtcttgcttctagagattataagtggaaaaagaaacaaaggattctacaactcaaaccgtgatcttaatctcctcggttttgtaagctaaaaacctcttcaattcgatattattttgcactcctaatctgatcataacactaaagaaagaaatattacgtcctttatgcacaggtatggaggcgttggaaggaaggaaaagggatagagattgtagattcgatcaatatagattctttatcatcaacgatacggacacatgaaatattaagatgtatacaaattggtctcttgtgtgttcaagaacgggccgaagacagaccagtgatgtcgtccgtaatggtgatgcttggaagcgaaactacggctattcctcagcctaaacgtcctggtttttgcgtggggagaagttctcttgaggttgattcttcgtcaagtacacagcgtgacgatgaatgtacagtgaatcaaatcactctctcggtcattgacgctaggtaatatgtaagattgtaagttatcgacccaatctgtttatataaaaatatagacacagggcagtaaggtctccacactaggggctggtcagtgataccttgtgtaacaagtttcctttgcctccatggaacgtatacaagagttgtagtcaacttcgttgtaaatataattaagagataaagaaaaaaccaaagagggtataaacccacaaggatagctacatttgctaaatggacaatccatacaatttccggagatcaggatgaggaggaagcatgataccaagcttgagaatccttacaaaatcccactactgcgatagcattatatttatagtgaagaaaaattgtgatctaagatgatacacatgttcaatgatcactgatcaatgaccaatttaagtatgtctgacaaatagcaaaagataatacgagaaaagtcacaaaaggacgcataagaagcagacacaatgttttaaaagaccaaaaggaataccaaattgtctgcttttgacaaagaaacagacacatttcacttatgatctttggggttagatgatgaaagttgaacctttcttctaatcttccacagtttctttagcttcactttgttcctgcacaacaaataaacagtgtatattactggaactggttttatatgaaatctaatagactcatcaaataatcccttacttgata

SEQ ID NO: 36544 - DNA, 3886 bp, Arabidopsis thaliana landsberg
tctaatcatttgcaaagactctctgtgtttctgttcctacggtgctccttcactttgatttactcaagtagacataacgacaagcaatgtgagtttgattgtagaaagaaagggatggcagagatgtttaaatggattgaacaacagattccaggcaatatgttttctgatcacagaatttatagcaagaagaatgttgaattttctgcatccttcgttcggctgttcatgcatgaggttttgggttatcattctgtatttgccattcgtatttggtgttttagtttaacaccatacactagagctctgttataacttttctatgttaaactgtaggatgatctattatttaaagtcctcctgcaattgctgtctgtaccattgcatagacaggaattgtaagtagggtaaaacacttgcctttctgcaaacagttatctagatttctgtgagttcttatgggcgtttttttacttacaggcctaacgtggaagggggttcgcttgaagatgaggaacaaattactctcttccgtttatcaaccttgttcaatcctgtaagattattctgtatatttctttcagaggtaattttcatataacattctcataatctcttgtgctattttccatttaggcttggtaatatgttcatcattcacctctgtcttctgttttcagctgcattatgatcatcaagtacttcttgattaccttatatctaaagatattggggctagctgcgcagagtacctgctgaggttaatccttttctcttaagaatttgcatatcaactgctccatcttgagtaataagattggatatgatctgttagtttgtgtgagaccagccatgttagctcgtactctagtctttgaatgatttctctagttcacaaattacgttatgaattttccaaacaaatacttataggttgattcccatatgacatccgctgttttttcctggtagatgcttgcgtgcagtatgtgattcatggactctatttgtggaattcccgtttgaaggaagtacagatgctccatctccgaagagaagaaaagttttgcctgagacttctgaggttgaacaaaactggagattacatgcccaggcttttgaagacgccaaagattgtctgctttcgttacaaaattcagttgttaagctacatcagaagaaactgtttccatacaacccagaggctcttctacgacggtcagtcttattttcgcaacttgtaaactcacctacgcatataaatcagctaaataaaccttcttctattgtgaggcagtttgtcaaggtttcatgagctctgactatcccatgagtaatatatctggaccaaaggtaaatcagttgcaaatatggattcaaaagaactgttatatgaaaattgtcatatgcttatggtttagcaaaatgttgtgatccttagtttgtgggttgcggtaattaggaagtcagattcaacaaattatacttctctgttagctgctagataagtctctaacctctcaatttggtgcttctcaggtgagattctctgagacagaacagaaggatcagatgccaacacaaagaagtctcctttccagatcaaatttcaaactaatcggctcaccagtagaagtgtatgtaagtttgagaatctcatgtctaatcgaattttcttggggtacttctgacacaagtgtagctgacatgagctgtgtttctgcagagagatcctacattctttggttggtgcagctgctatgaaacagagagcattatgttcttgcctccacaatccaaatctgaatggtataagatactttctagtcaagctaatgtgaaactgccccagccaattagagtaagcaatgaagtgtagaatatcaagaatcacaaatattgaaactctcttattcatatcatagatgtaactgagcccaaatcatacacaggtgtcatcattttacatttagttatatttcgctgctatttcttgtagcagtttgagaaagttcatgaggcttaacgagcataaccatgtgaccagcttcttcaattcgcttaacttcgtgaggctcgtagatactaatcattcacttctgaatctcctctggaaccacattgtcgccttcacagacaataaacactctcttcccagatccatacctttcctttgatatcagatcttcacctcccatttgcttagtgtataaccagcttggtttcatcaacgccatggctaattctaaatcctgcaatcagattaccaatcagtgaccacctgatctcagacaaactatgccataatcataactgtagtggactcacctctaactggcaattactatatgccttctccttcaagaaactagtaccgaacaaaactgaacttggtgggtgttctaatccttcctcgaatgtaaactcacagtccatagcgaaaccctctggtagtctcgtaaaatactgcaaacaaacagaaagtgacaagagattataagataagttcttaagaatggtaccaaacaagataagataagaagagactaatttcttttttcggcgacctcttgaatcaaaaccgccggaggagagtcatggtgcggcatgtaagcagagaggaagattccgacagagactttggtcggaaacctttccatagcaagagaagttccaatgccaccatagctatgaccaacaagaaccactttctcgttttcagggagagactccatgaaactcatcaaaggctctagatacgccgacaccaaacgaacctcatggagctgcctcgtgtcgacaccggagccaccaaggtcgatagctgtcacacggtgaccatcgagcttgagctttgcagctagtttgaaccagcaccatgctccatgacatgagccgtggacaaagacgaagtgatggagttgttgttgctgcatgtggtgtgtttgcatttggtattgcttttggtatgtcatgttatcttttgtccattcgtgtgttatatatatacacatcagggcacatagttttctggttctgcttataactcttggtttaccaattcgaccttatttggacggttaggatacgtgtttcatactttatctgtttatgattccaagaaggcaataataattacagtataagattaaggaaaaaatctaaaagatctaaaaatggggtgaatctcttactccctctgtttctatatgtagttttaggattttgtttttttgcaaaataagtgttagttttatttttctatgcaaaaattaaatgtacttaatagttttagaccaattatgttttacatcatattttcttattggttacatcatattttcttattggttgatttagttgtagttaatgatattttataaaaaatagatgtattaattgaaaattttgtgttttcttaatttgtgtaaaaaatctgtaaactataaataatgtgaagcagagggaatagtatttaaaaattacacaattatacaatctcttattatgttttaaatattgggttatagattatagtatactgcgaaaggtttatgattacaatttttggttatactcacaccttaccatgtaaaagcaaaaaaaagtattggacagttaaagttatttttattctacggtttttttttgcttcgaataattacaatttatgaaaacattaaacattctaaagccatttaaaatggaccatattcttagtctaactgtctatatgatcccatattagtatttcgtgatacgaaatatatcatacttttttttttttaagaatgatgtttacctcttgtttgaggtttgtctttatgtacgattcataaaatcgtcggcaaaaatacaattctcactagtgcgttagtaagttcta

SEQ ID NO: 36545 - DNA, 2139 bp, Arabidopsis thaliana landsberg
ggaatttaccgcatatatggcatttataattcattagaacttcagagttttatttatgtatttggaacttcagagtaagcagctttagtttaggaattcttagcaaaaaaactttagtttaggaataaatatttggaagtgaagacacaaacatgcaagaaaagaaaacaacttgtaatgaatttgcaaataatggagacatcaatgtcttaaagttgattctggttaagacataatttgatatgcatgataaataagatggcttaaatcggttagtatgttcaggtgtccaaatattaaatctactttggtcgacgttttggcatgtctggctcagtttccgcgagaagacatacaaatgattcaatctttcatgaacgaaacaaaatttttccaccgaacatactaatgtttttcacttcctagatgaaaatagttaatgatttaactggtgtgggagctcgtataatggtatgaatgaaaccgtaatgtaatgaacaacctcatttaatataacaacaaagtttttcatcaatttctatcaactgtctccaacttatcttctgtatgtctaacaatagaaaaataacaataaagatataatctccttaatccttttagagtcttaaggtaagatcaggctttgagctattattatctacacctccatttgccgcaaccgagttcaaatcaaggcctgactcagtactagccaccacaaccaccggagcctcagcttcctcaaccacctgacggaagctgccgggccagaagaagtcgctaccaccatcgtcatagtcaaagaacaacggcacggtgttaccaaaatacccttgatgatgaaacctataaacaagaggctgaggctgagataaggtgtgatgaagtaaaccggagtgagcttgcatcccaagggaagaagaagtgtatgtgtaaggcctgtgatggtgaccaaacattcttcccatgtgcattgctcgtttggccattgttctttctcgcttgtgtgcgttctggtgacctccaagagcttgagagctatagaacttgcgtctgcagtagttgcaagagaagactctctttgatacagatggttgttgttgctgctgctgctccgggttactactctcactcgtgctcgaaagtggcagcgtcaaagacgatgattcaagatccagattattgttgttgttgttgttgaaactgaggctaagattcagcgagattggtttgtaatcttccccaaccggagacaagtttgaggccacttggctgctactactgcccgatgaagcttcaatttcgaggtctaatattggtctcatgatttatggcagaaactttacgttgttttttctttttctgcaatgattttgtattgaagggaatgttaaaattatttagatcaaaaggaataatttaaagaaattggattgtttctgtccaaacaaagtcgataatgcaaacaaaaaattctaacaaaaataataattatttcagaaatagatagtggaggaaacattggtgtgaccatttatggtcctaacgagtcaatgagtagacaacatcagaagtgccaaatttagtactgacacatccatccatatatcaaccagtcaactctaactaattacattcttctatttctcactaaactaaacttaaatagtttccaaataatttctagattcttttatcatctaccaactaagtttaatttctattgagacagaaataacacaaaactttagatcacaaaaattgtaactcagttacttggttttgctttccttaacaatgagaacccaacaaagaaaaaaacataaatatacacaaagcgacaaacaaacaaaaaacccgacaaataaaacacatatactcaaaggaacaaacaaaaaacagacaaacatatatagcgaaaagatcaccgacagcaaaatcaacttacttacgaagcagatccatcaactaaacaattatcatctccaaggaaatatatttatttatttaatttttagggtatccaatggtttttgagcaaaacgaaaaagaaggtaaaaaaagaaaaaagttggaaaactttaagtttgcctgaccacataaaattggccaattaattaattatggtggaaccccatt

SEQ ID NO: 36546 - DNA, 2901 bp, Arabidopsis thaliana landsberg
taatgtacattaatgtatatcatagtgagagctatctatgacatttgtcaacaagttaattacttttctttatgacatttgtcattatatttttggtttgtgcaaagacatttattgtttaattgatttaatactaaatcggcattgtaataaaatgacacataccgtcaaacaacatttaacattgtatgaaagcaactatgattcgcgttgtgctgattttttttttactacatcttattctcgtcaaaaactatttatgatacaataattaatgaatatgctactataggtttgttatcttattttcattctttcacaaagtttacaaccaattgtagatgtataataaatgtatgagagctaatagactatttatgtttaaacaaagcctagaaattgagggtaaagttgtttgtatttcttatggagttatggtagattagtaaaagaagattagtacatgaatggtgaatctaaaacttaattgttttaaaataaatgagttaatatacgaataaagttaatttagtagatagaaaaaatatgcaaataatcaagaaaatatcaatagaagtctagtagttagttagttttttttaccaaacaagctgtaaatggggcacagagtaattttgaagatgtgtaaaatccgagttatttgataaatccgattgaaaaacaacacttttctcttggtaaaagaaactataccgaaccgaattgagactttatatggtttacgtttttcgaaaaccgatcaatcagaaaccaaataaaccgatataaaccggatgtttttgatagtcttcgacagtgacccttagcgaattgtttttttttattggttggaaaatagaaattccggtaacctttggtagctcgtacggcgtcttcacaaaattgccggcctatgaagatcatttccttcatttaaccctccaagctccagattatccattgctgtactcacaaagctccaaagacttgcccttttcttctatgattctttaattactgctcatgactatctctctgatggaaaaagcacgaagcctttttctgggtttctctaacgggtattgattgctaagtacttcgatttccgcgtagtatggtacatagttgaagtttgagaatttgggttttgttctctgatattttaactttggtgggtagcttttatatgcttattatagcttctttcttcgaaattgaaagcttgagcctttgattctaaagcttggagtgagttcgtttggattgatgcagatgttgtcaatgagggttagtgtttatgtagttggattggagaggatccaattactcttttgattgttgaggacgaagagagaagaaatggatctatggttaatcgcagctactgctgctacaggatatataaccaagcatttgcgaaatgtatccaaaggtaaatcttcttctgaagatttgactaatgtgaagctagagtcaccgagatgcttggctagtaatgtagtaagagttaaaagaccaaaagaagaaaactttgaggattgcttaaatggggaaactcttgatctatatgaatgtggcaatgcatatggagtagaagtagctttgagtaatgaggagaatttgggatataatgaggagattcgttcaggttctttcggggacagagcgtttcttaggagaaatcagcgtcctatcaagcctttttctttggagaaaagcataatgactcggttacatagagagaaaatatccatggaggaatatatgcgtagtccgtttccatcaccttgtggatcagtttcgaggcccttgcttgttactgatggtacaaaagtaattagcaagaatactggagattctgttagccagcaagttccggaatgcgggattcctcagcttaggaagttgaaatcttcacttctttacgctaaaaggggagttggaaatgcgaagagcgtgagtagaagatctgataatgggactggtaaaattcttgctctcttttgagcatgtaagatttatatatactgacaaaggaaaagcttaacatgttagcttttttttcaggatcaaatgatgctgtgttgctgctatgcgttgggatttcaattgggataatgtcatcaattgtagcaaaccaaaccgaactaagcaaagtcagagcagagtcaaagcagacagataatttgggaaaagagttagaagatgacttacacgatggtgaaaaacagtgtgatgaaaagacagcagagaattcagaatctataagtaaaattgaagcagaacttgaagctgaacttgaaaggctggagatcaacatgatttcctccaacgttgagacaaaactctcagatgtctttgaggtgagctttatactctagcttttgctttttcctttcctttcactgaatcattgtctcattttggtcgatcatgtctgttcattctggaagttatcccgcagcactaatgatcctgttttctccatatatgaaaattgagctaaacagatatttgatcataagactagccattgtttaatcatctatagaagttcagcttgtaaattgtttctcaattctgcagctggagccagatttcgaagtagaatttgcgcagggtgagctgagagatgatcaggttgaaagacagcgttttgatgaaaccgtgtccaaccaggaacggagtagcaattccacacctgaatcaggaaactacatagtctcacctcgtgagttaagcttgcgtctgcttggagttatcaattcacgctatgaaaaacggataaaagaacttgagaatgccttacaagagagtcagaggaaagtggagcaactggtcatagaatcagaggaaaagaagaaaccattgtcaaggatttgggaaacccatgaagagatg

SEQ ID NO: 36547 - DNA, 2083 bp, Arabidopsis thaliana landsberg
taacgagtaaaaagaaaaagaaacattcaaatcgtaatcccattagtcttcttaatagtttccccgaatatccaacaagaagatccaactcttttgaatgaagatttttttttatatgtttaaaggttaattcaaattataatttgtaaaccgaaataacagaaagaaattaaagattgcatcaagatcgatatgaatcatatgatacaacagtttgctttcctaactatcttttcaagtccaaaaatctaattctttatacgaggtcacataaattgaatgttaattagatgggatataattcttcatcccatttactgttacatttcatagctcaaaaaaattaaaaaggaaacaaaagaggtgatttttgcaatgtaataagaaaaatttcaaataaattatatagtaactaactaaaaaatcacgaagaaaaaggaaaagaaacattcaaatcgttatatgtttcttcttgttaattagagatcacacatttctgaatgtagaattttcaaatattataaattaaaaaacgatgtaacaaaaagaatgattgcatcgaaatagacatgatatatacttccctaacgatctttgcaagtccaaacacaatatctttaatacgatctcacgtaagtgaatcttttgcaaataattcgatttcagtttaacttttggtatttgacttcctcttcactcatttgcgaacataaaacaagcaacaaagaaaataaagagataattattcattgatttaaccttaacaaaggatccgttcattagatatgaacggcaacaaatattgcatgactaaccgacccaaaacggaaaacaaattatcaaagaaaaaaaccctaattaatcaagaacaaacaaagaagaagagaaactagcaggtgacatggcaagtgtaacgaacaagaggaacaaagaaaggatcgttgaagaatccccaagcgacgtcgtcacattcacttttcatgttgacaacaaggttgcaacaatagtcactaacttgaaacaacctcgtgtagaaactgacttccatctgcatccgacacatcccaacaggtcccatgtttatcatacatctctcgatgtgttcccatggattctgttgatgatgaggtggatttgatggagatgatgagtgatgacttggtggcggaggtggagacttcttgggtgttggaggtggaagagacggtgttgaaggagacttcttgggcgctggaggtggaagagacggtgttggaggcggagatggagacttcttgggcgttggatggggaacaaacggtgttaatgaaggcggagatggagacttctttggcgttggcggtgggggagactttttaggagctggaggaggaggagacggtgttgatggagttgacggaatcggcgttgatggagaaatagaaatggcaggagcagatccgttgctataagtacatttccagactttggaatctccatagccgaaactatggccagtgttcaaaagcatcagttcgtttctagagatttcagacgggtttggccatccttcgatttttggccagtattttccgacggttgtggtcggaaaagccacaagacaaagaaaagctgccgctacaagcacgatggaggttttcattcttaaagggaagatttgtgagtgtgtacaaagaaatggactaactcgttctttatatatagaaggatttaactttttttttttggttggttacaaatatatcaaagatctttttaacaaccaaaaaaatatgaaaaaattcatatctcgtaactattattttttaaaaattaaactgttgtaaatattatctcttggaaactcgaaaagaatattcttttttttttttttatctaacaactttctttcaaaactcaaaacatatccttgtttacaaatgggattagaaagtatggacaagaatgtataaagaccacggggtcatgggcgtaggcagtgtgtaattagggggtcaattgacccttataaattttgaaaaatcaactatattttctttaaaattattataatgaatccaatgttttataggttttgacccca

SEQ ID NO: 36548 - DNA, 4042 bp, Arabidopsis thaliana landsberg
atatatttgccaatgaatctagccaaaactacaaactacggtagagttacgtgaacatatttgaagtaaaccgcaaaggtaaatgtataactaaggctaacaccacgatgaattacaagtctacaatattggatacatatgtcaactcattactctatgaataaaatttaaagataaatgcatacctaaagcaaatatcacaagaaagatgatggggacgacaagtgaagaagttgccttggccatttttttttctttttttcttttctcttaaatttcgttactcgtatactaaatagtgaatatattggtaaacgtgaaaaattaagagactacagaaaggagatttatagaataactagatgtgtcatgaacacacggacttatagaaacgagatctgtttgattttataaatcttttatttatagaatagtatatgaatttcttacttgtaaatatattttatagaaactctatatataattttataaacttaattctttttatagtaaaatatttatagttgattttataaatcgttttatttatagaaaagtatatgatatttgataaattaattcgtttttgtagtagaatatatttattttattgaaaagttgagagactaaataaaaatatttatagaataatacctaggtaatattggcatgcacatgtacattttatttatttaagtttacgaatatttttacatacatgtgtatatatataaatatatttatatttgattgaaacattaaaagacaataaaagaagatttatagaataactaggtaataacatgaaaaaaaaatgaaaaaagaataacatacaaataaaaaaataaaaaaaatatgtagcaagctatttaccaaaacaacaacacatcgactatcaagaacaatataacaagtcgcagttgctgacgactagtaaaataacagggctatcaccttggctcattgcttttggttctattcaataatggtgatcgagctcgagcttttctatgtataacttgatcaaactgatttcaaaatatcacatatattaaataccaaactggatatgctgtaaaatggagacattaaaggaacctcacagccacatatatatagcttgtagagataatagcagggtactgggttttgatgatctacatacatacccaaatttatttccaacttatagtaaatgccataatcagtttctcttggcgatgaacaaaccccacttctgctcaccacttgagctcctaagtagctttgacttccacccgcctataatatcctcgtaatcctctttcgagaagtcactgatgaattcttccttctccttctccactgcatccagttcccgtttcaggactttcatgaactgatgattaaaaggcaaacagcatattggtttcaacatcttttttaaagcatatgagtcattctcgaaagaaaatcgtttcttacctgatcggttctatcctccgcgattacctcctcgaaagcagcatctctcagcatctgttgaatcatatgagtttagatgacttttggtgatttttaaataagtataggaggagacgggttctatctctgtatacctgaccgtatgcttgtacatcatgaagatcataacctcgtttcttgatgtagattgcaaagtttggagatggggttttggggcttctgcagtaatcagtgatgagaactttccctttctgctttaaccatttgtagaatgttctgaacaatgctggcttgtcctgagagtaagaccagggattacaaaatggataccaaattaaagtcataagggaagaagaaatagcggaagcttatacttggatatgtagaatggtgtctctgctataaataacatcaaaggtgttatcaggatactccttcttggtgcaatcagctacttcgaattctacagagcatttgagtcctattgcgtgttcaagcgcaaaagagatcatgtttacagatagatcaatgcccacaacatccacgtcaaagttctcagccatgtagaagtcccctcctcctattccgcacccaacgtctagaactttttggccaggtttcagatccagcatatccacaaattcctttgttgtctctatatcaaaagaaacaagtataataagaagaaaagatagcttcacttaatggttctgtataacttaaattcaaaaacagaaccatcaatactgcaaagttgatacaaactcgatgactaaagagcataccgagtccccctgtgctaacaaacccttctccaaagacacgctcatagcgtaagataccactagacttatactggacattgtccaagaagcgttggaagcccctatcattatccgaactgactttctgccaaagccagcatatctgaaattttcgaaaaatatgagtccaaacattataagagataccatcaaagggtggctaaaagatgaagaggccaattacctggttctggttctttttgtttctcacataagctccaatgcatttacagctaaccaaagagagttcatacgaattcccatcttcgtcattcatatggcattctttgaaaagctgagaggaattcatgtaccagagttcaaataattgtcgtctagaaacagaagagtggagggatttataggtagcacacctttgtgtaaaatttaggttcacggtagtgtgttgggttgtacttccgcttgttatcaccagactgatggaaacaagactcccgaaagaaaatatacccgccaacctttgtccattgtaacatctttttcgccaaatcttcaacctgcaatttgatgaaaagacatgaaaatttgtccaagggatataagcgattagtctaagtgtgtacagtttaaaagtggttccctcagtaataaataatatggctacctcttgatcagagagatacattagcagccagttggagaatatcagatccatagactcatttggaaagttcatatttggtgatgtgacatcagcgcacagaaatttgacgttcttgtagtgaccgttaatgttctcattctggagatgaaactctcattagagaaaaaaatcaaacaaaactcgagaaaaatacaagtcttataagtagctagaaagaacaagcatggacgtgaactaacaacctttttgataacactttcaatgaagtaacccgcaatgacctgggccgccttctgagctaattcaatagtaaaacgaccaattccagaccaaactctagcactgttgtcccttcaataggtgaaagaaacgcaagtatctgacacaaccacacacataatttaagcctttagaagctttccttcataagtccataacacaataaaggacagcaaagattcaactcatcaaggcatacatatctcaaaatgatctatatatagcaaagatgataactttatagtgggtgagtcgaaataaacctcaggacgttcttctttgtcgaggtcagaagctttggaatcaagcatcatagcttcaacactcaatcccactgaatgctctttccagtaattcttttggatttcacgctcctcgcctgcaaccattaaaaagattcaattcatcaaaataaatcaataaacccattaccaatatcaaatcaatccacacgctttatggtaaagtcccaatttttaaatctgcactacatcatcgaagccttaaagaatcctaacacagtgtccatattgcttcacaccagaaaacgttgtataagaaactagtcactcaccatacgaagccattatccttgagaacacactaggaaacaaaaaagagacgattttttcacgagggtaatgaaatctatgaatagagaagaaattcgagacggagatgactgtaacaaagagctatggctattggctatgatccttcgatagcgagtctggatctcgaaaagctcctcgacctgaagttgtgaagcctacccttcgactgcatcagcacactcgcagatcccaaattcgattctcgctcgatctccatcttactggactgagctctc

SEQ ID NO: 36549 - DNA, 1206 bp, Arabidopsis thaliana landsberg
  unsure (1)..(1206): unsure at all n locations
gtattcgttcagatttttttcaatagtcatgcacatattttcaatttttacactttcaatgtatcaatcgattctgaattgttaaaaataggtttacgtaaggaaaaaaaagatttgtttaaaatatgttccggtctaataatttacttgacgttaatttcttaaacacttttagatagggggctttgtttatcccaaatgattttgtaccactacgacatactagctagacataaaatgttaataaatttttattaagtaatataatcgaaatattagatcaatgtagtagacagttaggttaactaaaacaagagtaaacacattttttttttttcaggataggcaaaacaaatttcacactattttgcgtatttccttaaatttgttgttcgttttctcagcaaagatgaatattttttttcatagtaattcacaagtataaactcgccagaactcctcaaatagtgaaatataatatcgcttttaactgttgttcggatggaccgggtttttagtacatatataacacgaggatttttggcaggtcaccaacaaaataattttaaaatatattatgaatgaattattatacatgattattatcttttatgtacattttttgaaagttagccctacaaaattcaaaatatggtgacactcctcactagagaccaagttggtccaactctagctataccttccacactgcttcctcccccaccacaaaaggggtactatcgtcatttcacacgtacctacctgtaattaatgtgacattataaataacaacgtgaaagaaggatccatgcagaaacaattagcatatattacaaaacacatactaattgtttctccttctccttcttccttgcaaatggatactttagcttcaaactcttcggatctcacgaccaagtcaagtctcggaatgtcgtcgtttaccaacatgtatctcctcacaacgcttcaagcccttgcggccctttgcttcttgatgattctcaacaaaataaagtcatcttcacgaaacaagaagttgcatcctctcccgccaggacccaccggttttccaattgttggaatgattccggcgatgcttaaaaaccgtccagttttccggtggctccacagcctcatgaaggagcttaacacggagatagctngtgtgcgtctaggaaacactcacgtgatccctgtgacatg

SEQ ID NO: 36550 - DNA, 592 bp, Arabidopsis thaliana landsberg
tttcgcactccaactggatgttcgtttctttactctttcaatgatatagttgaacatgtctcgttttttccgcccaaattgctccgggagcccaagatattttccacctccaccatgactttgaataccaagaatgtttttgagacgattttgagtggtgccatgtactcgtgaaccaaacgttatcattgatttggacatattaagtttttggcccgaatagtactcataaacatcaaagacatcctttaaagcttggcagtttcagacattagattggcagaaaaaagagagtcatccgcaaattgtagatgagtaacaccaggaacaccattaccaattcggatacctcgaatatccccttctgctactctgtttttaataagatggcttagtatatcagcacatagaatgaagagatatggagataagggatctccttgtcttattccacgttgtggttcaattgtgccatgaggtatgccattcactaaaactgagtagttgactgatttcactgctcccattatccatttgatccatgtctcgctgaaaccaaatagtctcattgttgtttccaaaacattccact

SEQ ID NO: 36551 - DNA, 954 bp, Arabidopsis thaliana landsberg
gcaatcattaatggacccaatgagtgtagttatatctggttaagtatagacaatccttaataacatttctgttcacgtttgtgtttttgcagttccatttaggcatgaagaaggaagtgtgctttagctaccttatatcccaaaagtacactggagattctgctctcgtgaaggtttttcgaaacaaagaaatattagagttcaacataaaacttgcaatccacaagaggctaatccctgctcacataagtggcaaacctccttcgtacttcatcgttgctggctttgtatttacaactgtctctgttccatatcttcgatctgaggtcctttactgtctctctatctttccttcctttctcgctttctctcatgcatccattcacagtttatataactatttcccattgatatgttttgcagtatggaaaagaatatgaatttgacgcacctgtcaagctattggagaaacatcttcatgcaatggctcaatccgtggacgagcagcttgttgtagtttcacaggttggtttctcctgtttcacacgttaatgcagtcataattattttggtgtcgaagcctcaacacccatattttaacttgcaggttcttgtttctgacattaacattggttatgaagagattgtcaacacccaggtttgttaaattgcatttatcatttgtcactttattgaagcatctgtcacgctaaatgttcaaatcgccgtgtaggttgtcgcctttaatggcaaacctgtgaaaaacttgaaaggtttagctgggatggtggagaattgtgaggatgaatatatgaagtttaatctggattatgatcaggtatgttattttctcatcttccttaacttttatacaaacttataaacaatttttagctaaaattctttggtgtttctacagattgttgttctggacactaagacagcaaaggaagc

SEQ ID NO: 36552 - DNA, 1758 bp, Arabidopsis thaliana landsberg
tctaagtctgtttccaagcatcatcatactaataacaacaccaccaacgttaatgctgctgcttctgggcttctccctaccaccaccagtgttcatgagcttctcgaatgtcctgtctgcaccaattctatgtaccctcccattcatcaggtctttcttttcaatcccttgttctctgatttcgtttccccggatctttaatttgttgattttgtttagggttttgagttaatgatgtgaatcatggatgttgaagcagtggttgtgttgctcttgtaacttgaaatttagttttatccattcactaatggctacaattgaaacaattgtcactaaattttgtcaatagctttgatagtttctaagattcttcttattgtttctttagagaattatggaataacagatagacaattatttgatttccctacagtgtcacaatggacatacgttgtgttcaacctgtaaagccagggttcacaaccgctgcccaacttgtagacaagagctcggtgatatccgttgtttggcactggaaaaagtagccgaatcacttgaactaccttgtaaacacatgtcacttggatgtcctgaaatcttcccttattacagtaagctcaaacatgagactgtatgtaacttcagaccttatagctgcccttatgctggatccgagtgttctgttacgggcgatatccctttcttagttgctcatctgagggatgatcataaggtggatatgcattctgggtgtactttcaaccatcgttatgtcaagtctaatcctcgtgaagtcgaaaacgccacatggatgttaactgtaagtacatatgaatcgtgcttcatagtatacacttagataagttaggaggctttgtttaaagtaataggattatatttgtgatgaaatttgatctgtctggtataaactgtaatgtgatcagctgagtcaaattttgcttttgttgcgagttagctttcctagagaaggtccagttatttatctaatctatggttgtgaattgtgaatcttccatctcgctatacatgttgacttgatatactttaatgcttatcaaggtttcctctgttttggttttgtttctggttcaaaaagaaaatcaggtctttcactgcttcggtcaatacttctgtcttcactttgaggcattccagctcggaatggctccagtctacatggcgttcctgcgtttcatgggggacgagacagaagctcgaaactacaattacagtttagaagtgggaggttatggtcggaagctgatatgggaaggaacaccaagaagcgtaagagacagccacaggaaagttagagacagtcatgatggactaattatacaaagaaacatggctctcttcttctcaggtggagataggaaagagctgaaacttcgagtcactggaaggatatggaaagagcaacagcaaagtggtgaaggtggaggagcttgtatcccaaacttgtcttgaaaattaaaaaaaaaaaatcaaactgattttgaaaacctcaccgatttggccttgtctctgtaaccatggttatctgtaattagggttttctctgacgataaacttggggttgttcttatgtatctctctctgtctttctcatgtcatggagatttttttattataaaatatatagttcattacaattctgctatatctggaagaaaaaaataaaatgttgaaccttttacttttatcaactgtagtgttcataaatttatgtaatgc

SEQ ID NO: 36553 - DNA, 776 bp, Arabidopsis thaliana landsberg
  unsure (1)..(776): unsure at all n locations
ctacttactaaagaagaaaatgaatcatctttcattactttgttttgattggatttgaccctttagtgttatctattttcaaaaacctttctctatctggtttattggttttttgaagaaagtgattgaatttgaccctttagttaattctgtttcaaatgcttttatctatttggtttctgggttggtgagaaaatggttaatttctatgggaaatagaagaaattgattgagattaatgtaaatgaatctgctttattgattttgtgggtatacagagtaagttgggaggaggaaatcagcagcaaggtcagagagttagctacaacaagaggacaatcagacgttttagtgttagagctaatgtgaaggaaatagcttttgaccagcactctagagcnnnnnnnnnnnnnnnnnnnnnnnnnnnnnnnnnnnnnnnnnnnnttacgcttggccccagaggtatttgttaatattagtagctcctttactctttccatcttcatctgtgttatttatctttcgacttatcttggggttttcattcgttattcttaagggaggaatgttgtgttggatgaatttggaagttctaaggttgtgaatgatggagtcgccattgctagagctatggagttacctattgccatggaaaatgctggtgcatcgcttattcgtgcggacggcgaagctccgttattgtctctagtactgctattcatacggtgcggtgctctgttgtcgttatgtgctgtgtagccccttttactagtgac

SEQ ID NO: 36554 - DNA, 4419 bp, Arabidopsis thaliana landsberg
gatctcagccattgctaacgacccagatgaaatctgttggggaatctatggctctcggccgtacattccaagaatctttccagaaagctctgaggtctctggagtgtggattctcgggttggggttgtgcaaaaattaaagagctagattgggactgggatcagctgaaatacagcctaagagtcccaaatcctgacaggatccatgcgatatatgctgccatgaaaaagggtatgaaaattgatgaaatctacgagttgagcatggtggacaagtggttcctaacccagcttaaagagctcgtggacgtcgaacagtatcttatgtccggaaccttgtcagagattacaaaagaagacctttacgaagtcaaaaagcggggatttagtgacaagcaaatcgcttttgctacaaagacaaccgaggaagaagtccgtagcaagcggatttctctaggagttgttccatcttacaagagagtggatacatgtgctgcagagttcgaagcgcatacaccatacatgtactcttcatatgatgttgaatgtgaatcagctccaaacaacaagaagaaggttttgattttgggtggagggccaaaccgcattggtcaagggattgaatttgattactgttgttgccacacatctttcgccttacaggtatgtctttagacaatctaagcgtctctcccaaaagccagtaaacattgtttcaacatttttatgctaaacttacttatctactttttttaatttatttgcaggatgctggatatgagaccataatgttgaactcaaatcctgaaacagtatccacagattatgatacaagcaataggctctattttgaacctctcacaatcgaggatgttctcaatgttatcgaccttgagaaacctgatggcataatagtgcaatttggtggtcaaactcctctgaaacttgctctgccgatcaaacattatttggataagcacatgcccatgagcttgagcggagcgggacctgttcgcatctggggtacatcacctgactccattgacgctgctgaagacagagagaggttcaatgcaattctggacgagctgaagattgagcagcccaagggaggcattgcaaagagcgaaactgatgcattccccatatcataggaggtagggtacccagttgtggatagaccttcttatgttctaggtggactagcaatggagatcgtttatgatgacagtagactaataacctatttggaaaatgcggtacaagttgacccagagagacctgttttggtagataaatatctttctgatgccattgagatcgacgttgatacccttactgattcctatggaaatgtggtgattggtggaataatggagcatatcgaacaagctggtgtgcattctggtgactcagcttgtatgcttccaacacaaaccatcccagcttcttgtttgcaaactattcgaacatggaccactaagctggcgaagaagctaaatgtatgtgggctgatgaactgtcagtacgcaatcacaacatctggggatgtttttttgctggaagccaatccccgagcttcccgtactgtcccttttgtgtcaaaagccattggacaccctcttgccaagtatgcagcgctggtcatgtcgggcaaatctctcaaagatcttaactttgaaaaagaagttatccctaaacatgtctctgtgaaagaagctgttttcccgtttgagaagttccaaggatgcgatgtgatactcgggccagagatgagaagcacaggagaagtgatgagcatcagttctgaattctcaagtgcgtttgcaatggctcagatcgctgcaggtcaaaagctacctctatcaggcacagtcttcctcagcttaaacgatatgaccaaaccgcacctggagaaaatcgcggtgtccttcctcgagcttgggttcaaaatagttgccacctcgggaacagctcatttcctggaactgaaaggcattccagtggagagagtgttgaagttgcatgaaggaagaccacatgctgctgatatggtggcgaatggtcagatccatttgatgttgatcacaagctcgggtgatgctcttgatcagaaagatgggagacagctcagacaaatggctctagcatacaaggtacctgttataaccactgttgctggtgcattggccactgctgagggaatcaagagcttgaagtcaagtgccattaaaatgaccgctcttcaggacttctttgaggtaaagaatgtatcttctttgctcgtctgagttagtttttttgttgtgtgttgatcgtttgtgtggaactttttaacgataaattttaacggattttgtttcccataagcatttctatgaataatcttcgaaaatgcagcaaacttgtgatttatcaatcggctttgttcctttaattcagatatacacaagcctttgattgtatcaggtcatgtaacgcttggcttaaactcgagttatgttctataagattgcgcaattgtagaaacagcctcttcatttgagcgaacccaagaacattccatttgaattttagttaatacgagactagtatgagagaaaaatgagtttgattaatgacaaatcatacaaagtcttgcaaatttacatctgaaagtctcaaaccatcacatacaaccttctctttctcctcatgtctctcactcgaattcaaaagactgaaagaaaagcaaaatacaaactgataaaacttggctcactttccgggaacaaagttggttgcgaaggcccatgcgttgttgttgactggatcggccaaatggtcagcaaggttctctatcggtcccttaccagtgacaatggcttgaacgaagaatccaaacatagagaacatagccaatcttccgttcttgagctccttcaccttcaactccgcgaaagcctctgggtcggtagcaagacccaatgggtcgaagctgccaccggggtaaagcaagtcctcggcctctcccaacggcccatttcctgcgactctgtagccttcaacagctcccatcaagataacttgagtggcccaaatggccaaaatgctctgagcgtggaccaagctagggtttcccaagtaatcgagtcctccatcgctaaagatctgtgaaccggccttgaaccaaaccgcctctccgaacttgactccgttcctagccaaaagctcagggaagacgcagcctagggctccgagcatagcccacctgctgtggataacttctagctcacggttccttgcgaatgtctcgggatcagctgaaagtccagcggtgtcccatccgtagtctccggggaactctccggtaaggtagctcggtgactcgccagagaatggacccaagtacttgactcggtcggatccgtaccatgggctgcctgatggaccctttggcttggcaacagtcttcctcattgtcacacggccgcttccaaggacttctgatgccgcgggggaaaggttcacagcctttccggcgaaggcaggggaggagagagccattgtggaggcggccattgaaacttttttgtgtgttttttttttttatgactaacttgtgagtgagagtgattaaaactggttcgatagtgttggattatatagggatattgtaacgtttgttatatctgaagtaatctttatctgttcattcattggattttaagatttttgttttatcgtttagtagtcttacgtggcaatctctagtccaccagcatttgttttgattttttcattgcagccaagcgttttgtgaccacaagttatgagccactgaatacttcaacggttacacttacttacaccctcgtgacaagaatgatttttgctacaacccaataactaaaacttaaagtataacattttgaaaatatagattctgatgatcgaaacattaatataaagtaacattataaaaagcatttacccacacataaatatcaatattttcaatggtaattagttcatcatcactaccagtttaatttcaattatgaatcgatttcatcgtcactttatccaataaccaaaataatctcatgaattatgtgatattaccttaaaactttgacgttttactctttatcgaagaaacacaacgattaatgaaacactgttttaacttatcgaccatttttaagaacatgaaagaactatattaattcatatggcatgttcatcatcatgggtttagactttagagaacatatagctactttttttcttatcatgattcaagttatctttattgtaaacttcaacaaccttttgaacaaacttatttattcgctttttccgaattcatcaacaaattactcctcaatcacactcctatagaaaacggtttaagctatcattacatgtctagttggtt

SEQ ID NO: 36555 - DNA, 1442 bp, Arabidopsis thaliana landsberg
  unsure (1)..(1442): unsure at all n locations
ccaagtcatgaatagcgttgcaattacctatcgaagcacacgatgggaaagtgcaaagcaaatgtcgaatcaacttcacagctgcaagtccatgaaataacatccacaacattttcaatgacgtattcaagcctgtccgagataaagaacaaactgtagtcaaaccaagcgaaacaaaaacaactcaaaaccccccaaaaaatatcttaccagtgtgtgaaatcatggaaagtgaaacaaaacatgctactccatacaacactgtcccagtcaagctaactctcgtaagccaaatagacgatgacgacaaagattcatcttttctcacttgtgacataatcactgatagatatataagtatagcacaacaactagccgatgctgcccaatactgcattgtcacatgtgcaagctctacacaacaaacaaatcaaaccatgttaatgatctaaatactaacattagcccaatacaaaagctgtgaaagttaccatcttgttcagcttcatggattgaaatagctcttgaaagctgaactaacttagatatcataacagaaggaagtgtcacagctcctagtaatatccctgaagacgcaccgcgtctcaattataacgaaaaaaacgcatcttcaattgaaatcttcttcccaaaagattgaaactttattgattctgagatcggaattttgaaattagattaagggtttttcacctggagctgaaatgagagagaagaaacggagaagtctcgacgcggatctcgacgaggaaggcggagagagagaggaggaagagggagaagccatgggagataagtgataaaggaagagataagagaatacgagaaaccacgacgaaaactacaactctctctcccgttacaaacgacgtcgccgtcgtcttcatcgccggagaagatgatgatttcgccggagattcgttgttttaaggcgcgattgtttattcttggtggtttgttgttttattgggccgccaacaaaacgtgacttgtatgtaannnnnnnnnnnnnnnnnnnnnnnnnnnnnnnnnnnaggtcacgctaattttccacgtaatgataaaagtcaatttgttcggtttgattcggtttgttttggtttaatgtcggttattgaaattagattttaagccgttgagagagactttgtgaagaagaagataacgaagtcatgaggatgagagaaatgataattcttctgttgcgatggagcttagtctcatcaagctgcaatctttttcgttcccttcttcagtttcaagtaagctgaacaaaaccctaatcctcgattttgttttgttttctctcggagagaatttgacgcaattctatgagcttttgatggtttttgacctgagaaatttgacgggcaaaaagcaaaactttcttggtatttctgataantatttgagtaaaagca

SEQ ID NO: 36556 - DNA, 4682 bp, Arabidopsis thaliana landsberg
tttatatttactcactttggctactcgattctcccgggtccagtttgactcatcggaatcatgccattatcaatgaatcctccgacgaatccgccaccattgttccgttgcatctccgtcatgtaactcctcacttccgccttaatcatctcttgcaccaccgccataaactcgcctccgttaccgggaaaagacttccccatttcctcaatcgcacctctaaacccaccactaaacggcataaacgacaccgtattgttgtggttgtggcggctcgaagtggtgttgttgatattcgttgactcgtggctacggtttgactcctcgcttacgtcggcaccaggaagtgacaagcttaacgaagtcggtggatcatcggaagaagacgacgtttcgataggaagcggtagcacaacagcaccaggtctaggcacaggcttgaaaagctcaacggaaggtaatatcgggatagtacttgaatcactgacatcagatccagttgggcttcctgggctcatgtaaagcccagtaacaacaggtggagatcccgcactcaccgatctcttaaccggccgatgatcctccgaaccatcgtaaccccgatggtcgtaaccgccgcatttcctcttgagcgtcgagttccagtgattcttcacggcgttgtccgtacgaccgttgagaagacgagcaatcgtcgcccatttattaccgaactgagcgtgagcacgtgcgatcgtctcgtcttcctcagccgaaaacggccgatgctcaacttgcggcgaaagctggttgcaccaccgtaaacgacacgatttccccgatctaccgggaatagatttgctaatcactgtccagtttcttggaccgtatttaacaacaagcctacgaagctgctcgtcttcttcaggactccatggacctttgatcctatcagccattgatttttgaatgttttatcaaactttagcaatcttctcctcttttagtgattttggttttgagagatgaaccaaaaacaagttcgagaaacgaaagagaggacaaaattatttatacagagatttaagagaggaggataaccggaaaccggttaagacggtggagaagtcatgggcaacgcttcttccacgcaagcggttttcaaagtttgcggtacagctgtaagtggacacgcgtcgaagcctgactacgtcgatgtgtcttttttgtcgttttcgtaataattttgttcagatcagcaatttcgtatagttgagcgtggagatcagtcgagtctcaaagtatgagtttgtgagtacacgcgccatttaagcgcgtggcgaaagtaagaagttaaagagacaaaatcacgaaacccaactagcaaagccatgataatattcgcacaatttgaggtgaatttaaatttttttataggggaaatttaaattaataagaaatatctgaagaaaaaaatagaaagatgagaacggttaggtttgggtaaggacagtttttatttatttttatgtttagtcttgactttagaatagcgaagccaggctgtatagcacttcacataaaaactttatgataatatctactttacatataaccgattttccgggttgaaaactaatcaaaattattgaccacaaatttcattactaataaagaaaacaaattgtcactaagaaggtataattaattactaaacaacacacaaacacctaattcatgcatataacagtgcatgacaaattgacaatactaaatctatatatagttgctctatgatcataaaaagatctaaacctcaataatttgaaacgaagctggattaaaatgggattgacaaagaagcgtgtgagcgatattaagtgaatgtataaaaatggttagatattaatgttcggtttaggaaacgtgatgtaaaatgtgcggttaacaaaagataggaggttttgacgtggcagaaaacgacaacataggttgccgaattggaacgcaaaatcatcactgcctttgtttcctgaaatatatttaattattatatcgaaaatacgaatagaaacagccaggctgtataaaacttgttaatcaaacaaaaacaattaataaaacactaactgtcatccatttaagaactgccacgtgtcggtcgtaaaacgcggggttttaaaagctctttgttctggtatgtacggtacgagtcaggtcggtaaacgtcaggtaatgttcatgcacgctccctaaccttccctctaacggttcataattctccttttaattaaactatagtattgttagttcttaataattcaagtttttacgtaaccccaccaaacatttgaatttataccttttgagttatatatctacatttttgtcgatttgttgataatctattagacatcaggagtttaatactttgagtgaatttgataattaataatgccaagaggttattgtgatgggaacaataagctctagatgtaaccttgcgtagttattatattgggtttacgtgttcgtttgtgagactcaactatactatataaccttgctcgttgtttctattatcaatggtccgagtgtcggttttggtctccttgttttaaatattttattgaagtcgttttacaattaccaacttttccttaaaccaaaaaatagatcaataatggttttgattgatgatattgatggttgattgacggtgtcttactcactcgaagattagacaattaccaaaacgattttattcgtagtccactaaaaaaacaaatcaactgtgatcatttttcatatctattataaatgactactatagtatgacattttaaaaacatttgtaacgaataatcatcacaacatatagtaaactgaaaatataacatgcaacaatctaaagaaaaaacctaaaatacacaacgtacagcctcaattattgaaaatattttgttttctggtatgataaattttgtgattgaaacgaccaccgagaagttcatatgaacatagaaaacattaaagaaaacaccgtccatatattattttatttaagacacaccgtccaagattacaactgtatatttttggaccaaaaaatcattgcccctcttgtggaaaagagatagtggtgcagaaaaaaaggcacgtggaacatgacctaattcggctaaatacagttttaaaattcaaaaacttacgataaccggacaaagatttaacagctgttttccagtatgtccacgtgtccatgaattatccttccacgtgtaagtttgagtgacgtgtcatgctaattattcttaacaaaggcaaaactactcttgtcttgttcctcctgtcgtgtaagctagcaactgtaattttgctattggtctactaacgtgtttagatattcttccacttgcattaccttttctttttattcgacattatagaatgtattaattgttaacggtttagggaaactacttaattatatggtttacaaacaaaaaaaaaacataatggtgtcaacaaaaaaaatcacaaaggcaataaattaaagaaaacaggtgcatgtggttcgtttacttagttgcatagaatagaaagatgctgctacaaaatatccttccgtgttctcgcttatccttaagccgtatgcacattttgtaccttcaccttccacacgtgtgcatgtatatatccacacgcactacaaatctgcattaatggtacggtcatcgttgaaacgactacgttcggtgaccttcgtgcttaagataaattttgttggtcttctgatgtatatgcttaagccacacacacctaacaccttcactaaagcttgattgaaaagcgattctttgttggacgacaaataaaaagttactcttttcttcttctttttgtatgtgtggaatcaaaacgtttaagttttgtacctaccaagtactatttcatcttatatgttagaacttaccgatttgttggattttttagaattctgatatcatatgatatttccaaaaaaacttatttaaagatttgctttatttcgtcttcaaatctgaaatttatcgtcaactttgtaaatcaaatgttaaaaaatttcaaatgtagaattgggatattaaaaacttgatcattttgataatatctatatactataactctataagataatgcatggaatcacgttttacgaccaagcatcataagagtcatgaacgggcaaaagcgagggcaatataaagctagaaacaaaaggacagattactacatgaaagtgtgtgaagctttttccccacattggccgccggctttttttgacttaattaatattaacaatactctctacactgttttttctgtcaataatagtagtatatgataaatattcttttcaaaacaatacttctcatgtggagaaaatatcgaccacatcatcaactttcatgaacaatgatcaatggatcgaccatcacacttgctaaataagaaaggcataagaagattatgttgcaaattataaattgaaactcttggatcgataaatattccatcggatttgaacatgaagataatgtgtgaacgattacattttagggtttcacctatttagagtgcagtaaatgtgtgattaaatagaaatttgcttcactaaaaccaaaaaagtaagtacaattctataaacagttcattatttt

SEQ ID NO: 36557 - DNA, 2054 bp, Arabidopsis thaliana landsberg
  unsure (1)..(2054): unsure at all n locations
tactttttgtacatgcactcaataatacacggaatcagaaacagaaacagagcaaaaacagaggaaatttacgatcttaagtagttcgagctcacatagtgaataatacgtctaagcttgattctctacaaaattcactctcaccattagtggttacattaaaaataagaccccaactctctcaaaatccgagaaaagattacaagaatgatcaacagcaaaaacgttaacaccttgagcttgaaccggctttcaactgacatcaaaccaacaaccatgttgcttgattgttgagtagttggttaagccagagactcatgatgactaagaaacctaatctctacatggaacagagttggctctaagacacaccgctatagccaacttcgttccatgaatgacttaggtgcctaagttaacctctaaagtagccatcgagtgtcgatttagtaggaaaaaaataaaatcaggttaaagccatgaacatcaatagaagacttagaatcttggaaaatcatagacgatcttgtcaacgttttcacatgatcttaagaattctattgagttcgtggctataatcccaaccaaatttcatcaccggaagtaaaaagtcataactctgccacaaggagatgtttagggttccgatggatttgtttaagaggttgtcactgtatgtacttcctctaaagtattactcttagatcgaaaatacaagaggaaccaaaatcaaaagcaaaaagaaacgtatgattaagaatggcggtagtaatgttggtagacttatcatctttcgttcctttatataatgtttcaccatgctcatttattaataatctaaccatattttcatcaacaaggcccatcatgccttgtaccatattttcttcaacgacacatgatgttatgttttctattttgtgagctgattgtatctgggtcaaaatggtctctgggcctagtaatgggctttacacaattggatttacacctcatttaacagaagaacagaagttaggcatgtacaagcctgaaagcccatacttcagttttatactgaagagagaaatttaggccaagattttaggagattttagatttcagattttggtttttgtaaataacatgagatttttggatcttgttaagaaattagtaacaactcttagaattagattccttaatttttagtgaatcaactttcctcaaaatcttgaatggtttaaaaaatggatttttggaaaaagctaaaagcaaaaaccatagccttggcttaggccttttttttattggttatacataagataaatagagaaaatatttaccaaagcaaaataaaaaaaatcctaaattactttgaccaaaagaaagagagaaaatattaccaaagcaaaagtaataaaaattctaaattactttgaccaacagaaaaagagaaaaaaaaaattaattccctatattaaaaaccctaaaatatctattggaagacagcaaccactttaaactaaagttaacacctttatattcccaaacactttgccgtcgtcttctcacaaaccctgaaaagcttctctcttctctttcgctcgaatattccgattttctcctttgacatttccaatgacgaagaaactcgatccaccactggcaacttcaagcgacgaagatgacgtcgagacttccgaagatgattcctcttcatttattccatctaaattgaactggacctcctaatttcacttcttctgtcagatggatnnnnnnnnnnnnnnnnnnnnnnnnnnnnnnnnnnnnnnatatcatttctaaatggcataatgtaagtgtaatatgctcatgtaacttatctacatcttgaataaccaatacctttgaacttatttccccaaagaagcgacataactttgtaataacaaacgagacctcccgaggcaaaacattacgtatagcaatagctaacaactaacctatcaagatgtggcaatcatggctctttaagcccaccatttttcgttgattcagatcaacacaagaagaaatgtttaagaattcca

SEQ ID NO: 36558 - DNA, 1390 bp, Arabidopsis thaliana landsberg
  unsure (1)..(1390): unsure at all n locations
ttgggatgcgaaagctgcaaagttgattcatcattggcctaaactacacgaaagacacacttttctgcagccaaactcgagaggctacggtggaatcatccgggttagtgaaccaaatcacctaaagcataatcctttcatcgtattttctcacagtggctttggtttcttagtaaaccagaatcaaagtaatgtcggtgtatgtaatcgaatttgggtatgtgttacgaatttggtgtaggctggggtgactgacatacaagtttgtccgaatggatttataacgtgtggtggtgatggcacggtgaagttcgtcagcctcgtagattcttcctatggcgatgctaaataaaaagaagatacattttccgggaaagttttgcagtcgagaaaacgagttattgctaccttgcgtgtgtttattgaatacgtgattttttgtgatgtagtttttttctctatatggtttaatatttgtgtatatacaaatatattaaagattatgaagcagtagaatcttgagttgaccataatccagattttaatttatctttgacttgacttcaatctatactcggaaatatcatctatttatctttgacatagttttcgttgactttgttgcatcagatttagaccagattaaatcggactgattccaattagattggtgttaagtgtagtgcaatagaaccgaaaataaacattatcaagatttagttcgttattgtaattttttttctttctttttggtgttggtttggtattagctcgatatagtttaataagattatgaaaaaaagaaggctaggaacctggccactatcgtattacgtagtggaatattatcttatggttgattattaaactgctccataatttgtgtgggagtcttgtagacgaaatgatatgaatcatcaaaatgtttgattaaaaccccatttgccaagaattattcctaaaactattaagttaaggcaaaggtccatttcattaataattattctaaagaagttagttgtatatatagtatatatatagactatggtgttaattatgactgaatatattagtgctcacataaagcatcttattagaatatcttagattgcttaaataattattaaccacgtaataaataaatctcatgtaacactatcaattggagaataatggagagagacaattaaccataatgacttgaagacacttggcttcacctaacattcaatttcctagacgaggccactatttacattctctttacctaattntcagaactacattaaaccacattgacatgtaaaaaacctaattttatattttcaacatgtctatttaccatttgccactttattacttaaatgaaaacgatgtcataaaaaaaatt

SEQ ID NO: 36559 - DNA, 3651 bp, Arabidopsis thaliana landsberg
attcttagttcatttgattttacctcagcaagtgccatagataagaatatatcatgaatatatggctttgaatcaaggttcctgagagcagcccggccaatatccagcacaagtttttcttgtccaacctgaagcatagtagcagaaagatcagtacaaaacatttgcagggataaaacgcaataaaaggtcagaagtagtacctcttgaagaaggcatagagcaccaggcaaccatgcccacggaattctgagaggagatttaggagcaatcttttcttttaggttaccagcatattctgattcaaaaagaagtttatccctaacatccatgagaagatcctacacattaagaacaaagtatcaagaaactgaagccacattccctgtccaactctagtgatactataggtcttaacctggcgagctgcagcagcttccattgtataaccctcttcagcatcagtttttttcaaatttataaccgacttaacgacctcgtctttctcagcttgctcagaaactccgataagctgcaaaatcaatacaattaacagtatcctggaataatgtctaacaaacgaaacgctacattctttacactctattgcagaaatgaactatgatacaatattaaattgccaaatcaatacatccatctcgttctacgcgctagagactacaaattggaggaaaatgtttctatttcaacaaaatttagaaggataaaaacaagttccacttgcacttcaacgaggagctaagtagcaaatcgcgagagatagtagtatctacagagattccgaaaagtaagtcagtcggagcaaaatacctggtaacacgtaaccgggagttcgattgtagaggtagatgcagcgagagaagaagtacgagacggcgcattgtcgacgacatggataccaccaccagcagcattcaacctcctccgtccttctcgctgaaaccgccgcaaagataaaccagaaccgaagaattcaccggattcagaacgaacgacgaggagacctgagatctgaagctccgggcgatctacgacgaagctggtgctgcgattggagattccgcaaagcagacaagaagaagggagaactggaaatgtgtaagctactggcattgcgcaacagctccagaaaacgaacgaaccctagaagaagtagagtgaagctggaatcatggtacaatttgttggatttcttcagaggagaaaaaatcggaaatttggtctcaaggcttttgagttttgacagtgatttttgcctttttctgaaagtttcgtcttgtgacgataataaggtaacccgctggccgaaagagaggctctgctaatctaggactagacgagacgagacgtggtcacgtgatcacgccacgtggataataaagaaacatctggaagattattttatccgtccctggacatgggcctagctctcggcccataactaatgtgcgtttgattctactgcaagctcatcgcatgctaccagtagtctattactgatcaaaggtttaatttgtgtgtaagaaaaaacttatatataatttaaaatttgtttaaatctgatcaatatgattttttctgaatcaaatacctggaaagtatatgtgtggtgtaaacttttaacttgatcagattttgtaatactttcacttaagtttaatatcatgaaaaaagatttaagatattttgtagtcattatatttttggaggatagcaaattgcaacactcaaacacatttggctatatgagaaccacgtttgctttcttgcaaatcagcacctcttttttgtcccgacttaaaaattcagaaaaataaaatgccaatttagtgaaatagagaatatttttcacaataattttgtgtgttgtacaagaaatgaggtatttcattttattttattttacttttttcctctacaagcaaaaacacacaactacacaaggataaaacctcttgccgttgggtttatttagcttctttgcaatatccttaatttcgtctccgtcagtagcagtctccgccgggaatattttttttccggtagctatgctccgaaccgtctcttgtttagcttcgcgcagctcgtcctctctattctttcgcttctttcgtcagttccctcgctcttacatgtctctcacatcgtcgacggcagctctccgtgtccccagtcgcaatcttcgccgaatttcctctccctcagtcgccggtagacgtcttttgctccgacgaggtttgaggattccctccgccgcagttcgcagtgtcaatgggcagttctctcgcctctctgttcgcgccgtcgccacacaacccgctccactttatcctggttggaatttttcacatatacttctttttttcaatctgtttgaagtttaattgctaattgatttgttctcttaattcggacatgttgatttgtggcacttgtgaaattgtggttcttactttaggataggttgtgaattgtagataggtgtggtccgtgtggtgcatttttcatctcatgctttgtgtctactttgtaatcaaatggagccatgtgtaacctctgctgatgcgtgattttccttatttttggttgtttggattcagatgtaggtcaagatgaggctgagaagcttggatttgaaaaagtgtcggaagaattcatctcagagtgtaaatcaaaggcgatactcttcaaacacaagaaaactggttgcgaggtgatgtctgtgtcaaatgaggatgagaacaaggtcttcggtgttgttttcagaactcctccgtaagtttacttcataataatttttactctctgtaaatttgacctgagtatgtattaggcaattgaaattggtacctaaagcttcactccttgaatttaactaattgaaatggtcaagtttatctctactcatcaaagctttttttttctgattagacctagtcatttcgtttcttcttctaatatattggtacttgtaaagtggtctaagttttggaggttacaacttgtcaaattacttaacgctttgttaaaagtcgatatgagcaactgcactttcagtagatattggtcccacaggcacctccttgtgaaagacttgcaaaaactaataatggaagcaattttagatcatagtttcgttgttaatgcaggaaggattccactggcattccgcacatactggaacatagcgttctatgtgggtcaagaaagtacccggtaaaagagccatttgttgaactactcaagggaagtttgcatacttttctaaatgcattcacatatcctgataggacctgctacccagttgcttccaccaatacaaaggtacaatgagccaaacattaagtccttcttttgttgtcctcagtgggctaacctctttctttctgttattgttatctaaagtgagtctatttctgatcacaactcatcactatcactatctatggtaggatttttacaatcttgtcgatgtatatttggatgctgtcttcttccccaagtgtgtggatgacgctcacacctttcagcaagagggctggcactatgaacttaatgatccctcggaagacatatctaacaaagaatttatttacctaggattccattttagagctcttttcctcggct

SEQ ID NO: 36560 - DNA, 6103 bp, Arabidopsis thaliana landsberg
caaggattagcaccaacatagagaagtgaacaaaaaaaaaaaaaaaaaagcagaaacttgctggacatggaaattcactttggcaatccggggcacaggggttatatataatgtctacgaatagacctttataagggacaaactacagaagtatgagggcaacaaatacattctctacaatccacagaatcaatacaaaaaagtatgaggtcctatatgtgtctgactttgtgtagtcttcaaacctaatagaatgtcaaggaagaaataatacgacagaaatgagaaggggtaaataaaactattgtcaaagttgccagatatcaatggggaagttatttttcttaagataaaaagaaaatgagaaaacaggaacatactgaacttgatgggatttggctaatcatgcttcctaagacacgtttcatacgcacactaaacaacagagcaagcaccagggctaaatggaacaatccaagacctacaactcccaaagactctaaaagaacaagaagaatgtagtctgttttcgccaataacagaacaaagactaaattctcatttaagcataccataataaaatctgcttaggaggaacaattagaagagaacataccatgcgaacccatccgaacataggcttctcgagtttaggattaattcctttgcatctactacacgactttgatgacaacctcataaaattcttcaagacagcagtgacttcagcaaactgaagagatgtccatctctgatcttccacgtcagaatcttcacattcttcggatgaatcagtggttacaactgattcacagctttcatcactagacttagacttagtgggagtgttggactccaattgcttcgcggaaactatatcacctttaatgatgagtttcagctgagaaacagctctttcaaccttaaattgaaaagaagaaaaaggagcatgaagcacattagaattagtaagtgcagaatgagacgcaacaaaatgaaattaatctcatgtatatcttacatcttccggttttgccataaagtgatgacagaagaaacaggccctctgcaagaaattgaaaagaagattgaagagcaaaggatggtaaataggaaagacaagctcgatatgaccacaatgtcctggacaagcaagtttgagctgaccacatgaattgcaactgcattaagaggacaagaaaagctttagattaagcaaagaaaaaagaccaaacataaacaagattatcagagaaataaagatcaatagctacttgcaaacaaatcggtgtatgaatagctacttccaactaagaatcgacaattcaaagcctagacaggtataaaaaggaggtctttataaaagttgcgtgaaaaaggcgagctattaagagcttagaaaggcatgataattcaggccatggtaaaaggatatggaagaaaacttacgcttgcttatcatctttaggacctaatttaagatcatagagaccaccaggaaaaggattgcccacgttatcgtgtaaaataggactggtaactttcaggaaactatgctttcgaacatcttgctctgtcatgaaactgaatctaacagattcgaccacctgggaagctccctggattcaaaaggaaaaactcgagaacataagataaaccatccaaggtcgaacaccatgggaaacaataaagagcggtgaaaactcaaacacacctctgtggtttgagcgtgagccattgcgtcgtcggtgtcgcttctggaggctgtgtaaactgtgcggcgagattagtgtttcagcaagaacggagacaattagggtttatcaattgatacaagtcgggactttaatcggagtttgaaaacagagagaaaagcggcgcgagcaaccggacttgtgaaggttttttttttcttttgaatcggcgtgaaagggttttagttttagggttgagaaaactaaaataaaaattgtgtttattatattatacactcattaaaaaaaaaaaaatgtgttctatcaaaaatggaagaaaataaaacctgttcttttacgatattctccctgtaatcaccgtcatactgtagttgaatttgtctaatctcagttaattccatgaacgggtttctgttttttcttctcaaaatgaatttttttttgtctaatcacaattaagtcccagtaggattagtctagtcagataatttatgtacatgaataaattctgttttttcttctaaaacgtcttgtaataacatgttttgtgcctaataaattctacactagcaatgagaaccaaggaacaaaacagtttaataataaaaggaaaatgtctaatatcaatcccaaattccaatctaaaaatagaaagttatacaaggcctatgcacttgagaaaaaaaatcccaagggactatagggattaaatcgttgatttgatcatgaccctatacatcaatcgactaagagacataggctgcgtagtagtagtagtaatatagtagctgaacaaaacggagttgataatattaagggatttttcatttggatgtctttttttttttttatgtttcttataacaaaactgacacgcgcttcttcttcttgtgaatttgatgtttggatctgtgagaaccagtttttacttctccttctccgtttctgtttgggaggatgattctgagtggtgattgtcttttggcttggctgggacgactttggctggggtcgaacgctctgactgagacgagcgtatcaggatctgcatacagagagtgatgatacctagaccaagcgccgatatcgtgatacctttccatgaagaaaagagttgtgcccagtgtaggaactttattgctccaagagttagtacgcatgcccatgatagaaccacctgagaaaaagatcaagagatttgtgagtttatagatggaaccaagagaatgttatgaattttatagactcaccgcaagggactttatgggacggccaatgttctgttcttgttgaccggggaaagtatctgcagctatgtgtttgtctaacagagcatcctgtatcacagagacgagatgagagaataccaaaatgaaagcttttccaagcttttctctatcaaatcttgaccaaatattttattgccaataactgaaacgtggaaataccagtacatccataatttttaccttagccacaaactgatctctgcaccactgtgcaattgcgtcatctgattcaggtaagtctttcatcgagtgacacttgatgtgaacatgcaccttgaaaccagcagcaatggtttgcgttaatggcgcaggaggttttaaaagaaaaaggcttgggatgggatgagtcctacggtttcttacacattataaaagtaaaggtgatataaagagttatgttcgtttcagtaaattggatggtgatgtgatccaagccagtgcatactttgaaatttgttgtgagaagagtgcaagattcaactgctatacgacctattcatatttttgcttgcttaccactgaaggttgtcctttgaatagtcttagcatcgtgggtggtggagaggtttttggaatagtcactgtcatatcataaattgctgggacaaatgaacgcatattactaacagctgacacgaaaccctgaaacaaaaatacaagcaagtctagtaattagggcagaaatcacaataacaaccaccaagtcgatctgatgaaaatgaaacgtataaaggctacccatgcattgagattttggatcatcatagcaatcattttgctttttaaaggacacagagaagatatcaagttgccccaggaatgaacaaaagaaaaatattacaacttactttggtgcgaggaatcaacacatttcgagggataggcaattcagaggaggctgcatactcttgtgcggctttaagtttggcttctgtaaagcgagttccctccacaaaaagggctaaccagaaaggtcgagggaagtcgctcaagcgctgaagacctgactgtaaatttagacaaacacacataactcatggtctggaaatgaagattctgcatttttaggctaatcccctcatgaacgaggtagctgcacgtgctaataagcattttacacaggagcaaaaactaaatgagttgcacaaggatactataaacccatacctttagagtgctttcatccttggcccaatttctttccagaaagagatactccgagaaccacattgaccagcctatgacctgtatgtgtgtgaaaattctgtttatgagtactatgaatatgtaacagataaaaaaggcggagaagtgtattaacctaaaacaatgattttttctcaaacgcaaagccaggtatcaaatttctaacttatagaagagattcagaaatagaattaaagattactactattttctctcaaatctagcaagcacacagcagtaagctaaaatattcacatactggaaggaatttggaagacttcttcattacagctaatgcgcttcccaggcaacctgaccgctgcaaggaaagaaaatatgaaacaatagattaaaagatgtaaacagcataacagggagcgtgttaagagaaaatatgatgatgctatactctctcatatctcatcagatgatcactagggactgtcaccttctacctaagataatctttcttaagtagatacttggaagcaatacatggtcccattgcaagtatacatgctttctcatcaagaagtctattatgttgatctccatttatgcattcaaacaaaaacgtaggaagatagatgaaactgtgaggtgaaattatgtacctgagccagaatccatcccacaagccaatcaatatcacttcggtgattacaaacgacatgagcatgctctttgcctagaaaaaaatagtaggacagccattgaagttacagattcacccttacattggattattatttctggtggacatgagctcttaaagaccttctctatcgatactaatctgagatacactactccaaccaattacctaccaaatcctttcaagaagacggattaccactgaatcaatttgatctagataataaagaactaagcataagttacaggcatccacagttcatccattgatgtccacattaaagagatgagacataaaatttatgtgaccgatttctggagcaacatatatgttgaggatagagaaaacagagctgatagtctcctgaaatgaacaaaaatggagaagaagaatcaacaacatatccaacacattccaaaaaacttagctagcagattattgagctgcatcactactacaagtccacaacaaaatttgtagaagtaacaaaaatgatgaaacagatcatgatcatataaactaggaccaatcttaagctaaagaatcaatgaagaacatagtacataagcttcaataatgcacagattaacaaacagatgatgtgattcaaaagaagtaaaaagatgtaaatatatataaaccaaaatgattctcacaggctctcagtgtataagattcaagcaaacatctctaagtacataaaaccacaaattccgcctaaaattgaagatcaaccaaaaggtttcgagctgaacgagagatcgcacaggagagaacattttgtgtgatcatataaaatcaaatcaagagataatctcatcatcatcatcatcatcagagcaacaccaaaatcaaagaaaacgagaataatcgatcatcaaacgcaccgatggagcaatcaattacataatctgtggatgaaacgtttcatacgcaatccaaagtttattcacagaaacccccaaaaatcgacaccactgaattcgaacgaattggagaagaatatatacgaagaagaagaaatgattcgaaagagaaaaaatgaaaaaggaatagaatgtatatgatcgagaactcttcttcttcgtctcttggctttataaacaaatcccaacatcgcatcaccatttctatagctctcctttttttttaactttttttttaacctttaattttctggaaactgtagtgtgttagaaacatttgcataattatcgttttttcccccaacggcaaat

SEQ ID NO: 36561 - DNA, 436 bp, Arabidopsis thaliana landsberg
gcccttctcatgggcaacatgtttgactttttcactacatcccctccactatctgctctacgttactcaacgtgaccacaggagctcgcagcactactgttccgtctggtctcaatatgccatccatctccaacaatatcaacgtcaaatcacacctcaaaacatacacaaacaacattccattagtcgcgtttcacggatatagttttgagttggaagaccatgaaactttacctatgttcgtataagctgaacaatcctcctgcatgaatcatatcataagttcttggatacgttgagaatccttcacaccaatcttgatacgtccctatcaatccacgttcgtagataacacctagtgtttgtttctctgcatcgaccgggacaacgttcatgacccatgagggatatttcagcatggaagcagcgaatccgc

SEQ ID NO: 36562 - DNA, 2433 bp, Arabidopsis thaliana landsberg
  unsure (1)..(2433): unsure at all n locations
tcggtatcggtttcgctaatcaggtccgtcattaaaaaaccttaattttaattacgttggtttagtttacaaataaccatccataatgtgtttctatcaaaattgatttttttttgtcgaacagaaaactaacaaaaataaaattgtctttaatactactatagaagttattaatgtattgaaagttatatttataaccgttataaatgtaccttggttttggaaaaaaagttatggactaagccaactactttcattaaacataatcataaaatagttaggtcaacttgactttatcaattttcttttgcttttctactacaacgatcattatattccacgttatagagtatatgatattacaattattgaattttgttattgatttgtttttctgctagtatccacaattccacatggtctgttcattagactgtgatgatgtctctttctctccatttccattgttttaattaattaaaaaaatatattgtttttgacgtcatattatatattttttagttaggaaaaaggtcatattcggacctatcttcgagttataacgcaatgacaaaattgaccgtgtttaacttccatatttacgttcatatctctatttgatctcgaacaatcagaatcttcactcacttaaaaaagtcagattaggacacgtatctacttaaacctgctaactacgtaactaaccctagttaatatcactatttacaggctgtgcacgtgtactctctgagatggctccatacaaatacagaggagctttaaacattggtttccagctctcaattacaatcggaatcctcgtcgccgaagtgctaaactacttcttcgccaagatcaaaggcggttggggatggcggctcagtctcggaggcgcggtggttcctgccttgatcataaccatcggctccctcgtcctccctgacactcccaattcaatgatcgagcgtggccaacacgaagaagccaaaaccaagctcagacgaatccgtggtgtcgatgacgtcagccaagagtttgacgatttggtcgccgctagtaaagagtcgcagtcgatagagcacccgtggagaaacctcctccgccgcaaataccgaccacatctcactatggccgttatgattccgttctttcaacagctaaccggaatcaatgtgattatgttttacgctccggttttgttcaacaccattggtttcacgaccgatgcttctctcatgtccgctgtggtcactggctcggttaacgtggccgctacgcttgtttctatctacggtgttgacagatggggacgtcggtttctctttcttgaaggtggtacacaaatgcttatatgccaggtaaggaacaattactacttttatttatctctaagatctatataaacatatactaataaagatgtgttggttcactctctgtgtaattgtaggctgtggttgcagcttgcataggggccaagtttggggtagacgggacccctggtgagctaccaaagtggtatgctatagtggttgtaacgttcatttgcatctatgtggcgggttttgcgtggtcgtggggcccactagggtggttagtaccgagtgaaatcttcccgttggagataaggtcggcggcgcagagtatcaccgtgtccgtgaacatgatcttcacgttcattatcgcgcaaatcttcttgacgatgctttgtcatttgaagtttgggttatccttgttttcgcctttttcgtggtggtgatgtcgctctttgtatacattttcttgccggagacgaaaggtattccgattgaggagatgggtcaagtgtggaggtcacactggtattggtcaaggtttgtagcggatggtgagtatgggaatgcgcttgagatgggcaagaacagtaaccaagctggaacgaagcatgtttgatttatcattgtttttaatgagagttttaagaaagaaagaaaaaagatttgtaatttctaatgtcgtaaaggaaaaagtgtattagcctagatatatattggtgtttatataattcaataccacatggagaaattatgcatatgattcttcgttaattgtctgtaattgttatactctttacttaaaccaagtgtttcctctttgattctactttcgcagcattgtactccaatgaaccaccaacaatataactaagcaccaccaacaaaaatataattagacaaaaatctaaaaatgctgaaatcaacaaagaaaatccgagaagaagctaaaaatgcagaaaatgttaaattacaaaggttcatcattggtagaacgaanagaaagacaaattaagcagagaaatagctttggtaataataaacagcatatccggntgaaggtcaaagagtaaatcataagatttgtcatggagatcatatatcacccgatgttcccagc

SEQ ID NO: 36563 - DNA, 1812 bp, Arabidopsis thaliana landsberg
atcgagatttctctgaggaatttgttgatcctagatttgataaagctaactgtgaggaaacagagacagggtttggagaattttggagatttcttgatgaggctttggtgaatgtaactttaaaggctgttaaaaatggagggtttggtgcagcttcagtgattaaaaccgaggccgtgtatgcattggctcagtgttggcaaacacttgatgagaacacgtgtcgagagtgtttggttaatgctagatcgagcttgagagcttgtgatggacatgaagctagagctttttttactgggtgttacttgaagtattctacacacaagttctctgatgatgctgcagaacataaacctgacgctggtatgaaacattatgaatgttgacttgacatcactcttaagagcttattcacacatggatcttgtgtttctttcttgtgcagatcagagaaactttataaggtcatcgttttttccacatttgagtgctcgtgatgttacgagattagccattgctgcgagttcgttgtcgattcttacatctcttggagcctttatcaggtacagtcgggtttcaaggaaaagtaaaggtatactgtgtctagaatatcttacaacaccaaatatatgtatgaggttccttgtctcgttgattcatgatcttttcttgtttagctcaagttccaacgtgtgcaaatttcaaatacgagatgcttgagaaagcgaccgagtctttccatgactctatgaaactaggccaaggaggggccggttctgtatacaaagggattcttccagatggcagaatcgttgcagtcaaaaagctcttcttcaacacacgtgaatgggcagatcaattcttcaacgaagtgaatctgatcagcggagttcaacacaagaaccttgtgagactacttggttgcagcattgaaggtcccaaaagtcttcttgtctatgaatatgttcataacaaaagccttgatcaaatccttttcagtaagttgcagcatcttctataaacttaagtcatttatcgaatccatcatgttaactttgttatttgaattgcagtgaagaacacagtccatattttgagctggaagcaacggtttaacatcattataggaatatcagaaggtctagaataccttcacagaggatctgaagtaaaaatcatccatagagacatcaaaaccagcaatattctccttgatcgaaacctaagtcccaaaatagctgattgtggactcatacgttccatgggcactgacaaaacgcaaaccaatactggaattgctggaacactgtaagtgtgtgtgtacttctcgatcaattcttcttttagagtataaagttttggaaattgatgttgttctttggaactggagaggttatctggctcctgaatatctgatcaaaggccaattaacagagaaagctgacgtttacgcatttggagttcttatcatcgagatagcaactggcaagaaaaataacgcattcacgcaaggaactagctcggttttatactcagtaagtaatatttgtttccatgttaagtcgcagatataagatacactcacaatcagttaactctgtcatggctttgtcatgacttgttggaataggtatgggaacattttaaagcaaacactttagatcgctctatcgatcctcggttgaaagggagtttcgtagaggaagaggccttgaaggttcttcaaatcggattgaagtgtgttcaatcttctgtagagttgagaccgtcaatgtctgagatagtcttcatgttacagaacaaagatagtaa

SEQ ID NO: 36564 - DNA, 1920 bp, Arabidopsis thaliana landsberg
ccagaagaatatctcgaggagttaaagaatggtcttaaggctatccttgaaggaaatggtgcgcagcctatagatgagtttatgtttctgcagaagtttgtccagacgagatctgatttaacttcaaagacacttgtcagggctcaccgagtgcagcttgaagttcttgtggttataaacactggtatccaagcattcttgcacccaaacatcaatctctctcagtcatcactcatcgagatctttgtgtacaagagatgcagaaacatagcttgccaaaacgaactcccggctgatggttgtccctgtgagatatgcgctaataggaaaggcttctgcaacctgtgcatgtgtgtgatatgtaacaagtttgactttgcagtcaacacatgccgctggattggctgcgacgtgtgttctcattggactcatacggattgtgctattagggatggggagatttcgatgggagtttctcccaagagcgtatctgggatgggagaaatgctgttcaagtgtcgagcgtgcaaccatacttctgaattgctgggatgggttaaagatgtgtttcagcactgtgcaccgaactgggatcgagaatctttgatgaaggaacttgattttgttagtaggattttccgcggaagcgaagatcaacgaggtaggaaactgttttggaagtgtgaggagcttattgacaagattaaaggtggtttggctgaagcaactgctgccaaattgatattaatgtttttccaaggtaacttcttttttatgaaccaacattactatttgtctgcagagtcttaacccttttttgttactgttttaccgaagagatcgaatcagactctgcgaagagctttgaaaatggagaaggtggacgtttgatggcacctcaggatgcatgcaaccgaattgctgaagttgtacaagagactttgaggaaaatggagatagtggctgaggagaagatgagaatgttcaagaaggcacgcatggctcttgagacatgcgatagagagctcgaagacaaagccaaggaagtttcagaactgaaagcagagaggcagaagaagaaacttcagatagatgagctagagagaatcgtgaggctgaagcaagcggaggcagacatgttccagcttaaagcaaatgaagcaaagcgggaggctgataggttgcagaggattgtactagcgaaaatggataagtctgaggaggaatacgcaagtaactatctgaaacagaggctgagtgaggccgaggcagagaagcagtatctgtttgagaagattaagctgcaggaaaactcaagggtggcatcacaaagcagtggtggtggaggagacccgtcacaggtgatgatgtactcaaagatccgcgatctgcttcaaggatacaatctctctcccaaggttgatcctcaatcaaacgagcgtaatcctttcagatccaatccttaatgcttctatatatatatatgtagttttcatatcctaaatttcatcactgtgttttgtaaaacgagtgtttgttgccgtgtaggatctatctatattactgacgttttgtaatttgtgtgttctcactttgttgatatgaagttgtttatctatgttatggtttcttggttggttgattcagtgatttaggaaacgtagaaagaattgattgtgcagacaacagtcttaattagtctttgtcatgatagttgagcctttcgtttttaagtcttttctataactcgacatgtctttgaactatctaacacttattggaggactttctgataagaacttcgtgttagcttataactgtcaatgcaataagatacaaatgactacacaacataaaattccattgtctccgaaaatcttttggaaggggagctgtggaaaattgaaaaacgcggttaat

SEQ ID NO: 36565 - DNA, 1349 bp, Arabidopsis thaliana landsberg
acgaaatataaagagacggtcctccacctcctgaacagaggaaaccaagacaagaaccagcatcctctgattcctcttaaactataataagataatggagtgtttgcaagttttgatcttttggttagcacttagcttgttgaagtcgtgtgtaaaatcgtctagtaccaaatgatgatactgtatcatcacaccttgaacaatagctattgttatgttaggatgaaattcaacttgaaccatttgtttatttaggtaatgttcggttttggtttggtttgattctttgtcaaccactgctttttccccacgttttctcaacaccaatttcagacaagacaaaacaattgtagggtcacacactcgtcaccaactcaccatctacatcagtcgtccctaccttatcaacacatcacatggaaataatacactactctctcacggacttggaaccaaacattccaaattagtttaatcgacagatcactgctcagctgaatcgttttctctcatcaaccgcagagaaagactttcaagatcatccttcaagctctctcaaatggccaacttctatgagaattaccagagtccttacgattacaatcaggttaataatctctacgatcaaaatcattatcattacaatcaacagcagcagcagcttggtttcgaaccaatgagttataattattacaactggaatgaatctgaatctgaatctgaatatgttgcttactctggttatgatgatccaatgagttataattgttataactggaatggatccgagtctgagacaacctctgcatatgttgcttactctgtttctaccatgtctgagcctaaacacttgttctatgatccgaatctctatacaacctacgaatctcctcctcagtttagtatctattgctctgtagcctctgctcttgacttcaacgagccggaattcgatgaatacgatcccacgccgtacggtggtggctacgatgttgttgcaacctatggaaaacctcttcctccatcggtggaaacttgttacccttgttcaaccgctcctcacgctaaagctccctctcctcctgagattattgctcctgttcctcttggaatttatgatggtggtcaaaagaatgttgtcaagaaacgtgtgtcttttgctgaaccggtagaagaagtcaaaccaatagaaaccattaaagagcaagaacaagaacaagacgaagattatgatgaagaaagtgaggacgaagatgatggtgatgatgatgatgaagaagaagaagaaggggatgaggaagcttaagaagaaagaaaagatcacagtttaagctatggaaatgaggaat

SEQ ID NO: 36566 - DNA, 1698 bp, Arabidopsis thaliana landsberg
tttagtttccattactagtataaatgtgtttatatatatagaaattagaaaattacagtttccattattttatactctgaaattgatcgtacataaattggtaattggaaggtagtttttgctttttctttctagatacaatgttaagttcctaatgaatatttttaatattttatatgaaataggtccaaatattacaagttcatgtatttgagttatcatttgctaccatgaatatttgcaagacagaaaatatatcaaaatctcatgtggggacataaatcatagacatttaaatcttatccgttattgtagacaaacaaaaatcaattttttttttttattgtagagcgtaataattttataacgtgtgtcaacataaacggtaattacaaattgctttagattaaacaattaaacatgtgaggagaacagacgaatttgataaaaaggaacagaagagcatgccaaaaatttaagaacatcagcattgttaacattgagtctatgagtatagattctacaggaaaattctcaataattgttcttcgacctatagaaattattctaatatcatggttcatggatatgggcgtcatcaaattccagataaacagtgtatatcactatagttttaattagaaacctgatttgatgttctttaatatacgattcttaatggatatccaaaaataggtatgtatgtaattttctacttcaatagcaagagtatcaaaaaaagtttaattagttcgataagtatcaagagtaaacttttatatgtatcaatatcaaactcttgatatcaaagtttaattagttcaccgtaatggtcttaattatgtaggttgattagaaaaaaataatgatggacatcgatatgtataaatactataatccatcatttaagagtcatttgtatattttatacgttgttgatggtaaacattgtaaattttggcttagacattcttgtgacgaaaaatcattatttcaagccaattttttttttcttacacggtattgtcttctgatataaaatgtcgtatggaataaataagccccttaacccaattatccagaagaagaaaaaaatcttggcagatattcaaacacttgttgattcgtataagagaaatgatgatgatgttagacgtagatgtatagtataatgtacatagtctacggaacacgaatctaacaaaattatgtttttaatttccaaagttttttaagagaaagaaagagaatgagagatgggtccatgacacctcactttttaaagtctttttaattgtcgtcgcacgacaaaactaaacaacattacacattattcacatcagcaacttccactcttcttcttctcttcaatcattctctctctctctttccctcatatacacatcaacacaacacgaagacatctctcattaatggaagtttcaacatcatccatgtcttcaaaaccagaacaaatgcaaaacccacctcctatgatctcatctcctaggtttcagcctcagataatatctcctcatcatcatgaccagcatcaacatctctcaaatcattatccaacaacttttgttcaagctgactcttcttctttcaaacaagtcgttcagatgcttaccggctcatccaccgataccaccaccggaaaacaccacgaagctccttctccggtgaacaacaaca

SEQ ID NO: 36567 - DNA, 1570 bp, Arabidopsis thaliana landsberg
cgagttctgcttttgccctacacagagatgtattttcgacattgatgttcagggggcaaggtgtgtgagagcgagttctcttgatgccatattcatattcgtatgtcccccttcaatgaaagagcttgaagatcggctccgtgctaggtaaaaagcaggcttttacaatatgagttgttgatatctttcataacagtttcctgggagatcattatcagttcaacttcttaaaaacagaggaaccgagacagaggagcaaattcaaaagcggcttagaaatgctgaggcagagatcaaagaagggatatcctcgggtattttcggtctcattttgtataatgacacccttgaggaatgctacaagaagctcaaggtgaaccaccttttgttaattgctcaaaatgttgtcatgttctgaatgcataacattaccggatctgtttccagaatctcttggggctagatggactcgctcatgtcaatggtgtagaaagtgagaaacttaacactatgcatagtaaaaataagtgaatatggaaagtaattgcttttgtaattgtttgattctgcagtagaggggatcaatcttcccattgagtacacagtatctaaaatggaagataagatcattattcaagaaacaggaaaagaaacaaggaataagtaagcagctaacaagtaatgatcttatggttctgataatctctctatgcatgtaaaagttataatttgaccttgtggtaaacaatggtatgcaggattgtattggatatatcttcgcttaatggaggagcaccgggtagaacaagggggattcttgtcgacgccattaagttctagaaaaagaactgttatttgaaataacttatttcattcattacattaccgtttttccttggactagataaacattcaaagagtctatatgatgatgatgatgatattgaaagagtttggtggtgttgatattattcattgtaattttgtttgacaagactcgaagaatcaaagttgattttttatttttttagttgtcgattttgaacaagaatcaaatttagaaaagcaaaacttgaatacacaactcaagatttggatgtacaaaagacttagattgatcgttgtcctttgttgggaggaaaaagacagcagttagtgacagttaacagttgaacttttaaaagcagccaatgaaattacaaagagaaagacaaatgaaagagacagccaaagaacaagttgggactttggaacaaagcctctatgtgtcatggtccttgcatcttgctctctgcaccgctgatataccccaactgcttttgaatcttaggctcaggatcactctggtggggccaaagtcggtcggattgtagtaaaaggaaggttcgtgtaagctcactaatggttctggtcctcaacatggtcctgctccaccactacagatacttgtacaaaagactttagactctgccaaaacaagcgcgtggcgtgacgcgcaggaagaaccaaacaaagcctccttctcttccaggagattcaagagcatcattaacttctcagaacgtattca

SEQ ID NO: 36568 - DNA, 3643 bp, Arabidopsis thaliana landsberg
cgacctataactgaaggattcactaaaatattactgaagctcttttatgtggattggtatctttcattcgattctttttgaagattctgctaatcataatgcctttgagttgcttgcaaaatacagcgatactcatctcgtcttcaatgatgatatacaggtaacagtttaagacctctttttatgtttctttttgtcttcatagtaccaaagaattttgtctttgcctttcaatttcaggggacagcatcagttgttttagcaggattagtttccgcacagaagttaacgaatagcccacttgcagagcataccttcctctttcttggtgctggtgaagtaagaatcaatttttggaatcacagtatcatcctttatactcaatgttttcttatgtcttcttgtttggttgttgcaggctggaactggaatagcagaactcatagctctctatatgtcaaaacaggtagaaggaatacaaaactgtacataagaggaaatttgagagtagctgtcaacttattacatctttcttctgcagatgaatgcttcggtagaggaaagccgcaagaaaatctggcttgttgattccaaggtagaaggaatacaaaactgtacataagacatttcattggaactaccattttgatgcaagttttgttttctgatagggattgattgttaactcccgcaaagattcacttcaagactttaagaaaccatgggctcatgaacatgaaccagtcaaagacctcttaggtgctatcaaggtttgaaatttctcctgttaagcgtcatggtcctcttatatctcagatctgtcttctttcctcttaagtattatgtctcatcaggcaataaaaccgactgttctgattggatcttctggcgttggacggtcttttacaaaagaagtgatagaagccatgtcctccattaatgaggtatttacaactccctatcaagtgaatgagtgatcatattaattattaaagcatggttttggttaaagaggtagtgaaaccaacaatatgtttcttgcagagaccactgataatggctctctctaaccccacaacacaatctgaatgtacagccgaagaagcttatacttggagtaaggtaagtctctccacaccgcaccattgttccaatatgtattcccttcagatagaaatgaagttttctgatcttcttcgaatgaagggccgtgccatttttgctagtggaagtccttttgatccagttgagtatgaaggaaaggtgtttgtatctacacaggtagtagtcacagatagtttctcttctcttcatccgttgaggtttacggaactaggttaagaaaaaaatctgtgctttacttaaaacacaggcgaacaatgcgtacatattcccgggttttggacttggtttggttatctctggagcaatacgggtacatgacgatatgcttctagctgctggtaagcatctacgaaatgtaaaaacaagtaaaaggctctctcagctttgttgtttactaatattatgatgtgtttctgcgtcatagctgaggcattagctggacaagtaagcaaagagaactatgagaaaggaatgatatatccttcattctcttccatccggaaaatatcagctcagattgcagccaatgtagcaactaaggcgtatgaactaggtcggtctctctctctctctttcgcgcgcttgcagtcagccttatattgtggttctgaatattgatggtggaaatgctggttttgcaggattagcagggcggcttccacggccgaaagatattgtcaaatgtgcagagagtagcatgtacagccccacataccgtctctaccgttgaaagttgaaactcaagagtctttacttcgtgcgcttctcatcctttgttcagttattcccatgttttttctgtaatttccagtaataaattagtctttcaagttgagatttcaaacacatgcaagatctctcatttaactttgcaactctgaaagttaaaagactatatgaagtgaatttgtttgacacgtttaatagagaaacgatgaaaatgttatatttggcaaaagattgcaaaatttccatcgctagtttgacgagtaaacatgagtggtttttcctttgtagacttaaccaattttcaatattgtacgtcaattcattagtgagtgtaatagtgaatatattagtctatccgtgtgtggtctttttctcacaattttgcttttatcccatacttttggcactagctaagatgactttctcgactctagttagtacattttcctagatcccttcaagatgtgttgttttgaattacaatcactttaaattgcggaattattaacagatctatatcacatcataataatcctactatatagaaacacacatagaagaaagtaagcaaaacaaaaacaaaatcatcaattcaattgaatgatttatcactacgatttgatttttgttgataattggctactatgaaaatttttatgtattcaaaacccacataataataaataatttttcacaagatccaaaaaaaaaaaaagtatacataacatagcgacgatcacatacataactactacaactttatatatagccatccaaacaagaaacacattgtttataatttataataatctcaatacattcaaacttatgggctcatacattaaaacctcatgttacgactcttaattagattgtctattcttacgttgatttgaaaatatgcatgcattattatgcgttcgacgtagatgaaatatcaggacagtccaaggtacatgtgcaaacgactcggagatggtgttgtttgcaattcccatggctctcatcttcccactcaccgcatctgtggtcgtggtcgcagtcgcaatcgttcatctggcaactaatatctgtcaacgttttaatttgattgatatgcatagcttattataagcatccacttctgcatttttcaggatagttagtttattccttaattttgtatatcctgaatttataatgatatgatattgttactattacattagagaactcaccagggattgacaggatgagcatggaaaggcagaggaagacaagaaatgcagcacaaggcttggccatgattactcaattattttattgatgttgttttttttttggtagcaaagagataactccaaacagagattatatagagttaaagagcagttggtggttgtgcttcaattatgataacttatgcaaacctttgattcttgtatactgaaataattactcacttcgatcttgttatgtcaaacatatgaccataacctcacaccacttgttcaaaagaaataataatgcagtcctagatagcttatgtatagagttctcagctctttcagcatccagcaagtcagtacaagtataaaaagcaaaatatgtatagatacaccgattgtgggtgaaccttagcatgcatacaaagttatctttacaagtgtcgcccctatgtgtagtaagttgtgtacctctgaagcttctatagtgctagcttcatgacttctttccagcttctctacgcttccgtgctagcttacttacgacttcattggacaaagctatattactctgacaagcttgt

SEQ ID NO: 36569 - DNA, 2918 bp, Arabidopsis thaliana landsberg
cacctatttcatgtcaattttttgctaaaaaataaacaaattggtcataatgttcaaaaatttgacctcaccatcataatacttagtacttactggtcaaacaaacatatgctcagaacttttgtattgatggggaaggttacttttgtcgtaatgttacaaaaaaaatttgttactgttgagaccattataaataatcatgtcatgttctttaattatcaactttgattgtcatttaattgtaaatttcgttagttaatctgtcctcttcttgtaattaaataaaaatttgtttcaataccaataaagttgtcctaaaaaaaaccacccctctaaatagggagtgagtgagagagagagtgatagtgagaacaaaaaaaaaacatcatttcttctcgcactcttcacctgctccaatggacgaaagacccgagacagagctaatatcaataccagccacaccacgagtttcaacaccggagattctaactccctccggtcaaagatcacctcgtccggccaccaaaccatcgtcggcgacatggactccgacttcgttcatatcaccgaggttcttgagtccgattggtacaccaatgaaacgagttcttgtgaacatgaaagggtatcttgaagaagttggtcatctcactaagctaaacccacaagatgcttggcttccaatcactgaatctcgtaatggaaacgctcattacgctgcttttcacaatctcaacgctggtgttggttttcaagcccttgttcttcccgtcgcgtttgcgtttcttggctggtgcgtttgcgtttttcttgatttttccaataatcttttttcttgtttttgagttttttcttgaactttgtgtttagtgtttcaagattatttttgtttagtgaacggcgagggtttattcgactctctgtggtgctcagatccagtttcagggttcactttacttgtttgggcaaaaatcaaaaatgtttttcttgtcggaaataataataggatattgactaatttactttttaactttgaaaacatttcaattttagcagtagatattttctttttaatttgtcatgcttccatcattacacatgtggatactcacagacatacttttttgctttaatttggattaagacagagccttctttatcgtctactttgtttcttgttaatttccggcaaaaaacacttttatgaaaagtatttattgtgtatatataagtagggcatgtagttgacgtcataatagatgactatttcttcttataaactttatatttagataaatattttttattgcaagttctaatatttgaaactatacataacttgttaaggtggagcatttggctagttcaatacttaaatagcttagtgatgaataatgatattgcaatgatcatgtatttgagattcttatgtaagaaaatgcacatatattatttccaaacttcaagaagtgaattattgttgttacaggagttggggaatactgtctttaacaatagcatattgctggcaactatacacactttggattctggatcattttcactaagctgtccccggaaaacgctacattctatatgtcgagcttgcacaagctgcttctggcaaaatgatgactttaattttacattaagaatgatgaaacaatgcatcattcgtgacaatcattattgagactaattctgtgtcttgctaaagtgctattactaaatcttgtattctcgattgtaacaggaaaaatggtaagagtagtgctttcatagtttcctacggcttacttatcagcaggaaccgcgacagcgctgattctgatcggtggagagacaatgaaactcttcttccagatagtttgcggtccattatgcacctcgaatccgttaacaacagttgaatggtatttggtgtttacatctctctgcatcgttctgtctcagctaccaaacctcaattctattgcgggactctccttaataggagcagtgactgcaataacttactccacaatggtttgggttctctctgtgagccaaccaagaccagccactatctcatacgagcctctttctatgccttcgacttctggttcactcttcgctgttttgaatgctcttggcattatagcttttgccttcagaggtcacaacttggttttggaaattcaggtaaaatatgcaaaatatttctgtctatagataatgcacatattggacttatgatttattctgagtattgaaaactttgtagtcgacgatgccatcaacgtttaagcatcctgctcacgtaccaatgtggagaggagccaaaatctcttacttcctcattgctctgtgtatctttccaatctccatcggaggcttttgggcttatgggaaccttgtaagttccatttactatatcttttgtttatgtcttgtcagtgaaggatgtttatctggtgtttggttcatgttagtgaaatatagaattcaaaaggaacactaatatcatttatttatagttcattttctgatctttggttcaatttccggattagtttgaagttattttttcttggtcttatagatgccttcaggaggtatgcttgctgctttgtatgcattccacattcacgatatcccgagaggcttattagcgacggcatttctcctagtagtcttcagctgcttgagcagttttcagatatactccatgcctgcctttgacagctttgaagctggctacacaagcagaaccaacaagccgtgttcgatttgggtcagatcaggtttccgagtcttttttggttttgtctcgtttttcatcggtgttgctctcccttttctgtctagtcttgcggggttgctcggtggactcactctcccggtcacatttgcttatccttgcttcatgtgggtccttg

SEQ ID NO: 36570 - DNA, 1025 bp, Arabidopsis thaliana landsberg
gaaacccaaacaccaaaaatctagcttctctcttcaactctttaaccacagtgacaccaaataaacaaagcctcaaaactttcaaaaccaattcactcttaatctctatcccagagattttgcaaaaaccataaatccaaagaatcacacaaacaaaaaccaaaattggcactttgttctttttccttctccatccatcaaatcttccccatcctctccaaaaccctaaccctcctcttcctcctcctcctccatctacgccgcccaaatcagcaatgacaagatccaagggctgtggtaaaatctggagattaggtgccaataaagacagtgaattgaacagaaacctcgtgattcttcgatacccaactctttgtttcctcttctttgcacaaagaaccaaactttgaaactgggtccgatgtgaaatcgaagaagaaactcgagaaattgatgaaagtctcagacttttttgtggattaagaaaatgaaacctactgagatgcgatgtcagatgaagaagagtcattaccgcaatttctgtcttctcgtttctcttctaatcccagtttggttagagacaaaagaaatagccgttgctaatgcgtatgggatttgtttcttcgaaccataccaaaccaaaccgaaaatcaagaaccggtaaattcaaattgaaagtgaaactttcttaacaaaattctcacattaaaagacgaattgagtttaaaccacggttaaaccatgctaaaccgagtaaaattacatttatatatatttaaccggaaatgttaaaccagaaccggttatttaacactattatcctcgaagaggttacttgaacacgattctcgttggcttcagacattttccatcttctaggtttctttctttctcagcaatttccaggtacgctgtttctgtctattcaatttctgcttttctgttgaattcgcattgccggaggtaagaaaatgaagtcaatgagaagaaaagaacgatttttttttttaattcccaacttgtgt

SEQ ID NO: 36571 - DNA, 1590 bp, Arabidopsis thaliana landsberg
tattagtgaagtaacaacatacttaacgatgcaaaaaaaaattgatctgggtcgttcaaaaacccaaaggcaagtagagggtttaagtgttcttccacttgaaaggtttatacaaaaagggttattctaaaaatctgcttctttcctctgagaattctacaaatgatcatttttgtatggaacagaaacttcagagagacattacattactcttttcaaagacttattttatgcttgaacagcttctggttctttcaccgggcttgtggcgacaatcttacacacgggcatggtttcattcttgctcagtagctttaatgatggatgaaatacaacgtcttgcaataacactttgtcttcaatgtccagattgctcacatctacttcgattttagatggaatgtgctcagctggccctagtagtttcagagtgcttcggattgtccgcaggtttcccctgctcacagaacagagacgatagattaaactaggaacattcatgaaactagtctatgttacccaatgaggaaaaaggtgaaaattttgctctacaccgatgagaaaaaacacaaacacatcaaatatctggtttcttagttccttttaccattggaatgcaaactttactatcagatacaagtgatagatttctctttacaaagcttagctcgatcaaaataatggctggatagcagtaaaacagaagcacatgagcactagccatgcaaaaacaaagacaaaaccgatctgcaaagttctcatcagtatcaaggccaatacacagaatactactcctatcagttctacatgatttctcagtaagcataacctgtgaaactagctgcaaaaaaggcaagtgatgcgaacaaaagaagaaacagttacctttctggagaccaggacaatgatccaaccctttgaaaacaacaggaacatcaaccttcaacttctccccatcatcagcccatacgaatactaaattaagtatctttccagtttcttcgtctctatgaacctaacagaaacaccaaaccattctaatcccatcaccaaattaactcacaacatctgcattttactaaattcattatacgatcgcgattgaaatcgaaatgagtggaagctaacaataccttgaggggaagtactcgacccgattcaacaagcgtcgacgaaccctgaccagctcggatctgaagctggaaagtggtagaacagaagaatgggagaccaacagagtcaataatagacttgatctgcttcttatccgccgtcaatagctgcttcctcgacacgcctcgcttcgaagcatcagtatctagaagcgattgcgggaaaacgacggcgggaatacgaccaatcgtccgatcccgagccgatactcctcgacccgtagcttcacgtggaatcgcctggatcgtctgatactgatgaatacatcgaatcgatcgaccgaatgaagaagccggaagatcagccacctccgccgtcacggatctcaggcctcgccaccatttcgccatctcagtgtggtttagagttcgatgtgacggtaggggttgtttccttgaaaactcaggcgttggaggg

SEQ ID NO: 36572 - DNA, 2069 bp, Arabidopsis thaliana landsberg
  unsure (1)..(2069): unsure at all n locations
acgtcgttttgctttctttctttatgataaaaaataaaatcgttaaacatcactagtagtcccattaaattgcgatctttatttttctgttacggtttaggtaacacttttgtagcaagaatcacatgaaatttgtcgtttttaggtctctccacaacttgaaaggataattaggtttttagctttatcaaactttttcaagttaagtgaatcaaatatctttgagtcaagtttataatggaacaaaaaaaatcatgatcttaagttatgcgataaaggagagttatggttgtttgaaacgacacatgtcttcttgcaaataaatctgtatacttaattaattattttaacatttcgttatacattattagtaactaaggtagtagcaagtaaccactaaatatttgtagccatgtgttttctatgtagccactaatattaaccactcccaactgggagaattttgggttcgagtcattttggccacctacccgtgctttaaatttgaaatattttcgaacgtgtatccagatgcaaagcctcatacgattagttttctggatgtaggaaacctttggaatcccaacggttaagaaaaaacataaacatgaccaacctattgtggctatatagtgattacttatttacttagctaaaatggcccaagagtagtgcatagcttcagaaataactttttggccaccactttttagtgagaaaactaacgtattcgtgacaaatcttttgtcatacccacaaattttcacggtgactactttacgttgcatttttgaaaccattgacctatgctataaccacatagttaaccggtggtcatatgtgactaaattcgagttcactacggattttacccctcaaccataaaaaatctgtagctaatacataattttaaattatattggaattcaattatgttttgttgtgcactaccataaatactatcaagattgatatagattttaaaaaccccaccatatataaaccaaacaaatgcacaaaaattctttgttaattcaaattgtcttataagacccctactaaacttggttggaagttcacgagccaagagggtccatatatgaccgggtcctgatttggtgagcataaatcgataaggttaacgactaataaaatatcagatttggggacccggaaaacagtgtttgagaacaataagtgttgttttcaaaaaaccagaatttagctttattaggcatacatctccaagaaaaacgttgattacacatgttcacaagaaataagaggttaatttcactagacttagagcaagccacatggtttgattctataaatcaccgtattcactttctaaaccacattatttgatttgttccactcttattattgtcttggtcttggtacggccgagttaattaattttggggtatattaaatggctattactcggttattaaattacgacgaatttgaccatgatttgcaatataatgtggtttgttattattagtgttgattccatgattctaatttgcatgatcgagattctaaactagacgataattctaagttagaatgtcgatcatctcattctcatgagtcttttttcctagccggtaatccttaactcggctcgacattgccactttaactagatctaattgggnnnnnnnnnnnnnnnnnnnnnnnnnnnntcattaattctgattaaggattattgttgttttttatgtttgaaatttgggttttatcaaaacaattcaattaaaaagatttttgtccaaaactaaaactaatatataataaacttttattagatgctgctaggcaaattatgcacatgtgacgctagattagttattatcttgtacaatcctagctagttccgatttcaattattatccttatgcaaaacccaaaaaataaatcataagaaaatgttataaatggtacgcataggatgcactcaatttgattataaaataattatacagtatacgttatattgatgaataaaattacattttcatatatagtcaattgcaaactcgagagaataataatagaga

SEQ ID NO: 36573 - DNA, 1705 bp, Arabidopsis thaliana landsberg
agctaaattagtcaatttgctctcgtaatacaatgaccatataaactaaaacagcctaatcaatttgtttactttgttggaagtttcatgatttagtaaaaggtatagcccatagaagatacctttattctgcacgccttgcctcttgctggacttggaaactgactgagtgatagggagaaggatcccatccttagaggcattcagcaccaagtcattgccaagctgcaacaccattttctggaatgaaggtttcacaagcaatccggatgcaataaatgcatgtgcagaaccaggcttcaaaatgccttgtaatttggcagcaaagattaaaggcaatgagctcttgtaaggtttgagggaagaatctgcagttgctaatgcgacttttgtaggcgttgcattgcatagttcctcaacatttgacccataccaaaaataacagacacctatttctgaaattgctaaaacgtataaccctttttcatttgtttcaccccaactatccacgaagacaggagggtgctctaaggcaagaacacagctagctgactgcttctttgcaccatctgttttccaaactgcaatatatctttccccgactgcggatgagaggacatacttcccatcctcggtaaaagccacacaacgcacaaccccctatataacatgaaaaactgttaataaccttcgaatgtgtgacatagaggcagcatcctaacaataaaacctggtcgataaaaaataatgctgacaaacagtacaggtactcacaggatgaccagtaaacttctgtatcttcttgagatcagagcagttaaaagtcttcaactgagtagatgcagtgactaatatttttccatctacaatttggaaggaaaaaaacgtcatcagcaggtatacatgtctgttctactcttaagcattttaactgaaagttccccatattcatgttgcttttttaagggtactcaaaacgtacttgaagaaaccagttttttctatttagatcaaacggaaggacatacctggtgaaacacataaagaagaaactgtttttgttgaagctttgaactttctgatcagatttccactgtggggatcgatctgacaaaccatcccatctgccccaccgctgtatatgcaagatgcctttgctgaagatgaaacagcattaacaccactgcacaagacaggaaacacgtattaatatgtctaaaaccagcttcagagaggaaatttcacagagacctgcagaaagatcaactatctagcgcataaccaaatcacagaatgccaatatttttacaaatagatcagtttgctttcaagtatggtccaataaaagaatggtaaagaagaagacagttagagttctatactcacccgggatgacagtcacttattttccatttcagctgaccagaagccacatccagtgctaaaacatgtcctacccagttcctattaccaatacaagcgttgcaaggcaagatcttctcttgcagacaggaaggatgaagcttatttataagcgaaaaatgtgatttaacagactataactacacggcaaggctagaataaaaataaactgagtctatatacctttttatgcagagacaaccatttcatgcacgtataatcgactgataggtgaccttttccaactatgggatatatgtttcgctactctgtcgatgcaata

SEQ ID NO: 36574 - DNA, 2297 bp, Arabidopsis thaliana landsberg
  unsure (1)..(2297): unsure at all n locations
acagacgttgctcaagtgtgctctagcaaaatccacaccaatcccctataacacaaaatactcttaggctactcaatttgtccaatttcagattttaagttcagcattgttggcaacatcaaatagacaaatacctctggttttgttccagcaatttcatcaggaagccaacgacattggttaagatcaaggcttcccaccacaactctgtcttctatgccatcagagaactgagaaacagatgaaccatagcacaaatccatatcacagttttttctagaccaggaagtaacaatgacatgatgacaattccaaatgtagagcaccataacttaaatgcaacaaaccctcttgaacaggtaaatacaggatgaccaaattgagtacacagaccttacatgcagagcataaatcctcaaaagagcttgataattgcgacaatggaagggtagcatttatgcaagcgacccgcgtaaacccttccctcttccctgaagttctctccttaagcgcctcgaattcacgctctgccaagtatcttctatgatcctaatgaaacttgaacagcaaactgtaacatcagcataagaaacaaaccataaaccaaacaaaacactcactaactaatcacacaacaacaacgaagctcttcagaactataaacacagctccaacatcaattatcatttcatctaccaattcatagccaacggagttgacttcatgatacaacaaacagctaaaaatcatcttctaattcaccgattaagtaagaaactgacttggatattgtaagcagaaggattgagttcgatgaaggttcgtacgcggagacacgctgcagcccaaagctcatgttctgactccgattcggatatgactaaaggagacttgtccatcgctggagcacaaatgtgtgaggaagccgtgactggacggaaccgaaactttaatgaaggaatcgaaagatacgagcgtgatgatccatatgtgttcgggtcgccgaaaatggccatagaggatgaactcgggagagactaacagagaaacgcctttttttcggggactaatcacattctcagcttcttgctaagcttcaaagctcgcatgtttgggcttatgtattatttgggcccaatatgagcccatagttctctgttcgtttacgcttttttcaatttttatccgagagaaatggcagccacacgaataccaactaaatgtcataactcataaacaaaagatacgtaacaaacttttaacgttttatttcccaccaaaagaaaatcaacatgtgtcatcatcactcatcatcttttctttcaacgacaaaaaataacattgttcttatcgcaacaatacatgttttatcatcatcatttgaatgtacgtaatcaatgtatctcgattctttttggttgatatagaaaagaatttggagttgtattttgtgacctaataaaaatcaattaaaattaataatagtgatctacaccctcgttaagagaagcaagtagagctagttcatgcatgatgatgtcttagtaaaagaaataagattatctcatataaagtaatagttagaaagtgtggaaggattagaatgagtatgatgatgatgtgtgtcatgagtcattaatctttgtcattatccgatgattcatatctcttcttctcgtgcatccaattcttattggtcaacaaataccaatagaaatcatttcagcaataatggacagaaacctacttacgattggtgggagggatactcaagaagacaactagagtgnctaactataacatgttcacgcatatgatcttttatctattttcataattctgatgtctgtgaccacctttcaatacacctgtacttaaatgtagaatatacggtaaacacttaaaatatttgtaatacaacgcatcacataggacatagaagagatggcgatttttatggttgcatagtttcttgaanaatgttttatttacgtattcaatcgtgattgtcaagagaatggaatatcatacagtgaaatcaaaaggaattaactaaacaataattggtagtcaaatcttacaatgctatacgtataattctcttctttaatttgtctttttntcttttttcttctgtaagagatttctttgaaacaataattaattcaatctttccttacataggccctttaaaaaaaaaagagaagatttccttacatattaaacaatgaatagaaaataatcacaagacggtgttgaataatgttccgattatctacaatatatgtgtgtgcatg

SEQ ID NO: 36575 - DNA, 1730 bp, Arabidopsis thaliana landsberg
tcccttacttcggttatgtcttgagccttacgggctctttggttagcgtcacaatcgctgtgacattaccgtctgctttctacttgaagatttgctgggacgggatgacgaagttcacacgagccgccaatcttggtttcgttgttctcgggtgtgttcttggagttttgggatcttttgaatcatcaaagttgcttgtcaaagaactcgttcgcgttcatggaggttgagtggttttaaaatcgcggtttgttgttgcagttaattatataaaactgcggtttgttatataaagcggaataaaagaaaaacgcaaacctttataaacaaaagatcggaagacattgttgttaaaatcgaaaagaagaaaagaatcaagaaccaacaaatatatatatataaagattaaagaacactgatgaaatcaaaaggggtatacagatatacgttttacatgataagatttactttttttttcgccttacctcgaagagtttgttatttctggtttacaggtgctttcttcttgagaagattcccaactttaccaagtaaagtcttcttcttcttgatcttcttctccatcgtaagctgatcttctgcggttaaagcgtttccggtttcatcgatgttctctgttgaggttttgtcgctttcatcgattttgcttgaatcctcttcttcttcttgtgactctagttctgatttcttgtccggaaaagcttctttcttctcgatttggcaactttcccacattttgaatataacttcaaccgaatcatctttgtcatcatcttgggactcatctttcttctccttcttttcggtttccacctcgggttttccattcacttctttctcctccataccgttgccattgctgtttccattgctgatctgctcttgtggaggttcgtgatcaagggtttcgactttagcagatttctcttctacacttctatgaccgttctcagaagaaaactcaaccacttttggtagcaaatcatagtctttctcgctctcactgagctcgccattctcttcttccggttgcttcttggccaatattgcttcctcgagtaacttcgataactcctcgatcttcttcagagaaacatcctccttcgccttcagatcctcgttttcgtgaatgacgttctgaaactcagtttctttatccaacagattctcctttagcttcatgctttcagcttttgcttccccgagagtttcctgaagataaacaatctcttcttccacttcttttaaactgtctttcgtctgtgcttctttcttccaagctgcatcggcttcttcctcggttctcttcagcagattatccagcctattcatttctttccccatcgaagcaacatcttcttccattttcttcacataattcaccaaattggcttctttcatctcccaatccttctttgagctctcgaaatgtttcttggtttgttcaaccgcgctaacaagaacatcgatctcatgtctcgcctcgtcaagcatattctcgtacttctcgtttgtggctttaatcaccaacttcaagtcatctatttgtgtttcatactcgtgatcgccttgactcaacaacttctctttcaactcccttccttcactcgacacttcgtgcaaagctgaagccaaactctccattgctttcttactcttctcctcttcctcttttgagctctctaaatctgataagagcttgcttttct

SEQ ID NO: 36576 - DNA, 2698 bp, Arabidopsis thaliana landsberg
gaccaagacttctcctggaaggtcagtgattcagttcattctaaagtttgaaactttgtttatattgagttgttgacatcaatcttgatttgatgttatgcagggacctgcgaggttgtggcagaaggtactattgtcccttaatgtggcgggaagtgcagccggaaccgagggtgaagagatagctcctctggccaaggagaacgtagcgacgccgtgagaatatgacttttgttttgtgtcaaagtggtttgaagaaagcgttgggaagttaggagtagggaaggttgaggaaaagtaatgtatattggaaatgttagagtctaatataataataaaaaaactttgtgaacacaatcaatcatatataagtttatcatcacaatcaataaaaaatggtagaattttacagaatagtttcaatttattgtcacaataatgtttaacacataaacacaatcaaactaataagaagataaaatttgaatgtaaggaggatatatggagggaaaacggttaagaagaagaagaaaccgtttcttttcttgttcgctacgtcacaaatcttgctcaaatgcaagattctttacctctttcacatttcagtttagatttctcgggtttatcttcaagttttgtgaattgcttaggagagaagtcaaagaagagagaaagccacgtcactaaaacccaaatcttggtctaaaaacgatctcacaagtaaacaatctctggtgatttctagatggacgacgaagccatgatcgctgccattcaagctggtgtttggtcagaagatcctctaacacagcttgcatgcactaccgatatcaggaagcttctatcacagagtaaatcaaatctatggttgacggaaacttacagttattcttttttgctctgctgacgtggaggcgaaaacagaggcgactagggttttttgctttctcatcacgcatgataccgtcatcggcttctctgagccagcctggaggttcgccagtggccgtaacaggggtttcttctccccctgtggttgttacaattccagaagtcggtcagaaagaggtaatggagaggagatctcagtttctggttcgggatcgaatgtagggttagggggaaccttttcaaaactcaatcaggcagcatcgtcatctcacgggaaagggaatcagaacgggaaatcctcttgggtcaatgtggcaaaaaagcatatcttcactcaacaaaagtttgtggtatcggaggttgatggtaaggagagagtagtagtaccaaaggatgtgtttgtaggggcaaaaccattgtgggaagatttcttgataggaaagttcataaacaccaaggctccacatgtggggaaaatttatatgatagtgaataagatttggaggttgggagatcggtcttcccttatcgatgtatttgaagttaatgaaaccacagtgaagtttcgtataaaaaacgagggtatgaggcagcgaatattgaatagaggaatgtggaacattaccgatatccctatgatagtctcaaagtggactccatttacagaggaagctcacccggcaatgaaatcaataccattatgggtcactctcacaaatgttccaacaatgatgtttacggacaagggcttggagtttctagcaagtgcagatggtaaaccgatccgtcttcatcctaaaacagatgcatgcgtcagttttgatgaggctcagattttagtagaggatgatttaacaaaggaactaccaaaggaatgtgccttcaccggagaagagaaaggagagcttgactcggttaatcagtactcttatccttagttaccaccaaggtgtagttgctgttaaaaatggggtcatctacgtgcaacatgtctctccccgaagaacaagtccactcaagatatctcacctccagctatgtcccaagttgatggcgaagcgataatgcgggaccattcctctgccatacaaagtgttttagagcagcctggttttgcacctgcagaaagagacctgcaatttaaagaaattgagctaggggccacaagaagtggtggtgcccaaggaaaagaggaggggaccaacaataaggacgatgagggttggattatacctgcaaatacaggccgcagtccggggaaacaagcagaaggacttaagtttggtgaggtatccatcctatctaactctttctctgctttgggagaagaggaagttttgggagaagaaaaggaatcaaaggaagtagttaatggagattcagagcctgttatgacagagatagacacgggaaaggagttcccaaaggaggctgaagataaggagactagaccacgaggaagtaaagaaattcttatgcgatcatctttacctcgtgcatcaaaatctgctcataaagtgatttctactaactattcaattttcacaagggatatccctaaggatcagaccaagaaaccccctcttaaacgttgttaatgtcggggttctcatggaatgttagaggtttaaataagacatcaaagcatgctgtaatcaaaaagtgggtggaggaaactcaatttcagtttggttgtttcttagagacaagggttaaggagaagaaagcagaaagtttgaggagtaaaaaatttaagaattagtcggttataacaaattgcgagcataatccgagagggggcatatgg

SEQ ID NO: 36577 - DNA, 2484 bp, Arabidopsis thaliana landsberg
gattctgtcttgataattttctgcgtaatagttccacgttgcaccctatttactttgttcttttgtctttctatctgataccactgctttgagcacaattgaaggttttacgtatttgcagatatggactgaaagttatgatcgtgtattagagtttgtgaagcgaagtaatgcagttagccctactgttgcgctggaaactgctgctgtgcttcaggtactggtctaatgcttagtggaaattttcctactcttaccctgtttcttacatagttttttttgcttatattgtcatggtgaaaataagacatgtatgatccttcaaggttgatcattcatagattattgtatgtttattttcctgcatacgtaccatagcatttaattttatttgcaccggtaattacagatgaaactagaggaagtgactcgacgggctcaagagcaacttcaaatagtattggaggagcaaagcaggttagaacagtttaactggactttatatatccttttttttttatctttgtccatatgatcagagttggaccatttggtagtgagtgactagagtggaatgtttgttgcatggaacacaatcttctgtccctgtagtctgttggggattagatctaattattttatcattgtttacaagttgcatcaccagctttcctttatactttgcctttggtttcttagatttgctctcgacattgatattgatgctccaaaggtgagaattcctttgagggcttcaggatcgtccaagtgcagtagccatttcctattggattttggtaattttacgttaaccaccatggtaagtttctagactagcccttcgagtttactagtttttcttttctgttttcttatatttcttgtactattgcaggatactcggtctgaggagcagaggcaaaacttatattcccggttctgcatttcgggaagagatattgctgctttgtttacaagactgtggatcagacaaccaaggttgcagtttagtcatggaagatttcactaatcagccaattctgtctcccattctagagcaagcggacaatgtttattcccttattgataggtatggaatggcagttattgttgatcaggtattaccttgcgtgatattttatttttaagagtcaattgcgacaacaaggcatttctacttgacacggatctatttcttgttgaagatcaaagtacctcacccaagttacccatctactagaatatcgatccaagtgccaaatattggtgttcatttctctccaacaagatatatgaggatcatgcaattgttcgacatcttgtatggtgctatgaaaacctacagtcaagctcctgttgatcacatgccagatggaatccaaccttggagtcctacagatcttgctagtgatgctagaatcttagtttggaaggtatgcattataatatacaagtactttttaagtttggttgatctgtattagctttgattttttattttcacggaatctacttttttcagggaattggcaactctgttgctacttggcaatcttgtcgccttgttctatctggtttatatctgtatacatttgaatcagagaagtcacttgattatcaacgttatttatggtttgtgctaattttattaattattttcttttatgtactttctttctctcttttttttttgtcaagttcttttttctactacaaagacttttgcatatgttaagacgtttaaatataaagtttctgtgtgcagcatggctggtaggcaagtattcgaggttccacccgcaaatattggtggttctccatactgtcttgctgtcggtgtaaggggaacagatcttaaaaaggtacgctaagctgctttattttaaataataggagttagattagaaccgaaaaatctgtaagttgactagggaatacaatatacgctcttggtgacttgggtatgcttgctatgcttgctaaatcttggaatggcttcctacctgaacaataagatggtagtgttatgattctctggatcttacttttattgaagttgctttcgatgttatactggagaaaaaagccagctcacacatattcctttacaaccttgctttgtttgtggtattttcatttctgtttatctgatggatcttccgcattcttcaggccctggaatcttctagcacctggatcatagaatttcagggggaggagaaggcagcttggctgagaggactggtccaagccacctatcaagcttctgtatgtgtataaaatctctttcttcttttctctgggcttttactgcaatggtcgtcttcgcttaatgctgaaaatcttttccttttgtaggctcctttgtcgggggatgtacttggtcaaacgagtgatggtgatggtgacttccatgaacctcagaccaggaatatgaaagctgctgatcttgttattactggtgctttggttgagaggaagttg

SEQ ID NO: 36578 - DNA, 2026 bp, Arabidopsis thaliana landsberg
aatatgcactcttcagtagtaggagatgtcaatatgtttcccatttttaactctgttttgatcaaagttaatgtcagcattttctgacgtacgtgaactgcgatcctttttcttgctggaaagatacacttgtacttcatatactggtttatgcgttatgttattattttgtaattcattttattttttctttatagctaatactaatagagttttggatgttacgtgatgtttctcttgaaatggtaatatttattgacgggtagtagttcaatatatatttattacataacatgcatcaagattcagtaaacataaccacatagaaatgattacataatcagatatttgtgtgataattcagatacgtaaaatcagtagtggttatctagttgtatatattttctttcgtcacgccgattgaaaatctaattctatattattatacgtgaaaataaacaagttggacgacaaagatactgacatgggattagtgtaatatgtataaaatatataaacattaaaagaagtcatcatacctggacagcaaggagtggtctgctaagtccttccaagttcaagatcccattgtaaggaaccaactccttgaacttagccgtcccgtcctcagccgttagatcatcgacggttacgtcagcagcatgagcgacggagaactctacgccgttgatctctgagtcttcagcgtcgtactcaacacggaagactccttcatcgtccttggccagcttaccggcgagttgatagaagtcttcaagaaccaaacccaaaccatctttgagattctccacgacctcgttttggaatgtgggttcctcgagatctagaaggttctggaacttgtagagtagaaacttctggttgtagtagaaagcaaggtaaggaagatcaaatgtggtgaggtggaattgtttcttccctagtactggttttgttggtttcacatgtgttttgctcataatctttatcttcatggtgaaagagattttaactggccttggatcaatgtggtattgtgatgatcacaagaagatattaaattagctattgtttttctttttgtgtgagactagagtgtagtgtggagagtggtaaagaaagaactaaaggctgtgttttatagagatgtgcagtgtgtagttgggttaggcatttaaggtttcatggaagtagttgtgattcaattaatgactcaattacacttttcttccgtaaatttatttgcatgaattgttaagttaaattaagttgtagtttaaggatagaggttgagaattgagatacaaaaataagtattgtaatgatgctacaagtgtaggacactataaatgccgataaagatggtaacgaagctcaaaccaagccaaaattgtagaattttggatcgtacctgtatttaaaacgatcctatatatacactacttttaattacatgtgcatgacaccttatatgttctatatgttctgaagacatgcatatgcgtttatttcaatagaatataatatttgtttagatgctcaatgtttgacgagaggatggactgaccggagtggtatataaacatttgagtaataagatttttgtcaccacagtttcatcaagttttaagaagttctatcagattggagaaacctttgcaacgttgtctaaacaaatgtgtataattttgctaatgaaacaaaactaatgtttaaatttctgaaattataatttatagatggattcgatgaagttgttgggttttctataatgatttcctctttacctacattctgtaatcgctataaactgcacatatataccctattttatacatggaagaaaacactttattggatttcaaggactctacttccccatatttagtttagtacggaacaagcggaactgcggaggttcgacaaccacttctccggctaaataaaaacttatgggcctctaccttaggacctttcctacctgatttggggtattaaacttacccccaaaacccaaggaaatgcc

SEQ ID NO: 36579 - DNA, 2011 bp, Arabidopsis thaliana landsberg
aagaaataacattatcttaagagcaacctcattggttactctaaactatgtggtttgatgagataattggacatacctttgctacggcgatgatgaggctggcaagatgaacctacatgtttcaaatactacgaaaatgtatacctaacaatttgatacgtatgtaaaacgatttgtccattagtcgcggagtctgaaaaccaaaagaaagatttgtcatgattcttgcacagtgtgttgggggaggaggaaatgaggaaactttgaggtggaaaggcaaaacatcaatgaagtggaggatgaggttaaagatggagtaagtcaaagcaatggaatatggtgtgtctaataacatgttcgaaaggcagttaatggaacatcagcgattggatagaacttattgacaaagatgtatgcatatatacatatatatatacaacagaagaatgatgattgatgaagatggttaagtggaacttgggattcaaggaacactcctggcaaatacaacgcatctatgcctacaccaacaagcaacggtcatgcctctcgcgtgcagattcaagaaccaaaaataatgtctcctcttcctccttcttcttctccattcgccttcaaggtatttctctcttttgaatcaggaaacaccttgatctctgtatcttctctctctctgggttctgttttgctttctactttatgctatctgttttgatcctctctcgttgacttccatcactatttcttgactcaagaacaaaaccaagacccagcttctcttttgtctcttcgtgttttcttcatggtgctttttacttgcatgttcataacgaattcacattaaccagctttgaataacctgttgatgagacaccattcttttcatttttcttttttctgcaggaacaacaaggtagaccacctccatcaacacaacaaaccatagcaggaaaactctttagaactcttttcaagggtcttctcttctcacaactaaccttaatctcacttttggtgatcgttctcaccattcgcggtctcatctcagcaagtacacaccatttccacctcaagaaatggtaccctcctttactagcatctgttgctgtctcaggaattgcatctttagcatggcaatgcatctttatctacaatccatcaagagcagtcaaagcatcgatctggcttagcccaatactcacctgctcggtaggaatcttgcttgttttgattggctcagcggtagatgcaggtataggtgcagtatttgtccttttcgccattactcagtccctctatggtagctggattactccgaggattgaatacaccgataagatattatcacttgccacagcatttccacctgcaagaaccagagaagtagtctgtttatcaatcattgtcagcgttgtttactctggtttcttggtgactggaattggaggagcaacttccactagaacaaatcttgatatcttgttcatatccgtaatcatgataagcttagcatggacaatgcaagttctcaagaatgtacaacaagttgagatttcacgggcgagatatgtagactttgtacatggagaagatatgcacgcttggaatgctttccgcactcattatgaaacactagactgggagcatttgggttggcagagcgcttgtttcaatcattgtattcataaaaggatcaataacaagtgttactttaatgtcaaggagcaccgagcggcccatgtactaaggccatcattgggtttacaacgctgctaccgtcctcatgacacttcaaagcatagggcacttagatcatgttgttgcccatgatataggccttatggcgtgatcttagtgacatgactcaccagctgtgaagcacccctgcggtatggaacccttgggttgttctcgggcattgaatatgctcaccaaggtttgcgagacacgaaccgacagtatcggtctcgtctatgtacctgctcggatagggatgttgttcacacacaag

SEQ ID NO: 36580 - DNA, 445 bp, Arabidopsis thaliana landsberg
tgttaaagaaaggaaggccagctggaactcttcttgtctatccaataatctaatgaaacagtgcgtaaagcctcattaggaggttttctatcaattgatatttcctctacgcgcacaaaccacaatccttattctaatggttatcatttatagcatttaagggttgaatccacaaagaactagagatttaagacactaggaatatacaaaaaaatttaatctaagcaaatatgtgttttaaactaacaacctaagtgaaatgaaactaaaaatgaactaaaatgcaaatgtaatagacaaaccaaaggcaattgaccaacctaaacaagtgtctaagctaatcaatcacccatacacataaagcaatagcaaagtaaatgattaaaatgcaatttataaaaatcaaccaaaagttaacgaaaactcaacaaaaggtcaaagacgc

SEQ ID NO: 36581 - DNA, 1138 bp, Arabidopsis thaliana landsberg
tgactaggcttctttaatgtcaaccaaaagtgggattcgttggcgtagactgatgtttgctcatcgcggaagatacaatgatgtatgtcataaaaccctacgtctctttgctcaccattatcaagggataggaccttggccttgaactcatgatcatgtatttcatatcttgtatatatcaaaaccgccttataagattttttaacaatatctttgccaaatccagcaagagacggcattctcttcactaatccaccttgacggaaaaaaaaatatttgataaataggtatataacatattactgtgtgaaagttaaaattcaactctataatcaaccatagaacaagaaagttgacaaaccagataggtcataatccaatactgattgagaaagttgtctccatggtttattggccattgcgggggttaagtaactaagagtaaatggccattgcataaattcgggagaaagtttcatgtgttctttagtcgtcggattgatcaagtaaatggacctgaaatcgtcatggatccgaagcaagaccaatccatcacaagaccccaatacttgaatagttttattttgagattcgtcgactggatcaccagaaaaagtgtagtaactagaagaagaaagacaagtttttctgttgttttgatcatctctagaaaaagtctccaaaagaaaagttattgagtttgaatattcttcaacaaaattcgctgaaaaatgttgactaatatgaaaaaatttcatattaggggttggtaagcctgtacgaatgagtcgtttgtggcaaaagtaggctgatttgattatcgatctccagtctttagaaacgactgtgcatctagccagtgatgttggtagaagatgttgaaagacatctcctactatatcctctggtataagtatagtcttggaagtattatgtgtatcattctccattattttcaaactatgatggtgcttgcagtccgtgaggatatctatatatgtatgcaaattcttgatctattcatagagcattaactccagatttgacattacatgtatcttatcagatgaatcactataactgattttagaatattaaggatgcaattatgcagcattgttcaatgtatgctatgacc

SEQ ID NO: 36582 - DNA, 2846 bp, Arabidopsis thaliana landsberg
  unsure (1)..(2846): unsure at all n locations
atgtatgttaaggctcaaatcccttatttcataggttgaaattttttttctaccagtcccagctgtaattatcattggatggaaggattgagttattattgatctaggtatagtcttttattttttccagatcacatcaaattggactatgaattagtgtacgtagttatcactgaatttagttttatacccctcccaaattcaaagattgattttctagaattttagtattgtatcaaaagattgatattctagtatttttattttctaaatcattaatgcattttaactttacaatacataattaattgtaggcatttagaatgagaaggtcaaaagtcatactctagtgtatagtactctaactacttcttttgtttttgaggcggtaaatttaaattaaaattatgaaaacaatatatgattttaagtaaatggtgtaaatctatgtcaatatatataaaaaaattaatggaacttaattttactggtcttggttccattctaaaattttagtttttgaaaaacgtagttttggctcttaatttgaacttttaacaaaaataagtgactcatataactaaatttgtaaatttaaagagtatggttttagttttagaggaaatgtgaaagatctcaaaaatgatgcatttaatatgtggtgtaattagaattattggaaagcaacataattcgtagtacaaaagtaaattgattactgcatcattaattatttttcttaattttagtgaaaatattagaaaataaatccttagaattacgaacgggtgtcatagaaatgatcccacaatatgagatttactaaccaaattaactccgttgagatatgtgatgatcattactttttagaaatcatggatcacatgtgataatcggtataacaaaattaaattatatcacttttttataaaaaattggcttttttataaataagaaataaataaatttagaaacaaaattaagatccggaaaaaaaaaagtaagacaatatatgaaattgaaatgtctatgaagattatggtgccgactgagatacaaaattgaaagagttgtgtcgcaaaatctggctatagatgatcaaccattattaattctgaacatacataacatgtacaaatttttttatgtaataataaaagaagacatatatatttaaaatatgatttgctttcagatctaattctctaacttttttaaaaatccaactacatgcgtttatgttaaaaatatcaatttgattcgacatctttattataaactatacaattgggcttttgtttaattgtttcttcaaagaataacacacacaaagcaaaaagatcaacaataaaagggaacatcttaatcctctttcatgtgatgctacctttttgcaaacctcttatcttctttacaaatatttaataataaattattgtttcatatctgtgattttacatgtggcaggtgagattagtcacattgcaagctcacatatcacttgtgactaacattcattaatatatattcaaaactatagtgatttttagaataaaatctgataaatatatggaatatgaaactccaagttatgtcaatctattaatggaaacaaaccatttgaatggacttaccatcatgaaattaagatgttgggctttttacaatctaatacaagtaacataataggcccattgtaagcccactataaaaacgctgcgtttcatggcgccggtatctgatttttatctgtgccgaggtctgagagaagaaaagccaaaagttttgtacgaaagaagaaaagctttgagaagccatggatacggaaactgagttcgataggatactattgttcgaacaaattcgtcaagacgccgaaaatacctacaagtcaaatcctttagatgccgatgttagttttctcttcatttcatgatttcagattcagttcgatctgatctctgctttgtgattcgatggcagaaagaaaaaacgaatctttttgattttttgttcttgttgttgcagaatctgactagatggggaggagttttactcgagttatctcagtttcatagcatttcagatgcaaagcaaatgattcaaggttctttaaagctatactctgttttaatatgattgaatttggtataagaatcttattcatctttagatctctttactcccatatgaacttggttgttaatgtttcaagcatccttgtaatcataatcattagtccttaggcttagtattatgattcagcattcttcacacttgctaaagataggtttttgtatagagcatttagtttatgatacttggggatctaactatggttgatggcaacatgctctgaaagtttgatgtttgtgtgtgtagaggccatcacaaagtttgaagaggcattgttgattgacccaaagaaagatgaagcggtttggtgtattgggaatgcatacacttcatttgcgtttctgactcctgacgagactgaagctaaacataactttgacttagctactcagttctttcaacaagctgtggatgaggttattttgctttccattcagaatcaatgttgatactcatctttttgtgttgtgattttaaatctgtgatgtgaaaaacgtgtttttgatctttgcagcaaccagataatacacactacctgaaatcactcgaaatgacggccaaggtacttctttctataaaccatcaaccaatttgtgttcatattcattntgcctctaaacccaatctcaaagttttattctttgatcaaatttcttctcctttgtgctgagtacaggctccacagctgcacgcagaagcttacaaacaag

SEQ ID NO: 36583 - DNA, 3958 bp, Arabidopsis thaliana landsberg
atgaatattaacaaaaaaaaagaggtaggcaaagtagcttttatttttataatgttttccctaattggtaaatcataaaccaaaaaattgaggtaattcttaatatatttactatgattagaatgatacattaatgtaacattttatcatcttcattaataatagtaagttctcctcaaaattacaatttgatatcaaaaaatatatttgtattacaagcaattactgaaaaattaaaattacaatttagcccagtaacataactccacgtaaggtttgagcccatcacatcacatggtacatgaccaaagcccagttatgttaccatggagtattcttcagacaagagccatccagacagaagtggaccacacaatcacgaatcgtatggagatcattacaatatattgctcacatcttattgcgccacgtctcttatttggcgagtgatcaacgtccacagatctcttgctccactctgattggtacacgtcatcattttattgtgctacttgtttatgtggtacagtagagacaagtggtaagattttaaaatatcttagaagatgtgtgaggcccatttagatattttctcaacgggctgttcctcaaaagctgcccgtttatctacaaccatcgaacggctcgaaactattcttttctagctgcccgaaatctcttaaaggaatttgttgagtgggcttgaatcaacggtggataattcgaaggtgtacgtaacatctcgtagcatctgaacttagctcccctcaaaatatctgtggacatatgtcactagcttttttttttgtgtcatgaaactaataattaattaggcaatcacatgagagatgttatatacttaaattaataactcaataatacaatcatgaccaccaaaccttgaaataaaataatctctctgattacttgtacaaattctttaccaatatatgccatactgggaatgtaatggtttattttaaaacagccaaatatttttgatataattatatgcttaagtagattttaaacttagctcatggttaaaaatagacagaattttggagtaaatctgagtttacaaaatttatttattaggattaaaattaattacttaaattggcaaacatttttcttggtgattgtaacatacaatatacgaatttgaattcgcattgtgattccaaaacaacactaacataaactaccagtaaacttttttaaaataaaatttcatatatatatgcttaaaaaatgtaacaaaaatatggtaaattttttaaccatggtatgggtggagatgtatgtgggatgatgatggttatatggtaatggcgcataaaggtggtggcaaaggcaaggaaatatcgatgacacgtaagcagacgggaaatcttaaaccgagtggagaagcctccaaatctcttttttctctctctctctccaaaggccaccacaatctcttcttctgtgtatgtattctttttttctccgatattcgtcgatctctcaaaaatatcctcaaagctaaaaaagcaagagtagagataaccaaccaacaaactcataggaagacatatttactttcaggtctttcttctactaccttttccgtggtttttggttgattgattctcagatgagattttttcccgaatcatttgatgtcttttttttaaataagttcttggtaaatcactgtttctactagcattttttgttttctcagcttagatttgttgtttgatttgacatcttatctgattgagattttgttcttctgaattgttgttacagggtttagctgtttgattcagcttcgatttagtgtacagtgtgttgattagtataaaaaggatttaaaagaatctgggagatgtgtatagtgattgttcttgctggcgaatgttaacactacgtcgtattgattctcgattggtagaagaagaaaggtgttagttagattgtccgttcgtctagttggggtttagtaacggttcctgctattaattgcttctggatggctagttcatcttcatctgagagatggatcgatggtcttcagttctcttccttgttatggcctccgccacgagatcctcaacaacataaggatcaagtcgttgcttatgttgaatattttggtcaatttacatcagagcaattcccagatgacattgctgaggtactataatacctaatgagtttaataagagtattctcttaatagtgacgttttgattcatgtataatttatctgtatcaggtggtccggcttcagtatccatcaactgagaagcgacttttagacgatgtgctgggtatgaacttctctatcaacatttatgatccacacttctctttttgtgtgtgaatgtctatctgattttcggtttctgatgaaacagcgatgtttgtccttcatcatccggagcatggtcatgcagacattcttccaatcatttcatgtcttattgatggctcgttggtgtacagcaaggaagctcatccgtttgcctctttcgtatctttagtttgcccaagtagtgaggtatataatagctgtctagtatcatgcttactgatttggtgtaacctataccattttgtgctaacatgttcactatcctaacagaatgactattcggagcaatgggctttggcatgtggagaaatccttcgcattttgactcattacaaccgtcccatttataaaactgagcagcaaaatggagatacagagagaaattgtctgagcaaagctacaactagtggttctccgacttcagagcctaaggctggatcaccaacacagcatgaaaggaaacctttaaggcctttgtctccatggatcagtgatatactacttgctgctcctcttggtataagaagtgactatttccgatggtaagtagactctgttactgatgcttctatgtgttcatgcgccggcctccttcttttattttggtctctctgctgaggtctatgtattgaggttctgtagtggattaagcttactgacaactaaaaatgttgcttattatttacaggtgtagtggtgtaatgggtaaatatgctgctggagagctcaagccgccaaccattggtgagttcaagaattccatgttaatatcccctggaactggattttgatgataattctgatcaatagagttgttctatcacttcgttcataaatgtgtatccatcacctgtggctatagaatgtgttttgagttgcttcctataactttcatgttgtcctactttggcagcttctcgaggatctggtaaacatcctcaactgatgccttcaaccccaagatgggctgttgctaatggagctggtgtcatactgagtgtttgtgatgatgaagttgctcgatatgagactgctacgctgacagcggtcgctgtccctgcacttcttcttcctccgccaacgacatccttagatgagcatctagttgctggccttccagctcttgaaccatatgcacgtttgtttcataggtattgtttctgagcttaccctttcaattagggtttattggtagtagtctgttgctagttttaaggttgtgcttcctcgaatccctagatcagaattgttttctcactttcctgttttactgtcagatactatgccattgcaactccaagtgctacgcagagacttcttcttggactcttagaagcaccaccgtcgtgggctccagatgcacttgatgctgctgtacagcttgtggaactccttcgagctgctgaagattatgcatctggtgtaagggtaagcgtaatatgaatctcttaattaccctccagaaagctaattgtgtcccttgttataaaaaaagtcagctttggtatgtcatcaaagaaatcagctttgatcacattctttgtcttggtgccgctacccaggaactggatgcatttgcacttcttgcgggct

SEQ ID NO: 36584 - DNA, 3774 bp, Arabidopsis thaliana landsberg
gtaatccaattctgcattattacaacttatgaacaacgtcaagggccttcgtcttcttatcattcttcttccacttcctcttcctcttgttcttgttcacatacttatatatacatatgagagacatattctaatttctaacacacatccttcacgttcaggactggacatccacggtgatccacaatcgagacacattaaaaccatgggctctgatactattacatgtgttaaatttatttcaataaaaatgaaataagcaatgccctcttggcaaaatatcgtacatttttcaggccaaaacagaacagaagaaaaacacaagtcatttaacagaagcaagagacaaagtcatggacgaaggagacacacatttcatgttggtttgtagtatttggtggccacgaatggcatcttcgtgatgctgccttcatatggtttcccacggaccaagatcttgactttagtcccagtcttgtgctgacctgacttcacatatcccatggctatgttcttcttcaggttcgggctaaaccctccacttgtgatctctccaatcttgttcccactctcatcatgaacctcgctatgcgaccttgcgggtggtcctgaggagaagaaaccgacccttctgattgtaggtccatctttaagctgctggagaatcacatccgcgccaagaaatccaccttcggctcttctacgcttccctatggcccatgtgagcccagcttcaacaggagaaatgtgttgctccatgtcgtttccatatagacaaagtcctgcttctaacctgagactgtctcttgctcctagacccgtaagccttaccttaccctcggacttctccaagattgcttttgctagatccacagcatgctcatctggaaccgaaatctcaaacccatcttccccggtatacctgaaaaaccaaaacagagacattcattacctatgagatcttcagaacttttcctcttgagctattgtctacttgaaccaagcaaatctgactagaagcagatagtgaaacatgaaattttacccagtcctggtaaggaaacatgtggaaccattaatgtccagaatctggaaattgccaaagtaaagcttgctcaagtcttctttagtcaggtgttgaagcactggagcagccaaaggaccctgcatcacaaggttcaagataactcatgaactgtatatacaagtattcagcaataacagaacaaaccaagagaagaatcttataatggccaaacctgaagggcaagaagagatctctcgtcgtggatatgccacgagacatcacctcctttggatttgaaagccttcatgtgttcttcaatgtgagccaaatccttatccctacagccagcattgaccaccaaatagatatgttcatctgtcactttggtaatcaccgagtcatcaatggcacctcctttctcgtttgtgaacacagttaagctcccagttccaggagccaaaccagccacatcagcaaccacaagtgtctcaagaaaaggaacacaatctttacccttaaggctcaaaccacacatatgtgcaacatcaaacaaactcccattttccctgcagttaaccgttgagtccataatcgaatctttgtactgaattggcatactccaaccagcaaaaggaaccatctttcctccatgggcaacatggaagtcgtaaagagcagtctttttcaggtcagcttcagaggcaaagtagcgacgtgacacaaccttcttgtcagattgagcaagacgacgggttattgattgccctagctgccatagactcccacctctcatcttctacacaacaagtttgatacaagaacactcaaaatcaataaccaaaaatgcatcttttcaaattcaactggattcgataaactcttaagctatggaatgaagaaaggagattcatataaaggctctataggcaaaaagatagcatttttaaatctatgaatcttcaaccatcagattaagattcataatatagcatctgaaacaatcagaaaacttaataatcgcaatgagatcgaatcgaaaatcgtattatcagaaagaagaagaaaacaaatgttgtctgcaatcgaaataatctgtgaatagaaaacataaaaactgaaatgggttgtgtagaaatcttacaaatgttgagtctttgccactggagcttcttcccagattcctcaaactactatgtagtagtaagtgtgtgttatattgcaaattaattgatgattttgttgctatcaatggcaaaagggactttatatatttatatttaggtaggattaatgagatttaaaaatagagatttgtgaattaaaaaagtgaagaaagagatggggttggtgatggaagaggaatcatcatcagccaaacgaagaaaaggccaaagcaaccgcatccccattgagtggtaagtaattgttcaatctttatcttcttatttttcaaaattttataaaaatctaaataaacttttaggtattgtagatcaccaaaaatgaaaaaggaacatttgcttcatcaaatgttgaagttgtagacatttttatccatttattattccaaaaaaaaagaatacagtacattgacttaaaatttgaaacaggattcaaaataacatttcctttgtcacggtttgattcttaagttatcaagtattcaagaaatatatttaaaatcaactactatgggtaatgaagctgctttaaaacatgttgtttgcttatatgtgacttaacattgtatgttcattgtgatcttctgttatatgcaaccatcaataacgtgaatgtgatcataggcatttcgaacactttccttcccaatccttctatcttctctctcgctctataaaaagacagaacggctcattgccctctctgttttttttcttttgggtaataccgggccggggaagatgggtttgagatttcaccaggcccattaaaacgaaccccttcaatagattttgtcattgtcttttaacaacctctagccacaagtagtttccctttctcacttgtagttttgtttgggtaattttgaccccttatgcattttttgttccaagcagatgtcgaaatggtttcctgtgaaccctcagttttatatatctgataacgttgtgatttctaatctctagaatcatggggtttcgtttcccactttccctaataagatctaaaaccttgtagagaaaaaaaaaaggctactaacggaagacgtgaacaagaacaaacacaagaggaagaggaagaagaataattagtatagtggtactttttatacaaggctagaccggatctgatcttcatatctaggtctcatggatgtataaaaatatgatttgggtttgggaccaaaaataatggtattgtgttttagtcgcggttaatttgatcttattaattaccttaaccatcacggcatctccattcactaacctagttgtaggaataactatatacatagtaaatttaaatgtgtgcctcttgcaaaaatatttatgatcatatgtcatgacagtaaagatgaaaccactggactaaaatcacatgtttaagaatgtaagcatagcattgtttatatatgaggaggggtcatgatcacaatccatatatagttctttttctcttcctacttcggatagaatataagcttgttttgtcccctgctacttcttccaatcgtttttcggaaaaataactacacttgttcaaaacaaattaaaaatacattttgt

SEQ ID NO: 36585 - DNA, 3860 bp, Arabidopsis thaliana landsberg
gaatatgctgagtgagtcatcttgttgtgaaatgaacagaagaagaagaatctaccaaattttataggacccaacttgctttgttatttttaataaatccaaatatggaaaaaaggaaacgaaaagatcgtggtgggaaaaagtgacgtagaacaagacaaaagcaataagagctgagaggacgtggtacaagtgtacacaaaatcggcctcactcacatcacatgtttctatttcattaaattagtaatgttggaaacattcattgtcacaaaaccaaatcctcaacaatgatcgtatcatgtgtagtatatattttcttctcctttcaaaatccctttttctaatcactttcgtattgggttctgattccttcaacaacaaagaaacacaaaacttaaccaaaatcaagaaattacgaaattttcatatatatatctatctatatttaaattgctgacaaataaaaaactaagaaaaaaaaggttccttatttgttacgaaaatttgatcatttatagactttaatagtgtttgttactctataaacggcccgtgttctccgactaaaccaactcaatgtctgatatctcctccggtttgagaaacaccaatttaattcttcgtgtcctggtgtaagaaactgtacagctttttgttttttcatcacgtagaagagttgctgctgtgttcactatccgagcttgtgtcgtcttgtcttgctttatacctatgaagaaccggtaacgaagctgttgctgaaatcctgaacgatctagctgaagctgaacccatcgatgtcgacatttcttgcatcgtcttcacttctttacaaacgttatcgagaactccgagaaaatctctcaccaccatgaagattcttaaaggatgtgcttcttctctcgcagcgtttccggggaagtactctgttacttctttcaccattgacaaagcttttctttctccctctttgatctttcggatttcttcctctgcttctttgagaaacgttttcatcgaatcaaagaacttcccttgagttgtctctgtcttgagaaatgatcggagtttatcaagacccatttcgagctttgtcacgtaactgctcagtacatcgaaatccattccggctgattttttcacattaaccagatctctactgagtccagcaaccacttgtaatccttgctttctgaaaccgtcattgtttccatggagaatggtttcacctcttgttgtcgttgttccctcggatcttgtgatttcttggacgacaaaatgaagtaatgtggttttgccatcaactcctttgatgtctacaagttttaaaagcgtatcgagtttgaaggctatggcatctccgcgattcgtgccaacgttcattcggtttccagtcattagaacagcctcgaggagctttaggaatagtctgcttgcttttagttccaagcttgcttcctacaaagcaaccaagggattagaattaggacaattcgtttgagaaatttaatcattaagtgtcttgttaagtaactaacctctaatgtctggaaagagtttcttagatacttgacttctgcatcaaagttggctctatacaacattgcttcaactcttttgaaggcaaaagggatatcgagaatggttttgaggaatctttcagctgttcctagtttagagacatcaccagagtactctcgcagtttgatctcttcctccttggttggagccatcttcaccaaagtctctagaagctcagcacctaagctctctggattacctgttacaggtgccacaagtactattaaattaaaataatagggaccacaaatgctcatgcatcttagaacgagaacgtaatgaaatcaatggtgctcagagaatcttattgaatgtcagctacaacatatttgatagtcttgtaaaatattataggatggacctttttctcctttacatgtggtatgtttcataagttgaactgtcatgttagaagcaatataaagcagagataatcatttcatatgtcaattttctttgcaatgattataacttgtggcctaagccattttagtattatttagattttcaccaatgttaactctgatgagcgcatctctatctatccgcaagatctccattagcccatcaaggcatcaatatttttaaaaacgagttatgtgccaaacagaggaacctaaatgtgcacaatctatgaaaatgctgctttaagatgcaaatggaaccttcccttcaaaaataaataaaattggagacaatgacttaccatccgtgagagcttcggaaacctcttcacgtgttacattgagagctcttaagagaattgcaatgttctgcgatttctttggatcaagcactctgttctcattctcagctaaaggtatcactgaccttctcacaggttcctttggagctgaacttccagaattgcaaccaaacagatgctccatcctatcctcgttcaatctatatagcatgatcagatcaaaaaagtcactaaaaacgtcaaattcaaaaatgcatgcggcacaaatatgtagtaaaaaatgctacccactggaatgagcttgatttgagctggtcccaaacagtggctcgatctgagctcgctcgtactttgtcccagtggagtggctttaactttggcttgcttgggtccgtgtccccatcacctgatttctcaagagaacctgctgatacgctattgacctcctcaacagccttcgttttaagacttggagtcgtgaatgcttgttttcttgaaggtgacgttgtggagttggttgttgcttccgaattggtgacttttcgtagcatctggaaatctctcggccgtttctgaggaggtggaggcggagcaagaggcggcggcggaggaggtggtggtggagtctggagtggaggtggagaccgtcgtggtggtggcactggtgatttttcctgagttatggcttgaaacgccgccctattgggcggtggaggtggctgcgagaacttaggcttgttctgggaataaggaagctcttgttcatcactttccaagcctcttagaggcggaggttgtactggtggcggtagtttctgcttaatcgatgggatgatgacgtgtttcatctccggcgacctagatgatgccgtcgtcggagctgatccaaacttagacctcggagatgttctcttggagtgaggaagtgatccattggcggagcgagggaatgccgtgtagtaaccgtcatcgctgctgatcgcagatccgtgcggcgtgtaaaacgctgtgtcacggcattcttcaccggaagatgatgaagaaggagataaagccgacggagagttatcagagggttgcgggggtttagctaacggaggaagcggttgaagctccggactgggcctataccgttccgatctcttagccgaattcaatttccggtacggagacgaattaaccggtccattagttccgctggtagactcactggccgaaactcggctcggttcaacagttcccatatagagaaatgtagaagacgtcgtcgtcggtggtcctggatcttcctggaatcttcgagaaccgccaccgccatcgccacctacagtaacaagcttctgagtatcagctggcgtgcttggctttatgacggcacacgaagaaagctagagcagaaagcatcccaagcgtgacaattccaacaaacatgacgatagcaacatacttcccaggcttggctgattgaataccaaacaggtggaatgggtaatccaccattgacgtcggcagaaacacgaggtggccgaggaggaaatagagcttgttgaagcgtataaggattctacgggaaa

SEQ ID NO: 36586 - DNA, 5612 bp, Arabidopsis thaliana landsberg
  unsure (1)..(5612): unsure at all n locations
tttttttttagggaactgccagttcaatagatgccattgtccgtgctgttttttctgatatgaagcaagaagatattccagtagtaagtattaacttaccaaatgatcaatattattttgaaatgcaggttttagaataatactctctgccgttcttgtttatttccagattgtggaagatatgctgaaaagcgttatggtagaatatgaacgtagattagcaacacagaacgaattggtaagtaactttagttattcacccttagatctaatgatctcatgtatcttggattacaaggaattataccttttttacactttttatcttgaatatgcaattatttagctactgatgagcgcgggaaacagagataagcttggcagtggcgatcttgggagaactatttcaggaaatgaggagacgctaagtgatgcttcggtaatattatcacccttgaagttggtgatcttgttatccatataagcatactacgatcttcatggatttgtatatctatcatcataatgtgttatatgccaaactggtttaatgattacatatttatgcagtacggagaagaaaacgtgacagagattgtaaacaacaacatggaagcttcacaagatagtaatgttgaagaattggaaaaccaagattatgagctctatgcaatttcaaaagagaagaccgagaagcaacaactgataatcgaaagacaacaaactcatactgaggtatatataattcagttgaacataaatagttatatatggcatcttgtttcttttaagactttgtatttggtgattatcaagacatgagtgtatatgtgttggcaggaactgaaacatgatctaaaggctgtaaaagcaggtctcagtctcttgcagatgaaataccagcaagagtttacaagcttaggtgatattatttcctacaacaaatttgagatgtttaattgtnnnnnnnnnnnnnnnnnnnnnnnnnttctagtgatccattgtacttttacaattgctatcaaagaaattaatcttatgatcattcctcatggttttaggcaagcatttgcatggtcttacttatgcagctacaggataccaaagggttcttgaagaaaaccggaaactttataatcaggttcaagacctcaaaggtaaaatatcaagctgcatagtgctaccactaccaagcttggagttgcaagttgtatttagtggattcagttactaagatctgcaatatcaagtctaacgaatgtataacaggaagcataatagtttactgtcgagtgaggccattcttacctggacagaaaagtgtcttaactactgtggatcacttggaggattcaactctatcaattgcaaccccttcaaagtatggaaaagaaggtcaaaaaacattcaccttcaacaaagtgtttggcccttcagcatctcaaggtgattcaatttctgaaatttatttatcattctttcatttttacatatgatcaagatgcatataaattttgtatagacatcatgatcaatatgtatctatatatgatcttccttgaaaactattggtttttagttattttatgtcgcctcttacagaaacgtttaactttctatatgtagaggcggtgtttgcagacactcaacctctgatccggtctgttcttgatggctataatgtatgcatatttgcatacggccaaacaggatccggaaaaactttcaccatggtacttttctcaaagactttaccttattgtggaatattgaattttctgaaagacttcaccttatctacatttgtaattttactatggtaatcagatgggacctaatgagctcacggacgagaccttaggagtaaactacagagcattgagtgatctctttcatttgtcaagtgtgagaaaagaaaccttttcatataacatttcagttcaaatgcttgaaatttacaacgagcaagttcgagatcttcttgccactaatggccaaaccagcagatatcctttttcaagacttgtgtctctttagttttagtaagtcccaatgcttcttgcatatgatcactgtaacctactttccttgacttgtgaacacattagagattcgaaacagtgcacaagatggaatcaacgtaccacaggcgacactggttccagtctccacaacttcagacgtcattcatttgatgaatattggtcaaaagaaccgcgcggtcagcgccacactcatgaatgaccgcagcagtcgctctcacaggttttcatttttaatgtttctataaaattgaaagttattatctcattgtctttaaacatacactactagtgtcatcgtgtgaaatagaaaagaacttggacttgaaggaatttggcctatactgtaaatgtaaagactaatgtagaacatagagcataagagtgaagatgacatgttttattgtttataagaacgagcgcgcactcttcctcagttcgtgatataatagtcacataacatgttttattgtttatacttgcagctgtctcacagtccacgtccaagctaacgttctctagccagtagatactttaagaggttcaatgcatttggtgttcttgcggagagtgaataggatattcaggtgtgaggtcatgtggtgataggttaaaagaggcacaacgcatcaacaagtctctctctgctctaggagacgtgattgcatctctctctcagaaaaacaaccacattccttatcgcaatagtaaactcacccaactgctccaagacgctttaggtaaccagcaatactcaagtgttactgaatctagtcacgtataacaataatgcaactccaacttccaattgctaaagcggtttccatttgaagtataacatatggttctacaatgtatgcatgtatgtgtgtgtgcaggaggacaagcgaaaacgctcatgtttattcacattagccctgaactagaagatttgggagaaacactcagcaccctgaaatttgcagagagggtggccactgttgacctcggtgctgctcgtgtcaataaggacacttctgaggttaaagaactcaaagaacaggtccaccatatatacttctcttcacattattatactattcattctctcaaaatacattgtccaaatcatcagttacctttgttatttgctttcagattgctagtttgaaacttgcgctagcgagaaaggagagcggggcagatcaaacacagctccaaagaccccttactcctgataaactcctcagaaaaaagtcacttggcgtttcgtcttcattttcaaaatcagcaaacagtacaagacaggtccaaaccaaacataagccatcacagattgatgatgtcaacagcattgaggtaaaggggacaagaaaactcattcaccaaacaaaacaaatcaaacttgtcaatacgttttgcagtgattacttcatgatatgtagtgaaattacttgcagggtcaaagtgactctgcatctagccttgacttacaaggactagtaggttcaccgtcatggaaaaccccgccgagagatgggaaagaggaggacatggaatttattataccaggaagtgaatgggttgataaacacgaggacgaaatcacgcgtagtagcaaacctgaaaacagagcacatacacagcttgagaagcgaacgtctagcttgaaacgtgaagcaactcgaggtgtagataagaataagtgtaatagtagtgtagataaaggattagaggtaaggaagattccatacgaagaagaagcaaatgagtcagatgaaaccgcaacaagtgattgctcggagactaacttgatgtggcagttgaatgttcaagtgaatatgcctagaccagcttctaatggttcttcaactaaactaaagaagaatcaatcaaaaataagtagagttgctgctgagaccaggtgagttatttattatataaatgattggattttcttataaaaatagaatgttttagctaatgtaataatgttgatgatcaggagtatgataccttcgctaattccgacgcctacgaggacattatcgcttggggcggctattagctcgccaggacaaacgtcctcaaggcataacaacagtacagtagttgtgaagaagagacaaaatcccaagtaatgaagaaaacattttgtgagcattttaagaatacaattattattggcggacccatatttcatattataaggtcatatatatacagacgccgtatacgaagagtagaatacgtatgagagtgatagattgtagttgtactatactataggttgaatatgttttgtttgatttgtgtggcgtttactagaatgaatattccattctttttatggccgatgttgtattctactacagtattacttctcgaagctaatgtattttattcatcacaagagttatacattttctgttttaaactttccataatctcgatttatatgtactttttaacaatatgatttgtcaatgtagcaattttatagtttgatattttgttaagctagactagttagttcataagaaccaaatcagtttttgatggcagtttgactagatggatggtgatgtaaaactgctacaagcaaattagccaaatagtcaaacacatatcgaaaactgtgtccattatgatatttttttaataaaaaaaacgcaacagaaatattactatacggatttttttcacaatcagatttagttaaatcaaaatttgaccaagaaaaaagaagttaataaaaaaaaaattctcctaccctaaaaatgtgtccgttatgaaagtatttaaggaaatttgttatttttattacaaaaatgctttaaacaaatattgcacgaatcatttgcagaaaatactaattctataatcaaacttaagaatatacgatttctataattaaacttaaaactatactaatacaattccttacctaaagcgggacttttgaggggcaattacgtaatttcgagaagttcatcatatttcttaataaaattagctgtctttaacccccgcgtcgctgtttcttcccaatctgagaaaactctcactctgcaacttcgtttctcttctcctttcttaaacctctcacgcggtttcagacttccgttcgcttaccgaagacggctcggaaattctctcctgaagaatcagcgacgaccttagcattatctacaagtcatcttttctgctagatctgttgtgtatactactcgcgatttcattttggtgagtttattgactgcgaagaagcctcaattagtgttcttttactgattttgctattgctcgattctactttcgatacattttcctgcatctcaaaagatagccaattgttggagattctagaattctctagattagggttttcctctgcattttctctatatttttttatttgtttggttccattaaccaaaaagagtttatctttgagtaattccgtagaaacctcaaatttttggatgagaatcgaaatttagtaaagttggttaccattatgttctcatttttagggagatagattattatcgggttccttagtattatttattagaattgaaccctaaa

SEQ ID NO: 36587 - DNA, 1265 bp, Arabidopsis thaliana landsberg
ggatccacgcagatctctgtatattctcacgtgaactcaccataatactctcattgtcactttttttttcttttgctagatgatgtggaaagatgtgaaaataatgcttcaatagtattttattatttttacacttttggacgtttctatgcagagagagttcgatcaacgatagctttttacggacatcaataggtacacttgcgttcaagtgatgtcaacaaaaataatatcaatcattcaaggggtgatattttttacgaaataatccaaagcataaacttctaaatcaatcggatgaaaatcgattaatcctctccagcctttttgatagcgtatttttgcctaggcatattgaaatttccaaaactcaacttttgactgcatatctatattacaacattctacattgtatagtaaaaaatgtattccaagttgaaactattagctgcagatgaagaaccctctcaagtttgttgtttgcctttatttgtctttagcctcaatcacaatccggcttggaaaatacgctttttatgacattttagctctggcaaagaccactccagcaaataaacctgcaaaaccaaaatacatagttacgtacacaaatttcattcacctctaagtaaccaaaaagacaagaaataacagaatcgatgatctttgcttgagtggtagatgatgcagctctgtaagtgtgttacttaccaaacagtatgctgaacagatttgggagactgagagggacgttgaagagtacaagaccagctagtgatatcggaaccttgtttaatgaacccaccaaactgccacacaatagaaagaatgtcataacatttgacaccaaacataaaatccaatcaaaaatgttgtttttgtccagagagaaagagagagttacctgtatgttgtgggtccggtttgatgcaggaaccacatcgaagtgaagctgatggctaaaccaaggaaaccgcttgctgttgccactacccaaaacattgaatcttttgtcacatccctgccagagagagtaaaacaccatgaaaactttaccttcaaatgatatcacctttttcatatgcacctgtttagttcccgtgatatcgtctactcatgtattttccatttgcagtctcaagtcttgttataaacacaaactagtttctagaaattctactatttttaagaaaaacacagtagaagctggaaacgtatagctatatagaaggactagtttcagtcattatcaatgtgatccagac

SEQ ID NO: 36588 - DNA, 1753 bp, Arabidopsis thaliana landsberg
ataaacaattttttctcacactatgtatgtgcgctcttgtggttaatacatctgaaataagtaaataaataaaggtcccttagatatttttgtagatctagttttggtaatcacgtatcaatggcattttagatctctttagctaggcttctcgagccttgttactggaacctagaaccatggcatcatgtcaaatggtttcctcaaagtctattagataagtaactagagagtttggatccggtatttctctacaggtgatctcaactctgcatatttgtgctcctgctgcgaaatgttttcttgaaaataaatcaatctctgtattgcttacatatatagtttccactttcatgtatctacgattaatatagtgttcataatttctgggtatcttgtttgttacatacttcattatgttttctgtaacattaacttctggtaaaatagttagagattttccagtctacaataattaaacaaagcttaatgacagggagctttacagcaataacattactggggagatacctgaggagcttggcgacttggtggaactagtaagcttggatctttacgcgaacagcataagcggtcccatcccttcgtctcttggcaaactaggaaaactccgcttcttgtatgtactatactctctttcttctcgtgaccgcttcaatatgcagcttcattgtttacagtttcaaagtttggttgtattttttttgataaagaaactattgcgtctaacattcaagacctcaatgaaggtcacggtctagtgtaattgtttcagggagagggttgttacaggcagctttcttttgctacaccacatttagccaagtagaagaatttcgaattctttgataaaaggatacccattgaatatatgatatcacaccacatataaagttcaccctgattgactgtgtgaacagacacctcttactcctctgccacattgtgatcctcagtggaagctagtgaatggttgaatttagttgtatggcattactttgtgcctgagggtgggtcctatcgaaagagaaaccggcgaaactcctatcatcacaaacttcagtgtacatgtgtagcgtgaatgtttcagaagtagctagaggctaagtttacaaattcaataaacaaattcactcatcgccctacaagttctatggaattgaataagattttacatcagctctaatttcttttcttattattttgtagattagtcgtattttgctggatcttaagtcattttaaattcctttagtggttattttcaatgtcagacattctactatatgtggttaggcgtcttaataacaatagcttatcaggggaaattccaatgactttgacttctgtgcagctgcaagctctgtgagtgtaactttgtctctcctgcattattctgttcattttcttaacattctctggacaatcttgagttctgaaaaatggtatcatcctgaaatgcagggatatctcaaacaatcggctcagtggagatattcctgttaatggttcattatcgctcttcactcctatcaggttttccttcatgatcctagctttattcttgatggattagccacaatgaactactaatccgttgcaagttatctacagttgtgcgaataataacttaacggatcttgcagaacctacacctacttatacctctcctacgccaccaccaccttcaggttttcattttgcgccttccattgttttctcagtggttctt

SEQ ID NO: 36589 - DNA, 1720 bp, Arabidopsis thaliana landsberg
actttttgtaatcgatagaaagggttctaagagttacggtattttaaatcaaaattgttatttctatctcattatgcgtcagaaactcttaataaagtttgattacgcacaaagactaaacttcaaaatctttattgcattgctacatgtataaatagataaagaggagatgttttagttatagttttgttgttttagttttagttttcacaacatatttatcagaaaacaatataagtcaaatttgacatgggtatataaaatttaatacagcagatgtgcactgcatgtgtattttggtctgtgtcttcgtgtaagatgaaatccgagaaagacaagagctccagatattcaggtggccgatcaactggaaatcagccactttgatttcttctctaatttttattttccaaatctcgaaaaatatttaatcatctgtctaatatcttaaaaaggagtatactgttatctttagaccagagccacactggatttattattattattaagttagcaattagttttgttttatataatcctcggtctttgagggttttcagcgaagcttaagccttaagcgccgttcgcggctatttaaaaaatgactataccagacgaataaattatttttttgtccacaaacaaataatgctatattttatattttttatatagtttttcatgtataaccatatctttctttcttcttattgttatagagttgtcttcataaatggataaaacatttcaactttacaaacaaaaactgttagaatatttgattaaatttggatgaacgcgttacgcgtattaccgatattaagttctatacgtctttctttctttagagactaatattgtgagtgtaattttatactcccatacatacgtaattaacgtatgagtgtgtgtgtgtgtgttgaagacatgtgcttattgggatttgtttggcttcaagaacccctagaaattcctgcaactggtccaagattccatgacgacaaggacctttggcctaatttgcattgatccgattgcctaaattttaatcccttcgtagatccaaatgaacaccagccaacaaaataaacatcaataatttactttctcattattataaccattagtattgtgaaatcataaatcatttatatttttctggctgatacacgaaacaacatctttaagtaaggccatattttggcatctgcctccaaaacttttagcttttacattttacattttttatttttgtacgcaggtggtgtacataaaaaatcgaagttattcaaccacttgattgcggtattattgtattgacgttaaatatatatttttatgtaaatataatagttatcaatatatgtatttataaaggtatattgatggatatatcactctaagtatgtaactagcagcacaatttgaatgatgccgaatttataagtttcagtcatgaagactaaactcgagaatcccaaattttgtttatgtgttgatcagtcagaaataaaagaggaaattttggtgaaaacaaaagtgttggatattttattatattatataaatcaatgttgttgatccgatctaagtttgggaaatgtgggaatttggttgaaattaagataagtgtataaataaggatttaggagaagttgtagggtagagttttggtcttatttaaatcaccaaacaccttgatttattgatttaactactg

SEQ ID NO: 36590 - DNA, 1297 bp, Arabidopsis thaliana landsberg
  unsure (1)..(1297): unsure at all n locations
ttaaaaagatgtccaaatattacacaaccaaccaactgtgttgtgtgtgagtgtttgagtttcacttagcttcaaagcaaagacttcaatgaaaaatcataatatcaacttttacaatcacaatcatatttcttaagtttcactacacatataaaaagtctcgactctattaacaaaaaaaacagagatgatcaaacaatggcgactttgattctatcattcttgcttcttcttctagcaacaaagcttcctgaatcactagctggtcactgcaccaccacgacggcgacgaaaagcttcgagaaatgtatctctcttccaacacaacaagcgtcaatcgcgtggacataccatccacacaacgctactctcgacctttgtttctttggaactttcatctcaccttccgggtgggttggatgggggattaacccggattccccggcgcagatgactggttctcgtgtcctcatcgcctttccagatccgaattctggtcagctcatcctccttccttacgttcttgactcttcagtcaagcttcagaaaggtcctctgctttcccgtccgcttgaccttgtccgtctctcttcctcctctgcttctctctacggtggtaaaatggccactatccgtaatggtgcttccgttcagatttatgcctctgttaagctctcctcgaacaatactaagatccaccatgtttggaacagaggtctttatgtccaaggttactctcccaccattcatcctactacttccaccgatctctcctccttctccacctttgatgtcacttcaggtatccaaattctttctcaacctttgatctctcatactaccaccaaattctttctcacttcagcaaagtttgatcttacactgtttctttctataggatttgcaactgttaatcaaaacagcggttcccgagctttaaaagtgactcacggagtagtcaacgcgatatcgtggggttttctcctcccggcgggagcagtaacagctagatacctccgccaaatgcaatcaataggacccacttggttctacatccacgcagcaatacagctaaccggtttcctccnnnnnnnnnnnnnnnnntccattggaatcgagctcggcacataattcccctggagtgacctatgggttacatcggagcctcgggatagctactttcacagcagcggcgctgcaaacactggctttgctgttcagaccaaagacgaccaataagttccggaggtactggaagtcttaccatcattttgtcgggtacacatgtgtggtgatg

SEQ ID NO: 36591 - DNA, 1360 bp, Arabidopsis thaliana landsberg
catatttatggtcggtgtgttcatgtcttcatggcttggagcttcagttctcagtatcggagaatggtttatcaagaagatgcctctcgtaagctacatctactcagcttctaaacaaattagtggagcaatctcaccaggtataattttaccaaccttacttaccaacaagtactaataagagtcataagactaaccttattaccttttttcatcagatcaaagctcaggtgcattcaaggaggtagcaattatcagacatcctcatatgggagaatacgcttttggtttcattacatcgactgtgattcttcgaggccgtgctggtggagaagaactatgttgtgtctatgttcccaccaaccatctttaccttggagacattttcctcattagctcaaaggacatcataagacctaatctctcagtccgggaaggcataggtaacttgtgacttgatctagcaactcttaaaacgcccctggtgccttaacaaatccatctcattgctctatttttgcttttttcaacagaaatcgtcatctcgggtggtatgtcgattccacatatgctaacaactctggactcagagactattcacaggtcagtagttggaacctttgccatgccacctgtgtgaagtcgatgaatcatagttttgatccaacgatcaaatctgaattggagctctctggttaactgacatcaacctttgcttatacaagaatgttggaaagttttggaattttagagtttgaatatgtttgtctaagtggagttttaggttggacattggcattatgcattgaggaagttccgtctgggttttgctctggtcatatgtgcacaagatatagcttccacagtgtttagtatcctccatgtcttctcaagtatttgtctttcacatcagtgtgtttgtattgttctcaatcaccagataaacggtttaagaagacaagagtgtaatgttgaggtgagtacctttccgtgcatcccttgaatagctttcatagcctcctcctctgtttcataccgtaggaaagcaaaaccttttggtctattagctactttatccatcaccatgttcactacatggggacacaatcaagaacatgagttacagttgtagaatttggaacaaaaggagaggtttatgcttactgtgtataaggttgccaaactgttcaaaagtatcccgtaaggtatcttcagttgtgcggaaagaaagccctgtgataaaccatcaaaatcaagtcaataccaatcaaacccttaaatccacattccacaccatcaaaactaaatccataccaaccaaacctttaatccatttaattagagttcaagtctctaatag

SEQ ID NO: 36592 - DNA, 3492 bp, Arabidopsis thaliana landsberg
atacactatatacgatgttattggtgggtcattaatacaaatacatatgcgtacactgtacacaagtgatagttttgataaataatatttcaagtgagctagttagattttaatacaaataatttcaaaatatatcttcaaattttaaacgtcgatttcagagtagatcaagattgtgacatcgtcaagggctaatcttttgattctttcttgcaaagaagaggacatgaaatcataaatgcaagtaggtgactaactgatttacgcggacgtcgaattatcgattatactatatatttatgtcaacttgcattataccacttaatccgatttacacatactatttcccatgtatacattacatagatatataatattcgcatattgcaggtttatgattgaagaagaataaaataacatctccccacgttttacatcggtctacgttatacatcggtctagtattactactataatatgcaatgtttcaaactttacgtggaccgttagtaaatgtgtttgtgaaagaaagaaagtcacacacatgtgtaatcgactgtttttttgtcttttgctacaaatgttaatattcattggaatgaaagttgaggtgctacaaaacagttagacctatgtatatttgttttttggcaaaaaaaacaaacaataaaacaatggagttgggacaaataaagttgttttcatcggagagccaaaaagccattaaagttgtaatcgactgttaaacgaaatgttttgttttaaccaaatatcaacatatcttatcttgctcagtgaattcacatatatagttgttagcaaaacaaaagatcataagataccacatacttttgaattttcttagatttatcatatatttttaaaattttctaataaagtttccatatgctgtcacgtttatatactcggacccgccattgctaaacactgttcttcttgtttgacctcttcccactgatatttttttagtttcttctaataaatgataccgtatatcatgataataaagattttcatatatttccgatactatttactgttttgtttttccacacaagataagaaagaaatttgttcactattatcttgcatcactcgatatctacatttttgtgagttctcttgttacgtcattgaggtgacgtatatgatcgttataatagtctatattgatcatgaacgaatgtgaatggtaatttggtatacgaggaaaaagaagtatggtacgaccgtacgagcacaagttgtaactttttttttgtttaaaaagaaacaatacagtagttacctacgaacataactttaatgttatgatactttttatttgtaaaaacagttaaaggaacttaaaaactatggttcatcgtatatattttcgatctgccacccaatgagtgagcacggcctttgactctggactaaaattatattgaatattcatatacttgatatccaagtaaatatgaaattatatacatgtcaagaaaattgtttatcgtttttggattatttatgttatcatctagtagttttattgaaatagtaaaactcgagatacacaaatgagaaaatgtaaataagtagtctgaatcaaggactaattgacgttgaaatttttggaaataaatgtatatttcaacatcaaccaatcaataatcacgacgatatcaaatacacatatccttttataaaattaataatgaatatttccccaaataaagagttttgcttggtctttcctctcttcttctcagcttcttcctcctcaatctttcaattaaaatccccagaaaagaaagaaaaaagggacagttggagaaaaagattctctcaatcttatgatcgttaagggtgaaacaaagattactaaaaacagaggaaaaacagagtaaagattactcaagagtcaagagctggtttgatcttaatgggaaacatctgtcctggctctggatcttccactgttaaccacgaacctgtctccaccaaacccctcccaggttcatacacacatctctctgcttttttctttttttttggggccgaatccaaatactttagatctatttaccttttttttttctttggtatttttgacgattcttgagtttctttaagttcttgcattaaccccccaaaaaaaaaaaacgctttcctggatttttttgtttgtttcattgtgccttttcaattatgaaaatgtcaatgcttgctctgttttaacttttctgttaaagtctcaatgtttttattttcattaaatcaaactttcgtgtgtatcaatctatacagtgagacgtgtgcagaccccagagaataaaaagtttcctccgccgctggtggcgatgccggcgttacatcccacgtttccactgccggaaacaggacataaactgagacccgccgctaccccgcctcgtgaaaaaccgcaacataggacgacgagatccgtcgagaacccacctcgtgaaaaaccgcaggagaagacaagatccgtcgagaacccgcctcgtgaaaaaccgcaggagaaaacaagatccgttgaaaccccacctcaggagaagacgagacccgtcgataatccgccgtcaaagccggtagaaaaattgggtttaggaaggaaagcagtgccaccgagtgggaagatagtgacacctaatctaaagatgtttacattagtggagcttaagacggctacaaagaactttcgaccagaatctgtgatcggagaaggtggattcggacaggtttttaaaggatgggtggatgagaaaacattagctccgtcgagagctggcgtcggaataccagtcgccgtcaagaaatcaaaccctgatagtgagcaaggcttacatgaatggcaggcaagtaactcctaactttcctttttttaatttcgttaaaatcattaaaagatactaattggagggaaaatatcattgaaagatctaattgtagcaaaaatttattttggtttgtctctgtttcttcaacataaggaataatggcatgagtatttggtttaaatagttatataacctacgtatatgtgcaaattaggaaaattttcagcttattgaatttaatgacagaaaaacgaatatactagactggtcattttaataacagtttttactttaaaacacaacacgccaaaaaacagtaagcacaaatttgggtaaaaacagaattatgcatactctttaaatattttcttgtcacaatttttgtcgtttttttgctccataaagtgagtatatgaactggtcttcaatgaattttagtaacccttactaaaagtttgacaatatatccttcttcactctagattttgtagtgtttatgattagttttcaaaataatggtatatttgaaagttttttttttaaaggtgataatttagagcatttctttacttaaaatggaataacgttgtatcaccgccggtctcgctagcattagaaggtattt

SEQ ID NO: 36593 - DNA, 1012 bp, Arabidopsis thaliana landsberg
actggcctttctgatataaagcctgtccaagaataatcatagcttgaaggtttcatgtctcttttctaatgccaatctgaaaaaacacaacttaagtcactggaacagccacatcgacaaagacaggtcaaaggaaatggttttcgcaatgagaagcaatcatagctacatagttaccttaatagcggaattgatttatccttgtgccctccggattagtatttagcagaaagctgacaagaaaagctgctaacgttagtaccaaagatgtggaagattaaattactgttagaacataatgatccatgacattgacttacagcaaccaactccttaggggttaagtttatgcactgagatcaaccgtcctttcgaggatggatcagtgagtttcccttcatttatatttgttaatataggattgccagcttctttctgtacagagtcatttgcttgtaggcccaactttgcacttacaacgggatggttaaggattgattgctacaaagccattgcgctttataagataatcgaaaggctacttacatatttaatgttaaagggaaggtagagttgttgtgaacagagattcagaccataagaatctaagaaataaaatcagattattttgctcatatgagctggattgaacgaggagttcctcttagataaacttctgtctacccataaccagcacaaagaccaaatcccctaaacatactaaacttcttgaactaattactacactatttcagtaacttagaaccaacgtctaagaaatgatgttgaaccttaagtcaaaagcccgcatcattccccctgactcaaaaagccactctttaattgggtgtttagtttacatgaatacaagattaagtacatcctcagaaatttattaatatccccattttcacaaattaatcatcttaacaggtttgactaagatatcaagttttgcctgaattcgagacagaaaagtactgagctcctctctttatctgtccaaacaaag

SEQ ID NO: 36594 - DNA, 1611 bp, Arabidopsis thaliana landsberg
  unsure (1)..(1611): unsure at all n locations
agtgtttgtttattcagtttatattggcattgcgtgactagtaatgttatagatactaaataatcaatctgtgattttagtactactgtagatcttcctttttccagtattagaatcgaatatgtctggtcaacatcaaagaagattctgtttcctctttttctccacgaatagtgactttgttcaactgaatatacttgtatgaggatttgtttatctggtcaacaagttatttctcggattaagtgttctgcgtctctcttactaaaaatctcgccaattgatttgcagagtaaggaggcatacaatctcggtgtttgtgggcgatgagagcggtataataaatagaattgctggagtatttgctagaaggggatacaatattgagtcccttgccgtaggattgaatgaagacaaggctctgtttactatagttgttcttggaacagataaagtcttgcagcaagttgtagaacagcttaacaagctcgtcaatgtcatcaaggtttttatcttgttctctattgaatctagtcttggctataacttgctgctttgtttaagaatttttttgagcttatatatactttaatgaatcatgactattatcttatactcataatggtttgttcaggtggaagatctctccaaggagccccatgtagaacgtgagttaatgctcattaaacttaacgctgatccaagcacccgctcagaggtaaagaataattcatcttgcaaaaatattgggtggatgttcaaagttgttttttcgttatgcttgatgcagttgcattaaaaacatcaaggatatggatgaaaggaagcatttattctttatgattaattgagtcacagtacagagtcttttttatctttctatgattagtcaagtcgcattaaaatctcaaggatatagatgaatatagatgaaaagaggttttcttccttgttattaatggagtcacagcaaatgttttttacttcttacgattgatcagttcacattaaaatctcaaggatatagattagatgagctatgttttaaaaaaacttgttcctttatgaaggtttccatgtactgcagatcatgtggttggtggatatctttagagcacaaatcgtggatacctcagagtaatttctaacgattgaggtcagaccttttcttcagtttatatgtgctcagatcatatggtcaaaatggttccactaagtctcattttttattgtgtaggtaactggagaccctggaaaaatggttgcactaacgacaaacttagagaagtttggaataaaagaaattgcgagaacagggaaggtaatttttcactttcaaccactttttgctccaatccttcttaactgtcaacaacgtctggctctaaatgtcttcaaattacatcttctgtcttgaaaaagcttgtttgaacggttggactcacatgtatcattacttgtagccacttggagcctctntnnttgtttttattttttttttttttagggctattatgtcacacatacagacccgagttcctttggtgaatctcaagacactctaaatggcagagcacatgaaattcccaggttagctttaaatacatgttc

SEQ ID NO: 36595 - DNA, 1919 bp, Arabidopsis thaliana landsberg
taccaaaattttcagttctgttttttttttttttacaatgtatttaaggtgataatggtgtaaaaaaattgatatatttatatatcttaacgtcaggttattttagttatatattatataattaaattttataaaacaaatctaaaatactaaaatttcctacttctacaaaacactctgattaaaataagaaaatatgtgttaatcaaaacttaagtactacactttgtgcattcttcataaagttcattgaaatttgatatggtcggatatgctacatataaatttgtaatcgatgattattacatctcacttgtcaattagttatagtagggtaagatctaaatattctcaatagcagattatattaatgggtttcagtgttattattttgatgttaataattatataaagcgaaactcaaactaattgcaaaaatctgtaaataagggatttattgtcatttaaataatcagtgaataggattctcaaccactactattaagtacttgagtttttgcttgtcttaaattggtcgcttcttgaatttgatttctcgccatcgttgaaattttataatgtttaggttgctaataaataactaaaagtaaacgaggacaaagtctaaacttgaatcacttttctgtttctccctaacatttagcgtatatgcgtgttctgcatttacatataccatttggccacaaataaaaaggataaatttgacagaaacaaaaagtaaaaaaaaaaatcaattgtgtggtcgatcttgtgctgcacgcattagatttgcaaagctcactgataaaatttgacaacatttactaaaagatctgtgcaaacgttgtttgatcttcttaacactaaaaagtagtatatatgatttataatagtgatacggtacaaaatcatgattcacataacatataaacttagatgtctagcctaaacatgaaaaataagagattcgttctttttgttttttaagagattcatttttagtagaaagtatatgatatacagtacttatgtatgtatgactttacgaggattggattccgaagcttctactttaaatatttcgcacaaactcataaaaactttatgccaaagaagcaaaatttcattaaatttgattccttgtagtctccaactttatacaacttttatgagaataaaaaggaacaatttagtcataaatttatatttcaatgggtaacccaaaattgaagaaacggtaaagcaaagaaggacaatccagtaaattccaattgagtggcattaatgtaattttattgaaaagtagagggtaatttaaacctccagcctctataaattgtcgtaacctacccattcccttaaactttctgttatcccctctttctcttattctctctctctcgctatctctccctcttaagtttttttttaaaacagactctccctctaagttattcggtcgcaattaaaaaagaaaacaaaatctttataaattttgattttctctttttcacccgattattttgatttgactgttttacgacagccaatatttcaattttattattgggtgctgacgtggcatgcatgcaagagagtatgaccgtgaacaccaatacgatgcgtgttcccccagcgtgcgttctaacggcggataagcgcaaagaacgagacgccttcatctcctccgtcaccgataatccgccggaaatcgccaagtttccctgtcagccgcctagacttgttccgccgccggttaatcccatttccaagaagtcttcaacagcagcaggcgagcacgattggctcgaaccatttaatgtcagagggttatgtcagccgcgacgtacctcggcatagcaaaccttgttgatgcggttatgggacatggatagcagcgttgacgcagtcgacgatta

SEQ ID NO: 36596 - DNA, 1242 bp, Arabidopsis thaliana landsberg
gagttggcagcgaggatgaaatggcagattttattgtagatgaagatgatgagcatggtcctcctaagaggtattttttttctgtcttttttgtgccctaacatatcacttatgtcatgtacattttctgattctaatcaacttacttttcaggggcaactcgaagaaaaagaaatataggcagggatcagatattactgctatgcgagatgctaatgaaatatttggtgatgttgacgaattattaacaattcgcaaaaagggtttggcatctaatgaaaggatggaaagaaggctcgaagatgagtttgaaccaactgttctttctgagaaatatatgacagggaatgatgatgaaatccgccagcttgatattcctgagagaatgcaggtgcattatcttctttagttttctctatgtatacttgtggtctatgttttatttggtgttcaaggatagatgtaaagatatcttgtaaactttgacagatatctgaagaaagcaccggaagccctcctgtagatgaaattagcattgaagaagaaagcaattggatatatgctcaacttgcttcccaacttacagaatctgatggaacttttgatgggcagagtttctcggataataacgatgacatataaaaactttcggagctacatcatgtgcagaaattagaggtttttgattcattctctcgttggattttctttgattcattgattagcttgctaatgttttctgtctcttctagataccgtttatagctatgtaccgaaaggagcaatgccggagcttgttggacactggtgattttgatggcgccaatcaaggcaagaaacctgagaccaagtggcataaggtaagcaattatcttggataaacaacaagtgctcaggttaacatttattgtcagaggaaatttggtggattctatactattttccaatgcaggtcttctggatgattcatgacttggataagaagtggctccttcttcgaaaaaggaaaatggcgttgcatggttactatacaaaacgttacgaagaagagtctaggagggtctatgatgaaacaagacttaatctaaatcagtatctttttgaatcagtcattaagtctcttaaagttgcagaaacagaaagagaagttgatgatgtagattccaagttcaacttgcattttcctccgggtgaaattggtgttgatgaagggcagtataagaggccgaaaaggaatccaat

SEQ ID NO: 36597 - DNA, 2080 bp, Arabidopsis thaliana landsberg
ataatccgaatccaaccatgttgtaaaactaaacaagacaaatactgatcaatatttcatttaattaagactttttttataagaatgtgatagcgcataacgtgaaaacaataaatgtactataaaaagaagtaatcaactaaacccattaaatgaacgaaagaacgaccaacgtgggcagtcgaactcgaggaaaatgttctctaaaaccaattgatgtatttgtgttgaccatcaactacactcacgtaagcattcaatattgtggccctaacaacgaactatatttagaaatgccctaaagctatggcttgttttactttataagagggtcggacctataatacacatatcaaaaaagttaatgtacaccaaaagagcaatatttatcatttatcaatcaattttactttatcagattgcagaacctttgccacagctgatatatagatcaatatataggcacagcttaacgagtcagatataattaaagactagatagtagagagatatattaccctatccaaatactgtacatttggaactaaatatgtaatgccgcgtgatcttctcaataataatctctatgtggataccataatactacaaacttttgtccatttttgttagagaaaataaaaacttttgtccatttcccactttggatcgacataggaaatttccttttcagaaaaggacaaaagaaaaaaaattgtgaataaggtgtgaagtccaatcccatgataccgttgggtaagcatagaagacaaaaaatcataaatctccattttgttttgatataatcgggtactcttatagtaataatcgaaaaaacgagtacttgaccatcaaaatttatcacaatccatgtccttaattatttagactattataattcctttcttctatttataaattattattatgacacatacttaacaaaaacattaagcgaatctacgattaattaattatcaattgtatacgtacgaatacgatctatggactttctattatgattttctttttgagatcaagtttagagcagaaagaaaacatgctaattaggaaccaagaaaacattatgattgttcttttggacataatttacatgtcaaaggtccgcatgagcttgtaattaattatcataacccgaagatgatagagattatgcacgtttcatccggatgaggaataaacatttattggcatcatattttcttcaccaatatctctcttttgcttcttttcaaatcagggtacttgcacaaaacctttattctttatctaacgcatttaattagcggcagatctattatttgtactgtgttttgaatattcaagatcacatttaaagaaaagaataggtgcacgagactaattacgaaaggatgatatgaaaatgaatcttgcattacgagatagattaggtacattacttcactctaagaaattgactcaaagttttcttctaccatcctatatcccaaaacattacttacaaatgcaaagaaacaacttccattttacggcgttttctggccgataagtctagtgaattatgtgacgattgtaagatatatgaagtaagttaggttgatctcataactgttatagatctctattaatcacttcgtttatttagcttaatctcattatatttgttattcaaatatgttgcatctctatatgttttcttctctattatcaaaacagttttatgtccttctaccatattatttccattttggttagtgaagtattgattttctctactaagaagaatacaaataaatcaacccggcaatagactaattaacgtactgttacgtctacgaaatagatattcatagaagtctctatccgcatgatacgagagataaccttttactcacatatcatcgcctacaatgcaataaaatagtaacaaagagaaaaaaatttctaattaaaaattgatgagctttgcgatggtacgactctccttttgctttttatctattcaatttacgaatctatgcacaatctccgaagatttaatagtacctggtgcaacctggcactagctatgttccaatat

SEQ ID NO: 36598 - DNA, 2019 bp, Arabidopsis thaliana landsberg
atatgccatagctaaccaaatttgtatctggccaaatcaattcccccacagaacattagcaatcataccaattccaaaaccaaaaaaacagtacctaaactctggtgttatcaaccaacctcaccaccaaagagtgttggccttgggataatcgtaagagctccttcaagaaactctatcgctcgtccatacattcctttaccataagccttttgacctagttcaaacatcaattctgcagtttttctcctctctgcttgctcctgagctacctgctctcaccaatctctttcataagcacatcaaactcttataacctcaccaataacttacactttcgtagacaacctaagagtgttcaccaagctaagctaaagtaatctaagagtgttctttacacacaaatagagattgctaaggccaaaaaaaaaacctaactagagaaagagccctcaaaaactcaccttttggagttctctcttcactctcatcctcttcttctcctctgaatcgtctccttcttcatcaatcttatactgtaactcctctgctttcctctcaagctccttcgtatcatgaaattccttagctctcctcttcctctccttctccacatcgaaatattcctcctcctcctcctcgtcaccaccaccaccgcctccgtcactactttcttcgtcgctggatcccgcgtcgtcgaaatcgacggcgttagctctggaattcgcttttccgcgagttaaaaaccggcgaacccgagcttcgccgtcagattcaagaggcttattggaagagagagcagcgtaatgagaaacgtgactgtgcgaatctctcttttgtaaattcaaaacgacgtcgaccaccgttaaacgaattctccgatcagttaccaccgtacggtgagagttaacgtcaagtaacaacgccacgtttccaataaccgccgccattagagagccaccacaatccaaaacagaggaacaagtagaaccagagaatcaaaagatagaagaagagagattttctatttctttatttgactcaaataccctcaattttatcgctgaaatggggaaacgtgtaaggctatttccgtctttagccaagataatcatgtcagtctttgttcgagacgcgtgtacgaaaagcaagagatacgcgcgtctcacgtttactcgaaaaaaaaacgatgtcgtttaaaaagttatgacgtttttacgattaggaaacaaacaacaagacgttttagaagtaaccaaacgtcacccactctaattcgattttactggacgacgagacgaaacactgaacaagaaaggtacaagctttgatcatacttcaccgatgggtgaaaaaatcgaaagatgataactttagggttttttcaaactcgaatcattcaaacgaacatagaagaagaagatcaatttcatgttcttcgtataacaaaaccaaaagaaacagaaactcacaatacaaaagataagatcttggtgaaaatccaagtgtagataacggcgagtgtagcaccaacgggaatggtgacaagccacgaagcaacgatctctctcacagtctcagctctcacactattaagccctctagcgaaaccaacacccatcacagcaccaacaagtgtatgagtcgcagaaatcggaagccctaatttcgaagcaaacaaaacaaccgacgcggcggcgaattccgcagcgaatcctcttgttggtgttagctcagtgatcttcttccctatcgttgcgatgactctgtatccccacattgtgagaccagcaacgattccgaatcctccccaagcgagaacatccattgggataacgatctcggctcctcctgcagctgctccgttttggagaatgcttaatgcggcggctaatggtccgattgcgttggagacgtcgttgcctccgtgagcgaatgacatgaagcaagcggagaggacttgcatatagccaaagattccgtagactatttcgagttgtgtacctgttggtcctgcga

SEQ ID NO: 36599 - DNA, 1427 bp, Arabidopsis thaliana landsberg
tcaatactctccgcacaagtgttgatgaatctctgtagtaattgctatggcatttaaatgcaggataggagatgtggtgcatagggtggtccatttttgtgacttggggatgtctgatacaagtcccaatatacaagaatgttgcgtatttagtatacagccattcagagtccattatcatttatcaaaacggagaacaaaggttacgaagctcacaccatcacgagagaaagagagaaattaaaactttactctagccagacgtaaatgacgttggatttggcccatgactctcagtttgggctacaaatcagaaagcccattgataacatacgaataaaaatcccagtttttcaaaattgtgatagaagcaacatacatagatgaaaaacgtctcttatgagacaacaaaagactttcataaatcatatgtgaaaatcacttttccagagattattagcctctggtgtctatcgtatcgttgtgcataaagattattcatatctgatatctctaagaattgacaatttgatcctataaactccctaatatagcaaacttctacaatatcttactaaagattatcacatgaccaaccctaatttactctttctctctcatttttttcacaacatagcccaaatatggaacctaagattgactcgttttatctctctctctctctcctctctctgcttcaaaggttaataaaaacatggaaaactgagataggaagcaatggccaataccttatccctaccattcggagatttgccaccaaacgaataacaatcttaatgatctatccaatggagaatcgtccactccttagggggctaatcaagaattcgattttccaattccatagctttttcaattctcctaatttcgtcaaatgtgactgagaatttgaataacaaacactgattgtgtacacaaacaatgtcgatatttccttctttccaattgctagagctcaacataatctctgctcaagatctagctcctgtctcacgtaaaatgaagacctacgcggtggcttgggttcactctgaacgcaaactcaccacccgcgtagattacaccggtggtgcaaacccaacttggaacgacaagtttgtcttccgagttagcgaggatttcctctacgccgatacttcagccgtcgtggttgaaatctacgctttacattggttccgtgatgttcacgttggcacaatccgtgtcctcattagcaacttaatccctccaaatcgccgacctggataccgaagcaacgaggagtaccgtcgtacaccccctcccggaatgcgattcgtcgcacttcaagttcgtagaccatcaggtcgtcctcaagaattttaaacatcggtgtgggaatactggacggatcaatgcgtagcatgccaatttacaccaatatggac

SEQ ID NO: 36600 - DNA, 1464 bp, Arabidopsis thaliana landsberg
taatccctcgaaggttcactgataatgagagaggactcagaggaggatcacattcaaaaggctctgatactaactctcggggttggggtgataggcgttctgttgtatatacaagagatatggatgattggagagagaggaataaaaccaaggatactagggagactggcttttttagccggaaaacttttgcagaaattggatgtagtgaagatatgatgaaggccttaaaggaacagaattttgatcgcccggcacatattcaggttcagactttattttcacacttgataaatcatctaggtgcatgtgtatgtatacaaatcttcttactgttatcgtgctaccattcttgtttgtttgacgcaggctatggctttttcaccagttattgatggaaagagttgtatcatagctgaccaaagtggatcaggcaagacactggcatatcttgtccctgttattcagcgtctcagggaagaagagcttcaaggacacagcaaatcgtctcctgggtgtcctcgtgtcattgttctggtaccaactgcagagttggcttctcaggttcatttctttttatatgtgaatgatcttcctaggttgattcattggttattgatgtgaatgtatttagctgaagacaattgtttggtacatatgaaatacttggcaggttcttgctaactgtagatcaatatcaaagtctggggtcccgttccgttcgatggtagtgacgggtggcttcagacaacgaacccagctagaaaatttagagcaaggtgttgacgttttgattgcaacaccagggcgtttcacgtacctaatgaacgaaggaattttggggttgtcaaatttaagatggtactttaaatcttttaacaaagcaaactttcccctttgatttgacgagatgaaagactttcaccaacttttgtgtgaaaattgattgggtacaatcttggttacgtgttttgcagtgccatcttggatgaggtggatatactctttggcgacgatgagtttgaggcagccctgcaaaatttgataaactcttctcctgttactgcacagtatctatttgttacagcaaccttgccacttgaaatatacaacaaacttgttgaagttttccctgattgtgaagttgtaatgggacctcgagtgcaccgtgttagtaatgctctcgaagaggttggtattaacataagtgattggaaatatataatgggatcaacaacagtagcagaatttttgttttgctaacttggttgctgaataatcttctttgactcgtccctgaccaatgttgagttgcactgtgcagtttcttgttgactgtagtggagatgataatgcagagaaaactcctgagactgcatttcagaacaagaaaactgctctccttcagataatggaggaaaaccctgtttccaaaactattatcttctgcaataaggtaccatg

SEQ ID NO: 36601 - DNA, 963 bp, Arabidopsis thaliana landsberg
ttagggagtgagttggtgaaagagaataatacactttttaggtaattcgttatgttgagaccgagttggaagaaaattcaaaaagagtgttgtttcaattacctttgtgggttgatgcctctttccgagaatatgttgatggctcgattgatcaccactgatgcatggttctgaactactttaaatggataacctgcaaacctggctatctccactgtgaagttcatgtcgaggatcaactgcaacacgtgacaacaaaacttcaactttcaaccccaatcttctcaagaaatgaacttcaacatcaagtttcaattgtttcccatttcaaattttcaatctttgactgctgagcctgagatcagagaatagctgaggtatataagagtggtgaaagagagtgtttctacctgttgcaatccagatggctgaagtggatttgactcgtcctcaaatgcactccaaaactcctgctcgtttgatagccagattataaccgtctctgttaatctcgctagtagaatcttttgcagcttctctttaccaagcagaacatccccagcaattatggccaactgttgtagcttagaaaacaatgcctgcataagaacagacacagatgattctgtgtgctaaaacttataaactgggaactataaaactagatcaaagaagagggcgagacctgaaacggtaaagacggcagatgcaagtcatctggtgtttcggttaaataaatgagtgcgtctaatcgcgttagtccttccctagagtagatgaagctcaagacaaactgcagacagaagtagtttctgagtttgtcaaatgcttgaaccatatggcgtttccattctttcagttccggtgcagcactactgtttagagcggcacaaatctcaccttctcctccgccattttcaatctggagtttccagacgtttaacaagtgaacatatggtaaac

SEQ ID NO: 36602 - DNA, 5365 bp, Arabidopsis thaliana landsberg
tacaactacaagagtcagtactccctcgattagatgtctccacacatattaatagactaaaaatgaccaaaaataattcaacctccaagatacataatgtattttaaaattcacttttttcatgttaatagtaacagctattagaaatataaatggtaaaatatctaaaacatctacaattaaaaactaacaaatttaaatgaatcatgatatgttgttaatttcacatgctccatcattttaaataccactttattaatatttaatgttttgctgaccactagtatcaaagattatggaataaataattgagaaatacaaaaagaagtaattaatgaaaaaccaaaaatcaagggacctgacattttcaacacgcggaaataagaaaaataaaaaggtaataaatggctttcgagtacatatgtttggtttttaactaaagaccagtctcttctcgtgttcctaaagcttcgaaataattccatctgctgtttttattcgcctgcactcttcttgtcctgcagtctcaaattacacatttttttttaatcggattttttttgggtattagtgaagaagaaaacatcaaccaaacaaagaggcaataaaaaagaagaaaactcactcacaacgatgcagaaagcgacaaaggcaaaaggcagaggagagaaagtaaaagggtgaaaaaaaaaactaaagaagaagaagaagaaagatcagatttttcttttaattttgggtggattgtttccttttcctttgcttgattgcttcgaattggaataagtctgaagaatttcgaggcggccatggctgtcggctttctctttttctcttcttctttctctgattctcaaaggtctcttctttatccctctctgtttcttgatcttccttattacttcaattgggtttgtgattcgatctgattttagggttttgaattgtttaatttgtcaatttcgattctgaaatttcgagcttttttggttactgtacttagttagaatccccaaagttctcgactttctcgcggattcactttttcttgagggggggtgagttcttaaagttgaaatgctgaaattattgtcactgttctttctcgaaatatgttcaatgatttttgagttctcggcgttagtttttaggaattggatacatcaagattttgatcatataatgttctgttatattttgcattatgtgaatatttcttatctgtttctgttatgtttgatccaaatcttaatatcattattgtctctgatgtcattttgaagatcattgagaagttatgaagaacagcgagattaggcctgagaagttgcatttacgtaaactaagaaaaagtttgaggaagatcagaatgaagtgtttgtgttctggtgaacaaatgaggcatagagaagaagaagacaagaaatctgaggttggagttggtagagactacaatggaagctcagctttatcgaccgcagaaagcgagaatgctaagaaactagataatggaaatatcgaagaagccgagttatctctgcgtgagacgagttcattgaactacgaggtttgatttcttggtcactcttgagctttgtttgattggacaagcttagccattgtgttgttgtttcaggaggcgagagcgcttttgggaagaattgagtatcagaaaggaaatatagaggcggcattgcgagtctctgagggatagatatcaatggtatcacagtaaagatgaaaaccgctctaaccgttagagaagaccggaaacatagaagacggtctaaaggcggcttttctactgctccttcacctgccatgtctaaacatgctgttagtttacttttcgaagctatttttctcaaagccaagtctctccagcgtcttggaaggtatccaaggtagtaacaggcatttctcttaatccgtgtttggttttgtttttggctaaacagaaatatcatgtgcttcttcttgcagaagctgccgaagtcttgcaaagttattcttgatataggcgagacttctttagcagaaggtgcgtcggataatgtgactggagatattaagttgcaggagacactgacaaaagcgtgagagctgcttcctgagatgaggaagcttgctgattcacctcgtgatgctattttgtcgtatataagagcgcttctcaatcactggaaactcgatccagaaaccacggcgaggatacagaaagagtacgcagtgtttctcctctattccggggaagaagcagtgccgacaaacctacgttctcagactgagggctcattcattccgaggaacaatgtggaagaagctattcttcttctgatgttacttctcaggaaagttaatctgaaaagaatctcatgggatgcggcaatcttggaccatctctcgttcgctcttacaatcgcaggcgatctaaccgctctggctaagcagtttgaagagcttagtcctgagctcttggatcagagggaactttatcatacattgtctttgtgttaccaaggtgcaggagaaggtcttgttgcgttaggtttactgaggaagctattttcagaacgagaggatccaaacaggacttcgggtttgctgatggcttccaaaatatgcggtgagaggtctggtcttgctgaggaagggttagattatgcccggaaagctatcggaaacttggggaaggaatgcagtcaattagatggagcagcgcgtttcgttttagggatcacgctcacggaaagctctagaatggctgttacagagactgagaggatagctaggcaatccgaggggattcaggccctggaatctgcagatatgacaaacccgagggttgtgcaccgtcttgcgttggagaatgcagaacagaggaaactggattctgcattagcatatgctaaagaggcgttgaaacttggagcagagtctgatcttgaagtatggttacttttggctcgggttttatctgcacagaagcggttttcagacgcggagaccattgtggatgcagcgcttaacgagacagggaaatgggaacaggggaagctgttacgtttgaaggcaaagcttcgtttagctaaaggagaagtgaaagatgcgattaagacttacacacaacttctagcactccttcaggttcaaagcaaaagcttcaattctgcaaagaagctgcctaaggtaacattttcgtatgttctgatttctctaccaaagttgtgagttgtgcagaattaacactgaaacagatttattcattacagggatatgtaaaggaattgatgagtctggagcttgggacgtggcacgatctggctcatatttacataaacctctcgcaatggcgtgacgcagagtcatgtctctcgagatcaagactcattgcaccttactcttctgttagataccacattgaaggtattaccttcttctctacttccatttagacttggagtgtttgtttgtctttttgaaacaagcaaggcggtaatattgatagcttattcgtaccgattggcaggtgtactgtacaatagacgggggcaattagaagaagcaatggaggcgttcacaaccgctcttgacatagatccgatgcacgtcccaagcttaacatcgaaggctgagatactgctggaggtcggtaaccgatcaggcatagcggttgttagaagctttctaatggaggctcttaggattgataggctgaaccactcggcttggtacaatcttggaaagatgttcaaagctgaagggtccgtctcgtcgatgcaagaagccgttgagtgttttcaagccgccgttactttggaggaaacaatgccagtggagccattcagatgattttgccctctcaaatcatattttttttgtctttggttatgatttctccttttctgattctttttttttttgtgtttgtttttgatagatgaatataagaagatataaagatgtatgtgtacgagtatatcatttgatgtcaagtttataaacattttgtaatacacagttaaacaaaaattaatataggttttggtgaggtaaattttataagccaggtttactatttactcataaaagattataaatttttcggagaaaacttttcaggtttgatattctaaaaaagattaacataagaaatctgtagctgtaaaactaatgatgagttaagcatttagattacactgaatgatgaagattctcccaaactaactttttatttttgttttgtttcttccttggggatctgttgtttgtctacacagctgagttgagagtcttccatcagaaaaatagttaaacagtaaagagagaagtcctgaagaacctcaagataagagctcgttctctctatcactgttaactctgaaactccgagattatccagcaaaagaccaatactttcaattatcgattttgggacgctttggctgtggagattctagttcctcacatttcctggtttcttcttctggaacctccttcgaatcagcagtcttcttgtcttcttgttcagatttggctgcggaatctgatgttgaggctgtccctttggtaagaccagagttttgcttctcgaacatcatttgcaggtacttgccttgttcttctattcggagttgcaggtttctttgaatctgcaggcaaaggaaaagaacacatgtcatacccaaattcagaatactttataaacaggtttcacattttctctttagcagctacaatccaaacacataagtataaaaaaccaaagctaatggcaatgcctttatgaacatacctcgagctgctcatggagttgcttctgtacttccatctgaagtcgtagagcctctgtaatacctatcccactgcagtataaatatgtatgaggtaagaatcagttaaaaatggtgtagcgtgtagcattgtgatgttaaccgacaagaaaaccttaccctttcaaatcaagagatgttatatgttcaagcggtgtcaacttcctttctggcgaacctgtagtgatcaaagaaactttagtttttacattgaattcttcaggtaaaatcatcaaggaagatgggaatgagttcggtatttaccagtttctgatggttctggccgatatctagctgtcctatatttctgaaaaacacaatctaatattagaagacaattatatgcattagcagggaactaaagaatagtaagaacctgtaaatggcttttaacatgatatatagtcaagccttcaactttcataatcttcagtacccctttaggagtagctcctgagtaaaatatccagaaaaagttattatctttccataatacaattcaaagtttatggaaagcaaagagaaataaatgt

SEQ ID NO: 36603 - DNA, 1054 bp, Arabidopsis thaliana landsberg
  unsure (1)..(1054): unsure at all n locations
gaattgtgtaccgtttgtgttttgtagatctaggttttttttggggaggagaatgcaaaggtagatgatggatagtggtaataataatatgaatagagccaagaggaatttggatgggaacgatgatgatcagcctgagcgaaaacgccctgcttttgctaggtaattcactagttcttcttactgaaaatatatacaactgtttctacaaaaatctctgactttggttatcttttggtttgcaccagtgtgattgttgaggctctgaaagtagatagtttgcagaagctttgctcctctttggaacctattctccgccgagttgtaagttctctctcttgcttttgttgagctcaatctttgcctggttcttgtgcttgcagtggtatgcatgaaacgtttgcgtaaatattagctgtcctttgtttcaagccttaatatgggattgttgctgagcaggtcagcgaggaactggaacgtgctttagcaaaactaggccctgctaggcttactggaaggtagaatacaaatttctcattatatatcttaatggatcgtgacgttagataatggtttcctgaggtttattattcctttgcagttcgggctcttctccaaagcgaattgaaggtccggatggtcggaagttacagttgcacttcaaatctaggttatctctcccgttattcactggggggaaagtagaaggagagcaaggtgctgtgattcatgttgtcttgattgatgcaaacactggccgtgctgtggtatatggtccagaggcttcggcaaagcttcacattgttgtgcttgagggtgactttaacactgaagatgatgaagactggacacaagaagaatttgaaagccatgttgtaaaagnnnnnnnnnnnnnnnnnnnnnnnnnnnnnnnnnnngtgtatgttccactcaaggaaggggttggaactttgggggggttagttttcacgcataattaaagttgcccccgccgcggaagttccgncttggtttacaagtggtatatgggtgttgtntggcatgggtatccgta

SEQ ID NO: 36604 - DNA, 1681 bp, Arabidopsis thaliana landsberg
aaagataaccagaaagaaaaaacacaaaaaatgaagtaacaatgataaagtttaataaaaaaatcaatgataattatttaagaacactaataagaaatataaggagcataaatatgaggttgctccatattttaattaatctatttatacaacttttccctgaaaaacgcctaattttcttctttttaaaattttgttcaccgaaataaatctttcggagaatacccaaccaccaacacgtacatctctctccaagaaatggtcaaacgacgccgtgttacatgtttctatcaatcggatgtgtgttattgacacgacacgacaccgtttcgttttcgggttttggcataagtggtgggccccttttgagaacattctgaaaaagaatcaatagaagggaggcggcggaggagaagcgtatgatattccgggaatcggcggtagtggcccttcgtagattggaggtggtggtggttggctgtggtgtattaccggtggaggtggtgggctgtagtggacagccggtggaggttgaggtgaattgtagtagtaaactggtggtgaaggcggacgactgtagtgctccggtgatggtggttgtggaggattgtaattgactgttggaggtggaagtggggagtaatcctatgcacggtgaatgtgattttgcggaggggagttattggtgttgatgaatttggtggggatatatagtgataagtaggggttggtggtggtaatcagcaatgtgacgacgacggtgctggtggtaacctgtagtagtaaggggctggtggtgtggggatgcaaattgagccggtggcggctagtaaggtatagggtaaggagggggagtcccgtaaattggagattgcgggggttgtgatggagatggttgcggtggatagtatgtttgcggcggaggaggtggcggtggcgggaagggagaatatgtctgaggcggtggtggaggtattgatggggaaggtgagaaagttgggggaggaggaggtggtggggatggaggagagtaccctgtagacggcgggggaggagagtaccctgtaaacggcgggggaggagggtaccctgtagacggcgggggaggagagtaaaccggagtaggtgttgacggcggaggagacgatggagtcgggcctacaatgggaggactaggaataacaggcggtaaaggaggactaggtgacgacggcggagaagggccggtgaacggtggactaggaataataggcggtgaattttgaccaggtgatatcggagttggcggagttgatggcgtaggaggactaggaataggagagctcggagttggactagatggcgaaggaggagaaccaggagatgttggggttgacggaggagacgggacagtgatcggaggactaggagaaatagacggtgaaggaggataaccaccgggagaaggtgttgtcggcgatgatggaggagaaccaccaggagtaggtgtcgtcggcgatgatggaggagaaccaccaggagttggtgtcgtcggcgatgatggaggagaaccaccaggagttggtgtcgtcggcgatgatggaggagaaccaccaggagtaggtgtcgtcggcgatgtaggaggagaaccaggagatggcgtagttgaaggaggagacgggacaatagacggtgaaggagg

SEQ ID NO: 36605 - DNA, 1143 bp, Arabidopsis thaliana landsberg
  unsure (1)..(1143): unsure at all n locations
caggattgctttatccctgatgtggatatgattatccctgaaactgacagtttcttcttccaagagcaaccgcaacatcagccattgtatcccgacgaagctctttcaccgtctctcttcgggtttgatcactatgatcatttctacgagtcgtttcttacacctcaagaaatctttcttcctagccctaagaccagagtcttcaacgagtcacaggaattagattccttccacccgccaaaacaccagaaactcattgactccagcttccattttaacagtcacgaccctgagtcacaggaattagattccttccacacgccaaaacaccagaaactcattgactccagctcccatttcaacagtcacgaccctttttcccctagccttaattctaattacctattggattcttacatcacagaagctactaacatttccgagtttagagctcctgatttctcatcgtcgttcaaggttgggtggactgaacaaggcgataccaagaagcgagagctatctgctcagagcatcgcagcacgaaaaaggagaagaagaatcacagagaagactcaagagctcggaagccagaaacataacactgccgaaatgttcaatgccgcagctaaatatgtcaagttcttgcaggctcaaattgagattctccaactgaagcagaccaaaatgcaggtataagataaaccgtaaatccaaatggttccatgcagaaattttccttcctttttttatacgatacttgtttaaattttgcaaactatgaatagttcaaaggnnnnnnnnnnnnnnnnnnnnnnnnnngcttctcaagaaatccagaagaagctatctacataaaaagtgtgtgtggttccaaggaaaatggttcaagtcctaaaagccgaagaatgcatcttgacaaaccctaagatttctcaagacattaacaaattgttgtcaacaaatatgatgaattagatttgtctatgttatgtatgtttataaatttgttccttggtagtttcaatattagttagaggggaaccattagtaaattgtattaaaccctcccgtaaattggttggttttttaatcctaaagatgtntagtattgtgtttcatcaaaaagttcaattaataattttc

SEQ ID NO: 36606 - DNA, 2915 bp, Arabidopsis thaliana landsberg
aatctagaaaaaggcaacgaaagatcatcagcaagcagtagcactgagtttctagtaacggatatgaataacaagagaaaagacttacagctccagggccttgagtggaaggtccaccaataaaagccatgattctagcagcagagccaggaaagcaagctcctaagagactagcagcgatacggagagcaacaccagtgcatctcgcaggacggtgatcagctgcaacgggccagggactgtttcccagctcctcaagaacagagtgaagagtaaagtggcaatcagaggcaggtaacagaaaccgagcaatgtcgtcggaagagagaccatctctagcaccagcaatgacacctgaagaaggtttaggattcttgacgaagaaactcagctgatccaaaagctgatctttagtacagtctttgtttccatggaagaagtaagatttggtacagtgtgggaatccaagctcgtaaacacgaactaacgaatcaaacgtaatgagaccaaggatggaggtatcaggaagaagatcaagagcttggaagagagatgatttgaggaaatcgagttcttcagagatcaaacaagtatcaacaacgaagaggaaaacaggaggagaaggagaagagaaggaatcacagagatactcaacagttgtggaatgaggaaaaagctccggcgggagattgttatcggcgactgaagagtaatttagcgggaaaggattccgattgaagcagaaaggacaaccccaattacaagcggagaaatctacgacggagtaagggtttagaacggagcgacaagtccggcaacggagaggagagtaaggaaggagaagggattgagatctaagaggtttcagaggtgtgtaaatggcggaaactggaacttcggaatcgattgattgttcctttttcgttgcgacggggatgatgttccatggcattcttactccatcttgagcttcaagctctccaaactccgccatggttgactaacctctctagtaaacaacaaacaaatctgtaatctttcaatacttcgccaagacgcgcaccaaggtgttagatcaagatgcgtcaaacatatagtgtgggctataggcgtgttgccttgaaagtctatagcacgtcactgcgttgcaaacgatacattcattggtgagcaaaggttttagacagcaattttgtgtggactggcacccaaatccactcacattcacgcacagagagtcagacaacaagcaatgtaagcttgttagggacatacatcaacagacactgcgtcagtagtggcagaaatatgtgaccctgagcagtagtcgtggcagcaacacttgaaccttttctgcagggtttaggataatctgagcgtgtccagtccacggtcgactcgtctccagcttgtgcattgaatcataaggtttctagttatatacaaatgaatgtgatgatcactccggttttaccatgattgattagtaatgtaccttttccaggaacgattatgacaggagcagatttgcaattgtggaaacaatactcgcttacgctcccctgtagcacgctgcacaagtatccaaaagagaatcatcgacttaggaaaggcaaaagagaagaaaaacaagacatagatcacacaactagtagttgtttttgtattataagttataaccaaccttcttactaagctcctgcctcgtgtgcctacaatcacagcagcaggcttcactttctctgcttccttgcagattactttaccagcatcgccttcaacaacacgggccacactctttacctaaacataacaaaatcagtatcaagttatgtcatcgaattcaaagaatatatctataaagtgtgtaccaaactcatttttctgattattctcatctaaaatcatcacaatattgatttccaagaatacatacaccagaggttttgtctctacgcagttggtagcaaatgcgacaaatgaatagactagaactagtgtttggattcaagagaagaactaagcaacgatctcaattctaagaactagtagttgttaggaaatgctactaatgaaacatctgattgaattggattctcagaccctaacttagcaatcaagaaacaacattatcaggcaaaccaaaaagagataatacaatataaaggttaccatggcaacttgatacgcctcaacagcaagtttctccatgagggcttggctcgtctcatacacaacatcgttcttaacacctgcgaagaaaatcaaaaaccagctttagaatctccgattccagatctggaaatgcaaatgaacacgaaatcggactatatactattcacattgaagagagaacgaacttgagacggcgtggacaagatggagagtatcggcgagacgacagaaatgaacaagagcccaatcaaaagcgtgtttgctattgggaccatgatcaacggctacgataacatctcttcctcttctcctctctccgctctctctctcaagttccggctccggcactaccggaatcaaagacggcaacactacttccctgaaactgtactcttcatcctccggcaaagcctccatctccgagcaaacaaaaaaaggaacaaactttcaacggatttcgagatttcgacttgtgggttttgttgggtcttcgattttggtttctgggtcttcgcgggttggatgaatcgagatgattggttttgtatttgaaagaaagttgcgtgtagagaatttgatttttgatttgattttattttggagtcgtttggttgctttttgacgcatcattgaaatttttttcatgtgagcccacaattttctggtcgctgctttccagaagatattataaattgacacttcttttttcttggataaataagagagacactaaacgaaaa

SEQ ID NO: 36607 - DNA, 1706 bp, Arabidopsis thaliana landsberg
ttgaaccatctctaaacatatgttgatatatatacttccatagatttttttgtgtgttctatatatatactcgattttaggttcaacttcaacacatgaccttgtcattaaacaaattacataatagtcttaatacatcaagtaatcctgcgttcctaaattgtcattagtaagatgaagaactatataaacaaatgagaatcagaaatgggtaataatacaagagaagtaggtaatggatgtcacatgaaagttagcttagaaaagaaggcaagtagggtgagagatcggaagattttacgtgaacataaagcaaaagtagaagacgaggaacgctatgcaattttttcatcaaaacctctttacacgtttctctattaatcaaatcttatactactacttttattcgtttttcttaaaaagcatatattatagtatcatatcatctatacctgcgacatatatattcgatgtgcgcaggacctaaccacgaggagccgaggagggtctttgatggtaaatcttcaaaactaagtgactcgtcaaggcgacggagggaacaaatccccatgattctctaaaatgataatttttttcacttctcaatattatagactatagttctaaagaataaaagaataatgctttctaaatttcgattagcttaagggtcatttaagagttttcttatatttttgcattattcacatagaagtgcaggtattgtacttgagtggtataataattgtttgtcaaacaggtgcgagaaaatgactttccatgaaaatggcagtcatggaaataataagaaagatataaatgtagataggttaagggggggtggggggggggagagatttggagtctataataagaactttattgaccaaaagtgactcttcttcccataaaataaggattgcaattgcagttgccaacaccacaacactactccttattttgggcctttatttttccaacttccaagcatttagccttctttacttctttttgacctattttcttttgttccttgttggtcatgttgtaactcttagctttatgcgttcagttccttgatttggtttggtttaagcattttgggttcttttcacttttgagaaatgagtcggagttagaaaaccacattttattttggttttggtttggatataatcgtataatcatataaatataagtattcttgcatataattaactaaaatatgatttttaaaaaatatgatttattataaaagtttagtttcgactttgatgttcggtattgtttgtttttttcgccatttctagtaaatagtaataatatagttgtgctacaaattgtagcctacaatgtacaattgtatgtaagaaatagttggcacatacatcaaagtatcaattatcatacatccacttactagtgctattgtgaagataaacgtttagaaaaacacatacaagggtacttagaaatgaggcataaaagataaaatctgattttcaatgcaggaacagctcatggtcagaggaaattaaatggtgaaagagagatagagaagtgcttaaaacatggtgttatttgtggtggagcctttcgaattataggtttagggtccatacaaatttgttgggtccaaaattaactaactagtttttacttcttagaagcaccacatgattgttccctttgctgcaacaccaaac

SEQ ID NO: 36608 - DNA, 3226 bp, Arabidopsis thaliana landsberg
  unsure (1)..(3226): unsure at all n locations
tttctgttctttcatactggttatcaacgtacgtatgggatttcatcagtttcttatttccgtcaacatttgcaataatccttttctacgcttttggtaagttagtttttgatttccatttgcatttggacttctaattcactgtactttgctagtttgctataaacttactgaaatgattgatttctttccttaggtctggaacaatttatcggaataggtcggtttcttccgactgtccttatgctcctggagtatggcttggcaattgcatcatcaacgtactgtcttacatttttcttcaccgagcatagcatggctcaggcaacttctagctactctgtgcttttacccatatcgttatttgttttttctttttcctcagttacttcatactgttagatgatctttactgatggatagatgactttgttgtaatcgcagaatgttattcttatggtccacttcttctctggtcttatccttatggttatctcatttgtcatgggccttattccagcgactgctagtgcaaattcatatctaaaggtgtggaatcttctgattttctgacctcggtgagccttgaaaagactaggaactgattctttttcgttatgctttacagaacttcttcagattatcaccaggattttgcttctctgatggattggcttcattagcgcttctaaggcaggggatgaaagacaaatctagtcatggggtgtttgaatggaacgtcactggagcgtccatctgttacctgggtttggagggtagagtcttccctgttcttcacctttttttgttcctactcctttgaaaacctgagaaatagatccaccattaagtgtcaatgattttcatatttgtgaatttaaaagttggaatattgtcgctactctatgctactattgtcattttttcatgggatagacacaaaattatcgttaatatatactataggggcatctcgtctgactgaactcatatatgacagagtatattctacttccttgtgacgcttgggcttgagctcatgcctgtccaaaaagtgatgtcgttctcaattggggagtggtggcagaatttgaaggctttcaagcaaggtgctggttctagttctacagagccacttctcaaggattcgactggagccatttccactgatatggaagatgacatagacgtgcaagaggaaagagacagggtgatttcggggttgtcagacaacacgatgctctacttacagaacctgaggaaggtattgaagcctgctctttttacccaagcgttaacagagattctcctctctttttatcctaaaatactactgttcaggtctatcctggtgacaaacatcacggcccaaaagtagctgtacagtctttgactttctcagtccaagcaggagaatgttttggctttctagggacgaatggagctgggaagactactaccttgtctatgttatctggtatgttgtgcgtctttggtatttggaaactattccgagctgttatcttaaatactttgtaacccccaaataaacaacttcaacttctgaagcaatagcgttgactattctcacttctttgggtgtaacaggagaagaaactccaactagtggaactgccttcatctttggcaaagacatagtagcgagtcccaaagctattcgtcagcatgtatgtcaattcattgactttaccaattcattgaatcaacattgaatgtttaaagaaatattttgtttcctactcagattggctactgcccccagttcgatgctttattcgagtatttgactgtgaaggagcgccttgaactttatgcaaggatcaaaggagtagttgatcatagaattgataatgtaagtggtacgtttaatgcttgcttacacgccttaatgagttctgtgattcccctatagaagtataggtgtttggctaagttaaatacctacataacatttgaacaaatcatctttctctaccgtctaggataaattaaaaatatattcaaaatcacaaccttactattaggcataaatctaactagtggaagttcctaattggacattgtctgatatgtgttatctgataacaggtggttacggaaaagttagtcgagtttgacttgttgaaacattctcacaagccatcgttcactcttagtggcggaaacaagcgcaaactatccgttgctattgcaatgattggagatcctcctattgtcatcctcgatgaaccatctacaggtataacccaatcaagattttggttgacttgcctgaccagtttgactttaaaatcactaacgaagacttcatctctgttctacactagttcttagctactgggtaaagttttttgtgtttttgtttttaatgcttcaggtatggatcctgttgccaaaagattcatgtgggatgtgatatcccgcttgtcgacaaggagtggaaagacagcggtcattctgactactcatagcatgaatgaagctcaagcactttgcactaggatcgggatcatggtattttcttaactcattttgaactccttagggcgttagttccttaaatctttccacctcacagaaccatactcctcaaactacaggtaggaggccgcctaagatgcataggtagtccacaacacttaaagacacgctacggaaaccacctagagttagaggtacctttttacaatggtgttttgtttcaatggtaggaaggatcatttctcaaagcttgtgcgtaatgttggctggggtaccaattaggtcaaacccaatgaagtcagcaatgtggaattggagaacttttgccaaataattcagcagtggctgtttaacgttcctacgcagcctagaagtttactgggtgatctcgaagtttgtataggtgtctctgactcgattactcctgatacggcttcagcatcagaaatcagtttgtcaccagaaatggtacagaggattgccaagtttcttggtaatgagcagagagtgagtactctggtacctccattgcctgaggaagatgtgcgattcgnnnnnnnnnnnnnnnnnnnnntgtttcgagatggtaggagcacacatgtcacatacttttttagatttgccttatttcacgacttgtagcataaatatatgttttatccgtttgatgctgaacaggtggtattccacttccaatatttgccgagtggtggctaaccaaaga

SEQ ID NO: 36609 - DNA, 3526 bp, Arabidopsis thaliana landsberg
catgtcgacccgatccgcgcatacgcttttgccaatgtgtttaacgttactacatcaggttttaccccataagattgcatcttataaacaatgttccatgcttcttcaatcttcctctggttacaccaagcctggacaagtatgttacatgttctgtcatttggttggagcatctcatcccgtaacatcatatccaggagtcttgatgattcctccagcttaccaattttgccataccctttgatgagagtattaaatgtacttgctgtgggtttacatccactttccttcattttttcgaaaatcttcattgcttgatcgagatttccagactcggaagaggcgttgatgatggcgttgaagagaatggtgtcaggtttaaggccgtttttctcgactttggagatgagggagaggagagagtggaagtgcttttgacgggtcaatgcagttacaagcgtggtgtatgtgatgaggcttggcttgtggccttcctcaataagtgtgttgaaaatggaatgagcttcttgaggcctccctctttctatcaagccgttcatcagtttggtccttgaacgaacatcaccacaagtagtaccacctgaacatatcacacaaggaaatgacctcagttgcactctcccttcctgtgaagcaaaggcgtacgttatctcaaacatgttttcatattaggatcaaagactttgatattattgaatccaatgctctatgcctaaaaggttcggttaatctaggtgattatttccagctactaaatccttcaactcaatcatcaaacagatctcagaatagataaaatgactcacttcagaatctttgaaaacagcttccacatcagccaaatttgcttctttcttctcttcaaatacagctggcttgtaatctttcttgaaccacacatcttccaaaatctctggaattgttatacgctggcatgttaacacagtgaattagttccacttttgaaatcaaggacgagtagcgttggcgtttatttatccgcagatgttctgagtgatattcaaattctacatgcaagacacagataaagcatccactttgtatgactctaacatgcgcttatccacgggactaacaattacaggaggggtatacaactttttaacatttttgaaaagtgataatctattacgagtagctcatttcaggaatggaaaggaaaggaaagagtcagcaagaattgcagagtttatgattcccaattatgatttctgatctgtccattacttggaacgattaaatttacacttagagattagaccaacactatatgaatgccactatgtctatgttgaatgatctcttcaaattttccattagcgctcaggcataaaatttccaccagattcctagtaacccctaacccgcctaatgatcttagaaagaaaaaaaaaaagcaaattgagattgtggggctccacagaagaaaacaaaagaaagataaatttaaatcttgagtagtaaaacgaaatgtcttacagtcatagggtttggatccaagattcggacgatcaaattcttaacaccagaagagagccaaggaggacaactaaaatcagcagatgagatctgaaaataaaaatgcaacttagaaacaggaatcacagatgatagtgagaagaagcctggagatatatattacaaacttcttacctttttgtacagcgtcgtgagactagaatcctcgaaaggcaaatacccagcaagtagtacaaagagtatcactccacaggaccacaagtctgcctttgccccatcatagccttgatcattaagaaccttgggacaaaggcaacaaggaagctattaaagacatggttcgacaaccgcataacaagccacatgactaagaatacctcaggagcagcataatttggatttccacatgcagtgtgacgaaggccatctccctgccaaaatcaagtaattctgataaggtgagaatctagaaagatcagtgttacggaccttgttaaatttttgtgaatataatcactgatatcatcattactgaacttcaggcacattcattagaataagacaaggacaactcagtaggaactcaggcaaacaaatgatgctaagaaaataaaattcagtagttaccccggcttgttgggacaaggcaatcaatccaaagtcagcgactttcaaattctcttgcgcatcaagaagcaaattttctggctgcattgagaaaataaagaagaaaaaaatttaggcactaactagctgcacttaaaagaacctacactgcaaacttggcctaagagttaccaaaaatgttccttgtacctttaagtctctgtggtacactcccctgctgtggcagtaatcaactgcattgataagctgctggaaatatctctgtgcttcgtcttcattcatgcgcccatcatttttcttcacaagtttaaatttaatggattggataaaagtcaaaataatatattatctaatctgtaagatacaggaacttcttagctgagcatggggcatttggttcatgattcaaataccaaaggatgcattagatacaagttaaagcccttgggaggtaaagggaaaactcacaatcttgtcaaaaagctttccaccactgatgaactctaggacaatatatatcttcgccttgctcgccaaaacctggaatgatatcaatcatttcattaaatgttagttttcaacatatttgcttagactccagggagctgttaatttctagttaatcaaaggaaaatagagacacgtagaaaaaaaattggggcatggaattagacctcataaagctgcactacatttggatggttgatcagcttcataatagaaatttctctctttatctgtaaaagcaaacgggaaagacccacatcatacttctggacagaagacggatctatctgtgaatctcgcttttagaaaccacgttttacttcaagaaatgtaacatgggcatatcaatggacaagaaaggaggcatgaaaaaactaaatgccgattaggaaagcgaattacttgttcagccatcttatgcttcagaaccttgtctttatcaaggatcatcaaagccacagggtctcctgtctctgtgtcaacagcactccgcagtttcccaaaattacattcaccaatcaatcttccaacctcatatttgccaacccaacgcctgacctttggctcactcatcactcagagttcacctcttgatcttcttcacaagctgtttcatgaaaatgtaatgtcaatgttagaattctatctccaaagaacccaacagtgcaggcaacagagtgtttcttttctcaattcacagaaactaatgcaaaagggacaaagaaactgtaaaatacgagaatacacacaaatagtactatggcgtcaaatgtgataaagacaaggcaaaaacagctgaaatccacaatgcgatggcaaagcttttcagcaacagcataaatttctagaatcatgacgtcgatagttcatg

SEQ ID NO: 36610 - DNA, 3245 bp, Arabidopsis thaliana landsberg
gctacattgctgctctctaaaaagtcatgacgcttacataaaaataactttactccagtgaactggaaaaattatagagtaccgctccacctccacggaaagatcatagactagtactacccagagatataaatcgtaattaagacttcaaatgcgtagagacaaatggaattatgacttggcaatttgatctttcttgatatttttaacaaatggtttacgtatgtctttatcaaacaaaaaaaagtaataaatgtgtttaattattgagttgtggctaatagcacaattttaaaaaactgatgtccaattttttcttttaaaaaaagctataacgaagcatgtaaaaatgaacacttaaaaaataaaagtttcatttacgaatcatgtacaattgtggatttgagattaagaatccatctgagaatagtataccatttgtgatttgtttatgaatggtatgacaccataaacgactatactacagtttgagattcactgatcactcatagatttttgaataattcatttgaaaatgatttgagattttttttttaagtgaaattttagttattttgaattgtttttttttcttgtaaaaggggtataatccatattgaaattcgaccgatactcagtcgatagcctcttcaccgaatttgctaatggaccttagccaagccggagttaaaaaaatttaccggataaaaattgaaccaaagagagaacaaactgagacaatgcccgaaatatattactagacattcgcaccgcatgttacaaattaaacggacatcgaaaactactacatacatactcaaccttttttataaacttttatagccattttttgccaatttatctataacgtaatactatgcattccctcatttacatattttttaacattgttcaaagggttgtgtgccccgtgttaatatagagtcattttctaacatctacaaatcagattaagctcccaaacatatgttccaattgcaatataccaccaaattaaaagattgactctcacataccccattaattgaaaccaaatgaacaaaaacggttcataaaattttaaaatgtcacgtcagaacatgactctgcaaatgacacataacatgcagacgcggaaacacggagggccggtgttgctcgtcacttgtcactctcttccaacacctaatccagacaacaacctaagatcttcactctcgcacacacacgacacatgcattcttacacgtgatcgccatgcaatctcctttctcacctataaaactaactcttcacttcactctttactcaaaccaaaactcatcatcacaaacgagtaagaatacaaacacaaatagcaaaaaaatggcaaacaagctcttcctcgtctgcgcaactttcgccctctgcttcctcctcaccaacgcttccatctaccgcactgttgtcgagttcgacgaagatgacgccagcaaccccatgggcccaagacagaaatgtcagaaggagtttcagcaatcacagcacctaagagcttgccagaaattgatgcgcatgcaaatgaggcaaggccgtggtggtggtccctccctcgacgatgagttcgatttggaagacgacatcgagaacccacaaggcccccagcagggacaccagatcctccagcagtgctgcagcgagcttcgccaggaagagccagtttgtgtttgccccaccttgagacaagctgccagggccgttagcctccagggacaacacggaccattccaatccaggaaaatttacaagacagctaagtacttgcctaacatttgcaagatccagcaagttggtgaatgccccttccagaccaccatccctttcttccctccttactaatagattccaaacaaaaaccctcgagcgtatgagagtgtggttgttgatacatgttaacaccacacctcatcgtgtcttttatgaaaatgtaagttttggatgtttgaggctaaatgtatttagcacaagtccttaataaataagagttttgtttatgtttcattttcattggcatatgctctctctaggttgtccgtaatattagtttacaagaaaatctcccaaataaatttacaggttaagcaaattagcaattaaaaactgctctatgactgtcctcctctaacaaatcaattatatttttctcacaaccgaagacatggtgaagataaatttgcgagtctaacagacggtgtgttttcattcaagatgatagatttgcaactagttctatatcatctgatcaactatcaagtattaaacatttatccatatgatataatcaaggaacacaacaccatggataaaacacaaaaccaaagcacagatccaattagtgacccaacacgaagaaaatttattcgctatgagaatgaagcattatgcatgtgtgaatttacgccatagtctagttaccaccgccccaccgcatgcgtgttaatatctattttttgggctcaagaaattgcacggcatcaagtggaagagacatgccaaattttaattttaaattagatgatccattggaagcgaagttcaaaaacgaaattttacattacatgatcggtttgatcgatagtcgcttacatttgtggtaaaaagtgctagccattttggccaagagtgtaaaacgtaccgttcaaatgtctttataaaaaaacgtgttgatgttgttctgtgaaaacaattagttctggttaacagctggtcgaccattttctgatgagaatttatgtaaggccattgctctggtgttgagaaggtttagtttggttcaagctaaccgtggttagaaagttagaatataatgtgtttcttgatcagtgatatcgatcggatttgtattattcatattgtttactctttgagtaattcatagtggtaactctttttttttttttttttttttcatattggtaactctttgaaatgaaaaacatagctaagaattgctagctttgatttagtcgagacgtacgaactctcgattttggtttttgatttgttggtgtaaaactctcgatattcataactcgtaagattttgtacgtatcatcttcttattctcttcatcgctctgttttcaattttatgtcaaaacatggttttggtaatttcttttactcctacttcacggtttgagttataatttttttggtaaacccttaaccacgagttttgatgtattttgacacctctaattatgt

SEQ ID NO: 36611 - DNA, 1608 bp, Arabidopsis thaliana landsberg
acagagtacatccaagaagaaacttcttgtcacgcctctgttaccccttcccttgtggtccaataaaaccctaattttctttgctttcttttatccatggtatcagatcctatatctcacttccttatacgaccatctctcatgtctacctatatatattaagatattcacaagaactacaaaagaaagaaaggagatggagtggccaacaacgagcaacgtacaaaacgtgagagtagctctcatgccaccgccatggccggagtctagatcctttaactcgctccacaggttcaacttcgatccttacgcaggtgtatgcacacaccatcgtaccaagactgcatatgttacatgcttgtccgtttatactattagatgcgttgaattgcatattggacgaattcatgaactttaaaaccttatttatcccacttgcaaatgttctcaagaagttttttttttctgtgaatgatgtaaagaattttaaatatgacgtccctaaacttcattccaaatgtcaactaaaacgttacttttctgatgagaagctaagattttcttatcttcagtctacaatatctattaaattaaagtttcttacttttttcttgggatcctacaaaaacaatttcttgggatccaaatgcaaaaaggtaaaacgtcacttttgaaaagttgagattcgtttatggtatagttcactctaagaaaaatggttgcggacataattttattcttcttatacttttggaagttttttttttttttttttttttcgtataatgattatattgttgcgcttctatgtttaaacatttccttttatcctttcggggcgtttgctaaaatgtttaacagcaggaaattcatacacgcctggcgatacacaaaccggaccggttatctctgtaccggaatcagaaaagatcatgaatgcgtaccgatttccgaacaacaacaatgagatgataaaaaagaagagactaacgagtggacaattagcttcacttgagcgaagttttcaagaagagatcaaattagattcagacaggaaggtgaagctgtcgagagagctcggtctgcagccacgtcagatagcagtttggttccaaaaccgccgtgcacggtggaaggcgaagcagcttgagcagttgtacgactcgcttagacaagagtacgacgtcgtttctagggagaaacaaatgttacacgatgaggtttgtgtgttatattgcacaaaattaaaatcatgggatctaattacatattatcgttttcttaatttatcccttaaagttgattgccccccttaaaaaattggattggtggtgcaggtgaagaagctgagagctttactaagagaccagggtttgatcaagaagcaaatctctgccgggaccatcaaagtttccggtgaggaagacacggtggagatttcatcggtggtggtagctcatccaagaacagagaatatgaacacaaatcaaatcaccggagggaatcaagtttacggtcaatacaacaatccgatgctggttgcttcctctggctggccgtcatacccgtgatagatgttgctgatctcagagaaagggaaagagaatg

SEQ ID NO: 36612 - DNA, 2097 bp, Arabidopsis thaliana landsberg
gggaccaaagccaccatttgtgttgggatccgatagtcaaaccacgggtcgacttcagtttaactcaggtgtggctggtatcgattgaagtgggttggcaagtaaattgcatttaattatttaaacaaacaaacattatcagaattctgtacgcaaatgacaaccataaaattattattcatgacttaggttttacccaacagttatggtgaccacctttccaccaaatgtttgatctccctatcaatttcatctttcgattttgatattataatattatcaaagataaggagtatttctattctaataataataacgattattaaattcaggctcaactcataaatatgatggggcatgtgtacttttgaatatagtcataagttaagtttgtaaaaggccataagttcttctaggaaggcccttaaatgtccttttaaagaaaatataggtgatagatacatttcatccgtatgatcctgggttgattttattttgataccgccatagcttgtaagtaataaatttgaagtttaaagaaataaataaactttaatgaggttctaatcgtcatcacccaatctccttctaaaaaccatgctcatcatcgtttcaaaatcaatgttaacgtcatcgtcatgatcagattcatcaagctccctaaccaaatcttcatttatgggtacgttttcttccacttaagcatcttcaacaatccaatcttgagcatgagtagcacaatctgcaactagtatatccacattcttttccttttgcttctttcgtttggccaacaatttcatattgaattggacatttaacaagattgttcatccctttagtatcaagtctgttttgctttttggtgtgcacctaataaaatttaacaaatgagagacaaatccactatatttgttaatatattaaaaaatatttcttatgtagtttaaagtaaataccccttcaaaagtactccaattacgctcacatctgatgaactagtcctcaaagacaaaatcttctttgccattgtttgtagtttgggaatttcaactccataaaaatttcaccattgaactgaacaaacataagtttaatttattagtaaattgtacatggaacatatttagaattaaaaataataacaaaacaaacctggatcataattttcttcattcttagaacatcctataatggcggttggatgtccaaagttcccctctttttttgtatactttgcaagttcagtgttgatgagatacgtctgagtattaagatcatttggaaaaaagacatccacatatttgaaagtagcactaatgacattttggttgaattggatattccaatccttataaaaataataaggattcaaaaaatatgtcatccaatgaagtaggactatcaagtccatttttacccttctgatcaatggtaccaagtattggactgtaattcttcgcttgattgcctagtgccttacatatctctttatttgtctcttctaatctccatgtagaaaacccattgtcgacttttgatctccatcaatcaatctaagtacgctaaccaaaggtccaaaaactttcaagcacgtttccacgccatccaaaaatttcatactcgttgcggtgttacgggctgcgagtccttaaggatgctttgcccatttacatttccactgattgctagcaaacatcatctttaaattttcttccttctctaccaaacttttcaaagtaagaaaagccgatgcaaatctagttattccaggcctcacaatatctcttctcttggtaaaactcctcatcatggacaaggtctggtgatgagcgtatataaaaatggtaaacgctttggccattttaactgtttcgtcagacatagcaagtttagaaataccttctaccatcagatttattgtgtgagttgcacaaaaagtccaaaatatggtgggtcttacctcctgtaacaactttgcagcagtcatgttgttagtggcattgttcgttactacttgaacaacatgatctccacctaaatttttgatgcaggactcattgacatatgcaaagatatattcacacgtatgggaat

SEQ ID NO: 36613 - DNA, 2592 bp, Arabidopsis thaliana landsberg
ctctcaggacgtggttttcaatgaggaagtgatgtttaaagattctgggcaagacgataaagaaaaagaagcatcagaacaagaggttgaagtctctgtcattgacacgtctgttaaaacaggaacagcagaaacagaaactgcagaaactgaaacatctgaaaaaactcaaggtggagcttctgatcaaggtaatggagaagatgatttatcatctctaggtcaaggtcatgaccaggattctgaaacagactcagaagatgagtacatgccaccaagtcttgaagattatcagttggctagagacagaaaaagaagagcaaccaaaccaccaaagagatttgatgagttaggagattcaggttttgcctttaatctaacagaagatggtgaatttctagagccaacaagttacacagaagcaatgcacgatgcagatagtgaattttggaaagaagcagcagatgaggagattaaatcacttaacaagaaccacacatgggatcttgtagataggccagaaaaacagaaagttataggctgtaagtgggtgtttaagagaaaactcgggattccaggagtagagcaaccaagatttaaagcaaggctcgttgctaagggttatgctcaaagagaaggaattgattttcaggaaattttctcacctgttgttaaacatgtctccattaggctaatgctatctgcagtagctcactttgatctagaattggagcagctcgatgtgaagactgcatttttacatggaagtcttgatgaaattatatacatgagccagccagaaggttatgaaaacaagagatcacctgagaaagtgtgcttgctgagaaggtctatctacggattgagacaatcaccaagacaatggaatcaaagatttgatcagtttatgaaatccacaggttattcaaggagtttgcgtgatagctgtgtgtatttcaagaaaacatctgaagaagaaagaacatttcttctcttgtatgttgatgatatgttgatcatatcaaagaacaaggaaacagtcaaggaattaaaggaaagactgagttcagagtttgaaatgaaggatttggggcctgcaaggaaaattctgggaatggagataacaagaaaccgagaagaaaatattttggagttatctcagagaagttatctgcaaaaggtgttaaagacattcagaatggatgaatgcaagcctgttaaaacaccattggcaccacatatgaagtttgtagcagcaacagagactgaagcagaggagcaagctgatcaaatgaagtctataccttatgcaaatgcagtgggaagcataatgtattctatgatcgggtcaaggcctgaccttgctcatcctgttggagtcataagtaggtttatgagtaaaccattgatgaatcattggctaggtgtgaaatgggttctccgttacattaaggggtctattgattcaaggctgcagtacaagaaagaaggtgattttgtggtgacagggtactgtgattcaaatcactctggagatcgtgatcgaagtagatcgaccacagggtacacattcactgtaggagggaacatagtaagctggaggtcatgcttgcagccagttgttgcactgtcatcaacagaggctgagtatatagccttaacagaggctgcaaaagaagcatattggctaaaagacttgatgaatgagctgggatttaaacaaggagcggtagatatccattgtgattctcagagtgctatagctttagcaaagaatgcagttcatcatgaaaggacaaagcatatccagagaaggtttcattacatcagagatgcaatcactgatggagaagtgaaagtgctgaaaatatccacagttcataatccatcggatattttcacaaaggtggtaccggttaacaagttcctgagcgcgttgaagaagctcagggttacaagtgcctgataagagatcatggtccgagatggaaatcaagttacactagaagggaagcaaaggaaaggttgacactaaggcaaggtggagttttgtggaagtattgcctaaagtgtcataaagactctaatccaaagagaaggtctcagcttgtgaaagaaacgaagtcacgagaggcgcacgtgctttgtcatacagctcatcaaggctagagacgtaattaacctcttgccaatggttcaaccattttgtctctttgtctctgcatttgaaacagagtacggaagaagagagaagagcgtggcggtgagtagagttgtataaaggagaagataagtgagacattagggttaagagagtaagtgcaagagaggcagctgaaagtttattcagtcttgtttctaagggtttgtgtaaccaaggctttctagtggatttccgggtaatctcggtccagacgtagcgttcatcactgaacgtgaactgggttaacatttgcttgtgtctgttttactttctttgtctaaacacacgagtgatcgaacaaagagagatttagtgagagcttccgcataaaacagttaaagattcaagttttttacatcaacaacatgtctagattcaaatggtaaccg

SEQ ID NO: 36614 - DNA, 1681 bp, Arabidopsis thaliana landsberg
agggacacctttccgataaaaagcctcttatagctttgtatctattgttgtatttcaaatcaagtttacaccataacacaaggtttggttgccatgaaactacataatttttctctcgttttaaccatttctatcgtcagtttaaatgtttcaatcggtgacaatttcagagactaaaacttgtgaaatgaggaataaataaatggcggaggagatttagacgaaaatgccaataaacagagacaaactctttgacataaagaagattaaatacctcttaagtaaaagatgttacaaatgttctatagacacaacaagacaaactcaaaaccattacctgatgactccaaaattaaacgagaaaccaaaaaagaaaaagaaaaaaaagttctcgatgcgtgacttacctctctgttgtgttttgtaaactaaatggttcctattgagaagtaatttaggtacaacaaaaagctgttcttgaattggaaacatattaattcccaaaccccacagcacattaccaaatatggaatgatgatgatgatgatgtgagtcgatgaatggattggtttggtcggagaatggttcgtctagccgaggagatctttgaacagtgtagggttctgacttgttggattccacccatttgtctaacaagagcgtctttctcaagagcttcctttgtgtttggtcctttggaggtttgaggttggtacgtgcgtgagtttcctttggagctatcagacagttcggataagagagagtcacacttgtggttgttgcacaggtgctgcatctgagtatagtcccacacatcggatgaacaccgtcttggctcgaagatctcatatttcctttcaattctttaaaaggatccattgttgtaacggttgtggcagttggctcaccgaagtcgagcaagtccggtggcagtgtatgaacaggggtttgattttccttgggtacggttgcggttttgttagcagttcctttcgccggcttgtgaccaccagaagaagaccttttgtcagttcttgatgatgatccaccaaacaaggatgcagcgagtctctgtttctcgggatcgatttcgggtttctttggttcgtaactgcttcgaggctttgagctagatgaaccaactcctgcatctgagtgtgtagagataccgtttgctgcttgtggagtagtagaagaagctgctgtggtcgattgatagctcggtctaccccatttttgcttaactccatcgagtcgcagcttaatttctgatgactctcgttcagaaaccaaagatgttgaaattggctggtgtgactcgctataataagaaggctcgggtactggaacaagctcgtttgaagcttgtggtggcactgatggctttggaagttcataggcttcgaatcgaagagcatgagttggaacttcgtgatgatcttggggatggtaatcggttgtttcaaacatgcccgagcgctctctctcagaaatataaggttgtgctccactctcgatagcttgttggatatagccattgagaaatgaaagatccttgtcaacctaattcaggaaaaggaccataagattcacgaaatccacgtcaaaggaagctagtgaagagagaacgttacctcaatgtcttcgcaactagcatctaaagggagtatagtctcaacag

SEQ ID NO: 36615 - DNA, 5380 bp, Arabidopsis thaliana landsberg
  unsure (1)..(5380): unsure at all n locations
ttttttggcgttggtgggctaggggcttaatacgatggtcctatctttcatagaaatatcaaagggttcatgattcaaggaggagaccccaaggggaccggaaaaggaggaactagcatctggggcaagaaattcaatgatgagatccgagactcccttaaggtatctctattctcatctctgcttatactttccctttatccttcaaactgcatcttcaatgtaatgcaactgtctcatggcctgttggtgtgttacctcttattcagtgtcttcataatccatgttagcatccatccataattatagacttcttttagctcagaaccattattagtcttagaaaaccaaagtggctgagtacactatcctgatctgttccttctgactgtaaggtaaggtatcaatgtgttttagccaggtagtcatatgcatgccattaccctactcataaccgctagtgcaatccctcttgcatttaattccagggaagtagatagatttgagtctgttgcgaatggtcttatctatctctctagttgttcttgataatttaccagattccattctcttatgcagcacaatgcaagagggatgctgtcaatggcaaacagcggtccaaacaccaacggaagccagttcttcataacctatgcaaaacaaccacatctcaatggattatacaccatctttggcaaannnnnnnnnnnnnnnnnnnnnnntgacattatggaaaaggtaaaccaacctcttaccctcttaaatcacctcgtctttctaagaagagtttgaactcttatgttttcttccttactgtgactgttgttagcctaaatcaagtgtgttaaagaagaatgcttgttagttgttggtgatatgaagcctggaacaggatttattgatctgaattttgtttttagaaaactcatctaatgatatgattgtggcctgttgcagactcaaacaggaccaggagataggccgcttgctgagataaggctaaaccgtgtgacgatccacgccaatccacttgctggttaagtctaatgtggcagaaccgagccaagccaaaagtgttgttctctttatttgtttcgatagagctgacatgtacactcagaaactgaactaagaccactgtttcacccaattaaaaagtttgtactggaggatttaccaattactgtcttcaaaggtgttttgtattatttaaagacaaaaataattttttttgcccaatacttgacgccgtattgcaatctcgccaacaagatttcaaatacacaataatctatctgctgagtgtgtaataataactaataagattcaacgtgggccatcaaattcgaaccaaatcatgtaaatgggctcagccaaacccgacccggatcgaataaaaacggatcccttccactaagccgacccgttcggcgcaattaaagcggccactacctctggctagtagggaccgaaccacactgcgcagtcagcacaaacctgaataagggtaaaaaggtaaaatacggtactctcttttgacaaaatgggacccgttgtaacgcaacgactgtctctgtcttcattcaaatactaaacgcgtgtgggcccgccaacctcctcctcctccatcactgttttttgtttaaacaaaaaaaaaacacaaaatgttaaaagaaaaaaatataacccaaaaattgacgaaacaaaattgagaaacaatacaacaccactctcttcttcttcgtttgaatttgttcttctcttttttgcatagagaagactattgattagaaaatggctatggcttcttcgagaaatggtgcggttagaggatccatgagaccagtctctggagctaattcatccaatctcagatcgtcttctttcaaatccaggattccttcctcggcgcctgctccccgtcggagctcctctgcttctatcggagccgcagacaatggaggtccgttttcatttctttatcactgatttgagttttcactgactgtcgattccgtgaatttatcaattttagctttgtattagttaagcaactctcttcctattgctggggtgctgatccctttccctttaattgcttcttaggagacgattcttcacttttattgattcgattcattcttctctactcgatgactattttttttgtttttattttgcttctgtagaaattgtgtgtttatgtgttttttttctggtaactgttttgacagtgcctgggagagttcgagtggctgtaagattacgacctcgcaatgcagatgagtcagtcgcagatgctgattttgctgattgtgtcgagttgcaacctgaggtttctctccacttcttaatataaacttgaactgagtcaggggtttcatctttatcactcaattgtttcaatcccttctctctgtgtgttagcttaaaaggttgaaactcaggaaaaacaattgggatactgagacctatgagtttgatgaggtgcttactgaagctgcttcacagaagcgagtctacgaagtggttgccaagcctgttgttgaggtctctttttctctccttcttcattatgtttatactcctttgctccttctttcttggttacccttgggagtatctttacagtgaaattgctttcgatttgtagagtgttcttgagggttacaatggaactgtgatggcttatggtcagactggtactggcaagacttttacccttggaagattaggagatgaagatactgctgctcgtggtatcatggttcgatcaatggaagatatcattggaggcacttctctagacactgattctatctctgtctcatatttgcaggttgggatactattgattgattctttagtttatttttattccttttactttaatatcttttcaaacttttctccagctttatatggagaccatccaagatctcttagatccaactaatgacaatatcgctattgtcgaagaccccagaactggagatgtctccttgcctggggccacgcatgtagagatcaggaaccagcaaaattttcttgagctccttcagcttggggaaacacatagagttgcagccaatacaaaattgaatactgaatcttctcgaagtcatgcaattctcatggtaattcacctctgtttagccttctcaactttctctggaacttcctaggccttagatagaacctttacgttcatctctattgttattttgagttgatgcatgatcaatagttcaggtacatgtcaagaggtcggtggtggagaacgagtttccagtctcaaatgaaatggagagctcatcccactttgtcagaccatccaagccattggttaggagaagcaagctagttctagtagatcttgctggttctgaacgtgttcacaagtcgggtataaacctctaataatcaaatgagatagcttgtcacagcccttgtcaaatcagatttactcatttcttcgttttccctccatgagaaaagtctaggatacttatttccttacgggagtgctcattaccaccacctttcttacaatgcaggcagcgaaggacacatgctggagtaagctaaatccattaatctctcacttagtgctttagggaattgcataaatgcaatagctgagaatagccctcatggtccgcttcgtgattcaaaacttactcgcttgttgagagattcatttggtggttagttatcttattgctcataggctaagtcctattgtcttgaattctgaattcctaataaatggacttttctatattaccatttgttgtttgcatttcaggcacagcaagaacatccctaattgtgaccattggtccctctccgcgtcatagaggagagacaaccagtactatattatttggtcaaagggtgggctcttactactttaacctaacccctagtgtagaagtctgttgagaaatttcaattcataagtgtttttaaatcttgggcaggccatgaaggtagagaatatgttaaagataaaggaagaatttgattacaagagtttatccaagaaacttgaggtccaactggataaggtgattgctgaaaacgaaaggcagctcaaagcatttgatgatgatgtggagagaataaatcgacaagcacaaaatcgtatatcagaagttgaaaagaactttgcagaggccttagaggttagttcatgcaaaatccagttaggctctccttggcataacctgaaagaatagaagaagaaaatcagaaaaatggtttcatatgtttggcttttaaaagcgggttatttttttctttacattctgtttacagaaggagaaactaaagtgtcaaatggaatatatggagtcagttaaaaagcttgaagaaaagctgatatcgaaccaacggaaccatgagaatggtaaacgtaatggagaggtacttgcccgcggaactctgattttcttttcaggtgatgggagtgttcgaatctttaaccagtaaatattactttgcaggtcaatggagttgttacagctagtgaattcactaggctcaaagaatcacttgagaatgaaatgaagttaagggagtcagctgagaggaagtcagcaaagtaaaaagccagtcaacactgaagacaagatcaggggtacccattgtttaaattctatatggcttcctctatctctctccccttgtcaatgatttaacatattagataatatttatccaagctctctggcgttttaggaaggcgaagatgctggaataacaagactacaaaaactgctggaggatgaggctcttcagaaaaagaaacttgaagaagaggtcaccatattacgaagtcaacttgtgcagcttacttttgaagctgatcaggtacggagtgtatgaatttgagtgtgtaaaattgagggtgtgtactgtaagggtctctttagttgctgtaaaacaactgtctctatacatcagctgaagaattagtctccttttgctcaaaaaaagaaagattagtctccattgtatgccctctttaaaaatacttttaaacacgcacggttagagtttctttgaactatctattgtgaatatgaggcatatattcacatatcactattaattgcttcctgtacttgataacgactgtatcttggtaataaatttggtccaatcttgagtttcttgaatgcgttatctaacagttgagtcttattcttccagatgagaagatgcttggacagaggtgccccagggaattcgtactctggcacagactcattaccatcacgacattcccaagcaagagaatctgtgaacggacagaaggcaccgtttgctacactatgtgagcaaggtaatggaaatttcttctaaactatttgaa

SEQ ID NO: 36616 - DNA, 685 bp, Arabidopsis thaliana landsberg
gccctgttcctcggtttgagaagtctgcctattatgccctggcagaatgctgcatagtcaatgcagtgagggatgggatgaacttagttccgtacaagtacactgtttgtcggcagggaactcctagtatgaataagtctttgggagtaagtgatgatttgcctcgcacaagcacgcttgttctgtccgagttcattggttgctcgccttctctaagtggtgcgattagggttaatccttgggatgttgacgcggtagccgattcaatatattctgctatcaccatgtctgattttgagaagcaactacgacataaaaaacactttcactacattagtacacataatgtgggttattgggcgcgcagcttttcgcaggatttggagagggcatctcgagatcattacagtaaacggtgctggggtgtgggttggggtttgggtttcaggcttgtcgctctctctcctaatttcagaaggctatccattgagcaaactgttagtgcttacagaagatcgagcaagagagcaatatttcttgattatgatggtactttaattcctgaggcctccatcgtaaaggacccaagtgctgaagttatatctgcgttgaaggcactgagacgtgatcctaacaacactatatttattgtcagcgggagcggaaaagctggtttgagcgaatg

SEQ ID NO: 36617 - DNA, 3685 bp, Arabidopsis thaliana landsberg
tttgttggttaaaaatggttaattccctttgggattcccaaaccaattaaaaaaatggtagaccaaattaaatgtttttctctctttctcttttaattaaacgttttatgtcttttgtgttaaaattaaaataaccaaaagacttgagagaatgatagttcaattatttttgtgcttgtgttaaagtgagtgagtgaatcgaagcattaaaatgaactaatagaggtcagagaaggtaaacctttgagtaatgaaatcagaggaagaaccgaattgtcaactattgttcttgttttgtgtgtggatccctcttagaagagacatacatgatgttaccgaacccgaccactggtaacatctttgcaactgcaaagaaaatttcccattgactcgtaaacttaaagaagaagtcttgttacgtcaataattagtgacacatattcttttatcaatctaatccctttaaaacacatgtttagacatttctaaactttgaaaataaatggatcacttccgaagattgactgctttgcatttagtttttactctaccaaataaatttgttgattagttatacattgtggttcatgttttatgagttatggttagtttttaagagctgaaaatagcaagtccttgatgatttatgtttatgtacaaaacttacgactgtagattgtgaaaactaccaatctcttttgttgtttccattcactaatttctcgtttgtacctatacgaaatatattataccgtttgatcttaggaaaacttttggaagagatagaccatatactgaattacaactttgacgacagaataaattaacataggaaaaatctttgtgttagaatgagatcgtcgcctaatggttgagtgcatctcaggaagaaaataggtaattggatcgagtcttcatagactcacaatcgttaatttatttcaaaatttttaaaactaaatcgttttgcttgcaacagaaaatactaatgaaaaattaactctatgatttttttgttaatcgaaatttaacgacatgtttgaaatgataaaatcaaacaaaattttataattttagtaaaattttcgaaattcatatttttttcatcccaaaatttttatataccattatatatgctcaacaccataaaaaccaatacattataatcacactctttatgaacgaatatccagtttgaaggaagaaattacttcatgataatataaataattcaaataattcaaaaaagctaaaaattgatgataaaaaaaaaactaaaaattgcggttctcattaattacttttcaaaaaatatcttcgttttgttcttgtccggatagtttgtcatgtcctaaaccattataatattagttgtcttttattggcacgttttgtggatgcaaaagttggaaagacaagtcaacaccaatcggctgcctccacaatgacaaaactattggtcaataagtcaatctcccatgttttaatatttatataaaaatattaaacatatattaattgattagtttatatggatatgcttcacgcagaccgatagatataaataagcacaaagtcttgaaactaaaacattcatcacagccttacgcacataaaaataaatcatcacaagacaagagttaaaagagagacatgtcgacttcattcacaatgatcggtggcgaaggtcccaacagttaccgagaccattcgaaataccaggtttactatattaattatcatctaatatactcatgttttttttcttctttgaaatcatttctatttagctttagataattgatagcaaaaaacttatggtgtatagggagcattggttgaagctgcaaaggaaaagatcaatgaagccatctccacgaaactcgatatcgactttacttcaaatcttgttaacatagctgattttggttgttcctctggaccaaacactttcaccgcggtacaaaccttaatcgatgctgtggaaaacaagtataagaaagaaagtaatattgagggaatcgagttccaagttttcttcaatgattcttcaaacaacgattttaacactctcttcaagacacttcctccggctagactgtatttcgcaagtggagtaccgggttctttctttggtcgtgttcttcctaaaaatagtctccatgtgggagtttcttcttactcacttcatttcgtatccaaggttcccaaagaaatcaaagaccgtgactcgcctgtgtggaacaaagacatacattgctccggatcttcaaaagaagttgtgaaattgtatctcggtcaatacaagatcgacgtgggaagtttcttgaccgctagagctcaagagctcgtgtctggtggattgctattgcttcttggatcatgtcgtccaaatgcagttaaaatgtttcaaacggttgaaggcatgatgattgatttcattgcaagttctcttaatgaaattgcgaaccaggtaaacttcaaaactcataaaacactagttaacttgtctatatgttagtactaattgatgctaacatgttccctcttttttttttttttttctcaaaagggtctaatagatcaacaaaagcttgacacttttaaattgcctatctatgctccaaatgtggatgaattgaagcaaatcatcgaggataacaagtgtttcacgattgaggcattcgaaaagattagccacgcaaagggggagtatccgttagaccccgagtatttgacgtccgcgtttaaggtcactgttggaggatctgtagcttcactatttggacaagatgcgatggagaaaacatatgagcttgtgaaagagaagacgcaagaaatgcttcctcaaatagccaaagccaaacctggaatgcaatacctcattgtgcttcgaaggaactgatttcatgatatagatctgtgaaatgaaataaatcttgaggcctcagtgatgtcattacttatgtttatgttctgttcttgtcattttaacagtctcttcttttaaatatcagttacaattaatattttccctaagagagataatgtttcccttatcctctcctctccattctattcagctcttaatatataatacatgatgcaagaagacccacctggatcaagtcaacttcaagtttttccacccaaactcataactcctcgtgaaatattcaatattgaccaatagtatggatatttaggcaatacacctttgtagattacagaccaaatcacatgagtgccatgagagctttcctagagtgcccctaattttgcgatttactacttgtttggacattagagctgttgtatttcgagcctatatagctcagctcatttctcattgtaaaatatccattatcattgatttaataaaagtttgttttcttttaaagactatctttgaattgttcttgttctttgtctttagaatctgagtgtggaattcacttcctttctatcaatttacggatttgattgcttgtggaatcaaaccttcttgtttatatgtgattatggaatcaatcacaaactctatctccatcgctaccaatatctactttcgcatgaagtttcaaaaaaaaatatatatatattatttctaattatgatgaaatagacgatgacaaaaaaaaactcaaatccgttattaatagagatgcaactacatcaaaaatgc

SEQ ID NO: 36618 - DNA, 2523 bp, Arabidopsis thaliana landsberg
  unsure (1)..(2523): unsure at all n locations
ttcttgcttttggacgaagctgtcaatcacgttattatatatatgattatttctgttttttgtttttttacgatgggtttgagggctgcagtgtttcttggagagtatatgggttgctctcgatgcttcccatctattctttcttggaaagttaggctcacatcatgatgcacgctgttctattactttacaattagtcatttaaatgaaaactacaaaacgatcttggcatgttttatggatatgacagctgacgtttcatttctactttcttcccatgtttcctctaaggctggattgacactccttccagggctcatgactccgccctatctccattactgctactcgtcgnnnnnnnnnnnnnnnnnnnnnnnnnnnnnnnnnctgatggcagccaattaattgcgtcatgatttgaggtacaagatgttctaccgtttatcaccagatgaaagcgaggtactccttcacaacactttaaaataagtcatttatcaccattcctagtttcaattgtaaatttaaaacaataaagccatgattgacctcaatatccttccgaagctcatgcattcttggggtaaaaatgactgatcctttactttctgaatttacttgcagacggatgatttacagggtcacatcattatttgcggatttggccgcattgggcaggttggtatcgttatctataaactttgttgcgaaaacaaactcctctagaagtttagatagtttgatttagagaatagtttggtgacatatgattaaatttgtctttgaccgctgctttctaaatgttaaacgcagataatcgctcagcttctttctgaaagacttatcccatttgttgccctcgatgtcagcaggtaatgtaacatgcttgccttgtcttgcttaatgtatctaaccagctctttatttgtctcatttcgcaccaaaaatctcttattttacagtgatagagtagcaattggtcgttccttagatcttccagtttattttggagacgccggtagtatagaggtaagagtagaaagctgatgaaacaaatcaaaagtataaccacacatcatccaaaattattgagggttgttttacctatacgtgcaggtactccacaaaatcggggcagatagagcatgtgctgcggctattgctttagacacacctggagcaaattacaggtgtgtctgggctctcagcaaatatttccccaatgtcaaaacctttgtccgtgcacatgacgttgatcatggtctcaatcttgaaaaagccggcgctaccgctgtaataacttccacaacttttctattctccttctgtcattgcacaacattttcaaagtaaactgattaaaatctcgatacaaaaactcgttaggttgttcctgagacgctggaaccaagtcttcagttagcagctgctgttcttgcacaggtacaagagataattcttgtagtcattaagtcaccaacaatgttatttggggtatttgttaaacttgtcggcttctttttcaggccaaattacctacatcagaaatagcaacaacgatcaacgagttcagatctcgtcacttgtctgaactagctgaggtatatatttggtctatttaaaaaactacaattcttcttactctccggtttaatggatcctatgatggtacagctatgtgaggcaagtggaagctctctaggttacgggttctcaagaagtacgagcaaaccaaaaccaccatcaccatctgaaacatctgacgataaccagattattgaaggaacactcgctatctaaccttttttctcgcttctggtaagaccacacaatttcaacttcttttgcttaaaactgtacagaaactcaaaatccttagtttgaaaaatcgtagctggagaaaaagtaacaaactctcaaattttgatgggatgatgatgtgttcaaatttctctagtttctttcctctgggggaaaaacgaaagcaaataatatttgcatccaacattgggtctaatatgtgaatctatccctcatttacatattaatccgacactatttgtctgtactttttacctttgcttcacccttcaacaatcttggcaatcacaataacatgacttgctctgataccacttgtaatacatttagctttgattgttcgagctctcgagttaaatcacaagggtatatatatctagtgtggtactttagaccacaaatagagaatggaccgtaagtcaacgaacttacatgtattgtttatatattgatcagtgttaattacatgattaatctgagtttaagacgactaatcaaattaaaaagctactaaaaatatgaagcggtccgattggatttattaaaaaagaaaagaaaacgaaagactggtataataaaaccggaaaattcaggtgaaatcaacaaaccggtttcttttgctcatctgaatgaatttaaacccttgttgatatagaaagaaaaaaccctagtctctccgactctccgtagacgacgaagttt

SEQ ID NO: 36619 - DNA, 3792 bp, Arabidopsis thaliana landsberg
  unsure (1)..(3792): unsure at all n locations
gaagtctaggaaatatcagtggtcgcaaaatgctaagttactaactgctcttttcagattggatgtcaagccattgctgaagctcttgggcttgctgcagtcaaagcagcagtggctattactgcaataattgctggtggccgtctagtgagtctcagatactttaacttttgagggttcagatatcaaaataagttaattattaccaaagttgttaggtgaaatgttttagatttgctacaaaaggaagaggcatgtttccatgaactaatcatgaaagttaactgtgctatcactgctacttccggtactcaatttatatgtttcaatggagttataatataaggaatttacactcttgttgcatatagcttcttcgaccaatctacaagcaaattgcagaaaatcgaaacgccgagatattctctgccaacacgcttctcgttattcttgggactagtttactgacagctagggtatgaccgtgaccttgttggcattgagtagtttactgacataccagtacttcccgtctgctaatttttccgtttctataaatcaggctggactttccatggcattaggagcgtttttggctggtctactccttgcagagacagaattttcgttgcaagtagaatcagatattgctccatatcgtggtcttctgttgggactcttcttcatgacggtaatatgagtttcctaataactttttgcatagtttatcatttctgaaaagaatgaggaactatagatggaaaaggaaaccttttacttgtgttctagttagatcctgatattgttgtcaactgtaagcaaactaacaaaaagagttccattgatttcaggttggaatgtcaattgatccgaaattacttctctccaacttccctgtcatagtgggaactttgggactcttgatagtgggcaaaactatgttagtcgtgattatgggaaaattgttcggcatatcaataatatctgcaattcgggtcggtctactattggccccaggcggagagtttgcatttgttgctttcggagaagctgttaatcaggtttgttatcaacatggcgtatttttttgcttttttccaatgaggtatataatcagcaatgttgttttaatggtttacccttacacattacatatatttctgtcaactgtttttccctagaaggcctaatctgtggttcttccagggtataatgtctcctcagttatcctcgttgctattccttgtcgtgggaatctaaatggctatcacaccctggttagctgctggtggccagttaattgcatctcgttttgagttgcatgatgttcgaagtttattgcccgtcgagagtgaggtaggaatcttaatgattcaaatatagaatttacctctattaggcaataatttatcaatcatggaaccacttgtagctcacacattctctagttgaggaaatcattacaaggccgactgatgagaatttttcttgtctgattttatttgcagacagatgatttgcagggtcacataattatttgtggatttggtcgagttggtcaggtttatatattatctgaacttcttcagtttatgctcttatatgagaacctctctgtagacattcagcttcacatgatagctcgaagtttctaacctcgtgaccattttctgtttgttaattgtagataattgctcaacttctctcggaaagacttatcccatttgttgcccttgatgtcagcaggtaacataacattgcttattctttgcctctattgttgaagaatctttgtgggctaaagtggtttcaaatattttgttctcatatcgaaccgaaaatgtggggactatcagtaacttccacactcaatgagataacatttcaacctatctgatttataagtcttttttcaagactctttgtattgcaccaaccagtttccatacctcttcctcgcatgctatgcttacctgaaaacctccttttttttacagtgatagagtgactatcgggcgttccttggatcttcctgtttatttcggagacgctggtagtaaagaggtaggtacacacaaaaacagaaaaatatagattacaccagcatgtgaatattacttcacttgtgtgaacaaacaggttctccacaaaattggagctgggagagcatgtgctgctgtggttgccttagacgcaccaggagcaaactacagatgtgtttgggctttgagcaagttttaccccaatgtcaaaacttttgtccgtgctcacgatgttgttcatggtcttaatctagaaaaagccggtgctactgcagtaatactcacagaccccttcactctcatctagactatagatatgctttgtcaatcgtacactaataatacctcgatcacaaaaacttttaggttgtcccggagactctggagcctagtctacagttggcagctgctgttcttgctcaggtaaaacataaatgtttccttatttagttgaagtagtaatcctaaacagtgtatgatccttttttgggttgaaacatgtcaggcaaaattaccgacatcggaaattgcaaacacgattaacgagttcagaacccgtcacttgtctgaactgaccgaggtgtgtttcattgtcgatatatccatctatatttatgagaatctggtttggtctgattgatgtgtattgggaaatggtgtaatgataatggcagctatgtgaagcaagcggaagctctctaggctatgggtactcgaggacgagtaagcctaaacctcaaccatcggatgcatctggcgataaccagataatcgaaggaggcacagtcgtaatctgatgacgttctccattctggtgagaaaaagaagagtatttctcctttggtgttcttcttaaaccaccatcaccaacttgggttgcagtgcgtggtgaagtgatggatccatcagatgatgtgtagtgtgactaatatattaattatatgttcagtacatatctctcatttaagtctttgatctcagaacaattagatttgaacaaatgcgtagcaatcgattctcggcggcagtaataacaaatgaaactacatcccgttcttgtacctcagatgtgaacaccttgcagttgttggtaaaagactgaatgggccttcttttctttgacttcgactgaatgggccttaaatacagttggttttatggtccaaacaagatttacgtaattgtttgaccatcgatcattacaaaacaaaatagaccaagccataaattaaaccaaagattgggttaatgtcatgttccagaagcgagaatgataaaggcatgtaatttgaaaaatgtccaaaacacaagtgatgccccaacggaaaaaaaaaaagaataagaaggaaaactactgatacaggaaaagccccaatagacgatgagaaaaaaacagttgctctcttttggccatttctatttgtagcttcatcagagcaactgtttttttttttaataatatatattgatatatttgaaacgttatttaggtcaaaagagagatttttaacaaaggaaatggccaaaagagagatttttaacaagaataacgctggaccaaaaagggaccaccaaatcacatttgccgaaaccacaagtacctcaacattataaaaacatccaaacatatatccaatgtactgtgcatgtcattactatatttgaggtcaaatattttactaacgttntttttatgattaaacatgcgaggttacgtaagagttagtatatgttaacttgtggaaaaaaa

SEQ ID NO: 36620 - DNA, 4375 bp, Arabidopsis thaliana landsberg
  unsure (1)..(4375): unsure at all n locations
ggtttgacgttgactataaaaaggactcgtcttcttcttttctgttcaatcctctgtaacaaacattgtatcttcttcttcttcctctgatcttgagcttgtaacggtgtgtgtaaaagcttgagaaactccattgatatagtgaattgctggtcagaatccagccgagacgtaggcttactcatcccgagtagctgaactcgtaaatcctctgtgtcactttcttctttgagtgtttcttgttttgagagtgagagattacaaattgagagacgagagaggttcgtgtgcgtgagatcacaaatcgatcaaggtttaaggttcgttgggtaacactttcatttaccaaatgcaattctctcttctttttgtcagtcacgtgaatctttctttcaataattttccgtgtcttttattaggtgaaggcatcaccacaatttatagagccgagagtaatggcgtggaaaggtccacaacatctgtgagacagtaccttttgtcgcacgtttgattggttttgtaactttgctaaaatcaagacattgattggtattgtccaacaatttttatgcgaaatggaattcactaatttgagagagaaggtgaaatgacaaaatgtaaaaaacaaaaaaggtagctggagtatcctcactttcttcctaatccatatctcaaaacctaaatatgtacaaaaccaaagttcctctgtaactttctatgtacaggcacagaaatgaaaactaagaaacccatgttgggttttgtatatcttaaagatgaccagatgcttctgcaacacaaaactttagaaacatggttacggattccatgaccttggatacaacttgcctagtgggtcatggagaccagagttctggcggctctggttcatccacactacatcatctggcatcaaagatgttgtagggttgctaccgctcaagtaatcaagcgggttcgcaggctgaaccaaattgctgcttacttgagttgaacctccccccatcagcattccgtagttaccagacgcaaccatttgatgacttgaactttctggctcgaaagcagatctggatgggcgcagttgactgcattgagagagaacagagaataagctttgatctgaactacttcccctatgaattatttgctctgcgttattagcaactctgagaaggctcggatctctctcggtcccggtttgactgccttggcttgtacatccgacaccgtttgtgtttgcccacatgctcctaaattgccaattctgatttaacaaaggcccggtgctcaacaggggctgtgcggtaactcctatctgagtacaattggggttccagtctggccgctgcatcaagaatccacggtaaatgttgtctgacatgcttccttggccaaaggcgtcaacctgtctctgctggtcctggggaaatgcatgagatgcaggaatctgatcctggaactgaccagaaaattgattgcccaccatcatattgttgtttccttcctgctgaaaaccaatgcccataatttgtttatgctcctcgttaagtgggactttgagaagaggatgaagctgctcagtggtgcgagataccataccctggccattaaacaaagactgtagtatttcattttggttgttgttagggaaagaaccnnnnnnnnnnnnnnnnnnnnnnnnnnnnnnnntcctcctatcaacttcttcaggcatgttcgattccaggtctatgaaacagtttttagctacttcatcaccttcaggatggtgtatgattgacaatccaccactgggggtgtaagcttgacggctaatgtaggactgcctaatccctcccactggctgccacacatctccaccagaacaaaactgcgacccttctccaaggcttgtagcaatacacggaatcctctcgtctaacgaagcattctctagttctggtgcacagtgcttgcctacatgatctgcatcttcgagatctgaagcatggggctcattaggaaatgaagcctgtgggagagactgaccttgtatagagctggaataattatttacttcaacatctgttcggttaaagctgtgacacctgctgggagaacaaggagaagaatattgtttctcttctctatcctcgtgattgatgttatttccacaatctggtgatgaaacctgtgaggagtgtgtaccaactagcaagcagcgacctgaatctgtgatttggtcaccataagacgaagaatcctttgaaggggagtgattcttgccagaaatttgactgaaaattccagaatcttcaccatctggtgccatatcaccactctgattaggattcaaactttctccattattgtattgaacatcatgcttctgcagagggttttctgcagcatactgttgttgtttatcctgtacccaagaaagtcattaataacatgggtacaccgaaacaataaataatacatgttaatagagaagacaaacctccatccacggattgcatttttccttcagttcccttcccatagagctgattacatctcgtttctgtaactgtagccttttccatattgcatatgctgcagggagatctttaacaagatgcagcctgcatgaaacaaccaaagtttcaggaaatcagacttaatggcttattgaaggaatttagtgaagatttaggttgtttcaccagaacactgaccagtgagcgttcagtttcttctgttcttcttccacaaaaactccgtatggttgaacatctaaactatcgatgttaccgaagattcgattaagtgctctcgactgaatgcttttaccagactgcttcatgcttgtgacaatttgatgctgcttcttgcttatctgaatatataaaatgcaattaaaagcttgatcaataggcacatcaattacatgaacggcaactgcacattcaacacaacaaaagccacagaggatagcaatcgtttgttttccaaacagctccaagataaggtcctacttccaaatacaatgcacgcagctgtctaatggaatcaggacattctaataattttcaagctaattaatttagatagccagtttactgctgcttgatgattgacagcattcggatgaactaaaatacagtaagaaacgccaaagaataactaaccttaagataggacatgtatttagcaccatcagtttgctgaatctatcttttggcacacgttcttctttctaacttttccacccaccgttaccccattattttgagttttttctttctttaaaccaatagcgcttggacctaagttggataggaagaattagtatgcaggtctggggcaaggaaaagaatactaacagaaattgcgtacacatgtgaagagtaagtgttcagcaccttctctgaacctctccacacctcacaacaggagaaatcatattatcactactgtctggtttatcatcttcattccaggaactcgaccccgaggcagcagtcagaccctggcagctaccgttcacttgtgcattgccccctcttgatctcctgaaaaataaatgtaagcaataggtgattcattgatactagttacaaataatgaactaagatcttgataaaggcatcactagactcaagctcaatataaatccatttcctgtaaggctcatactataatcaacaacggttatagcttgactattctttcttcaccaaactacataactttgcaataaatctgcttggttacattacacttcaacagttctccttttaaatagaaaattgtaaaggactgacccccacatcattttgacaatatccttctctggatctttgcagctttcccatttctccttcaatgtctgcaaataatctataatactaccagaaacaatggaaagaggagttacaatcatgtggacaaacatttcaagtactcctataattcaaatagagaaaacagcacatactcttgatgatatttctctaaattcgagtaatatctccttttatcagccctcaggcattcctcccgtgaaacgatttgatctggatgagctttaccggagcagacagctgttcccctgaaaccacaatttagattcaaaacggagtcgaatttctgagcataaattagaccatcactaagtatacggtttataatgaggatgcgaaggcagatcacggatgttggcattaaatcaagctctattttggtataggcaagcaatcacagagtgcattctaggaatccaaaccaaaaagcccagtgtaactaaccaatcaagagaaggatttcaaaatgaaaattctcgccatcaagcaatgcttgtacaacttgctccacatcaaggtcctcagggagaaattgccgcagataa

SEQ ID NO: 36621 - DNA, 321 bp, Arabidopsis thaliana landsberg
attctaaatgggttaaacaaataatatatatggtcaaaatttaactgattatcctcgtatagatatgagtgggtgtagggtgaagtgaagattcaaggtatcgccgagggacatgttatcgtgtctgctgttgttttcttttacttaagtaacaaagcccattcatgtgaaaaaccaaaccattgtatcctatattaaccctaccaattgtgtctccactcataaaaacatccttcacgttctcatattaaccataacagataaccaagtacttctaccttttcatatatgtacatatctatatatatgatacaataaaca

SEQ ID NO: 36622 - DNA, 3736 bp, Arabidopsis thaliana landsberg
gtatctttctcaccacaacaccatctcatcaaggctcttaaaaaaagcaaagatagagaaacagttgtttgatgctcatcgaaacaaagaaccgcaaaacaagatgtatcaacagggaaaaacagttgaggtattaaacacaaaatctcaaccttgtttgtggttaattaacaccaaagctgcagctgctcctgcctgtgcaacttgagccttaactgtgaaagcacactcggcaggtacagataacgctatagacccagatagctgcaaaaggaaaacatcacaacaacaaaaaagctcatcttcacaacagtggtatttgagtcctagctaggactgtacgatataagatggaaaagaaaaaggaagacctttgaagttaaattggagcaactgtccaaaggagtggtaagagcaaccggaagtttaacagctttgtctttatcagacgggagcatggtgccaaactgtgcagtcatggcggtaaaagtctcaccgttttctccgttgacccaattctcaactttgacctggacaatgttcaataatcagtagttgcatgagcgatctgataatgtagagaagttttgttgtacatgaatctatttatagacaactggtaataaacagaaacagagaaacctcaatattgatcacatagatattgtggggaaaaggaacaatgctttatatcatatcaatcaatttttatcaaaatcaatgaacaaactaccccatcctcatcatcaatcgatttcaataacggatttaacctaaacctattgaaatttaacaaaagctgcatttgtggttgaatgcaattccaatgaagattcaaatcaatcaatgagatatatacgtagggtccgttagacaaaggcaaaaacgattccggtttaaggttaaaagtgaaattccataaaattgatgattaggaactcgaattgggaaacctgttaccatttgaaattcattggagcaaccaggaattttgggagcggtaacatctttcgtgtcagccccgacgcacagcagacctatcagatagagagccgccgccgccgcgagaaggcggcaagtaaacggaggtaaagacatcgccaccgtgagaattagatagagagaagaaaatttgaagaattgtgggacaaacaaaaaaagggaaagaaaagattattcttggttcatgttcgttgttacaaaagcagagaaaactcggtgaaaagccatctctttttttcttcccctatttggatttattttccctcgcttttcccaaataatgacaaaaatcacaaaaccaaccaatcaaatttagtttctttaaaataggaaataacccaagtagaatgaatagatcttttgaatgtttgccaaaattataaaaggaaaattaatgtgaccaaataaattacagttcatgaatttcttttcttccatgagtcaaagaaaaaaacaaaaatttatataataaagttacagttgtgagaaataaaaaaggattattttggtgtggtatatcatcaagtggaagaacaacaagagaaaccagagctttgtttggaggcagagttatcatccttaacaagacttacccgattcacggtgagttcgtctttataagtatctgagttgagttgcttacggctcacgttattgtagatatcaagtatcaccatctcgaaagctgttttaacatttgttgaatcgagagctgatgtttccatgaaaaatagtccttcggtttcagctagtgctttgccttcttccacgctcaccgctcttatgctttctagatcgcatttgtttcccaccagcatcctcgcaaccggtgtatcccaatgtgctggcaaaataaaacaaaaaccacaaatgaatcaacaaaccagtatcaaatcaaacttgaacatatagacttcacatttggcctaagtaaagaataagtcaccagaaaatcttgaagatctaaaccgttagcggactagacaaccctctatttttggagcggataacaaaccgtggtggacaaagtttacttctacctaaaagcggtacgtagttagtccgctgcagacttgttctatttttttcgatccgcactactacggattatagtttatgaatggtaaataaaaagcagtccaaaccgcatatacatttgtccgccatgatcgccacaaccattcaaactcctaatcaatcaacacaatctaccaaatctggagaataaagtccacaattccaccaaatccagcttcctaatttgcagtttcaagacctaattgactaaatccactattcaaattgaggaaatactaatcttagctcaatcaaatcgcaatcaaaatcaatacagacttactcttgagctcatcaagccaacgaccaacactctcaaacgtggatcgacgacttatatcgtaaacgacgagagctccgacggcgccgcgataataagcggaagtgacggcacgaaaccgttcttgaccagcagtatcccaaatctgagctttaacttctttaccttcgatttccatattctgcgtctggaactcgacgccgatcgtggccttggaatgagcgttgaactcgttacgagcatagcgagagagaaggttcgatttcccgacggcagagtcgccgattatcactatcttgaatagatactcttctcctccttcgtcatcggacgacatcgttttttttgtttctgattttgagagagagaaagttgcagactggttttagagagagagagagagatggagctggcaaaggaaatgatagataagattacataatgcgcatgaagtggttttaattatttgttttgaattatgtgccatgtaattcggtgcaattataagttcttgtcgtgtcaaaaactaatgggccaaaatattgtatatttagcccaaaacagcccataattcatcagcgtttaagtagctgaggcctctagagtgcggctggtctaaaatgagtatttaacacattttgattattatctttgttaattcaatgtgtaaatgattacgatgtatatttctgaatggcttaacaatgataatatattagacataattttcagtcttcgaaataagttactttgaatcatataaacacaaaatataacaacaatcaatagtctatatactgtatgttcccacatatgaaattgaagggccgtattctctaacgttagtcaaagtatgacctaattaccatggccggaggaattagggaagaataagaggagaccatagcttagtcatcttaaatatactaataaataatttcggtgataaaattccaactacagagaaattaatgtttagatagtcaattccaatttgcatgaaacatagaattatagtagaatgatgataaagtgaagttaatgtaagaaactaaacatccaactagggagaatgtttagttagtcaattataatttgcatgaaacatacaataagtataagtacaataaatgacagaaattcaacactcattgttcacacattcaaccaaaagcaatttagagtttttttttgcctggtttactacactagtttaagtttactagcttacatatatgatatatatatacctttataactaaaatattaatattttagatattggaaacacgtaaacgcatatatgaacgcatgaaacacagatgcattacgcgtttaagacttttgaaagatgactgatttatacatctcaaattc

SEQ ID NO: 36623 - DNA, 3814 bp, Arabidopsis thaliana landsberg
tgcttctcattctgagcactatttcctagtgtatttaagggtcaaggtcaagagtgagagggcacctgggacagaagagcagaaacatttttctgccatactccttttcttaccatcttgctgacaatccgcctcaacagaacttattttctccggagatgcactttccagctgatccaatccaccaacagatgctacttgtataaagcaacaaaacataagttccacacccaaaaactaaacttttgaccactaacaaaaaatccactcacatcctcttgttggggaagcgcttgtagctccatccaacataggttcaagatcgatggttccaagcccctgtatcagcgcaggacaggagcacgaagaaacaattaggttatcctaacaaatctgggaaccatcaagtaagttgaattttatatatatcaggattcaaacaaactatgacatccatttcatattgttatggttccgcaacagtaaaaaattgtggttcaagagttcctccatatcaaattatatcaactttatgacaaggtaacaaagatatccacatcgacatatgcattgtgtcgcaccaaatctcagttattcatgtttgcatgttattccagaccactatatacctttgatgccctcggtaaacttgacattttaggatcaccggacacacttcccaagctattacctagattatatgcatcaaaagaggagcaatcagtagtacaacccaggggatagtctaatcaccataaaatcaataaagggaacacgaaaggcaatttagttttagttagtaaacaagtgaatgtaaaaggcctcctaatttaaaaattataaaataagtgcgctagcaacgttcactgcatatcaacaacaatatggctccaaggccacttctgagaaaatctgaggtcacgagagtttggaaatgacaaatgtaacaaccataccccaacaaaagttctatggagaacaagaatgtcaatataaacaagcaaaagaaaagataccattagagtttcctaacaccagatccttctctatcgtgacaggagaaatgctggatgttgggtgttcattttcaccaatgtcaacaacctcatcatccaattcactccctacaacgaatacagtaaaaaatgttactctgattaaagagccaagcaaaaaactttctcgaacaacaagcaggctgtgtactaaccatcacaatgttgcattgatgaattccctggcactgatccatgcagaagctgcaatagataaaagtttccctattagcagtgatgatgcaattagatgattcaaacatgagatatagacgaagatatacctctatctcacagggttcaacacttgattttttgttttggatctcacgcaaatgctcgtctaagagatcccgcaactgaaacaaggcatggtcactgagatcattaatgtcaatctcaatctcatcatccccaatccctccttcatttgagttgtgatctctcaagaaaattattaattgtgccgggaactcagtcaaggactccaaatccttgcccagcttgagtctatcctcatcagtcataacccgtttagcaggatctacgacattctcacagtctactgcagtggtcttcctcttcttagccataggcacaggtattacgatatgtttttccttatgggcatctaagttactcggttcagtatgaactttagttccggataatttcttctcgagggtcttccacctcacttcgaaaaacttacgaagtgtatcagccataacataaacatcattaccaggtggattatacgtcattgcattgctgaaggtaagccgaacatcagcagcaaactctgacggacaggaatatgtccccgaagttaacttattcttcacagttcctaaatccataggatgctcaataacattaaaatagtccagtatattcagcttgacaacatccactggagtattgaacacccaaccatactgatgtgacatcaatcgtttcaaaagcgcctcgcattgcttcatcagaagcataaccgcagtagtgacaggagtcggtttagaagcagcacttatagggttcactgtctttcctggacccgtggaacatcgcgacattccaaaactcttgactcgagtcaaaccactagcagaagagctagtgagagccactggtctagaaagctcaaaattcttctggaaaactcgtatttgttccagctcttgtcttagcctacgaatcaactccttcctatctgatgatgataggccagataagggtaataccattttcgagacaccgaaggtttcaccgagctttctttttgaacaattggaaccctctgagaccctcggactatcagatccttcatcataatctccaccgggtgcctcaaaacaataatcaccagggaaaccaccgtttctctctgtcatatcgacgaaattgtgaaatagattcccttaatctcgtgaagagctccggatcagtctaatcctgcaggaaacgaaacatctcgtatgacggatttgcttcagaaagctaatctccgaagactcttatgactctaaatcagataatctcgatccgatagtagatagatgattcaaaaccctaatttaagcgattcaaatctgaactcgtcctgaaatgaagacttcgaattgcccgatggaagtaaacaccaaaatcgtgaaaaggaagaaactcaccggctgaacttcagagcaattgagaaaatcgatgatccaactgaagcggaagacagagaatctaagaagaagcgaaaccttagaggagtaaaaaccctaaaatgttgatatggaaatagataaaaggcagaatgacgaatacgaccgagagaagtagagagataaatatctgttgatctcttcactgtctgattccacacttaacggtgaatcggttaacgagtttcggtacgggaacactcaggaacaatcaataaacaccgtcggattttaatcgaacagatctagtgactagtgtagtgagacaccaatagatattttagatgcgaagatttttatgagtcaacgcattcaacgaaccgcttgccgtttttgttcactctatcggctcgtcctgacgtttttgtatccaatggacaaaatgctcaatttcgtttttcattttttttggaaatgataaattctaaatttctaaaacagagataaaacattacagagggagttggggaagaacaagaaggttcattcatgtatgtacactttgaacaatgcgacttaaggcttcattgttgtaagaaaaaaaggacaatcatatgctgaaacatttgcgtgtcaagcggcagataacgctcctagtacccttatctacctgcaattgcaatttgcaatgcattaaaactttgaaatcatcaacttctgaattcataaacaacaataaaccatctataaggagatagatttcggctttgtagctagcaagaaatcttacaaaatcaaaattattttggaaacttcctagtcatgttttcgagccgcaaaggatcagatctagacttgtacacacaaaaactgaccgtagttaagcgacctcagattgtaatgatcaaggacacgaccaaaaattactcctgccatgtcccacaaattgcagctacaacacgaacctgaaccaacatagttttagaaggtcagaaaatattagttattaagtgagggaggcagggggcagagatacgtgcctttttatttcaaggaaggagcatatggtgctgggcatggagagatggctgtatcgggcggctgatttaa

SEQ ID NO: 36624 - DNA, 1730 bp, Arabidopsis thaliana landsberg
gctggtaactaatgtttccagtgactaatgagaaaaaacaacttgggatggtaaacttatcatcatatatatgttcagaattgggaaaatcaccaattaaaactatattaagtgtttttaaaaataaaatatttttcttctttaccaaattaacgtttcaatttgctagctgtgttttttcccgtgcgtgtaccaatgttataattacacagttacacttgctttgttttattcacatataatttaaaaatagataacaattaaatactactatatgtatataattttgtttcttaatattgaatttattttattcagaaaaggttaaatattgccaacaaacttgcaaaatatcacttagtaaaatactagcatatattgctgaagacattaatccttttctgaaaagaaatcttttaaacctcaacatattttaagaaataatataaaatataataatcttaaaagttaacaacattataaccgaaaaacacatactgtatatagttgttttaccacttggtttaacgaatattgttttcatgttcttactagtctcttagattagacaatgctaagaaatcataaacttatcatggagcatttgatatcgttttcgaatttctgtttgaagagcctaaccaaggaaattaacatacggtttaactaaattcatcactaaaccatgcgagtggtcaccatcttagttaccgttttcgtttttttctttttcaagttaactattatgctgagtttagagaagatttagcgaatatgaatttgggagttgcagaagataaatccgtcctaaaataaagtggcaacgttattactaatgaagatgattaaacaagaattgaatgatccgaagctgtaaacggacaaaaataggacgcgatgaatcgagtgaagctggtcccaaatagtaggattggatccaatgccaacattctcattgatctctccaatcttgtgttactcaaaactcaagcgaccctttgcgtggaagctaaggaatgaaacactagagaatttatactattattggataataaaataaattgggttggaaaacttaacttgaaaacgtcaattatttcttgggatgaacaacaaaaacgttaagcaatagttataaacttcattttaagttcctaaacgaaaacttcaagtctctgattttcaatcttataatgacgcattagatgtgagagtcgagctcgaattgacacttctatcgattaaaagatgttggtgttggtttggaaaaggaagaagaagatattcatatggcgaccatcaataattagacgtctaattcacattgtttgatcaattgaatatcaaccgtaatattctgtgccggtaaataaagggttcaccgaatataacctaaagatacgttgaaagccgctacacaattccgagaagaattttgcagtcccaaaatcttagtcttcccatgaaactgtctagtgcacgtatggtttacgttgagcaattcagaccattaactgtatcatgccatacgtctgcatgaatatatatatgttttgttcaatgaagttatatagataagatagatttttggatattttatgatgatatgcacatgaatatgagtttgcatggacccctacctgtcattattcgggtgcaattaaaatagccaaaacactaaaatctaaagctatggaagaattatatggcgcataggtgacagtacaaca

SEQ ID NO: 36625 - DNA, 2028 bp, Arabidopsis thaliana landsberg
aagcccatagcaacaagccggctattatcagaaagctaggcttttttttacaggctctttcacccaaagggaacgtatggggatatctaaaagagaaagtttatagttctggcttcctgccttaaaagcagattcaaagagacaagatccaattccttcagcctattcacagcggatgaagtaatagcattgtacaattagaacttcatacctttttcttgctttcttgttcttaagccagttacatactttattcgcccgaggggttcctccttttagtcgagtatgtaaacaacctgaaactaatgctttttccctttctagctttccaccattaagacttgttgacttcctacgctattcgattcgctggcatgtccggtctcatacgaaggaaaggctggatggtcagtcactcatgaattccttctcgaatcactactggaatatagcttatagaaagagcagcttgaagcaagtggcaatgctagaagggcatttctttcccgcctacttgagtagcgcgttggatctatgcttaggcagcttaatcgagacttcatatacgtagattgccatgtctgtatccgaacgaaaagaccttcctgatgttcttgccctatttaaaccccgggcaatttccaaaagaagagaaaacaaccacctcggaacaaatatcatgcatacataggaacccggcttcgctaacctttcttacttagtcgtgaaacaactgttctacaaactgatagtcttaaacctaaaaaatagattaggcaaaaaaaaattgtcgaaatagatttaattatatataaaaatattattgtttgggtacaaaacataacaatctttcagtcaaatattttataatactaaactgcaaatgctcgtgagaacaaaaaaaaacacacactaaaaatgacaaataaaattttatagtgaaaatctgtagacatcgtcattgttaatatagttgggttaatacacataaaagcaatctacagagattcttttctacgaatcaaagcatatttctactacttaaatttaggaacttcattgtcattaaaattatcattatgaattttacaatttagaactaattaaccaaactcttaaacttctaaattgcttaatagatcaagatttatcagcttttcgtgctatttgaaaatatgaacagaagggtggtgtgtgcatgtctatatgtcaaatgtcaatgtgtagaaatagcaatacatatatccaacgaaaaagaagactttttacttacgttcttgaagacaaaaaaatagaatattacaatcctctccgctgttccagaggctaattctttatccaacacactgcacgtttgaaccaagcgatcaacctaacatacgaacatatgtcatcttatataaatttcttattaattagttgtcctactagatcaatatgaaataacccaaaaactcatgaggtctctcatttagctagctatacatgatctatctatgtggtactttgtttaggtttataggtttgatgtggtttatcagttttttggatttttttgcaaaagcaacgagtattggttatagccttataggtttagtcattgatcatttgtatactatagtctataggaccatttattagcctctaaataataatctgttcacattctcgtacattcgtccatgaattttgtttctttctgtaatcatataaggtaatgttacaaaaaaaaaaaaaaaaaatgttacaatttattacttagacttacgagtcatgactaacaatggtcatattttcagagcgaatactaatgcaaccaatcatacggcaagaacaactgattgtatttatacttctggaaaaacaaatttgtctgatactgtacttgtaattaatatcttgaaaccaagatctattattaatttaaaatttattagaaataataagggagtgtttggatgtcaatgcgcattcatacatgtataaatgtgcaccaaacttcttaatcccacgaaagtgaaacttttc

SEQ ID NO: 36626 - DNA, 3936 bp, Arabidopsis thaliana landsberg
ggttccctacctgtctgaaccatacaaaagaccgtctgaacagcaaatctctaccttattctctcgacacaacagatccaaatagacattgaacgcccagatatctggtatgaatccaagggtttccatatcactcactctagcgcaaactgcaatcaaatcgtttaactactacataaacccaagataaaccttgagtaagtgaaggggatgagagaaaaacccatgggcttcatatcccaatatattgcctcagcaagctcaaatctagactctctaaccaaaactttgatgaaacgattataatcgaaggagaaaactcggtagcttgagtgacgcatttcatcgaacacctgaacagcgttgtcaatcatacctgatttaacgaggttagctatacgcgagcggtatgcaaggcgtactgcgcccagcgtctgatgcatatcagagctcgacgcatatgatcatatcaccgttgcctcttctttgtttcaatgcggcgacatcagatcgacgacgacggctggtcttgagcttaagctagagggaaaaaaaaaaaaaaagaagacgaaggctccaacattaattaatctgaggctttcttgatatgggcttaaatgggctttaaataaggcccaatcatattttactaaaacctctctgtgaacgagagtgttaggtttggctttcagtttctccccttctccttcttctccgtctttggagctcaacaggggtttaaggattttctccgaaagctcaaaacttgagtgaaatttctctcattttacttatctgaagttcgtctacgatggaggaagagaaggtgagggttcgtctggtgtttgaagaccgacggattctgagtaagtatcaaaagaagcaaggtttaacacggagctgggttgttctaaatcgtaaatgtcaccgaactatatcagagttttctgatcatatctttcacacatttagcctctgtgaagcgtgtcctcatggcctctctctatctgtacgttatacttctttgtgccctaatttcagagaaatcaaatttgtcaatgttgacgccattaatgcttacattatctttcgggcttttcagatggaaggtttcgttttgccacctttcgagtccagctgtgtattgaaggataaagatatcgtttggttagtttcgtcaatctcttaaagctttttcctttgagctttactaagtatcattagtgttaaattttgcgctttttgtgtagtgttaagaagaagaaagagtctttgttggagattgttggggaagacagtgatgagaatgtttacaacgctattgaggttgaggaaaggcctcagattcgtcctggtgaaatgctgcttgctaatgaggaattccagaaggaaactggaggatatgaaagtgagtctgaggaagatgagcttgaagaggcagcagaagagtctgtgccagagaagaaggcttcgaagaaacgtaaaacttcaagcaaaaaccagagcaccaagtaggatctctacgaaaacttattcttagtcacctcaatgtctatttgttgttattcaagcttgaagataatgtaggaggaagaagtgtaagttagatactactgaagaatctcccgacgagagagaacacgcaaatgttgaaaacaatgttgtgaagaagaagaagaagaagaaatcattggatgtacaaagtgctaacaatgatgaacagaataacgatagtaccaaacccatgaccaaatcaaagaggtacgtagacttttgctttgtcaaaactcgcttgtgaatctttaatcctcttgaattatctctaactagtcattttttccattttcttgcttttgtgattgcaggtcatcacaacaagaagagagcaaagagcataacgatctgtgccaactatctgctgaaactaaaaaggtttgagtttacttagttattgcaaggaattagaatgaacaatatgtgtagagtgtaaaattccttgatgtttgtagatgcagggattggcttttgtttcacttactcatttagcttcctatcagtccttcactcttccttatttttattttagacacctagcagaagtgcccgacgtaaaaaggcgaaacggcaatggctgagagagaaaacaaaactagagaaagaagaggttcttcatcaaatactttaaacttaaaatgataagatttatgtatgcatcacgtgttttagtgatgtacagcctgcacttcaacacttatatcttctttattgttacatgatttgcagcttctacagacgcagttggttgtagcacccagccaaaaaccagtcatcactatagatcaccaagcaaccaaggaaaagcactgtgaaactcttgaaaatcaacaggcagaagaagttagtgatggtttcggggatgaagttgtacctgtggaagtgaggccaggccacatacgcttcaagcctctcggtaaattattatgtaaatttctctctgtatagcttttgtgcgtttgcaaggctcctcacagtttcccttatatgcttatttttcagctggaacagatgaagcctctcttgatagtgaacctcttgtggtatgacttgaccctatgtttgtatccttaaagctttgcctaagctgaatctgtaatgattatgtctaaataatattaggaaaatgtcttgtggaatggaaacatgacgaagaagaagggacagaaatggggcacagagaagtcagggttttccaagcgatatgctcaggattttaatgaagatgctacgacacagcccgctgaagcagagacacttgctaattgtccgattgattatgaacagcttgtggcttacactggctcagtaaaggtttgtttatagtctttactacccccagcaggttgtttatagattcagcatttttaaactccttaactcctggtttgttaactttacagaaaggagatgttattgcataccgcctcattgagttaacatcatcttggacacccgaggtttcctcttttcgggtaaaatatctggctctccttttaagccaaattcgatcaatcaacgcttattctgaggaacttatccactttacaatatacttcttttgataggttgggaagataagctactatgatccagactccaagatggtgactttgatgcctgttcaagaatttccaatcgagaaaaagacagaagaggacgacgatttctgtatgcaacctgatacatctctttataaagaagatggatccctggaggtatgcttcatggtttacattatgtcatacatatcttatgaacaagaacattcttgtagttgtttgcttgctaagcatcagaattctaatataagaaagactttgcttctgcagatagaattttctgctctgctcgatgttcgcagtgtcaaaactagcagctcagattctgcagaagtcgccaagtcagcactgcccgagcctgaccagtcagctaaaaagccaaagctaagcgcaaacaaagaattgcaaacccctgcaaaaggtaaattttccatcaatcttggatcgacattgtattgaaatagatggagtcttatctactttcattggaatattgcagaaaatggagaagtgagcccttgggaagaactaagtgaagctttaagtgcaaagaaagcagcgttgtctcaggccaacaatgggtggaacaagaaagggagttcaagtggaggctcatggtcttacaaggcactgcgaggcagtgctatgggtcctgtaatgaactatctcagatctcagaaagagatttgagaaactaggtcacatctctctagaagaaactctgctgcttttgtcttcattattggatatgaaaaactcagacaaagggtagagaaagccattttgtttttgatgctgtaaacgcacagtttagctttct

SEQ ID NO: 36627 - DNA, 2813 bp, Arabidopsis thaliana landsberg
tttcttattatcgagaaattaggctcaattctgaggatacaaattatacaaaattctcgataacctaggatttgacgtcaatcccaaatccagtgacacattaactcgaaattcatgcaattcaaaccaaaaccaagactaagaaagtgtcagctttcagtatttcacactagggcagagagaggaagagagaatcgaaaccttctcgtcttgatgaagagcgatccagacatgaactttgtccatggattgccaaaaggcgaaagcggccaatgtcatcccaaagtaagtcaaaaccttcaccattgttgttgtagttttcgtcagctaaatcttcttcttctcgtcgtcgtttctcagaacagagagagagaggagtcgcagatcgcgcgatgaagccctggaggatgtgttgttggggaaggatctagtgcggaaagatacaccttactaccgtagattggattgtcttgtataaatgccacgtgtcgctttgaccatatagatatctcttcctctacggttccggataaatgaaatttcatattttggagtcggattagtcttacgaacttttttttttttttactttttatatcgaatctaattggtaattaaaaactgtacaaattttttaactgttaagtagagctgttagctttataggaatagagcaaactgttataaagaattatacaaaaaaaatatatcacagaggattgtgaaatcaagcctggaatatccaaaaatctaacaattgcctttccatgttcagaattgaatcaattatttaaacgaagcaacaacataaataaaatacaaacatattattatggaggtaagaataaagtaacagggctgtgagttactgatatgcaacaaacctcttcattggccacttacatttctcgcacgtgacaactctcatcgtcaacgcttcttcaaacggaacaaccgccgtgtgactcagttcacacggcttctccgccgcaatctcaatcgcctccgtaaaacccaaccccttcgcatactctccccaccgcacaatctttctcatcctctccgtcatcttctctccatcaaccgtctccgcagttgatccattcccaatgattccccaacctctatgtttcccgtaatcgaagtcgagaaggttcctaacttcttcaaaaacacgatcaggtttcgatggttcaattacaatccgcttgagttttgatctttcgatgctttctaatcggagccagaagagctgttgcaatgtaggactgaacaaaattgagctctcttccatggctcgctcgtctcgtctctggttgcttaggtaaatcagctctaactggaaccctaggttttgaatttttctcgctagtgacacaaattcgtcaatccaatccaaattctcgcttccgaatatgcagatctctcttccttcaaatgtaggatgaattccatcaagcaagagattgatagaccatccatgttctttccaaagctcatcttctctagaaactgagaatggatatgctttaacaccccaaatcaacaccatatccatggcattcatgttgacgaacctcccgttagaatcgataacaaccaacattgcttcgttatctttataatgccattcttgtttgaaaaagttgagtattgtggagctcatcaaccatggttgccttactgagatccatggtaaggaattggagtagaaatcgaagatttctttctcttcgtctgtccatttttgggatgatggtattggaacccatatgatctcgtagttttgttctgtgttggtgttagatggatgatcgtatagctgttggagtaggaagaaaagtggctctactggtggctttgataatagcagtagtgttaccttatcttgtacctcagttatagatatctgccattgggtgaataaagaatattcaatgctattgcaattttgcaaagataaaagaatcggtctatgtatcgtcatacggaatgtcggagctcatctttatgtaaagttaaagacgagacatgaaagaaacaataagaaggaacatggaaaaagaaaaatagatagttctttatacctgtctggagtattgttgaagtggcaaatcatcttgtagagaaaaaagtaggtggagtacgtcttggttgtcttgatgagtctctatgttaatgtttctaagcctttgattgatttcttcctctttagatataacaacagaggagcaatatcagagatcgagttttgcttttagtagaaagttgtgattatggaacttaacatcagaagatttgaaagttacctatttgtgtgctgcaatcttctacctgcttgttgaggcgggtgtgtatgttcagcaactgatatcccaaactagacagttctcctgctgctctccttgattcaattgaaagttccgctgctgttttccttgatttttttgcctacgtatttcagagaattcctagtcatgagaaaactcaatgttgactgctaatatgctggaaacaatttctgtgtgtctggttcttcattttgcagagaagatataagaagggtgaaaatttgcacctgctgcgtttgcttgaaataagggatctgctgcatgcatgtgagtgcacttttgacaacccgataagtagtcagatagatgttagacaaggtttctcccaaaatgttgttgtctagcttcgcttgtttaaatggaattttttcaaatttgatgatgcatttggttacatccaccatggctttaatgagcaagtttagagactctaaccacggtctgaacttggttctctcaata

SEQ ID NO: 36628 - DNA, 1638 bp, Arabidopsis thaliana landsberg
  unsure (1)..(1638): unsure at all n locations
aaacgaaaatatttgacagttagaaagaggcatagtaaactgatatatcttcaattttttgtactaagctagaaaacaagaaggtttaaactgataaatttgtcacgaacaaacacttaaaaagaagtggtaagttgtagagctgaacttagaagagtgtggagtcatgtgaatttataccggtggaaataacagttttgatgaatcagagtgtttgagccattcgtgacaagttttggtgggtaggcctttatggttgatgtgttgtttggctccataatcatcaaacattttttgataattcacttaaatggttaaattttccatgcatcttcaagatgatgtcttcttgttgagtggattcttcgatagataactgtgcttgattttggtacaatccaggttggtctttatgttgatccggctgattggcctgatcaatttggattctacttgattagttaagtcctggttcgtttggtttcttactcggtcaacttatctatgtgttttgcttgatgtcaatatcaaaggcaaaaaaaagtgaattactttcgtaattacactaactttttattctaatgtataattttagtttcaatttaacaataattttagatctcataactttttttctttttaaataaaattttaaaagacctcaaaactcttcttattcataattttacaagttataaaatttaggagtccttctgttttattttcttaaaaaaggtcataggctgaagttttcatttctgcaaatgggcaaacctttatatacaaaatttagcagtccttaaattcattacaagttacatcacacataatctaatagaaagtgtcaaaaagaaaaaaccataaaagacatttagtgacactacgtacgaataaaagaaaattcatggcccaaccttaagccttaatgcgtgggctcaatataaaggcagatgcgcttgaaaataattctacaataaaaatattcttataaacaaccctttctttccaagcattttgttttgggttttgtgcaaaataatctcagagtcgtccatttttgcaactttactcttcatgtacaaacaatagaaaataatcctatgaaatccaaaataatacacaatatagtcttttattgttattgtcaaatatctaaattctgataaattatatatatccaatcaaaaccattatgatgaagagttcagctatatctttagaattttcaaaaatacatgtatgtgatcgtgaaaacgttaacaaaatatgttaagttgcaaaaatgggcaatattgcgtattattttagatttcataggattactttgcattttttggatgtggagtgtaaaattnnnnnnnnnnnnnnnnnnnaaggttctttgcacaaaacccatttttttcttctaactaattttaaatatgatgacgaaagttttgcaaaattattatatcttatcttatctaataaagtaatgttacctctaaacacaagctactacaagctgataagtggcttatgatatgttctcctgtcatatggatccaaattcaatgtgtttattagtaaataaatcaantatccgataaaatttaaaatgattagaaatagataaaatataggaaatgaaacaatttt

SEQ ID NO: 36629 - DNA, 2747 bp, Arabidopsis thaliana landsberg
  unsure (1)..(2747): unsure at all n locations
ttttgagttcctctgaaacttgtgtaaacaacgaaacgttacacaactttttaaacattctctgtaaatggttggcaaattctcaaatcttttctaaaatgacaagtttgtttcattactgaaaattatccccacaggttacaatgaaacacacaaaatatccaaaaagaaagttaaaacacagctctaaaggctatagctgaacctgaatatctgttttatacaaagctttcctaaataacccgcatgcctctgatccagatggaggggtttcatcatagcggagatgnnnnnnnnnnnnnnnnnnnnnnntgtattattggttatttacaggaatgtttcatttctctagcaaatcaggattgaatattcagtgtatggatctttacctctatgcttgaagaagaccggttatttcgatgtctagaccagaatcccttcttcaatgcagagtctttggacgagggtttattccacttggagctgatagaagcaaagtgccatttcaagaatgacttattagacgagctcttggtactgcaactaggatccatcttcagaccttttccttctcgtttccctagattctggaacataagatcctcacattcactgcggacataactatctaccacacggttcttacaccttttgtaactcgttgccttcaattctgcctcggcttttagagctttcctcgataatttagtaacctgtgtctctgtgcatatgggacacgtaggatcatacttctctgtttcatttgtcattgtctctaagcatgccgcatggtaaacatggccgcacgctagaacagcaggaattggaaggtcaaacctggcaactggagacctttcagttaaaagctttgagcaacgcccacaagtctgctgatcaacagaaggggagcatgagaatctgctactactacacccacttagtcttcgtcgtccggaacctaagtgctcattatcaaaagaccatctctccctttgagactgagccacgagctcacaaaaggcgtttatggaccagccaccttcagaagaagcaaaatgggacccagtggcagtgtcattactacaggtcgaaagcacaaaggacgaccttccttcagatgttgagtaattattgggagatttcaatcccaaagtttgactatcagaaacctgcctaaacaactgctgcccaggtgaacctcgagcacgtctagacggagttgatctgggaggaagtgaatgtgtgtgagctgaaggaagatcagagaccgaggtggaacttgacggatttggtaaaactgatgaaacaatatctgatgagtcaactatattcttcacctgaagaattaaaagatgagagggctaagagaccctgaagggacgaaaagagactcaaattggagaaagtaatgatctcacctcaacacgaacaggtcttgccaagtatacatctgcccagagaaaatagatgcatgagagacaggaaaaaaatccttcattacagtaaaaaaataaagctgaaatgatctctaccaaaaaatggaatgtctctcgatctaatcctaccaaataaatgttgttacccctttgactggattgagtagactggaaaagaacatccacgaaggaactaaaatcgactcagcagtatattcccaaacaatgaaactgaaagttctacactttccccacaaaaaaagtgtttgaacgaacatgtttgaacgaacatacctgaaggagatcgaatcgccaaacttgtacccgctaaaggagctgtaaccatcgaagctgtgcccatctctgagtctgcggatttctgagagccaagagtagctaaacccccagtttcagatgacggaggtcctctctctaagcctaacgacaacttatcgatgtcaatacctctactcccaacattatgattagatgaatctttaatctcatcagctacacgcctcctgttgtcccgtcgaaaactccacgatggtgaacacactgaattatcaatagctccaccgggaacatttctgtcctttgcagccacacagcaaacagaccccataatccttaaaagagagctgtaatgaatatgtcttacacaatctccattggtggtgcttcctaatctaccactgaagaacgtatcacagtagcaaaccacaattctgcatataaacaaacagaatgtgaacttcgaatcagagccattataatacatagaggtgaaggcagagacctcaaaatctaacgcagaaatcatcaatggaacggaattaaagtaaatacaatagatgattctaaaatccgggggttcaccagggactcaccagagcaactagggttccgcaggattgaaacgaggtatatgaagatgcggcggaattcgaatccaacggctgagagagatttcaattactcgacggagatggccgccgatctgagagagagagagacggaggttgggtgcgtcgcagggaaattgtgccacgtcacccttcctctcttctttttctgttctctgtttttcttgtgctactatttgtttttggtcaaattttacttttttggtcaatttgtttcttttttttttacataacaatttttttttttttttttactgaacaaacataacaaaatgttttttttaacaaacataacaatatgtttcctaatgcaatttgattatantttttagtagtacttagtaagtcttggtatgtgtttatggacacatcgttttcgggaaac

SEQ ID NO: 36630 - DNA, 1534 bp, Arabidopsis thaliana landsberg
  unsure (1)..(1534): unsure at all n locations
cctcgactctataggatcccccttccatatattatataaacaccaaatgagatctcatttttctaataaataagaagaaagaagagagaaacaatggcttgtcgtcaaattttggccatagttttgtttctttgtgtgtttcaattcttggactgcactgttagctccgccgtagaagagaatgggactgtgtttgtgtacggaagagccgccgttggaacaatagacgaagacttcatttgcgccaccttagactggtggccaccggagaaatgtgactacggcagttgtagttgggaccatgcttcaattctcaatctggtttgttttttctgtggttaatttgtggtatctttttaatcaaattttgtttcattttcatgtttttccgtcgaaaacaatgcaacttgcatttttgatagaaccaaaataaaaaaggttgtgtatttatttcgggttggttaggtagcaggaatccattgaaagatttcttagggactactactcttcattaagcaaaatagaatttactaattgttagaaaattgtagagattaaaaaaaattgaatcatttttaaccatttatgggaatgtgaaaagtcaaaaaatcaagattcggcaagtataaggtattcctttgtttttgtcatcatatgccattttaacaatagattacaaacaaaatttggtcatgttaatatgaagtaatttattcgaagagttgattagagaaatatgaaatctaatgaaaaatttggtcgatcatcttgcaggatttgaacaacgttattcttcaaaatgcaatcaaaggtaatcacatgattcttgatttatattggttaatgttaggatttgaccattgttgtcccaatttccaaaaacacagcatttgctccgttgaaaataagaataggaggaacattacaagacatagtgatatatgagacaccagattcgaagcaaccatgtcttccttttaccaaaaactcttcaattctttttggttacacacaaggatgtctacctatgcgtcgatgggacgagctcaatgccttctttcgcaaaaccgggtaccttcaaattctcttctatctgtctctttccttatctacttgtggtttgagtcggagctaaagtcatcttcaaattctcttcttacttttcttctctctgtctcttttcttacttacttgtggtttgaatcagagctaaagatatcttcaaattatcttctttcttttcttctctctgtctctgtccttacctacttgtcgtttgaatcagaactaaagtcatcttcgggctgaatgcactttctggacgttccataaaatctaacggggaagccataggagcctgggattacaccaatgctgaatcgttcatccggtttacagcagagaacaattacaccatcgacgggtgggagctcggtaagtcactttacaacataacaaagaatgcataagcctgattgaaatctctactcatctncaagctggttttgcttcttttctcaataggcaatgagct

SEQ ID NO: 36631 - DNA, 116 bp, Arabidopsis thaliana landsberg
aaaaaataaagagtagtaattttattatcccattcggatggattatatataataattatctctgactgtttatgtttctagcatgaccactcgattaaatgtggagggaagcggga

SEQ ID NO: 36632 - DNA, 220 bp, Arabidopsis thaliana landsberg
gtcgattaaggtgtaaccgctgccctgggagcggaaggcgggccgaccgctccgcgggcaggaggtagtactggtgttccttggcgcccggggcgccgtgggttctttttcgcggcccccccttccccgcgggaggttcgggggggcagcgtgccgggccggagcccggcggcacgggtgactcgttcgcggtctgttttgtttaagggtcacggcaatg

SEQ ID NO: 36633 - DNA, 1028 bp, Arabidopsis thaliana landsberg
catgagaaatgaaatcgctttgtaaattttgattctgtttcagttcgactgagaaagatgttattctctttgtaggaaacacagaggttatgcaaaaaggtactgaagaagtggagagtttgagctcagtgagtaacaatgttgctgaacagatcctcaagactcctgaaaaacctaagaggaagaagcatcggccaaaggttcgtagagaagctaaacccaagagggagcctaaaccacgagctccgaggaagtctgttgtcaccgatggtcaagaaagcaaaacaccaaagaggaaatatgtgcggaagaaggttgaagtcagtaaggatcaagacgctactccggttgaatcatcagcagctgttgaaacttcaactcgtcctaagaggctctgtagacgagtcttggattttgaagccgaaaatggagaaaaccagaccaacggtgacattagagaagcaggtgagatggaatcagctcttcaagagaagcagttagattctgggaatcaagagttaaaagattgccttctttcggctcctagcacgcccaagagaaagcgcagccaaggtaaaagaaagggagttcaaccaaagaaaaatggcagtaatctagaagaagtcgatatttcgatggcgcaagctgcaaagagaagacaaggacccacttgttgcgacatgaatctatcagggattcagcatgatgagcaatgtgactaccacaaaatgcattggttgtattcccccaacttgccacagggagggatgagataccatgccatttgcagcaaagtattctctgtacaacagcgcaaatatgttcctgcctttcacgttacgtgctccagtgccacatctcagctcagtgctaatagagtcctaaccgttgaagaaagacgagaaggtatctttcaaggaaggcaagagtatgagctaaatgttctatcggatacacctacccccgccgatcaagaagaacacaacagaccataatcgattccggatgttgtcttcaatgcataacca

SEQ ID NO: 36634 - DNA, 951 bp, Arabidopsis thaliana landsberg
agactgccggacattatcggaggttttgcgttttggtttttgggagagagattgaaaccctaggaaaaaacaattgagacgtttgatttatactttaggtttagatctattgaaccagaccggttcaggatttgattagtctttggttctgtccggttattaagaccaagtaatttatgtttttcttaaagatgggtgttgattgttgaatactgaagagtttatttacttggtgcatacttactgtctcaatgcaacagcgaatttattaacagctttgtttttaggcttcatgtaggagagaagtagagactcacagtagtgaaagactcttgaaacaaagggtcaggttatgtaaatcaataataattgtgtttgcagagtgctacaagtgttggttatataatataacgtatcaaacctcaaaaatcatgaatttgtcaccactactcactacaagatagccttttccctatcttgatgtttgttacttgagtctttcgattgttctcgagtctttagactgtgaaagtgtgaatcagtgggatcgccattgaagcatcatagattaggattctttgattaatacttaactaggctgaacatatctaaaactaaaatatctcgtcctctgtgttttggacctcttccccctaaagtcaaaattctataatcttttttcagatttattccttgtaatctacttgctagtaacaacgattgctctttcttttgtttgttaattgattctaagagtttcagtttgtcatcagcttatgtcagatagattcacataagacatgacaggcaaatttgcattttttctggaatttttctttcacgggtttttctcaataaacacacaatttgtaatagcctaattacgtttcgtcgccaacaagaaaccctcatcttcttcatatagaccaattctacacgaagacaacaaat

SEQ ID NO: 36635 - DNA, 1373 bp, Arabidopsis thaliana landsberg
tcagaatgtcagtagtctctatcttctcctctacacataaagaatatacacgtgttttccaccactgttttattactgatcggcccataaatacaacttatcggctcgatcctaagaagagatacaaacaatgcgttgattgaaaaattaaaggattggagaaagaacatcaatcatccatagagttgagattctgcaataagaagtcttaacctttaaaccgaagaaacaaaagggtttcttcccaaagtcttcgtcttcgttttgcaatcaaatccgcaaccacactgtggcgactcgtaaaactcatcgatctcgaagttcgccgatgtgatcccaacggagaactcgagttcgtctccgttcctaataacctcaacgatgttgagccacaagaagagaactttcaccttcacgccggtaagcttcgtgatcttgttctccgatatgtatccagagattgtcgatttgtaatccaattggtaagagccttgaagagcgaaactgcacgatttgttgaaatacgcgtggaattgaccagtagatttatctaaatcatatgacaccactcctttaggaagaatcccgacgggaaagttgtagctttggaggagagtgtacgccgtcggtatatcgtcatcgttagcggcggcgattaatggcgaaggaatgcaaaataaaaagaagaagaagattgaaatcggaagcagagtcatgattcgtccgatgtaacccaaatttgaatctttaggagtcgtagctaaatcactaatttaggttttaggtttattatcccgtttggatttcgttttccgtcactttctcggcgataaaataagagttttctgggagagacgtgagagacttttgtatagctggcacatctgatcagatcaagcgaccataaacacgacatcgttttaaccgaacaactcgacacgtgtcatcagtaagcccatgaggtgtctttttgtcattttgtttcaaaacaaacaaaattcttcacatgggctaattttgggcttaaaccaacagtagtgtttattcttatatattcataaatcataacagcttcgaggccgtgtttattttatatattataatcataacagctttaaggcccatgggctttaagaggaagagataggcctataacaattaaacccacaaccacactttgggctgtccacgaaatacttgctcgagaactcctccgaagcagcaccaacgaagaactcgacgtcgtcgccgtcacgagacacctcggagatgttgatccaaaagaaaagaactttgacgttacgcctatcaaccttatgacccgtcctcttgttatgatgccggagattacgggtttgtatttgaccttgtac

SEQ ID NO: 36636 - DNA, 2186 bp, Arabidopsis thaliana landsberg
aagcgaaaaataaaataattcctatcatttatgtggaaacaaatagttgcaaagaaaataaaaattcttacaaaaaaaacagaaatcagaatattgagcctaaaaaatagtttgaggtaaaattacaaaataaaataagtttgagatatttgtgcaaagaacttaatatatttattcatttgccccataaataccaaagacactgcatcttatctccactctcaaaatcatcttcttcacccaaaaacccctaaaagccttatcccttcttcttcccatggctgcttcagcttcgtctctcgctctctcttccttcaaccctaaatctcttcctttcggcgtctccagacctgcctccgtttccctcttatctccttccctctcctttaaactcaattccgactccgtttccttctccatcgccgccaaatggaactctcccgcttctcgcttcgcccgtaacgttgcgattacctcagagttcgaggtggaagaagatggtttcgctgacgtcgctccgccaaaagagcaatctttctctgctgaccttaaactcttcgttggtaaccttcctttcaacgttgacagtgctcagctcgctcagctctttgagagtgccggaaatgttgagatggttgaggtatggatttagggttttccccaatttgtgagttatagaagaaagtattgttcttttagggtttttattgataaattgataccattactcctttttttgttatttgtcttgtaggtaatctatgacaaaattacaggaagaagcagaggttttggattcgtgactatgtcttcagtttctgaagttgaggcagctgctcagcagttcaatggctatgtaagaatatacttctctaccttactctatcttcgattgttgaatatgaattcactgaggactagctttatcttatcttgttggtatgcgtttgtgttttggtgtgtgtgcttaatgtgtttatgttgttctatgtttctgtgataagctgtgtttgaatgcaatcttcaaacttgtggaatctaaagataaaacttggacctctgtgttgttgttcttattgtattagggatttggttgcttcggttaaccattttgatgtgaatttgtaggagttggatggtagacctttgagagtcaatgctggtcccccaccaccaaagagggaagatggtttctccagaggacctaggagcagctttggaagctcaggttctggatatggaggaggtgctggttctggtgctggttcaggaaaccgtgtttatgtgggtaacctctcttggggagttgatgacatggctcttgagagtttgttctcggagcaaggaaaggttgttgaggccagagtcatctacgacagggacagtggtcgatccaagggttttggatttgtgacatacgactcttctcaagaggtccaaaatgccatcaagtccttggatggtgctgtaagtatcatcacttctcttctttgcataataatttattcgattggtacttcttactgtaaatatcaaatatctaactcatgtgttactttcctaaaggatttggatggaagacaaataagagtctcagaggctgaggctaggccaccaagaggccaattttgagcggtcacacctctttcatattctcaaaaaatgcaaattctggagggtaagaatcgcaattctcagccatgttctgctatttccattctgaaccatatattgccttgcttaagacagttgaatctcgaatgtaacaggttctttgaagcatatagggttagtggaaaatggcggtttcagacagtaactaaaactcactgctggtgcacgctaggctttatccgcctttgatgcatgaaggtcgttaaggaatggtctttttttgagaaagataacaattagattaaagcagagaacccatgtttcttgtctgttcgaatcctgcgagattggttgtagttgaagttgcattttcttcttgtcttttttgttggtattttgacacaatttggctttttggcatatgagagtgactgtagcagtctgttttatttgatgttcttgatcttcttatgttctgaaaaccagttttcctaaaacttaacaaatttcgatatggaacaagaaattttctggaagggtttgattgtgtgaggttgtattgtcagttctca

SEQ ID NO: 36637 - DNA, 1841 bp, Arabidopsis thaliana landsberg
  unsure (1)..(1841): unsure at all n locations
aacattgctgatattttttgcaaatccaattatgttaccggatacaaagcgtaggaaatcatcccagaatagaatataaattaaaatttaaatattatcggacagaacataataaatggtcgagaaaataataaataataatatgtgctgttagatagccggcaaatggcttttgccacccacattgaacggcgaagtcatgtcaacacgttttactgttaattttttttgttatataaataaatggttaaggaagtaatcgtaattaaatctctgctaagctatgattaagtctaatcactgctgagtggattattagtttatgtgatggcacaagaatgttattatatagattaaatataattccatggaacatataattgagaatgaaacgtatggtcatgtgggtgagacagctaagaatgtcttctagtttttgggtaagaatgtattttttatccaaaagcacggatcgtactcttgaaatgaaactaaccttaactttgcattatttggcttgtagtgtgtacttctcagtttgtggcaatcttccctcgaagctgtagtttataaggattgaaacatgtaacagtaaacataaatcatttttgcaacactatcgctatcatcaattgaacttgagctcccgattactagaacatggaaacacatatgcagaagtgtctccaaaactcgtagccataatctttagtactacgacataagccaattaggcacgacagagactgagagacatcaaagactattcccagggattattccaacatttcgtacagagatgtagatttccgatactatatataatatacctatacannnnnnnnnnnnnnnnnnnnnnnntttccaatatttaacaataatcaaaaagataaacagtttcaataagcatttttttccaaggcaacgtagcagtactaaaatgtcagtcaaatttctcccaatcttgagttacattggccgaacgaagctggcggaggagggttcaagcttccgacaccgtttccgaacgattcccactcagtgcttacagctgcagctttgctctgatccacaaacggatttgaacatcttgccttcaacttatccacagcctcctgcaagttttggattctacgtacctgccaacacaaaccacaactcatatatcttccaactctattaacactcttaccgtgtaaacatgcttaacaaagcaagaaaactaacctcagccttacgctgtactttagcgtccccttcagcctcaatgccatccaatttgagcagctgcctcataagaagctctgcagccatgtcaaactcccgcaccgcaacttgcgtccctccattcacagcaacttctaaagcaacaacctaattaccaaaaaaaactagcttaagcacaatccttccgtcatctccaaaagaaatacaggcttataaaaactcactctatccgagagcttatcgacctctcctgtaaccgcgttaacagcagcaatagctttttccatctctttagttaccacaggaggctgttgttccactctcttattcgtatcctcaacaacaacaacaagcttagacgcatccttaacaccannnnnnnnnnnnnnnnnnnnnnnnnnnctctcaactcctctgaacaagatcttcaattcactagcttccaatccagttttctgaacaagagctttcttcacatcccctagttatcacattcgagcttaaacatatcaatcttcaactacactaacacaacttcaacaaaaactaaatagagcaagaaaaatttcataatgaatcacgctaaattctctcaggcttcgattatttggaat

SEQ ID NO: 36638 - DNA, 4694 bp, Arabidopsis thaliana landsberg
agcccagatcgagaatggtttgtcttcgcttagtattcctccaaagtataggtacgctagtgattttcttaaagtctgcgactcgaatcgagatgggcgtgtggactaccaggagtttcgtcgttacatggatgctaaagagcttgagttgtacaagatttttcaggccattgatattgaacacaatggcgacatttgtccagcggagctttgggaggctcttgataaagctggtatgtgatttttgattcttatactgttccattcttctactgttactttgcaactatcttccataagcaaaagaggaaacttttatgggtttatggttgtggattttgcttaaattgttagttactgatagattggttggtgacttgaatttgtgtgttgttgttcgttgatcccttgaaaattgaaatgtcttgatttgtagattctcaacgtattaacaatgtctgccattcctttgacatagcccttgtttgcaaaaccgttggttgtgagtaaattaacttcacagttatggtcttgtaggcattaaaatcaaagatgaggaacttgcttcttttatggagcatgttgataaggacaacaacggaattataacttttgaggagtggagggattttcttttgctaaaccctcatgaagctacaattgagaacatttatcatcactgggaaagagtatgcttaatagacattggagagcaagctgttataccagatggtataagtgcacacgctcaaagaagcaaattacttctcgcgggaggaatagcaggggctgtttctagaaccgcaactgcgcctctggaccgtctgaaagttgctctgcaagttcaacggacaaatttggggtgttgtcccgaccattaagaaaatatggagagaagataagttgttgggtttcttcagaggtaatgggttaaatgtagcgaaagtcgctcctgaaagcgctataaagtttgctgcttatgaaatgctgaaaccaataattgggggagcggatggtgacattggtacaagcgggaggcttttggctggtggattggctggtgcagtggctcaaacagctatttatcctatggatctcgtgaagactcggttacagacttttgtgagtgaagttgggacaccaaagctgtggaaactcacaaaggatatttggattcaagaaggaccccgagctttttacaggggtctttgtccttctctaattgggattatcccttacgcaggaattgaccttgctgcttacgaaactcttaaagacttatcaagggcacattttcttcatgacactgcgggttagttacttatcgtgccttgaaagttcttgatatttctcatgatactaaaccgtatatgatgtgcagagccaggtcctttgatacaactgggatgtggaatgacttctggagctcttggagcatcgtgtgtttacccattacaggtcataagaacaaggtaaaaactcacaatctttagctttttgagtttatctatttcttcgttttggtttgaaactgagtttagtcatttatcatcagaatgcaagctgatagctcaaaaacaagcatgggccaagagtttctgaaaacgctaagaggcgaaggtctaaaaggtttttacagaggaatcttccccaacttcttcaaagtcattccttccgcaagcatttcgtaccttgtctacgaagctatgaagaaaaatcttgcccttgattaaaaaaagcaagaaacctaatgttgtgttcaaagagagatacagtgaaaactccttgatggtgacgacaaaaaaaaaacttgagctttccgttttcctttttttggattcggtaaaggtcattcgagtgtagaaaatgtaacttgatctgattgattcttgattcttctttagtagtttggtgagtccataaacactcatttcttaagaaaatagtttttatgctaaatcgttcgtttccctttaaaagagaaaactttagaggatctggtgaaagctcttttgatcaactgaatgataaattatagtagttgttcatatctcttgaagctgtgtagaacccttaaacatctgcatcagtttcatgcccaattcatcacttccggcagaatctctaatgatttcaaacaaaactctgttttcgccaatgtcctcttcgccatcacctctatttcaccgtctgcgtcggcgtcgaaggaggtcgtgagtacgcgacttcagttttcagattcatcacaaacccttcaacgttttgtttcaatacgatcattaggatttgtacgcttcatgagccgtcgtctctgtcttctaaacgtttcttcgtcgagatgcgacgtcgctctgttcctccagatttccacactttccctttcgtattcaaggcttgtgcagcaaagaagaatggtgatcttacattagtcaagactctgcattgtcaagctttgagattcggattgttatctgatttgttcactttgaacactctgattcgtgtttactcattgattgctccaatcgatagtgccttgcaactgttcgacgaaaatcctcaaagagatgttgttacctacaatgtgttgatcgacgggttagtgaaggcacgtgagattgttcgtgcaagagagttgtttgattcaatgcccttacgtgatttggtttcgtggaatagtctcatttctggttatgcgcagatgaatcattgcagagaagcaatcaaactcttcgacgagatggttgctttgggtctaaaacccgataatgtcgccattgtttcaactctttcagcttgtgcacaatcaggggattggcaaaaagggaaagctattcatgattacacgaaaaggaagagacttttcattgattccttcttagctactggattggtggatttctatgcaaaatgtggtttcatcgatacagcgatggagatcttcgaattatgttcagataaaactttattcacatggaatgcaatgatcactggttttgcaatgcacggtaacggtgagctaacggttgattacttccgtaagatggttagttctggaatcaaaccagacggagtaaccttcataagtgttttagtgggttgcagccattctggtctagttgatgaagccaggaacctttttgaccaaatgagatctttgtatgatgttaatagagagatgaagcattacgggtgtatggcggatttgcttggaagagcaggattgatcgaagaagcagcggaaatgatcgagcaaatgcctaaagatggaggaaacagagagaaactcttagcatggagcggtttgttaggcggatgcagaatccacgggaacatagagatcgcggagaaagccgcaaatcgagtcaaggcgttgagtcccgaagatggaggagtgtataaagttatggtggaaatgtatgcaaacgcagagagatgggaggaagtagttaaggttagagaaataatagacagagacaagaaagtgaagaagaatgttggatttagtaaagttttgtcatagtttggatttaattaaaattaataaactatgattactaatgtaacaatcattaagagtaaggacttaaaaactttaatggcccaggcccaataactatgctcaactagctgttaaatgtgtacgtacgtatatagcaaaataacagtgcacgtagaagagctcgcttttgaatgacgtggcctgttatgattggttagcttcgcgtggcgagagatttgattggtggaaacaacaaaatgacacactcgaccgggtctacgggattgaatatataatttattcagagaaaccgaaaaatacatatcactctttctccttcacgagggatttttgttccgatctacttctccggcttatcaccgatttagatctaagcctgaggtttccttttgcattttagagattccgagaatgagacaacggcaactattttccgtgtttttgcttctcttagctttcgtttcgttccagaagctttgctactgtgacgatcaaacggtaatttcgattcttcctctgttctttgtagatccgaagatttagatcgatcattgtttagctgagttcgtttggttttggattctcgtttctgtttcaggttctgtatgaatcgttcgatgagccttttgatggccgctggatcgtttcgaagaatagtgattacgaaggtatattattgtctttgaattcccactgcattgtagttagtgtatcgttctgatctatatctgtatttggaattcaattactacttacttactgtgatgtattgcactcaacattatagaggaatcaaatcgagtagtttgaatcaaatctgactatgtggatgttaatcaattctgatttggtgcttttttggttatcaaatcgaatatgttcctcttgttgaagacttgaagttgttgatgattttccatttttgcattgaagcttcttgttaaagacgattttatctgtttcaggtgtatggaagcatgcaaagagtgaaggacatgaggattatggacttctcgtgagtgagaaggctaggaagtatggaattgtgaaagagcttgacgagcctctaaacctcaaggaaggaactgttgttcttcagtacgaggttcgattccaggaaggacttgagggtggcggggcttacttgaagtacctccgttcttaggaagct

SEQ ID NO: 36639 - DNA, 2262 bp, Arabidopsis thaliana landsberg
agtagtctagtgaagagtctccatcgattcagctctgtttcatcacctatgtgcttgaatctgttaagagtgatcttagtgcggcaacaagttaacaattgttcatcactttaggatctattaccttcaatcctctattattgtctaaaaaaactctgttttatattgaagataattttcttggattttttgatatttttccctcgtatgattgcaaattagaactttgactcttttcttggacaaacgggatggatccctctccttatcatcgtcccttgttgattaccacttcatgaaaatatttgctggatattagtcggaatatatctatgtaaaaaacttgttaaactaaaacatttctgacggttttttcgatgaactgtttaccaatttccggcaatatatttttgagaaagtttaaatgttcacaaactgcaagtgtataaaccaaaaaataatgaggaaacgaagatgggtggaattgttggatttggatatatagtgaatgtttatcagatagtgaatgtttagtcaagttataggacttatccggtgataggacacataaacccacaaacaaacttgtgctcttttttaccatttaagttcatcatacattttgaggtttgttaaatttacggttctaaaatcaatttttcgaactactttatatatcgataagttaatactatatattttaataatatataacagtctcatttttattaaattttttattattattatacacttcgatttaatttcccaaaaaaagacatgataattataaaagaactatggggtcaaacgtgaaaataatgaaaaatccaaacctatctcgtaaaatttgcgtagcgattgatgagagcatgtgaagaagccactagatgagtcaggtctctttggtttggcactgcgcagcactttcaaagcccaagcaagagtccgtcgtcacgaacgtcttcttcgtctccaccgattcttcacgtattttaatacttttccgatttgtttattttttcccgttttgaatctcatcggaattttcccccggaatcttatggtatattctattataccttttttacaggaacctgtttactctctttctgtgatttttgagtagattcggcttcgtacgattagggtttgaaggaggtgattgtggtgtctttcgttgtttgtggttttatttcactgtaagttagaattggctccagttgattttcctagggttttcacaaatgtcggaaggttcgagacggagtagggttactataactctaggtcgtagcggtcaggtacgttgaaggtttcatctctcagtttttgtgttaaaggagtttgatttggtgaatctggaaaatgaaagctttagaattgttttatagagatgagttggtgtaggatttaatgagtttttgagtctagaaaagtgcttattttggtgatgtttttcttttgcaggtggtgaatcgagctgcaagtgatatagatgatgggtatgagttacctagagttgggactaagcggtctgtcaaagagagattagggaatccgttagatagttctgtttatggtggagaagaggtggtcagtaaaaggtgttaactttttccctcttatgtgtactactgctgcatattgattgtcaggagcttcttaatctgtgatgttgctcttattatcatgatatctaggaccttttttgtttgttcacggggttgtgaatagatgagtagtgagaactctggaggaactgatggattgtgtgttctatgcttcggttttatgggttttgaatttggttacttgttgctgcaaggtacactagattaaagtttttggttttctttgtttatgcaggcaaagaggggaagcaagtttcagtggaaatggtatagatgtgaattactggatacacactagcgcatgtttgctgatttctgacccacccctctttgttactaagatttgcagatcagtcaaaatgatctccgattcaaactgatgcaaaagaatgcccagagacgagctcagagcgatgaaggctgcactatggatcttcgtgaaaagctctcaaggagtgaacagcctcctcgtagccttgatacaagacctcgtatggctgaagcgagggatcgtcctttatcttcatcaagaactgctcgtggttcctctcagatgatttcatcaagtagttcgcaccctgcatgggctctggaagaatttcgacgaaggtctccagagagatttgtg

SEQ ID NO: 36640 - DNA, 1994 bp, Arabidopsis thaliana landsberg
taccctccattggattcagttttgtaggattttgactagtgaaacttcattggttttttcagggtttagtaatggatcagtatacgtgcgttcttcttccaatgatcaaattccaagaaggtttatctaccttggagatggaggaggtgacttttgcccgacattgaagctgagagagtgtgattttgtgatgccgagaacgaattatccgctatggaagaagatctcagacaatcccttactgatcaaagcagaagtcaaggaatggagtagtgcagaggaacaacagagaatcctgctgcaacttgtcagcacaataacaaaagaagaagattcataacacaataacactaggctttgtttagagtcgataataagtgttactgattaatgcaaaggtgatgaaagaacatttgtttgttcctcttcactaaattgataaaggcattgctttgtgtcatggtaatggaaattaattgctaccagcgtttaaactcaaaagctacattaaaaatgaaggaatttagctaaagctcattcgattttatatttggtagtgtatatcaaaagaaaaaatgtatcagatattgattgaaactgaaaatccaaaaaagaagttaattttttgcaaaaagttggaactatcacttcaaaagaaatttatataccaacagtaaaaaactaagtcacgtgatcgatccttggcacgtgtgaaatttcatcactatatcgttctttgaggcatttcgtcgaacaccatgtatgcaattggaaggggtgtggttttggtcgacgtagcccgccatgatttctctccttaaagctcgcgagaagcttctctctcctctcgtcagttccactatccgaagactctcctctagcctctcctgtaaatctgtctttctctattcccgcttctgctttatgtgggcatgtttagctgaatttgtatctctactctaagctgtgaataattgtgtggtttggagcagattctcgtgaagattcgagggattctgaagtcttaatacacccgagtgctgtcgtccacccaaatgctgtgattggcaaggtttgattcatttactgacattgctttgaggtctctgagttgttttaagaacctttatatttggtgaatttggactttactcagaaattgaacccttctctgctcatttgaagactagaaacagcttaacacttgcaattttcaaattagtagaacaagatggtgaatttgatctaacctggtcaaagtgtgatgctttgtttgagatttgagcttactagactgtggttaaccagaaacattggctaacagggagtttcagttggtccatactgtactattggctcttcagtgaagctaggcaatggctgcaaactctatccttctagccatgtctttggaaacacagagttgggggaatcttgtgttctcatgacgtaaaaacccttccatctcttagattatactctgtaatttattgattgattgattgatctttgctatgtgtctgtcttgaatttttgtcagccagtggtgctgttgttggcgatgagcttcctggctatacattcataggatgcaataacattatcggtcaccacgccgtggttggtgttaaatgtcaagacttgaagtacaaggtgtgtgagagacgttatcttatcacctgttatcgtcctaatctcaccctggttatagactaggaaccgatatatgtcaagaactaatgctgtgttttcttcttttagcatggagatgaatgctttctttgcattggtaacaacaatgaaatcagggagttctgctcgattcacaggtcatcaaagcccagtgataaaacggtatgtagctgaccattgtctaatatcattgaagtttcaataggttgtatcatgttttgagttatgattattactggaacaggttattggtgacaacaatctaatcatgggttcttgtcatatcgcccatgattgtaaga

SEQ ID NO: 36641 - DNA, 1509 bp, Arabidopsis thaliana landsberg
cacccaccgggccaaattatggcctccagattgtcatgagtagaatatttttgtcttctattgctgaaactaccattagaattccagaatcctacccttctctcacctgatcctatcatattcacaatctcaaacttgtctgataacaacttcatatcatccaactgaaagttaccactcagacccttaaacctgctttcttttatggcctcaaggagagttgatgtcacagttggcatccttgtcacttcagctgcactcgccagactccaagcgacatcatgagcccatacgccagagatactcaaccgagtaatctcactcccagtaacttcttcaacagggagtgtttttctccatctcaaagtgaagttgtgaagctcttttgacattggtatataagacttgaaaccaaccacaccttccattgcctcctttgttaaatcgtcaatgaactgatcatgaaaactgctcatgcttctggaagtaagaatccaagcaaacccttcacccatcatccctaatttctcagcacatgggaagagacgagttgcaataacttcagacaagtgaacaacaaagacagttgttcccaagtccttaagctcccgtaatcgatccatcaaagaatcctcactcgaagtgacactaaaagcaaccttggactgtacatgaacgttgttctcatggaaatggtccaccataaaatgcatactctctctcctttcatcgagttcttctaaaacaagagcaacactggtccaatcagacccatggaggaaagctgtaattcctttaacctcagaggcagagttatgtgtggtttggatcaagtgagtgtatttgctcaatgacaatgacatgggagagttaagtgaaatcacaggaaccctagctttctctccaagttccgccaaaagcttcgcttctagcaacgagttcccgccaattattgcttgcactccttctgtttgcagcaaatctacaactgtttcattcacaaagattgtgagtgtatgaataatcacaaaacaaaaataggaaaaggtgatttatatagagaggtgcaagagtaatggagtatgttacctgaagcaagagcaagaagaggctctccatgagagtttctgactgaaacagagagtcttgttttgtaatcattatgaatagcgtagaaataggaaagagccatggaatcagagtttttcactatcttcccttccaaggagcccgaatccaaagccaacccgacccggatctgaacccgtttacctccatcaacgtcgtcgttttgagtagaagcaaaagacctggagatgcagagtagccatacaagaagaatcgatagcaaagtttgggtttgaatacaaaatctctccattaaaaaaactttccaactagagagaaaggagaaaccccacgtttgctgcttttagccattattttattttgttgttatataaacccatgccgtgttttgtttttcatctctctaattattccaatttg

SEQ ID NO: 36642 - DNA, 3284 bp, Arabidopsis thaliana landsberg
gaaggagctggagaagcagaggagggaactagaagaagtagcagattataaagttggaagtgataagacagctctgtttttcactagactactccagagacgaatacaagagactacgcatagccttttcagggcatccaccaacaagaccatcatccattcttgcttcttaattcttgtgtacagtatatactctttgtaactttgttggtgatactttcacatatagggagctgttttgagattggtttgtggaaaaaaaaaagctcataagatttgtgtttgatattagctatgcattatctagtttgagttctgaaactggaataaagcatagaaacgtttcaagtgtttacaaatactgctgtatatgacttttggagcattgctcaagaaaaatcacatacagatgcatgtaaataagaaataagagtttcattttcttattctgaacaatcatcataagtaatgtggctgtgctctgtacagctaacaacccggaagagaatgcttacttgagatgttcaacgtcctgcaaaaatcaaacttccccaggaagcatagtatctaccggaccaagatcacagtaggcaatgccctgaaacacacattcataaagcaaccaaggttagtttctatataaattggctttgtctgaatagacaagaaagatacgtacctctccagtaaggtgtgcaacacatctcttctcagccaacagttccgcttccgactgcaatattttcatgtctcagttaaacttctagtatttagatacaaaacctgaaaaagattaatctctaagaaggctataccttggcgattcgttggcgaaggtagtcatcaatttctacatccttgacaagttcataatctccatctccctgtaagcaacacacaattttgagacttacctctagagaaaggttttaagtataaggatagaacataccttcgaccggcatggcatactgaagacaaggccctcttcaataccataaggatttccatccgtgtacacctaaatttacattaacggggccctggtgaaacttgaaccaatctatcttattgttatccaaatgagtgtaaaagaagatgtaccccagtcgaaaaccaatcaccctcaggagtaggagttacaagagactttatagcatcaacaatggaaacagccgtagaagcagcagaagatcgaccccatttttgaattaataacccacctctctgtaaaacaaaacgcaaacttactcagcaaaacattatatctcattgcagaaatcatttcattatcagaggaatcgccatcttaccttctgcacactctcagtgaatccctcttctaaccatttgtgatctgtaataacctccttcacaggcaggccattaattctggcatttaagaagtctggcacctgattcacctctaaaagattagagaaacatcccaagataaatgtagagaatagatgacactagagcaagataaggcaaacctgagtcgtggagtgatttccccatatggtcatattagacactttgtcatagaaaacaccggctttaagagcaagctacaaaatggaaattgtcaatcatatgtatgcaaatatattgcatacaatcacatataggtgtgaaatctagtacctggcatttggcacgattttcgtctaacctcgtgagggcatggaagttctttgcaggaatgttgggagcatttttaagacaaatcaaggcactgaaagaacacaaaatgaggtaaagtatacttccaatgtttgtcactgattacgatatgaagagggttgaattaaggaatgtagcttacttggtgttgcaagggtttcccactacaagaaccttgacgttaggagaggcagctttgttcagagctttgccctgctcagcaaagatttggccattgatgtccaacaagtcagcacgttccattccagggcctcgaggttttgctccaatcagaatagcccactccacatcttggaacacttcatttggatctgttcctatatcaacttctctcaacaatgggaacaatgaatcctccagttccattgcaacaccttcaagagcttgaattgatctctctgatcctagcagtttcaatgcaatgggttgatctggaccaaatacttcccctgaagcaagctacacacccggaaaaccaaagatacataaaataagaccaatgattggtaaccttatcctataaaacagtaacttaaaggattaacttactttgaagagaagatggttagaaatcattcctgcagcacctgaaactgcaatattgattaacttcttccatgatcttgtctcttcttcctggcaaacacacacataatactattatatccatgtaaagcagaggattatctcaattctcaagtctcaaagataagatttttttatagaaaaataataagagggaatagtaagatacagctttaagatcataggtgaggcagaacactccataacactctttcttcgtcttcaccaatccattttcttgcacagcaacaggagcttggctacttttatcatcaattcacaaaagcatctaagatcagataaagttgatttatttaagagagaagaaacgattaggagcttaaagagacttacttttgagaaacggagcaagagattttggagttgggagttgttgtgtggagaggtggaagaagaagatggcgaaagtggtttgaaaggtgcaattttgaagagagacgaagccgagacgaagagttgagaaaaggcgacgtcgttttgggggttgagagctctgccatggccattatcgcacagacacaaactgtgaaagtgagatttcagaactggaactatggagagagagcgcgccaagcgacagagtagtaagaaagaggattggggaatctatggataaggctcagctcttgacacttgtcactcttttagcatcctcaccgtttatcttcttttgacttttaggcccagttaaggcccaataacagaatatacctgaaaccgttcgaatttgatcactgatcggagattttcgtcttcgccggcgacattgcatccgctgaccagagaattaaaaaagttgcgactttgatcgcggaagtttaataatggaggtcattgatcaatgggttgcttgaatttttccttattcgacaacacaatcctagggccttccccatatttaatctgatttgggcgcttaaaaattaggaagaatttctttccgacctggcattaaagccttcagagaaata

SEQ ID NO: 36643 - DNA, 6947 bp, Arabidopsis thaliana landsberg
  unsure (1)..(6947): unsure at all n locations
gggatttgtgactgtagtggtcgcacatcagattgtgcttgcatttggaactgcgggttcgctggagactgtggtcggtgcatcatttggtactgcgggttcattggagattgctggtggggctggaactgtggtggcatttggaactgtggattcatttgagactgtggccggtgcatttgggactgtggtgggtgcatttgaagaccttgagaaaacatattaaaactcagctcatttggtaatggctgctgctgaataccacgacccatcccaaactgttggttgaaacaattctgacctaccattgcaggccatggcgctgaagcctgtcctggaaagaagtttaagcctcccggtccacctggcattggcatctggccaccattgaactgcggttggaacatcatttgattttgattttgcattgccatgaaaggtatctgcattcccatctgattaggtataggaggaagctgatatgggttctgctgattactctggggtctccatgctgcattgtttggaggaaaaccgtccatttgaggacgcggaccacccatttgaggatcagaacggtttgacgatagagaactagatccctggttcttcgtccattcccctgagtaactgcttgtaggccttccgggatctcggtttttcttcttcttgttcctggtgttaccggttttctggtcactcatcattcctctcttttccaacttatgcattcttctgtattcggcttctttttcatcatctgagaactctagctcgtctggtatctcctcgtcgttatccccagatgcatcgtaacctttcttctgcagttccttgatattgagaatatgttgagcgaaatcggcgacaaatgagacaggtgtcccttgacaaaccccttctggcacttcactctctgaattgaacctcacaatataataagggcacttcacgggtccaaagatctcatccaccagtcccaatggcgttcttttttcagttatccaaaggatagaaccttcagtcaaaggactatgcttttccattccctcaactattacttgtgcgctcattacctgtaaaatcacaaatgagacgggtatgcttttagcagtggattgtcaagacatcaaacagagaagcaatagcatacaagtagaggtaatttttaatataccgaaagaacaactccaacaggaagtgtggcatggtgtggttccagagtgacatccacaggaggaactggaggaagctcctgcaaaagttttaaaaaggggaaaaatctttcaaaatttacacaacaaaaagaaggcttccatccttcaaagagtaatgctaaaaaccttgaggacagtacatagttttcttgtcgcagtcaaccactaatggaaaaaatatcaaccactaatagtaatagctatgaaatgtgaaaagctgaaggatatgtaccttgagctcattctttgacctgataggttcttttgtttgcaaaccaaggtcatcatcctcatcattgctccaagcaaccatctcattcacatcatcatcgtcatcatcatcatcatcatcatcatcatcctcatcctcaatatcgtcatccccattctcctcatctaaattctctatctcaccctcttcaagttcccctgctagatcatcctctttccccacaaccatgtgttcaaacttttcttccttcttattttcctctttgtcgctctcgtcctcatcactctcctcttcttcactgctactactatcactactgcttgcagaagagctcgaggtttcgctctcagactcagcagaatccatttcccccttagcctcatcactcttctcatcatcatccacggccaaacttaccttctccaaccctacttcaatagaacaagccaaaccctcatcagttttcttcaaccctgattcatccaaatccatggtgggacaagcaacagacgcatcagacacaacaactggctcagtctcaccttccattgacctcgagttttcagaaacaaccggttctgaatcttttactgctggttcatccccaccgtttgcagacatctcaacacaaacattgggctctacctcaaccgagctcactccaacttcctcagacatgacatcacaaagcacaggctttacttcaaccatcgactcagacctaaccgaactcacaccaacttccccagacatgtcatcattaaagacctcaagctttccctcaatcgactcagaattaacagtagtctgattctccggacacattacatcgctaacagtaacaacatcttcttgaggtatctccatgtggtactcaaagaaatcaaagtccgtatcttctatgctaaaatcctcaacgttccgattactctcagaccaagtgatagaatcgaaatccggaaaggaatcgatggaagggaaatcaaaagagtccttgaaagtttttaccttggggtcttgatcnnnnnnnnnnnnnnnnngtagctcttcttcaacggtttttgcttgattagcgggaaatccaaccatggcaagaagagagagcgcgaagaagaaccagcgaagaaaagtgaaagaacatgactttcgagaattaaagtggcggctaagttatataaaggcagctattttagcaaaggcgcgagggtttatcgcagatacgttagggttttaagagcagagagtacttggctttggctctcttggtggtgccacttccctctcaattagggtttagccgttcatctctccctccacctgtctttttttcttttctttatttatttttttatcgtatttattttaattttaatccttataattaataaatcagttataaaatataaagatgtctactttacaaaatctacataattagatttaccaatttgattaattttcaatgttccattagctttatttataagtaacgaacttggaagaattgttcaccggtgattgtggtgcctccgatgaatctcatcatcctgaagcgccatttcagtcaacacgcctctttatgtctcacgccgtcaatttcttcctctgctccgacgaaacaatcccggatcctggagctttgtaaattgggtcagctcaccgaagccattcggatcctaaactcaacacactcgtctgagatccccgcaacgccaaagctttatgcctctctcttgcaaacatgcaacaaagtcttctcctttatccatggcattcagtttcatgcccatgtcgtcaaatcgggtctggaaacggaccgaaacgttgggaacagcttgctctctctgtacttcaagttgggacctggtatgagggagactcggagagttttcgatggtagattcgtcaaagacgccatctcgtggacttcgatgatgtctggatacgttaccggtaaagaacacgttaaggcgcttgaggtgtttgtggagatggtgagttttggtttggatgcgaatgagtttacgttgtcttcggcggttaaggcttgctctgagcttggagaagttaggctagggagatgtttccatggtgttgttattactcatgggttcgagtggaaccattttatctctagcacattggcgtatttgtacggtgtgaatagagaaccagtagatgcacgccgagtgttcgacgaaatgcctgagccagatgttatttgttggacagctgtgctttctgcgttttctaagaacgacttgtacgaggaagctttgggacttttttatgcgatgcatagagggaaagggttggtgcctgatgggtctacatttggaacggttttgactgcttgtggtaatctgaggaggctgaagcaagggaaagagattcatgggaagcttattacaaatgggataggtagcaatgtggtggtcgagagtagtcttcttgatatgtatggtaaatgtggatccgtacgggaggctaggcaagtgttcaatggaatgtctaagaaaaacagtgtttcttggtctgccttactcgggggatactgtcagaatggagagcatgaaaaagcaattgagattttcagggagatggaagagaaagatctgtactgtttcggcactgttcttaaggcgtgtgctggtttggcggcagtgagacttgggaaagaaattcatggccagtatgtgagaagagggtgttttggtaatgtgattgtagaatcggctttaattgacttgtatgggaaatccgggtgcattgattctgctagtcgtgtttactccaagatgtcaattaggaacatgataacgtggaacgcaatgctctctgcgcttgctcagaatggaagaggtgaagaagctgttagtttcttcaatgatatggttaaaaaggggataaagcctgactacatcagttttattgcgattcttactgcatgtggtcatacgggaatggttgacgagggacggaattactttgtgttgatggctaagagttacgggattaaaccaggtactgagcattacagttgcatgattgaccttctaggacgtgcaggtttgtttgaagaagcggagaatctgttggagagagcagagtgtagaaatgatgcgtctctgtggggagttctgcttggaccttgtgctgcaaatgcagatgcctccagagttgcagagcggattgcaaagagaatgatggagttggaaccaaagtaccacatgagttatgtgcttctcagtaacatgtacaaggcgataggtcgccatggtgatgcactcaatattcgtaagttaatggttagacgaggggtagcaaagactgttggacagagctggattgatgctcactagaaagctataaagattcgtatccctctaaggaccttgctctagtatacatgaagaaatggtgttgacaactttaaaccacacaaagtttccttgaggtctccattacaaagtaattcaaacaaaagagagttggcagcctagactttgcagaggaaagggttgtgtcaaatattttgtgtatgattcaagattttaacctcaagcagccactgatacttttctggtgaagagtgatttcttcatagtgcacgcatcaaggtcgattttgtagcttcacgcttcatctctgcagctttgccactccctcggaagtatgcatatacttgctgaaagtcgagtattgcacgtcatgggttagaaaaacagatggattcaagtgatttacagtgctgataaattctggagtagaagaagttgagaaacctgaatgacccagatattgagaagtgtttcgatgcagaagaacccagcaccaatgaaatacattatctgtgagggtgaaaaagaagaaaattaggtgaggactaagaagactctcacaatccgaagtaaagtacttgtaaatagacagaaaggttacgtaccccgactgcagcattagtagttagaagctcgattgctggcaagaaacctctgttcatataaccaacaatgcatggatcagatggagatcatcaaagactcaaaaggtttttaacatgttcatgaaatgacgaatcgttaaagaatgtaaaacttaaaaggctgattctgatgcttttatctagaagaaaactcttacgtgagagactttccttggaagatgactggtggagcaactgcagcaaagccgcagaacgcgatgtggaactgaaaagtgcaagacacgggtttatttactcatggcttcttgaaaaacttaaatgcagaggaaatctaccaatagaaattcggtttttcttaccacgtaaaaaaagaaaaaagctccaaacttcagggcactatcagttctgcaagaggtacacatgcattgtattattgactcatttcatatatctatttaaaatgcatcgtgttccagcatatactaagagagctggttttaccttgtagctcggtaaagagggcggtaccataagacgtacgctccaggtaccccagcaaggaagtaaattattgagagaagccatatagtgggacctgattacaaaacagaacacatcagatgattcaacatggtcagaggaattaacattacgaatctgatcgtttaggtaaaaacagtaaccttctcctttgatccaagctacagttactgccacaatattccacaagagacatcctactaaccctgcatagttcaagaatttaccctgttaacattttcttgatttttttgcagcggtctaagaagggttcacatacctaacaatgtggtgaatgcgacgtattggatcttctgtaaatgaattggaatctcatttggaatgtcatgatgaattaaaggaaaaaactccggccaattcttctcttcaatgacaactccagctgccaaaacaaccgtatcaagttagctacaaaaacccgtaaaaggtcattggaagatgtaaaaagacatatagaagattgcactacttcgtgctattgcgtcctctcttcttttaagctcctgtattgcaatgagaagaagaagactgttagatacagtcctcattgaatcagtaggtctaaagattatatttgaatatcgcccaagagactcggttactagaaatcacctgctctttccgcttcaattcgttctccttggcctggagttccatctctttagctcgaagatcctgcgaacagaatcagcaaaatgaaaacttccgttttcatctaaccagattttgagtaaacatgaaaggcaaaatgcagaaggtattgaaaatatcgtacattgccagaatccaaagggatatcaacggttgcaccacgatcataaggttccggtggaagtggcttgagataagagttgctcgcaggaggaacacttgtatgattctacaacataataaattgagatcaaatggagaaagactacagaaagatcagacattagtattcagtcattatgaaacagagctctttaccgcaaaaggattgatctcttca

SEQ ID NO: 36644 - DNA, 4938 bp, Arabidopsis thaliana landsberg
tcattacacttcttcttgggaccgcattgttacgctcctcacaggttcgtctcttgggaggaaacatctttattacatattcttatgattaaatattcttatgatttcataaatatacttcaaaatcaatacaaaatttatgaaaagttgtacatgcaacactttagaaatcttatattacatatttcatttatatcgttatttataaataatttatggtgccctatataaaaaaatgttctacatccgccactatagtgtttacttgttagaagattgatatatccctatttttaccgtttttaattatgttttaggtttaggttttagagtctatttgttgtttctagagtcttttctagccttttcaggtctttacatgtttgggatgcatttggatattatggagcatcctagaaatcaactgacaacttaagctgcagaagcaatctggagacgaaaacgcacgtatttgagatgcaacttattgatgttttgaagattttcaaattcggcccagaactttctcctatgtttaattaaggcccaacacgttttaaagacatttatatagtttgtaggtcattgttttagacctaaggttggagatgctattttatatctcttttgtactttgggagcaaaaccctgtagaaactccctttggatatttcttactcttttctcttgttattttcatcattgatttcttattcaaaatatgatttgtgtttctttgatcatgtctgagtaatccacttgttaggtttagggtttctcattagggatttagatgatttagtagattgccccttgctaggttatctataggattcttcatcttgattgttcttaatgctagttctagagtatctaactagaacttgatattagataacatgtatgcccaccataggtacatgttatttgatctactattttatgtgcctaggcatttaagaaagaacaggtaggctcatataagggctctggtttatctactaaggtgaacttatcgaacttgtttaacatgcatgctttaggtataggatttcacggcacatcaccgggaattttagctctaagtatagagagtttcgcggaatgccaccggttactctaaaatcatagtttgagttcgagaatggttcaataacaacttagctatttctatatctactatcatctattttctgagaataccctaacactaacgctttcattatcttgtttccacaactcacaatctgctattgctttcttttgtttctctttattttcttacttattttacttagcataattcgatttgccactagtctattgcgtgatccaagaactttgtgaattcgatccctaagtgctgcaactgacctctttatttgagagagtggtcttagaattaatttgacatatatcacctattccggcttattctccaggagtgcctaaactgcccagtaaacactctgctaaggaagaacacttgacaattaactatgttactagaagaacttttggaactcaggatagaataccaaaactctggaggataccattgggaagttaacctacaagatggaagaactgaaccatgcaatcttggaacttcaagaaatggtaagagataccccagctttgaaattgaggattagtcaaaggaacctagtacaaaagaagaagactactctaacggtaagaaatgagtactcaaccttccatatgtcaagagaggatgcagagtttgattcatgcactgaagattcaaccactgaagatgaggacttctcagtttctctcttcaacctttttctgactaagctctgtaagagtcaagcttagtgactttaaacaagctcacttgggaggaagtcccatgtctatctttgtacatattgctttcttgttatttttgatgtttttgtttaagtgtttcagggaaaaagacttctagagaatttcaggccacactcgaccgtactactcggctacaggccgaatgtgggcttcaattgaccaaaggcccaacaagatgcagcactcggcccgaagccgagtcagaaaaagaagcccatcaggcccaacactgtactcgacacgcgcgtcgagtatgtcggccgagttcacacgtgcgaggtcaacacaattcaaattcgaatttgaattcgaatttgctgggccccaccaatcaaatcctgctccccaaagcccttcaaagattctgctgcaaatagtgagacatgtccccttgaccaaatgaagggtgaggatctaaggtgtttggagggctaggatcaaatcttcttgtctataaaaccacactcaacaagctaagtcactcacactctcttttttgctcaaaaatttcgaattttactccttctctccaaacattttaagttcttactctcacttctctagatttctcagaaactttgccaaaatctcttgttacaaaccttttcaaagcctctcttacactctttgttcatttttaaacatcaatttctcttctactttgacctacctttggttattttgtggtgactatctgcagtaaatcacctcaagatcatgaatcccaaagaatcaagaaggagagcctctgctcgagcagtggcaagagggtttgagatgattaatgagaagaatcagtcaaagaatcaggaagctgcgagtcctggttttactcggatgacaggccgagtacaatggccgagtatggccccggagtcctctgtgggtcgttctgcggcggctcaagaggaaatagcaagaggcaagagggtctgggagtccgagccagttgcagaagaagaagtgcctgtgctagagaaggaagcatgtggggaagatgtgcaagttgatgaagaggtcccgatagttcctacaaggagaagaaggaacaacccaagaaggaagaaggagcctacaattgaagaacactaccagtacctcatggagttgagctttgaggggacaagatatccccataggcataccatgcaagctttggggatctgtagagatgttgactacctcatggagatggccaagctggggacattcttctcctacaagtgtgagggataccaaactgagagctgccagttcctagccactttgaagctccatttctacgcagaggagagggagagagagatacataagggagttggctatatcacattcatggtgtttgggattcactactccctccctattaggcagttggatgttgtattcaagttccccaccaagtatgggatccgccaaaacttcagcaaggacgagctccttgatctatggttgacaatcgccggtccactcccctacaagtcatctagggccaagagttcgttgataaggagcccggtgcttaggtatctccacctttgcattgcaagtgccttcttcccgaagaagacaaccggccatgttaatgagggagagctgaagttgcttgatctcaccttatgcttcattttggggcacacgaggaatgggatagagatggaaggggatagggctgatacatccctttcggtggtgttgattgatcacttgattggttttagggagtatgcagccggaatccaccaatccggctatggaggaagcttatgtgctggaggagtgatcacgcccatcctaatagccgctggagttcctcttcatacccccactcacacagcaacctacatcgatatggagtatttgaagaggaagtgctacttggacaggtctgctccagcggatcaactctacttcaagttcaagcactccacgctaggtctctctaggctagcactcccttgcaagaagttcaccaccattaggattgggaacaacattgactttgatcctcctcaatcgatcttagtcaatgtccttgcgcctctacaagcagagccgagcataggaagtgagtctcaagaagaaggagcagagtggaatgaagaagaagctgagcaggaagcttatactcggccgagtaactttcagcaggccgagtatggccatgacgagtttgagcaagctgagttcagtcaagctgaacagtttgatgaacaagaagattcgtgcgaagctgcagcggagcagtttttctttgaggattatgctgagtccgatccagagagagatcccggtcaagttcacaagaagttgggaatgctcaaaggtctgggcaagtttcagaggaagttgttcagtgggttgaagaagaaggtgagaaagatgaagagagcaatggatggcatggcggttcagattcaggagctgcaacgaagacagagatcaccaccacctcgacccgagttcaggagaagtaactcaacaagtgtggcgccgcgaagggacgctcgtttcgacccgccaagagcctcaaactacgagctcgggaggagctccaccttttcagatcgccgtttcaacagccgcccacccggtccagtgaaccagttggttctgaacgctgacccaagccgagaggagtactactcgggatacatgctcgaccggtcaaccgagtacaacgccaataaccccaacacctccacacgagatcctaagtacacacaagaccgcctggacgagtttgtccagaacctcttcgtctaaatgttgaggtatcactccatttcactgtacatatcattgcatttcttttatttcttgctttgtgtggttatttctcttgaattcttctttgaatttttattacacaagggactgtgtaatttaagtttgggggagggttcaagatgtatctaacattgtttcatgttcaaatttttgcatcatctaaggcatagaaaacccataaaaatttgaaaattttcgaaaatgattccccaaaccatagagtgtcatgtagtttgcatttgcaataataaggctgttttaagaatgttatcatataggttgttgcatttt

SEQ ID NO: 36645 - DNA, 4829 bp, Arabidopsis thaliana landsberg
aagatccaggcctctaggagagagagcgcacgatggtatctgcagaccctaattcgctagccacgtcagaacgaccggaaatgcatatctgggagttagactcagagattctgatgaaaccgtgtagtgcctaggatgtgctatggtactatgtgaactgctctagcgcatgttatagcctatgctaatagacgccataaacgcatctgacagcacgtaaactccttctaaatatggacctacgttctaaaaagacatacacaaacgctctgctagacacctacgcatggtctttgttatacgttctatcatctcgagggaactagaagtttctactgctacattgcttatctgcttttggcttcttgattaatatggtcggcctgctatgggatctacatagtacgttaccacaacttctgcttcattgcttatgtgcttgtcgcttcttcggtattttgatctgtctacttcgggatcttcataatcgcttaccactacttctgcttcattgcttaactgcttctggcttcttggttattttgatcggcctgctttgggatctttatgttagttcttatctactctgcttctcatctagatgctcttatgtttgaaaacttcattggctctgatgattgctggtcttgcttttcttgaacttaaaatggccgaggagttgcacttgctactctggcaggtatttgatacctttcaggcaggcttcgaagaaacttgtcttacggtgtagaatagtttagagtatgtagaacgtctctgctttgtttgaggtgggcacttggataaacacttatcgccatctgcaatagtcattcctttggtttcatcacgtttggtacatggactaatctttaaacgagagatttttctgctcattggtttcaatttcatcatgtttgattcaaggatcattctgtctttattgaaggctttttggctgcctcctcttctgatgatgctttggtttaaaaccctagtaaaaggagtagattttcataagtttcttatctttgtcctgttttgttgtgtcctgaaaatacttattttttatgaaaaataatttacagatatccaacttcatgagtttgttcactttttatatttagcaaaactttgttgtcatatgttttacttatcatcataatcaactaaacatgatgacgacgatatctcctaacaactagaatcgagcaattttgtgttcgtacttattcaagtgactagatttgaagttgttatttttgatgaaacatgtactgagtattgatataaaacatgtaaaacatcattgacaacatttttcattctttttggactttaaatgatagagataacataggtgagaccagtttacacgaaactccttaagtagggatgcatcatacaatggcaatataaatctgcttcaagtaaatcttgtgccggtccctgtgaggagaagaagctcatcaagaaaatcactttagacactcaaaacccataagataggctgcaaacaccacggtaaaagctcgagcaccagagagagtagtctcgtagaaaatttaccttaaagattcaataggtgaaatagcctgacccttctgaggcggccaagtctgagttggtccttgctaaggaaggcatttcaccttcattttttgcaatggcaggtatatcttctacacggttatttttgataaaataaataggtagtcctctccctacacgattcatcttcttaaaccagtgactgatggtctcaactcctagataggaaaagagtaccgtcaatgatccaccagctacagagataataaccggaaataaccatcgagttccgggaaaatgcggtatggtcaccaaagatgccgcaacataagccgttgccataaaccctacagaaacccacatcatcctgtgagtggccaccaataatttcttcaagggtttcctctggtaaggtatgatgctaacgagaagaataacaatgcacaaggacgtgaacaatgcaatgttgttacatattgcaaagactttaaatgctgccgtattacctacaagcgatttccctttccatggcccatcttggtaaacaccgcccggcgggtttatcccaccggcataagaaactgaagcaatcaagactgccactatcgcgatcgtatttcttgcattttgtaatgcttctatatgcatctcatgttccaagctcttatgacctcttttaacatgatgtttcttgcttttctttctctctgctatctctgatgtgcttatttcgattagcttaagcagccttattacctcagaatgccctatgtgtggttcatttctctcagcctttttagagtccacttcttctgaagtcttggtgtcacacctcaggtagcttgatataaactcatagtcttgagcttgtcgagggagaaggtgataagctcgataacccatattgtttctgtctctgatatctattattttcttaccaacaatgtaacgtataagctgcaattttttcaggaaaatatatgagaagaaacacacacacacacaccaaaacatggtttcttaaaggagagactagagagggacaaagaaaactactcaccggagaaccacaagacacagaagcagcaatatgtaagacagtgtttccctgttgatcttttttcttcaaaagaattgggctgctagttcccaaattctccgccatgaaaacaaaggcatcggtattcttgtttcgtgccgcgagatgaaagactgtctcttttgacggcgtccttacgcagaaagacaatggagacttgtccataaactcctccaggattataactgagcctctttggactgctagatgcagaggtgataaacctttgctgttaagagcttcttctagtccttgattgagtcctaacaatatacttgtcagttcaaggtcacctttgtcacacgcataatgcagtaacgttgatcgcgagccgtcttcaacctcccaagcatttttcctagctaggtctgggaatctctccagtatagtccctacgatacctgctcaaggatccaaacacagtagtagtgagctagtgatttttacacaagattacgaaaaatgttgagcgcgcactagaaaaacttactagtggatccacttgatatggcgagaatgagttcaccgaggccaattgattgtgtcttttccgcgatgagtctggcagcctctatggaattgctacggcaagccaagtggagtggtgtgtggttgttgatattgcgtgcagaacacacttccaatccagtctctaacatctgcataactatgtttacatctccaaggatagcagcaagatgcaaaggtgtgtttctgtatgcgttgcgggaagagagaagggaaggtcggagctcaataatcttggagaccagttctcggtgaccaaactttgcagccatgtgcaaaaccgtgttgttggtgttctgttcctcgcttctctcctccagggaagattcactatcttccaccaactctaaaaaagctggaaggtcattttgaaggatggcatcgaagatcggatgcatctttttctcaacaaaactagaacaaaagtaagaaaattcttaaatcttgggagtggttagactacaagggttgttagcatcttgacgttttggcttcttggtctttctttttcatttaacactggttgttgttgggtatatatgaagtgtgtagtgtgatgtttttttaattttttttgttttatacaatgtagtttaattttcttggccagaagactttgaccctatatagtcaacactcaacagcttacagttacagacaaaaaaagacgcgtttataattgaataaaataaaaaacaaaaggcttggccatgccactggttcctctctctttctttgacgcgcaattaaagctaatgtcagtctcaagcacaacccttatgacttggtctttgagtactaaaagattaaaaagttctcatgttctgagttctgacttacctatcttctccaagattgctcctagtttcaatatgtgagctatggagagaaaggggtaagatgattcaatttaatgtagtacaaacttcatgccattgatgacaccatgaggaacatagcttccgtattccgttgatgggttcaacttgtacattcacattccatagactcatcctatcccccgttgtaagacgattgtgcattgcgagccacactaggaaggagtacttgggagttgagtggaacaacttgtacattaatacgcattattaaaatataaactcgagttagaaaagtttagcgataacgatatggtttgtaatagcgtatcccctcctattaatgagatattctctcatatcaatcatcttaatgggagaggatacaatcagaatcaatttacatcaacatgattgatatgagagaatatctcattaataggagaggatatactattagttagcaaatgatcgtattcaaaataatgaacatttttagtttccacagtcatcgtactctctttgatgtgatagtggtgttcgtcctgttcaagtcatttaatcttgctatttgatcgttctcaagaatagcatgcaagcctaatgagtctgaaataacagagtgggcatcacattgtaagtattatattatacttttattacatattttatttagcaaaaaataaattttaataagagtagaattgaatggtggcatatttgtcttacaaaataaaaagacttgaaatggcccacttcaagaaattgggcgtggggatgtgtcttttaatcacaaataaatagaacattcg

SEQ ID NO: 36646 - DNA, 2435 bp, Arabidopsis thaliana landsberg
atttgaatttatttctacttgggagttagaagatattacagtgagattttataaaagggtggaggcgggtgccgtacaattgagtcatgttctgctagagcaatgactaggttaggttcttccaacttctttgaacatgaagtgcctttttttggcgttttaagcagtgacccatctcaaaaccctggtacattacgagaaatctttagtagcttctccgttgttgcttttgtatatatatatggtagtttctttgaagatctatatagttgtctttgttgtttgtttgtagacttctttaactggaacagagttatgatacggtactgtgatggtgcttgtttttctggacaccctgaagctgaattcaaggtaataaggcttttggtcggatgatagccaaaaaaattgactagttttcatgattctttgactctctttctttcgtctcagaatgaaacacggcttttcttccgcggccagctcatttgggaggctatcatggatgaattgttgtcgatgggcatgtcacatgcgaaacgtgtaccgtcctcattatcttataaatcttaatttgtagaacttaagtctctgtcttgaaatcccattaatgtttctttttgttttacatgtttgataaattgcaggccatgctcacaggatgttctgctggtggcttgtctactctaatacattgtgactactttcgagaccatctgcctaaagatgcaactgttaaatgtgtttccgatggaggctatattcttaatgtgtatgtaacttccttttatcacaagtcatgactttaccttttcagtgctctttcattaattccttcaatgaagctggtgatactcccacagagctaaggaaaagcagctaacaatgactatcaacaaaagctattttccttcactttcaggcttgatgtccttggaaacccaacaatgggatctttctttcatgatgttgttaccctgcaggtttgtattcactttctgtcaatattatcttgaataagtcttcattgaaataatcaagaacatgtcatggttttgggttggattgctgcggttgacaccgaccagagcgtagataagagcttggatcagaattgtgttgccaaaatggaaccatctaaggtagcttttgtctcttccttcgaaaaatctttcgtgcctaattatgattggtactgaggcttcttgatttcggtttccagtgtatgtttcctcaagaatctcttaaaaacataagaactccggtatttcttgtcaacacagcctacgattattggcaggttagagttaccaatcctagcatgagcagcacttattgcctgcttccattagatttgactccaattcatgtttactgttttactaataccaaacatacattcagattcaacatgtcttggtaccaacttctgtggatccagataaaagttgggcaaagtgcagactcaatattaaggaatgtgatgccgaacagattaaagttctacacggtaatttactccttaataaaaataaatgatgccaaacaaggatgagcaaattgatcttgtaacctgattatcaaaagtatcctctgtttcaaagtacaatcagtagatatgagcaagctgtgaagcagctataagatacaagatacaagttgttgaatatttatatgaatcataagatcttcctcggagcataagttaatacggccagctctatttatataaatcctatttaatttacaggttttcgcagttctatgatgactgcaattggggaatttcatcagaacaaagatggtgggatgttcatagattcctgctatgctcattgccagacagtcatgtccgtgacatggcactccctgacctcaccaagaatcgaaaataaggtaaaagatatttaacatgttgcttgttcttacaaatgacctcacctgtttcgtgtctgttttttccgttgttcttgtgggaacagacaattgcagagtctgtaggtgactggtacttcaaccgagcaaaaaatgtcaaagctatcgattgtccttacccttgtgacacaacatgtcacaatctgattttcgagtgagtaaatcgttgaaccccatttctctgattctttcaaacttataagttataccattattgcctgggactccttccatatttatcctaacttgcagatgtgtaacatttgtgtatctcaaatgagaatcatttagtttgtcgattcagatcataatttatatttgcatgaccttgatttttcgattgaaataagctttctttcgatgtgtattcgtatcgaattttttgatatatattgtatgggcagatttgatcaatcagctatagagatatcagcttcttcaaggatatgttttcctctcattagagcctttctggtctccctaatgttgataaaattcat

SEQ ID NO: 36647 - DNA, 4270 bp, Arabidopsis thaliana landsberg
tgtccttgtgccataacatatcgcttgtcgagaaagttttggtagaaaggcccataactctataggcccataaagaagaatcccttgaaatcagtttcgcaaatatcggcccatatcattgtttatctcttattacaaatattttccaaactttcaagagttacaattacaaatagatcaatatatatatatagacaatgaaaattatgtatggagaagcttactcgaagaaatgagagttttccactaacaaaaaaaacttgtatattcatcataatctaacttttttttagataatccaaatcatgctttaaattatgtaaagttcagttagaagtgaatacatgttgctctaagagttacaacaacataaagccagcacaaaactcatgctttagcattctcttcccctaaataaatatatgcttcttggctatatatattattagacacgcatatgggacatcatgtttttttttttttttttttttacaattatcaagaaaatggtttggagtcgaggtggtctttcggcaattttgactgcagccgaagccaaagataaagaaatttcgacattaaacctcaacagttttttcatatggattcaaagcaaactactatgtatagattcatttttaacacttaattcatcctctaggaatcccacactgatgtaatcaaatcgtatatattgcaaatgaactttatagcatatgtaacaaagcaagttatagtgcatatataacgaacttgtcgttatcatctgaaataacctgtaatgatcttttcaattctttatattgatgttcacactaatgaaaataaagttggatgcaaatattttgaacttttagttagggattaatcaatcgagtcagtgcaataaaaattgtaggtatagtgtataatcgtcggttggtttcgcatcatatgggcctcataaaatgccaactataattcagttcattttgtcaaataccgattatattttaatttaatgattaatacgaaccttctggattcactgtaaaatgacctttacaggctatcaaatgtcttcttccgttgttatgttatgttgtaatgtatatgtacccgttttatttggggttataatatttgtatttattattcaactatataaaattctctgacagctatctccaactcttgttactactagcaacaaacacaagagatagtaatggacaaaagaaaataaataaaacgaaaaacagcaaatatccaacggtaacgagaacaataaaaccataaccagtaatcaaaaattatcccgataggtctgctacgcacatgggatatacgataataacgacatcgttctttcttgatagatctgtatttttgtcattaaggttcatcgtatacgggcaaagagatcgttactatttactatatcagaaaaagtatactattattatcggtgggtggatcgattagacagtaagacaaacatgatacaatattcaatactacttcattatacgttttctctctccaattattattgacaatcatgattcgatttagctaaaccaatccggtcttctaaaaccattgatgattttatactcaacggatagaattggttctcaacttcgatttctcatctactatacttaccaaatcattaaaaaatgacaaatttacaactaagagctaaaaattgagttaacctaaaaatcctacaaaattatatatatacatatatgcgactacattatagtgataaaatgatctatcacttaattatgtttagttttgaaaatgtattctcttatttacgataaaacaagttgttaatcactgatatgtgtgttactgatcaaatatttttgctattttctttcacttaaacgtttctgctatttgactactaaaatgttattccttcatttgaatattagctactaatcattatttatactaataataatcgaataattatgatcccctccgcaagatatttaattagatactacttaatttataattattgttatctctctctctcgctttatatagttccatcgtggtcattcctcacctaaacaactctgcttcactctctatctttcttaagtaaacaaatctttagagagagtggaaaaaatgaattcgaagatcatcgaagctttcttcatcgttgctctcttcactacctcatgcctcgctcaagctccagctccttctccaaccaccaccgtcactcctcctcccgttgccactccaccacccgccgcaactcccgctccgaccaccactccaccacctgccgtctcccctgcccccacctcttctcctccgtcttcagctccttctccgtcgtctgatgcccctaccgcttctccacctgcaccggaaggtcccggagttagccccggcgaactagccccgacaccttccgatgcttccgctcctccacctaacgccgctttaaccaacaaagctttcgtcgtcggttcacttgtcgccgcgattatttacgccgtcgtgttggcttaggatctcattgtttacatcttgaaaacattatgttttacattttatagtttcggtgttaatttcgataatttgattgatttttcgttattcgattgtttacggtggagttaaaatgagatgttgacacgtgtaacttttcatggtttgttgtctacgtggaatatgttgtgtaaatccagtaataggctaataaaattactttattattcgttctcacatgtttcatcactcttttaataggaataaaatgtaagaactcaaaaagaaaattcagaatttttataaaatcaggtattctcgagatctgattcttgtgatttcagaactgttaaatcatgttcgtgtctttttctttttatgaaattgagttatctttattggatgaatatgagtccaaataaagcgattttaaatacttctggaatccggatctgagatctatccagtattataatgcatattgcttaatctttatcaatcaaagatagctgactcaaattatacaatttattttcctaaacttatatattatatgtttccaaaaaagacagacattcagaacgtaaatttcacatagaactatgaaatgttttcaagatgcaattaaaaagtatccccttttaaacctcacaaaacaataagtatcccctttcaaaatgcaattaatatcgaacttttgtttcacgaatatttgaatttgttaatttccatgtcataactccttcacaaacgttgttattttttttgtcaccaggcctgcaaagcccgtttaatagcgttctcgtatttgggctggtccaacatcattgtcacaagatatttaaaatgtgtatcaagtatgataaaatcacagtaacagttgtcgaatttggttctcacccaaaaaaaaaaactcgagtttcgtcttcttctttttttttgacaataatctggtctttcaacatgcatgactaaatttaaagtatcaaattttgatttccttgtggagaaaaatgattgattattatcatttggttttgttataagcattgttttaagattttgcaaattatcaaatttataggataagaataattatacatcacaaaaatataaaatgtcaattttgtacaacaatactgttaaattgtttactatgtttgcctgtggaaattttagttggaagaagagattgtgattaacaaaatacttgaacatttcttttctagaagcattttttacggctacaaacgcactgaaacctttaacatatattatcaatccaaccataaagtcaatattggtccacgctttagatttcagaagacgcacgaattatgtaacttctaagcttttcttccttatcaaggaaaaacatgaaaaacgattagttttcttacaaattccaacccctcgtgataattttatatttcgttttccaaaatagtagtcgaaatgttcgaatggacagtagtaaacaattaatgaaagagttggtatggaagaattgaagaaagaattgccattaacgtaacagccaaattgtcaataaattagaggcagacaaagtataaagtctaaggtgcctttaacggtgagtgtacgtgccccatctaatcgagacaataggaataaactatttttctggttgagtattataagattccgttataactttagaaataatttggctgtaagaaaaacgtcaacatatatagttacgatgtaactgtgttcttaattacatgaagttttaagttgg

SEQ ID NO: 36648 - DNA, 3344 bp, Arabidopsis thaliana landsberg
gcagattatatacggtacagtatccttaacattgaaaccttctttataaccacgttgcctcattctgagtgcaacctgagaagaaaaatttagccacacaatcagagagttaagttaagtgaatatatagaaagcatataataagggagaaataacgagaataatagctctcatactcacttgaacgtgtggttggcttttggaatctggataagctgcaggcggtttagtcaatgtcttggtgatgacatacttctcaagagcaacttgcccattctcatttcctcttttatctgttacatggacaaagcaacatgtgttggatgataaagacgatcaaactaattagcaaagattaataaatcataacaaagattaccttcattagttcgttatgaattgcttcaacaacatcctcacaggatctgcacagaagaagagacttgttgtgcttgcatgagagagtaaaaacaatgttctttagttgatgtttcaaaacataccctccatacaagattttactcaggcataaatctcctatttccttcgagagtaagctccaatctcgacgaaccatatccacaccttttctttcaatgtcctgcattgagaatgcatctagtacccataattttctgcaagaaagggtatgcaaaaatgtttacaaaaaaacaattacctcgcaaggcttcccatccttaaactgcaacttgacagcagcatacttcttttttcgaagaagaagcattctcttgtatatgccatcacagtcaatttttagacatctatacttcttattgacctaaaaattgaaaggggaaggcccaaaatcaaatgtctgatttttcttgtataaattttttataatcttcttagagaagcactttccccaaggaaagctatatagagataaatctagtatccaacctacctcttggatgacttttgatttaatggctttcacctcttcaatatcatctagtccgctgtgaatcatgattgaatctgtgtcaccgtatattacctacgtaaaagcaagattttaattctagacttgatagaacagagttgtttacacagttcactaatttctctactgaaatgcatttcctgagactccaagtataagagttacctctagatttaaatggttctggacaagatccacggttctttgcaggatatcccttccctgcaatgttaagccaatcagcctgatcacgcaaaaatagagaaaaaaagaaaaaacatgtcactagaaaacacagaaagcatcacttacctgtagtgttatgagctctgctaaaggcttagcatagaatcttgaattagaaaaccccagacagccatacatactgtgtttagaatgaataaaaaaacataaacatcaaattgcggtgattggcaattattgccgcacaagtaaaaccataaaatgcaaacctattggctgtgagcttcaatgcctgctgtcgaatgtcaagctcccagtacttgagacctgtttccttcttcatctttaatttgacgcttttccttatactgaccaaatgttccatcaactaaaacaaagacatatagtgggattcatgggcataccagatcaaggagagaaacttaaagtcgaggaaaaaaaaatgtatatagcaataatttagacgattatgtcagaattaggtttacttaaactacagaaagcagcagtcaccaatacaatactgaccagctaggtcgcattgttctgaggatttctcgcatatcccttgagaggttaggaaaagaaaatgaggcaaaatattttggttgttgaatttttctttcaattaatttctgattgggttggggtaatttatagatttgacgttggataacctataacatatagaaaatatatacggaattgaaaatagtcacagtaaaatgcaaactcgtgtaatgatgactatacctttggaagaattccaggtgtctgactcgaaggtaaacgaggaactccatcttctgatcgtggtatagtcgtaaaacagatattgtattcctgaaaatatcatgactgttatctaccaagcaggcggaaacatccaccaaaggcttgagaaatagaaacaatctgctaacctgtataatagaagggtaaagactattgaaatccagaagcaagacatatttgtcatataagcctctctttggctccaagaccagtccaccagcgtaggctggacctttttttgttttgctgcccttagacggatcattctccaaagtcaggtcagcatccaattcatctacattgcggtcttctggagcataatccattcttctttttgatgactttatttccttcatacgttgtgaaattttgtcagggagaatgaactttttcgagtggaatgtatgtagtaagtagtattcgattctctgtgccctggctccctggtcatgaacaaaaaaatgcatgagtcagcacagtaacacatattttcccggatgggagggagagggagagtcattacttgaagtgttttcccccaaagattgccacttatgttagtaagctggagagtgagaggaagaacacttagatgaaacatgagctccatggataaccatgcatccgtctcaccacattcaatctgaaagaaaagaaaatcaaagggttataacaagcgagcaattaagatgcagtcatcactcatcaaccttaagtgactgctgttatctgcaatccctttacttctatgtatgactggattatttattcttcaatagtttgcactaaattgtttcgcatgcaaggattcataacctatcgtccctaatgtggtagtaccaactcatgcataaaacagacatgaccgggctcatcgaagaacttacaagttccacaagtgttttggatgactgaaacattttgggaatatcattaggcgctatctctttcctgtcccggttcagctgtgtctttgagaggtccgttaaagaataactgacctgcaagaaacagatgcttatacatgagggactgagcttcaacttactgcttacaagacctgcaagggtatcatacctccttcaacaagtcacgagaacacagatctgtatcacacaagagccttccagcaatacaagacatgagccctggtgtagctcctgacccataattactgtttcctttaagcttaggcataaaagagcgtttgagtcggccaattttggaccacatgctactctgaactttgcaagcctgcacaatagtaatcattcagtttaaagaacaagacagacatgtatatatctctattacatgatcatcacaacaggagagacggaaaagggactaatag

SEQ ID NO: 36649 - DNA, 7366 bp, Arabidopsis thaliana landsberg
  unsure (1)..(7366): unsure at all n locations
ttgaacgttatgatcgtttttgctcactaatattaatttcattttcttacaggaataaggaaacttagtgctgcagagacagaatggtcatagttactaaatctccgatcttgaaatgtctatttaaaattaaaaaaaaagaaagacttgttttgtgtgctttttgataactgatggatcagacttttgaatagagccgtctttttattggacttcttatatcattgtggtctctcgttagcttagttatgttttgtgtttcacattggcgtttatcaattacatgaatgaacctaaaacgcagttcacatcctcaacgatcatgtgttaattcatatttagaaaatttaatctcaagtgattctacaatggagacgtttattacatacgtgctctgttcttcctttctcgcgcctgcacatggtgtagaaaacactgatagaacgagctgggcctatctagtgggtttggtgttttgggcttgtattaatgaattgggcctgtcttctcgattttaattaaaacaattaggcatttaggctctctctcacacacccatagtcgtcttcctcgatcagtctctctctcaaattgcaaaggtttcttcgaggactttggcatactgcaggtttgtcccgatctcatgctacatcattatacgaagccattacttaacccagtagattgatagctcaaattatcattgcaagaaatgaccggatttagtgatattgtacagttttctgattcggaattttaaataaaaatcggtcgtgacgatttaggtatgtgggtagtgcgtagaagccctaatttcaaggatatgtacagttccagactgttaattatttgtgtttatttggataggttgttggagctgtagtgcttaaaaaccctacctttatactgtttagagcagcagtccctccatgtcaggtcttgtggcgttatgcagagctcgagcttctgcttcgtcttctttattcaacagcgttattcgtccagcatttcgcaatttctctacaggtaggtggtattactctttattctagatgtatgcttttgacagacttttcaagttttctcactctttgctttgaaccttgaatgaatttgttgaagaggtgatatatgggttgtgaaatggtgtaggaacatggttgcactgtgagttttataataatagttaaagccattttccttaggcagagtattgttacaaacaacaaaacattgagtaacgtctattgttatgttagcctcttctatttaagtggtcaagttgattttttttcctatgttgtgggttttatcaagctacaaacctcttctagatggattaggaactggatgaacgaacttacttacttctggattagatgatgagctagtgtgaaagtgcggttgcttctttttgttagatgataaaagaatgagcttgtatcacatcggctcttcttcataaattagtcttggattaaagattgagctgaaaactatgctacttcaagttaagatactatgtaactagaataagtttataactagggcctaagctgggatctctgcaactatggtgctatttgtatctaattcttctcctaagtctcttgctagctggattatattcttttcctataattaagattgagctctgtggagtatcattgattgatgcatgtagctactttgtgggacttgagtctgtctagtctataattaagattgatctgtgtggagtatatacatctcaaaagtgacttaacctgagggatttggagatccaaagtttcaatcaagctttttattttttgtcaaaatccatatcttctgttttgtgtgcgttttattttttgatagaaagcctctatctctgttggtgttttgcaggttttgctgatacacagaacaaatcattggtagcacaaatgaaagaagagatgctccacatggacatcaactcaatgataggaagttccatgccactaggtatgatgcgtatcggaacaatcatccacaacatcgagatgaacccagggcaaggcgcaaagatggtccgagctgcaggaaccaacgccaagatcctaaaggagcctgctaaagggaaatgcttgataaagcttccgtcaggggacaccaagtggatcaatgccaaatgtcgtgctacgattggcacagtgtcgaacccgtctcatggaacgaagaagctatataaagcaggacagagtaggtggttagggataaggcccaaagttagaggagtggcgatgaatccgtgtgatcatccacacggtggaggtgaaggaaaaagcaaaagtagtggaagcagaggaaggacatcggttagtccgtggggaaaaccgtgtaaaggcggttacaaatcagctagtgtcaagaagaagaagaagcgtttggcagaagcagcagccaaaatgtgatatgggtgaacaagtttcgattttcttcaaacgtttctttcttttaaaaagcctccaatgttatttggttacgttattgaatctgttttttgagagttttttaggcttcatgaaactagaagatctttgatcagttgagaataaatatggttacgtgtttacttttattaaaaaaaaaaaatcgaattcaaacgttttcatcataacaacgtttaaaacaatgcgaatttcttttttttatatatatattaaaatcgtcgaaatcgaatttgagagatttatatgcttatactagagaaaagggtctaaaaagaaaagaaaaggaaacaagagaaagagtcaaaaggttggaacaatatgatgcattgaatcaatccccgcgataaaaaaaaaacattcagcaaaaaaaaacattcagcacaaatgtcttctttgactaattaattaccccaaaacattaatcaaaaaagtgaagaaatcaatttgacatcttccttggtctaaacaaacaaccaactattgaaaaagttccttatagtggtttttgaaaattgaaacaaaaaacgagaatggtattctatagggaaaatagtgaaagaagcccacagaattggaataaggaatgagaattagatgtaacaatcaacagtacagcatccatgccttataatcttgggtcctactcctccatatcatttcatttttattcttacttctattttgagcatctaaataacaatctttgagctttaaagcaagtgttctttctgatattctctcacgatgacaggcacacttgtcggaggcacctgaaaacgagaacattgcgttcaatggtttgagattctgaataagtggagaaactgtattgtataggtatgagacttgaggaccctaatgctatgtttttaagagacgatgattaatcttaccatcccataatctgtgattatcatggaaatgtaatctgaaggtgtagcatcatacctgtcattagaaaaatcacaaacgagtttagtggcagagaggaatagcattaacagaacatagtttctcttctccgataaacacaagcttacatcaagttcaaaaactgcaggtttgcgttgttggtcaagccatctaagtagtttatgtcttctcttccatgaacttttgaaatagcatttggatcacctaaaggtaaacaagcaagaaacccaatgtaaggtaaaacaaaatcaaaggcggtataagatactgatatcgagagaagatattgcataccaagctcattggagcatattgaatccaattgcaccctctcatggaacttgtaggcttcgcaacatacaagcacaggaacacggaatgcatttgcaaccattgcaacacaagcagtcccaacccttgaataaactgttccgttagacaaaactgacgaggcgcccaaaaacactttggtgacttcgtgcatgatatatgaaatggcatttatatgagtgtatgtacagttaatgcctcgtttgatcaatctacgaagcagtagctgcccttcaagctttggacgagaatccaccaccaagactcgaaactttttcctgagttcatgtgcatgtaataataccatctcaacagcagtgggagatccgtaggtcagaaggacatcaccgtctcttattttagtaacagcatgtttgactatcaccgtatctgccactatgatcttctcgttaatgaaccggtcaatatctgactgaagagtagcttttgcttcagattcagaaagtgttataggcagctttgcaatcctgtttttcacaaatcggattgcgtttcccatgctaatcgaaagcggacggcattctatgaggaaggagacgtagctacttattttcgcagtcatgtccctgttaagagatttctcaggcggtgtcaaataatctttaacaacctcttggaatgcttggagcatcgcaatacacctggcattgccaccagagatatccccagaaagatattgaagaccaacctgataacaacaacagctgatactcattcagtacacaagtaacattcatcttaatgaagtaatagaaaccactcattagaacaaacggttccttgtcttaacaaagagattattaatgctatattagattattaacaacaaaatgaattcaagaggaaaacaaattaccttgtacacagcaggatgcatagggtcaagttggaagaacttagtctcgagatcaggaagttgagtgccatgctcatactgaggcaaatgcctaaatagctcaaccctgtttttagcctcggtctgtttcacaacagcacgtcttttagccttcacgactctactctcatcatcatactgcatgcggggatgaggagcatctttctttctatctttttcagatggacctcccttcttctcagctgctccagcagcaacagcaacatcattcttctgagatgtagccttcgctggtttagcagctttaacacttgttgaagccactgaagctgcggacactggtgccaccttcccaccatcagctgatatagcacagtattacacagattgatcaagatattgcaaaagacacaacgataacagaacagagcaaccagctatatcaaatctctgtactaagctgacgaatcattcattgcgataacaccacacattggtataaatcaaaaatgcaccttttgcagcagctttagcagctctttgagcttcttgaatagctcgtctctcagctttagtggttttctctttcaatggcttcttctggtcactctgaacctccattccactagccttctctgcaattaaatcataagaacaacattgtgattccattagcattcaatatcctaaagaaccgatttcaaaatctatcaaattattattccacaagatcaaagtgagagtaccagaaagtccaggaggcatggtaacgacggagacagtggttaaaccactagcaggaacactactagatttagcagcagccatagaatccatcccaataccaggcagcgannnnnnnnnnnnnnnnnnnnnnnnnnngaaactacccctggaatggcgtccaggagacgccgtcgttgatccatcagggaaatcacggcgacttgagtaagaaaacgaagaaggagacacggctgacgcagcagcaccagcgacagcgactcgaagagggaaagtatcagaggaattgagacgaggaggaggaatcatgacgggggagagtgagttaccggaaggagaaatggtggaagaagaagaagaagcagaggtagcagcgatcgggtcgggttgttgttgttgagttgatgaatcgggttgagatgatgtgaagaaaccgacttgtcggacctttggatctactacggcgcgagggttccgacgagactccatcgcgtcggaggagaagaagctctggattttttctcggtgaagacagaattataaattttggggatcgaatttaatttttgttttcccagacgaataaaacgtagaatagggtttttatttttattttatttactttttcagatttatccgatgttaacagtccagtcccagtcactgaaacaatcttactttgttcttttgtttttgttttgtttagagtattaatccatttgcaatttatttattctaatagaatctagtatccaaggttttggtgtcagtaacataataatgaaataggagcataatcttttttaaatctaactgagcaagtccaacaaattgtgaactgagagagataagaactgaaacacagttcatatgttttatcatgttcatagcaaaggagacacagtatagagaagagatcaaccaccaagtagattcttttacggctggtggaaattcataacatgatcttactcagattaaaaagcatatgagacctgacgatggaaatactttgatggtgactacatgaaacttggggaagctggacctttggagagaccaagccgaacttccatcccgtggtgaaagtctactggtttcagcgtctcggattcacgaggatctgtagattatacaccattcatcgtcagaacaatataaattgtgaaaactaagagaataaacaagttgaaacacttttctctcatatactaaaccaaaagttcaactttggttacacagtgcaagtaagtagtatgtgaaagtcactttttcagcaatgctttaatgatttgtggaagtagacagattattggtgttttggagtggaacaatctaaaaagtagagactagtaaaccaaatggaatatgaaaataaacaagttgagacacttttctattatatgctaaacaaagagttaaactctatgcaaggatgaggatgatttggttacacaatgcaagcagtatgtgacggtcatgttttgagaaatgctcaaagattgtaggaatagaaaactctaatgcacaaccaaatgggaaaactggtgtaaaacaattaccattcaagtaatcctcaaaaccaaaattatctagagctcctgtgtagacttcaaggccaagcattgatgaaagaattggtccaggaggtctctaaaacctgaatactccacataaaaagatatacaataaatattcaattcaccaataaatattcaatgaagaagaggctgctctatgcgtttatggttctgaattcaatctacatattgctcctaatttaagagtatccactacgcgtttatggttctgcaaatctaattctaagtagcactacacgattatgattccgaattttcgatataatcattatgatgattcatatacacatttgtactgacaatatttcaaaattcagaacagcaattgacctaatcaagatagattactagcattaggaaaccatatttcaatcttaacagtattctataaagcctaaggaaga

SEQ ID NO: 36650 - DNA, 2205 bp, Arabidopsis thaliana landsberg
tacagtcttaaagtatctcttatacattggtcactgtcccgagcgaaaaaccaaacaaataaattaagacccataacgtaatacagagaagtggaaattcccaaatatgaaaaagtaaaaacaataaaggaatcagaatgaagagaagagaaatgattttaaggtatatacataaataatatatatctagtggtggcactgactgactcgttcaagtgtgttctttaaacattgagagatcagctcaagcttggccacaaggagctgagttttgttgccagcttcgcactcttatagtcctccctcagttgaataaacctgcacattttttcgtttacattattctcaactctttatttcatcatttttattctttctattttatcctttataatctctttctattcttacctttgtgcgtctttgcgaatgcttggacttccctcgaacaatgttggcagactatctggagcaactatgaaaacattcgctattctgcactcacaaaaagtgattacaataaataataataataagaagaagaattaaagtgacaagagagtctcaagattgttatttacattcccagaagctcaaatttctcatccacagatggagcaccgaagcttttaacaaatcctacatactcgtttaagtcacgcttcagccgcagtcctccactgtcaacacatgtgttagtaatcataaaaacagaaccaaggtttattcactcagacctaattttgcaatggatcttttatttaatgtggtcaagactttgatttgatccgacaaaacatttataccaagaggtgcgactacgtcaaacattgcattcatgtcagatcagagtgaaaactcagagatagtaaattttggcatggttctctatgtttcgtttatttaggacctgaatctgattttaaggttattctgcagatgtgactttagtaaggaaaagagaaaacatacaaagggctgaatcatacctgggattgaaagtgaacttctgccagtgtgttagtagcagtttttctaacctatttccctgaaataatggagaatactttattcaagtcctcatctttctcgatatatagcaccattcatatgatgcagagattatcatttattctttttaactattattttgaagccaccacaattgttatagataggcgaaaagatagcagtatatggaaaagtcgaaaatatcgcacaggaacttaagcttagaatgtttttttcttcttctctagtccgtgattggacaaagcaataaaaaaagcaaaggccagggagaataagcacttcgaacagataaaatagtaacaaaaggcttaacgaaatctttggtgagaaagaaattataccagttcagtcaggaaggcttgcttattaagaccttccaaggcagtgaaagcagacttaagtacccgagaaagataagccacaaccctaaacaagagagtgggaatagaaattaaagtaacaagttctttagaggaaaaaacaaaagaagagcacagcgtttagacgtgatcaatatatattttgtaaaatggttcaaaaacctacttaagttactacggataagcacttctagcttatcaaactgaaaaatagaaaaggtgaagctttcaaccaattagcggaaggtagagtcttatctagacaaaccttatgcaggcatttgttgggcggtggtcagaagcaattccatcatcaggtgatctataatcggtagacttctgctcagatgaaagtagcctatcaacctgaaaaagaccatatcagagtccttaaaatgagtcgaaaaaaaataatacgcatgaccctaaacctgttcagggttgaacctcatggatctgtttgtaatgtacacaaaaaacaactaacctcagccatcacagtttcaatgcactgctgaagtcctttataagcagctgcctcagctttggacagggcagttgacatttcttcacatgaggcagcatgtgcaccatccactggtgggagaagacgagatatagaatttgcaaaatactgggagagaaaatgagatgattagaagattggatcaaactatttgaatatttcaatagttcagtaggagaccccttctcagatatagttttttgaaaaccaacctggataccaaaaaaaggtaaccccaacattaccttgcttgaaacttattagcca

SEQ ID NO: 36651 - DNA, 1786 bp, Arabidopsis thaliana landsberg
  unsure (1)..(1786): unsure at all n locations
cttcataagaaccagcgcgacatcttctacctaaaaacatcaaacttgaaacacacatagcaatatgaaatcaatggaatcaaatgaaagtgaagaactttcaacaacataacttctaatagtagaaaagttctgtttctaaagccaaaaaagagtaaaatttcacacaaataagagaaggagacctgagaactcaaactaagagagtcagagacaacatacttctagtagtagaaaagttctggttctaaaatttcagtgaaagaactgaactttcattagtatcagcataaaagacagagactttaatgtatcttaagagaaaacctgagaattcaaatgaagagactacaaaattcaggaaatgtcaaacttttggattggtgagggctttttactgtattttctcggccacccagagagagacaaagggagggaaggcaaaattctgacgtgaaaagagcaaagcaaagaagaacacgaagcaggcgagtggggaagcaaaagcgagtgaggaaccaaggagcgtgagaggagaaaatctagggttctttttgggaatttttagggatcttggattatgtttttatttttatttttttttatttgatgtaactctcttactaacctttactaattaaacagaaaggctttttgattggtaacacgtgtaatgacataatgacgtttgttttcgacgcgattttttttcataatcgcgtctatatttacatttggcgtgtgagacgcattgctgatttatgtattcttagaaaaattgattattctaaaagtatcagcattgtgattttttaccaaaatctctcgcctacattaataataatgaaataataaacaaaattttttaattaagacaatttctaagaaaatatgagaaagtttctaatttaagagatttgaaaaaactatttaaaaaaactcttcaaattaaataatttttattattattattactttagtaaattaaaaactttggttagaaaccaccactacacatgttctaaaagattttaattttaactgtatgataatcttcttttcatacaatttactataatttttccacatttttcaaaatagttatgtagtaaactaaatttatcataacttttaatatgatttttacatctatttttatgatttttacataactattaatatctacagttttttttttattataagttcaaataaaaccaaaaatacgagaatattaaaataaataacattaaatctattttgtacatatgagatacatgcttattcttattatgacaaatcaagtatacttttttttttaatctttaccgtcattttttttacatatatgtcggcatctcatattctatatgtaatatgctaaccaattatggctttcacatcaaaacagacctgacatttgccaccaaatataaataaaactgtagggcaaattgtacaagagttgtgctctgagtcacttgcttttagatttcgttatggagttacaaatgcagggtttgcatcttatcttttaatattttttttcctttctactcacatatcttttttttatgtggagtggaagataattgtttttaattcatttaatattttttgatttaattcctttttaaacagcaaaatcttttaatatttgatttaatttggctaaattcttctaaaaatctgaaatttagacattaaataactttctaatatatatttnngtaagtattactgagaactttttaatattatataaaaattatattatttaattaat

SEQ ID NO: 36652 - DNA, 784 bp, Arabidopsis thaliana landsberg
gtcatgaaaaactcgaaagccgaatccaaacatgatttctccattaacctctctgcttctgctaagttttctttgaatggcttcatggattataactccagagacaagccatatgagctgaacagacaagaacgccgctaaaacttcgagccgtttaaacccgaacgagtttcgcggattagcttcccagctcgagaccttgatcgccaacaaagagacacacaaacccgccacatccgacaacaaatgtgcagcatcagtcataaccgcaagactattcgccttaaaacctcccacaatctgtaccgacataacgatcaggtaaagaagaataaagctgcttagtcttctagtcgattcttcgcgctctttcgtctcggaaacgcaatgttcttgtctcgtaaacgcgcaagacagaggaaccacgcctaaattttcctctgttttcgatggtgatggtgactccatttcttcctcatcatcgggtttcaaaatgcagatttgctccaattccataagctgtttatacgttacacaaactttcattagagatctaaatcaacatttgatcctctttctttaagtatttttatgattaaaagattcaaataaacccattttgtgtttcttttaagacaagaaacaaacctgagaatcagatggagaggcaaaacgtatatgaattccagagctgtcctcttcagaaatcttgagttttatcttatggttagagatatgaagacatgaacacaggcaattaaggatgatccagcaaatatgggag

SEQ ID NO: 36653 - DNA, 1051 bp, Arabidopsis thaliana landsberg
attcttggatttaaactgtcaattttcaccttgagtttataatgcatgtgagggcggggcttctttttgccggggtggccctctaccaccgaacgaaacaaatcagttactcaggctaatctaagatgatgagtcacagggtcaactgtctgttccacccaaggtgtctctttgctactcatcttctgcagtttcatataccgaggttgcggtttttctgattcattaccagtagtattgtttatagacttcaagttactggcttggggcacatgagttcaagcaccaaaatcaataagaagtatgctctaatatttttctatgactaaccgtcactaaagcatcatcaagaactaacaatctaattgcatccatcaacattcaacagttaacatcaagtgaaacatgaagatacatgacaaaccacaaaaatacgactcgtgaacctaaatcactaaagaaatctaaaggcatttccctgttttgatacattccacagtttcgcatatgaattttagggtccaaaacgaaccttcaatatctcgaatcagagagtcctgaaacatttgcaagtcatcttccgaatgcttagagtcaacctaacgacacgattagcgggaatcgacatttaggagcttcgtccacagaacaagatagcgcgtggattttcgcagacagtacggaaatgaaaatgagagtgggaaattcgaaacctaacctcttcgtcttcttcgaggagcttgacaatggagagatccatggaggaatctcgcggtaccaaacgtcaatagctcaaaacgaagagggaattttcaaggaaacgatttgttgtatccaataagattccaaattccgcaagtttttatataaagggagattctgcgagaacaccgtgtcgttttttctttttgataaaacactgcgcgccgttctgttgatgttcttttcggtagttgtttcttttggataaaacactgcgcgccgttctgttcttcttttcgggaactgggcttgttcttgtatatcaaaattttttttttctttgaatata

SEQ ID NO: 36654 - DNA, 2904 bp, Arabidopsis thaliana landsberg
taaatctcggatccactttcacgatattttgatattttttctatttataatctttctgggttttgcgtcttttgaaggctgaattgctctgaaatctcaattgtataatcatctcctgggtcgtcgttatcgtgatcatctaggtaagtggaatcccaatttctgaaatttttgaatgttttcaagtttcacatgccttagatttgacgttctttttcatttttgtaaacttgctaattgcattgttgtgttttaaatctttgtggttggtgatgaagttaatgttctggcttgaaattggatcaaagccaacatttttctcatgtttctcattaatcaaacgtgactttattagagaaggatgaattttgctatagctcttgatgttttgtgtgtttaatttagatgggaacaactctgtttctagattcatagtttagtttgagctcgtgtaaaggtgtgttgatgaatcttgggttgcgttgttgttgtttttctgacagaagaaagcatgactacactagatttgaccagagccgagcttgctcttattgttctctatttgaacaaagctgaggctagagataagatatgcagagctatccaatatggttccaaattcttgagcggtggccaacctggtactgctcaaactgtcgacaaaaacaccagcttggcgagaaaagttttccgtcttttcaaggtcatgccctcattgttgctatttctatctttgtttcttagaattggaaccggcttcattggtgcttctttcttattatttggattgaaaatgttttgatttctgattgcaaatggtttcgaatgtgcagtttgtcaatgattttcacggtcttatcagccccgtgcctaaagggactccacttcctcttgtcttactcgggaaggtgctaaagagatgttgaattttcacatcatttcttcatatcttgatttgattcaatctctttaacttctgtttttgtttgttggttgaccgtttcagtcgaagaatgcgctcttgtctacctttttgtttcttgatcaaatcgtctggcttggtagatccggcatatacaaggtgagataagtttaaggcaataatccataatggtcttttgaagttttgatgtttcatttgctctgttaagtgactaaagattcttgttcaatcgcatcgcagaacaaagaacgaactgaattgcttggacgtatatcacttttctgctggctgggatcatccgtttgtacaagtgcagtcgaggtttttcttaatctctactcaacattataatttgctcacgtttaaacataaatcccgatcttgatcttcctatgtgtatcagatcggagagcttggaaggctttcttcatctatgaagaagatggaaaaggaactcaaagctgatgtaaaaactctcatgtgtaactcctctcatcttttttcttctatctttatcaaaactcattccctttgttaaaaacgcaggatgagctgtatcgagctaggcttcagaaatcaaacgacagaactctagctttgattaatcaagcatggacattattgtagccattggtctccttcagttagctccaaagacgattagtcctcgtgtcactggtgctttcgggtttaccacctcacttatctcttgttatcaggtaaaactctctcttcctttccacaaacccacttgcaatttcacatccttgtctgatatcgaaaataattcaccattttttcttctgtaaccacccagttgcttccatcgcgccccaagttgaagacaccttgaagaaggaataagcttgttctctagactttcagaataatagtttcatattcatcagtaaacctattgtgttcaggtattctaaggagtctatgttcctcctttgaatgaatttgctgctcttataacgcgtttgcaagaataatgataagttttagaataagattattatgatacatcttcaagattttttgattagaaatttgtgtttgtttctcattttgaacaagactctgttcctacatagtagagaggaaatcatttgatgttcgataattcatgttttcatcaacttttgcaaaatatgaagaagcaagcaagtgtaataatctctgaatggagaagtagtatttacaatcacgaccaccttgtaactacagacaaaactagagacaacccaaccatgtgtacacagttccacatctgagattcatcttgagaatgcagcccagatcaagaaaaaaaaaccatctagtgaatgtttcactgaaaaataatctctcaccctttacaaacaatctcactctatatctacaaaactattgtgatccaatgacttcttttgcacattctttaggtaatataagaacagagtctatgcatagcccacctttcgtgtgagtgcaatcgatttgagtcatggagaatttgattcctgttgatacatctggatttgtcactttgaaatctccaacgtgatagtgactccagctcccagggttgttgttcagataacacaatgatacagcttgttggttgtccgaagtggcgagctggaaccttacaggttttatgtcccatccatgaatgtgttcagagttgcagatcctccttccaagcctctttgatgttttaccgagctggatacggaagaagagactatatgttccagatggaaactggatctcaaactctcctcctacttcaaaccaccatatctgttgaacataagcagctgactggaacctgcatatacatagatattggatgagattactcattgatctcaagtaattcaaagatttggggtacaagctcattgcaacacaaccatggaatatagttgaaactaacaagatggtcaacgatactagagtctattcaagacaag

SEQ ID NO: 36655 - DNA, 1031 bp, Arabidopsis thaliana landsberg
aaatctctgacaaatcttatttaatctcaactaaccataattaaatcaatcttagcgcaaattaagcatatgcgatttatcgaatattcgtgtttcattaatttcaaaatatgccactaatatatttttttattttatagaaacaaataactattattcaaatttgcatttgcagtaaattccaaaaaactcagaaatcattagtttgattctattttagttaagtttgcaactaaatttagcggtatttacggttatgatttttttttatatgtaacgaatcaatattgtttctatattagtttgggactttaaaatataatcaatggaagaatcctaattaatagaattttcttacctaacaaatcatttttgctaagatttgtagagataacgaataaaatttattggtattaaaatcttctttaatttatttcttatgcataatatccataaatcgattacatctctatgatatcccaactactaatcaattaacataaatatgtggtatattcctttaaattaaacaatttccaaaattttattccaaatgtgttatggtttctaatatattatgcttgccaaccaacatcttcaaaaagctaacttatacgactctaaataccccatatcatagcatcttctcccatcatcattcaaccacgaagcatttttatttatttgaaatagttgatgattcgatgtttctatgtgattaccatagttttgagctttttggtatagaagtaactgttggatcactttggtgtaggatcttggtggttcattaggtagggaagctgccacaggtcgtggtgtagtatttgccaccgaagctcttcttgctgagtacgggaaatcgattcagggtttgacatttgttattcaggtaaaaccattatcagctaatctcagatctcaagctttattgtgtatatgatataagacagaaatgttgagagatttggatgatatgtgacagggttttgggaatgttggaacatgggctgcgaagctgatccacgaga

SEQ ID NO: 36656 - DNA, 4589 bp, Arabidopsis thaliana landsberg
gatttagtaggaatgtgcagtacccagattgaaaaagctgctaaaagaaaaaaattttcaaatctcagatttctatcacgggagaaaagaacgaaacacagtagaaatttgcagtaccccaaatcgaatcgtaaaaatttaagcttgataatcaatcacataactgaaaattacgactcttttttaagctaacactaataatattatcctcaatgctttttctcacttttttccttgtgtagttgaaagttgaaaaagaaaagagaagaagaaatgggaaatttaggcttttcacttttggtaataaataactgagaagtggtcagaactcagaagttggtcgggtttcggaaaagtgccaacaagagagtcgaaacagccggaggtgacggagaattttaatttttggtctctctttaacagatcaggcattaagcccaaatggatttgaagtaaatcagcccaatgggctcattacggttgtacaatatacatgaatgttgattactgtataggtaataaatacacagtaatgcatcatttcatcactgttgttacttgttaaaattcgaaagagcataatagaaatctcaacttccaatgagatttggattccataaattttgccacaatttatttagactcacaacaaagtcaacattgctgttaactctagatatcttgcttcaattacaatagtctttacatcctttaaaatctttcaatttttttctttattcatacattacttgttctgattttcccattatactactcctttctatttcaaactcttactttctgtcattagcaaatagagaaagtgatttcttaaccaaacttataaaattggaacttaacaagaaagaagaaagttcgttttgttcacgtataaaaggaatatgctgccattttaggacaagtttgtacatttaaaaaaacaaaatacagttacagaatttagctaataactttttttactattttttaagaaaaggaaataaaaacagctcgtcatgatgcataattatgtcaagattcgtttcaaaaaaacgtggacccctaccgcctcctcctccactactactaccaccaccacctttggtttccgtttctctgtatattcattcctcgaaaccctccaaaaacccatttcaatcaatttctcgcttttgccctctacgtttctcgtcctgggtttctcaaatccagctcagtttattccccaattcaataatcaaaactctgtcttttggtgggtcttcgtcaaagctctctcctttacggtccttttctccagcgcatgaaataataaaggacacctgtatttattaaaatcactacattttccgtaacaaaaaaaatcaaactttgttttctcaatggacggtgccggagaatcacgactcggtggtgatggtggtggtgatggttctgttggagttcagatccgacaaacacgcatgctaccggattttctccagagcgtgaatctaaagaatgtgaaattaggttaccattacttaatctcaaatctcttgactctctgtttattccctctcgccgttgttatctccgtcgaagcctctcagatgaacccagatgatctcaaacagctctggatccatctacaatacaatctggttagtatcatcatctgttcagcgattctagtcttcgggttaacggtttatgttacgacccgacctagacccgtttacttggttgatttctcttgttatctcccacctgatcatctcaaagctccttacgctcggttcatggaacattctagactcaccggagatttcgatgactctgctctcgagtttcaacgcaagatccttgagcgttctggtttaggggaagacacttatgtccctgaagctatgcattatgttccaccgagaatttcaatggctgctgctagagaagaagctgaacaagtcatgtttggtgctttagataaccttttcgctaacactaatgtgaaacctaaagatattggaatccttgtggtgaattgtagcttgtttaatccaacaccgtcactttctgctatgattgtgaataagtataagcttagaggcaacattttgagctataatcttggtggaatgggatgtagtgctggacttatctcaattgatctcgctaaacagatgcttcaggtaaaatatcttattattcggtttggtttaatccggtttggtcttttagagtgttatgagtcgtcgtgattcgtggaagaataaaatctaggactttttcttattcgacttttaaaaattgaaaaggctaatgacagctcatgattttagaaattattaggggaattcaatagaattaccagctagaatttgcctttcaaaatttaattatttgcgtcttggtgtcacttaataaagcatttagtacacttaccagctagattttttgattaattgacttagctttcatgtcattaatacgtgctataattataatagttgtgtgactaatttgattaaaatgtagtcactggattggtttttagttgccgacttaatatggatgcaactttattctatatgagttgtatgaaagcataaaggccaaatttacgtgtaaaagtcacgtgtctatgaaaattctgacagtgacaggctttgtagtctttaggttggtggtagttgtgaaaatggaaaaaccataatgttgtgttaaatgatcaatgttttattcattaaaggttgattacatattttttcctttctcgaaagtattcatttattacgaaaaaatagttcatgcattaggaatttaggatcgatgcataattacaaatttacatccacttttgcttacatatttaaattgtagatctaagaagcgaaggtggtaacacgtgcttgcaagtttctcgaatctctaatgtggttggcaaattgaaccaaaggtcataaatgtgctacaacataatgttgggctacttgcatagattttacttacacatgagacatatgcacacacatacctctgcatttatagatttgtgtttaatgtccaccgtataacggttgtctagtcccaaccattgttagaattttcttagattcgaaaatgtttttattttattttattttaaatattgtatacacatttttctgagagtaataataaatttgtgacaataatgcaggtgcaccaaactcatacgcactagtggtgagcacagagaatataccctaaactggtacttaggcaacgaccgatcaatgcttctcttttactgcatcttccgaatgggtggcgccgccgttctcctctctaaccgctcctccgaccgctgccgctccaaataccaactcatccacaccgcccgtacacacaaaggatctgacgacaacgcctttaactgcgtttaccaacgcgaagacaacgacgacaacaaacaaatcggtgtctcactttccaaaaacctaatggctatagctggagaagctttcaagacgaacataactactctgggaccgctagttctaccaatgtctgaacaacttttctttttcgcaacactagtggcgcgaaaagtctttaatgtgaaaaagataaagccatacattcctgatttcaagctagctttcgagcatttctgcatccacgcgggaggtagagccgtgcttgacgagattgagaagaacttggatttatccgaatggcacatggagccatcgaggatgacgttgaaccggtttggtaacacttcgagtagctcactttggtatgagcttgcgtatagtgaagctaaaggaaggattaagagaggagataggacttggcagattgctttcggatcaggttttaagtgtaacagtgcggtttggaaagctttgagaacgattgatccaatggacgagaagactaatccatggattgatgagattgatgactttcctgttcaagttcctaggatcactcccattacatcgtcgtagtgttttaaattcttttggagaactaatttgttatgttttattaaatgtaataacttacgtgatttgatatttttttattatcttaatatatatgattgccaatttgccatatgtgagttcgagattagtgatgtgtaacatgagtttattcattcacacaagaagagtcttgtgtcacatttggtactttgccacgttgtttgattgcatgttaaaccacaaggcaacgtatatggttcttggtgccacgtgttcatatacttgaaactgtttaaattgtctcttcaaggattttacaaagatggagagaagcaaaagttatgtctttgatctccgcaaatcttatgcgaggcactttttttgtatgttcatcattcaagtctaagccatggtctggaaggttaatcaccgcggtgaaatcggtttcgtgtacttctaagccggttagagggttaaccaactatagtaccggggtctatttcgttagccaaaccggtccaccagaaatcaagtttcccggtggatctccttcggaggaagagttaccttcaggaccaagtagaggaccagagttggctccattagaagttccggagcttcctaatataccag

SEQ ID NO: 36657 - DNA, 1372 bp, Arabidopsis thaliana landsberg
  unsure (1)..(1372): unsure at all n locations
ccatttgagtttagaccagagagattcttggaagaagatgttacatgaagggtcataattttaggctgctccgtttgaagctgaagacgggtctgtcccgttgcacaacttggtatcaatttggtaacttcgatgatgagtcatttgcttcaccattttgtctgacacctcctcaagggactaaaccggaggagattgacatgtctgaaaaccctggactcgttacttacatgcgtacccctgtgcaagcagttgcaacgcctcggttgccttcggatctgtacaaacgcgtgccttacgatatgtaaatgtcactctgatctaccttttgttgctgctgctcatactcttgttgttgtttgtagacatgtttcttgtggtttatcatcgaaaaacttttgatgagatttgttgtatcaattctctcaaggagaagtaaagaagccatcttctttgtcattgggtttacgatctttcaatcagtgcaatgttgtaacttgaaacataagaataaacaggaagcaaacatacaaagatatttgcaggacataagaacaagtttcttgattacattaactttttaggtttcgcatatagcaaagtattttacacacatataattaattactctcagagcatttgtaatcattaacttgaacaagtgaaattcaagaagatgattccttgaactcctgcaactgtttgaagttcatccatggcttcacccacactttggcttcaaaattcttagtctgatcaccttcttttgcttctagggttaagtggtacatcgttcctgcaactacctgctcccttgctttgacaatcttcttgaactcaagaattttgttctgtacttacccggaaaaaacaaaaactaatcagataaagatatattcataggttattataatcagatcgaaaacagaggatttaaaaacctgttgtttgttatgttcttgaatggcaaatcgagcgagactctcgatctctccactgttctgatttcctcggagatcatgaacgcctcctagcatcatcgtcttctctgtgcttttctcttctgatctgcaaatcgctaattgaattgttccacagagaagaagagtaacgatccagaacgtctttgattccatctttcatagacaaacttatgcttcttcnnnnnnnnnnnnnnnnnnnnnnnnnnnnnnnnntatcttttacgttacttggcgattaaggtatgaaaatgacaagtcaaggaacaaatgacacgtgtcttcacctgagaggctgtgcgtttcgttctctctgaaaggtcaaagagataagaaaaacaaaaagcggcacgctgtgtgtggtttatattaatttgagagcgttccaaaca

SEQ ID NO: 36658 - DNA, 1306 bp, Arabidopsis thaliana landsberg
ctttaaaagtaggtcctttatcgctctctccatccgaatcccccattaccaggtagttccactgatggaacgtgagtctttagactcctttctcgacccccttggtagccttcttacttctccttttgttccccccagtttcactttcaacttttttctccccaggcggcgacccaattggtttcttgtttagcttggcatagttatctcgtagactgtcattgatcaaatcaaaccttggactcagcttctcgctgtaaacagcgtcctcgtcctcagaagtcgaagaatgagacggcgaagaagacactttcttccttttagcagcagcagcttcctcatcgccgttgttgttatcatcatcttcctcctcagctttgttgtttctggcgttaaggacttgtctgacgttgagcagaagcacttgccgagtcaagcgggcaaagttactgtatctggagcgaagatcatcggcgatatcctccgccgttgttaaatccttcccgcatgaatcaataacttgactcagatatctacgatttattcctccgcccataccaccacctccgccgccacgaccacgaccgcgacctctcctcaccatcatactgcttagagcaagtttcaatagctaagtctgaaactttcttacttttggaggcgtctgtctaccactggacagaaccagaggaggcagcagagaaaaagaaaaaacctaattttgtgtgtataattgtttatgaagcaaaaaaaaagcaattaaccttggtgttattcttctctattatagtattacataaagtttgattttcagtattacagtttttggtataagagcaagattccagagtctgagctatattgttcttctctacaaacttgaaggagtagtacaatggtatacagatccagtaacagatttgttctcataagcttttgatgcttctccatatgtttatttttatgtatagtagacgataatacacacaagcttgaacttattcaatatctggattaacttcttccccaactccaatccaacattgtcttttctcatcaatctcgtatctcaaaagagttccaaacaagatctttccctgaatccaatgacaacaccaagaaaggttacttcacaaataattgtcaaatacattttttgttaatggaaaagactggttttagaatgttgaaacctttactctcctatatgaagctaaagtttgtaagggctcattggatttcttcactagtccagcctcattactttatgttatcatctggcaccggttacaaccgcccaatgact

SEQ ID NO: 36659 - DNA, 2316 bp, Arabidopsis thaliana landsberg
tcatttaaaattgtcaaatttaaaaaatagttttcgcaaacgtaagagatacgtacttctaaatatacatactttctgcaagcttttaaattgtcaaaaaaatacgtacttgaaaattaaattataagtatatttagaaattgtaaaaagatacgtactttacagttatctgagtgtacttacaacttgactgcaaagtaggtgtactttgagagtttcttcttccactacccaattgaatccaatccatcaacaaatatttgaccaaaatgcacatcaaattttaatgttcgtaccgcgtttcaaattatttgccgctctgttgtaatatttgaattataatcagttcgttgatgaaacaaataaatcatggttcttgaacagtgttagccgactagtttttatgtcttaaccatttttttcttgctctctagagcactgcgtgaacattatgatattgtattatttttggcatagaaatgtaaacttgacaaaaattttgatgattacttaagttttggtctcgagattctaaagatttgcacaaaaaaacaaaggattgttcttctaaaagaaaaagttaaatcgagaaggatacaaaatttatgtaattttattgtatcctctttttgggctagctttagtcgatgaggccaaatgggcctgttaattatttatttttactttagtattttttaagtgggcttcttcctttggggctttacatttttgttggtccctgtaaaatcctgttaaagggcttaaatactagagcacaaaaattttaaaacaataaaacctaaatcctctcgtcgccttcgtttcttcgtcccactcccatcccattgatgaaccctcagaagactttgccctaaacctcacatactattcataatttgtatggatattaaaatgatattttatttggaaacttcatttttaataataaataaaaactattatcggaagttagtcatatttttttattttgtactcaaagagtcgtaatgtatatcgacattggtgtatcttttttttataacatttttgttacatatatcgttttcaattacatatattttacatggctggatttggataatgatgaaaagcaagtagtcgactttattcacaaacgttagagtcataaaaccctacccggcccattcacatgcaatgaaagtgaaactcccaacattacaagcaactgatatataaatattctacaaataaaaagggaagaaaactcttgaaattacatggaagtggaataatagtattacgaatttataatgtaatgccaagaaagggagaatatttataattcacataaaaacaaagggggcacattcatatatacgttacgtgtgtataaaacagcatataaatacagaatatatatattacaacttgagtagcatagtccttgagctattgacaagtcataagtgagagttcatgaagcatcattttactgtgctactggaaatatatatttgatattagtcgtgacctatagttcactgtataaaatgtaaatcttatttgatttgatgcaatacatttttactttaccccaaataacctgaataatgttggtcataattatgaattattctcaacaaattgtaagctatttccctgctgtttgtttacccacctactgtattttttttttcttcctctaacaccaatttttttttttttttttggccatcctgatcaatgaagcattaaggaatcaatctttgcacctggttatttttagtaacaactaacaacgcctcgtcatattgatttgtgctctgcacacaagattatatggatttcaaaataaacatgcagtcaattaatgcagtttatataacttttcttaagttcgatgttagaaaaaaggttttctaatgttaagaagtaaactatgcatgtcaagctaattgctacattaatctccaaaattaatatcatatagtacatttcgattaagcaatgaatcttgttatctaataccaaaaaaaaataaacaataacgaacaataattttttcattacaaacggcaacaaattattacattttcactattttagatggtctacacactagggttacaagttggtccatgcgaccagtttatacaatttttcgatgacgtttgtatataagttccttttgcataaatttatatgagttataaaggatgataaaagaaagtgtacattagataattgaaataaagacgccgaaaaagagatatataaatagcttccatgtgataactattattgctctctctctctctctccaatcctacagga

SEQ ID NO: 36660 - DNA, 1192 bp, Arabidopsis thaliana landsberg
agcagctgaacattttctcaagtgcagaagacaactgttgatagaaagtgtaagttctcaagtcgacctttctcagatacggagcaccatccatgctcgccttcacaaacagaacaccaagaccaggtttcccatcaacctcatcagtgttcttcgaagtagaagaagccattgtattcttccggtatgatctgattggaggccaaccaacaacctgtgccctgcaaaacaatagacacagattaccacaagattcgttcttgactcataaacaaactcataagcaaatcatcatataatacacacttggcagctggtgcattgttcaagccacccttagcatgagatctttcttcttgaatactcttcgagacatccttaactttcggcgacaacatcatgttgattcctcctccgggtctaacagatcctttcacacccgaaaactcatcccaagtgtcagcaaatcctctcttgttaccagaaacaacattcttatgccctgtagtagcagaaccattgtcattagaaggtagcaacgggaagagaagcttctcatcgggtgttctcggactcagcaaaccgaaatcagtctctctctcaggagattgagactcaggaagacctatcctcagttcagtagctttgaaattgagattgctcttcccaacaacattgggaatagttgagctatcaacagaggaacaatcagagagacccaagtagttacgttctttcaaacaaggtgacgtaaccagttcatccttatccacacttagcaatcgataagacatcagatcttcaatatgcaggacttgttttatctgcttagcatcacaacaacaagaagaacaacccaaaatcaatctaattacataaaaatcttcactttctatagatgcatgaacaaaattctcaattttaagaagaacccagaaaaattagggtttcagatgagaattgggttagatttgcttaacaagtaagataaagttagaaactttaacctaggtttcatagccagaattcaaccttatcgttcccagaactcatcttccccaaaatcaatcactttccattcaaaaaccaaaaatttcttactctaacttcttcagcatttccctaaaattcagaatcacaactaaatcacttacttacgagaaaaataaactaaacccaaatgataatgaat

SEQ ID NO: 36661 - DNA, 1506 bp, Arabidopsis thaliana landsberg
  unsure (1)..(1506): unsure at all n locations
gatgtatatgatcaacacatgcaagtgaaccatttagctccagctctgctttccctactccttttgtcctcacttatccgaggttccccaagcaggatcattaatgtgaattctgttgtaagtatcttcatcgctgaaactgccagctgcatagtttttcatatagttttgcagtgatgttggaaagtttgatattcttggtatacagaacctaaacaaaccgaaagtttgaactttgtatatacagggttaccattgcttttctctctgtgaaattctgctgcactgctttgattgaatctaaatacgaataacaacgttctgtttatcatctaaggttattcccatctcatgcaagatcattgtttgttgggtttactcttttggtagatgcactatgttggtttcgttnnnnnnnnnnnnnnnnnnnnnnnnnnnnnnnnnnnaaagtttacaagcctcgttggatattctggcagcaagcttgcacaggtgagagcttacacaaaacatcattcaatacttttctttcttttattctttatctcagaaactaataaatttactttctatttccctggtcaggttatgtttagcaatgtacttttgaaaaggctgcctctagaaactcgcattagcgttctttgtttatcccccgggattgtcctaacaaatgttgtgagtattactttaagtctcactccattgctcgttcctcataacttatatcacattaaaccatgttgaacatccaattatgcaggcgagagatctgccaagatatgttcaagttcaatacgcgttgataccttatttcatcttttcgcctcaagaaggctctagaagcacactcttctcagctacagacgctcagattccagagcattgtgaaaagctaaaaaccgaagataagcccgtttgtacattcatatctcaaaattgcaagcacacaaagccttcagaagaagcacacaacgtagaaacagcagaaagagtatgggaaaagacgataaagctgatcggtcttcctcttgatgctgtagagaggcttatacaaggagaagaggtccaatgccggtatgggactcatcaacaataaagtctttctcacaagtctattcacaagtctctatcttctttcctccaatttgtacttgttagatgtttctagaacttgacctcaaaggtgcattacactacacagtctacactatgcacattctaaacgatcaaggatgagatattagggaatatagctttcataaatcaatctaactgccataaactcacatttattataccatcattttaaacacataggttgcataacaacaacgtaaacgttacctgaaaaaaaaaaaaaaagagaggcaggatcttgataaaccaaagaaatcaaataaataatctttctataacgtgacaatggagtgaaaaaaaacaattaagacattcaagtcgttactaaattattcaaaattctaaccaagaatttgcaaacacaca

SEQ ID NO: 36662 - DNA, 2046 bp, Arabidopsis thaliana landsberg
tatgcaattaaacaaacacttaatctaaactaatactacttagttagcctggtcatactattattaaagatgttttaatcttatgcaatagtttttttttttgtcaaacaatcttatgtaatagtttaagtttgtcaatttgtcttattaaaacaggaggaactgcacaactctaccaaaaaaaaaaaagtctcaaagactctgccaaatcttgcctttatgactccaaagtgcacgtttattcagataaagtattcaaaaaacaaccaaatggaaatgagattagagagcgaggttcagagatgatgggcgactagttgcaaatacaaagtgttgtttaaatgaaaagtgattaattatttatatagatctttattggacccaatgctatcacctcatctcaattatcaagcccatgggttggtctcatcaaagcccaatcaaagcttcccaaacaaaaaggaattaagatgaacaaacaaaaaaaaaacacttcggagcaaaagatctggccaccacaacacaacgatcgacgaatacaatcggaaaatttgaaatctcgtcgatgaagatgactgctaagatgcgccgtgaattcccgacggcgttccttctcttgtttctggttccggtgatgattccggtcggtgaggctgtatggctagatgtgcctcccaccggaacaaagtgtgtatctgaagaaatccagagcaatgtcgtcgttttggctgattacctcatcatctccgaggatcacgaggtcatgcccactatatccgtcaaggtaagtgtcttcgattttctgttcctatcatcttgcttgttcagtgatttgaatctgcattttgtgttactcgatccataatttcaactgattcatgagtcacgtttaggaattagaaaggcatgtattaattctcgatccaagtttccttatttggaaaattatgatcatgcatgtctttctttgattgtttgttatgatgattttcggatttgtataaatgctcagatgcttgtgtatagcttaatccctgtgaatacctttttttttttgccgtaatatcagtaattagctgtgagattgagataagaaaaattgaaactttatgtggtcttttaatgaagtctgtgtttttgatgtgtatgtttgggaacaatgataattattacgaacaagggagtttcttttattgagcaagtatcattcggtatttagtaatcattgctatgtgctagttccagatagtttgatggattgtttaagatagtgtcctttggattgagagcagtctttgaagtcgacttgaaaaaaggaatacaatgtttctgaatggtaacctctgttcctttttattcttggctctgagttttgagaatcattatggtgcaggtgacatttttatttggcaacaatctgcacaatatggagaggcggggcgcatggccaatttgcattcacaacccaagaatcaggaacttacttggcgtgttttgaggccgatgctaaaagtcatggtaacaaagattttagcatcaacatcgactggaaaactggaatcgcagctaaagattgggactccattgctagaaaagaaaagatcgaggtcagctctccatatttccaagcctctgagacaattaaattacttacaagatcacatcttagagtaggttagtctctaaactgacactcgataatgtcttcaattgtgtagggtgtagagctggagtttaagaaacttgaaggtgcagttgaagcaatccatgaaaatctgatttacctcagaaacaggtaaaagattaataaactgctacattatttgaaaatactgaaaagaaatacaaatacacattctcttgttttcacaattgcagagaagcagagatgaggattgtgagtgaaaaaacaaactcgagagtcgcatggtacagtataatgtcgctggggatttgcattgtggtctctggtttacagattttgtacttgaagcaatacttataaaaagaaaaagcttatttagatcatggatagtttcttgttaa

SEQ ID NO: 36663 - DNA, 4356 bp, Arabidopsis thaliana landsberg
  unsure (1)..(4356): unsure at all n locations
tggttattgcaagtgtgccttcttttccattttattctcagtggcgtatgtactttaggatgctttttagactttagaaaactgtaaccacacagacacagattttagtattgaagtaacaccaatctagaatgacggggcagagatttctctatttatgaatgttttcttacttgagacccacctttttgcagggttggctttttagttcagactccaaattctggaagccgcctcagttgaaagtaaacatccaatttagtgtatatgatgaatgctgattgattcaatatcacagcctcgcttgctttctgcaggcactcttacattcagttccctttggcaaaatgatagttcttgacctatatgctgaagtcaaaccgatatggaacaagtccgcccaattttatggaactccttatatctggtatattgttgtctcagtttccttcttatgcctgagtcagttgtatttttacgtgtttttattataatcggatgaattccaggtgcatgcttcacaattttggaggcaacattgaaatgtatggtgctcttgattcaatttcttcaggaccagttgatgctcgtgttagcaaaaattcaaccatggtaactcataactacgacattcacaatatgtttcacattttttatcttatgtctataggtgagactattttctccgcttagaaatggaatcttgttatttatgttgcacataggtcggtgtaggaatgtgcatggaaggaatagagcagaacccggtggtttacgaactaacttctgaaatggcatttcgagatgagaaagttgatgtacaggtaatgcatatatagtatgcacccttgctgtgacacttgaaagtgtttgcacaatcagtttcatacatttttaatattcgtgtacatagaaatggttgaagagctatgcacgcagaagatacatgaaagaaaatcatcaaatcgaggccgcttgggagattctgtatcacactgtctacaattgcactgatggaatcgcagtacgtttttttgttttggttactaccgcagcatctctccttagatctgctctataattcattagaaacttgcttttaaaattctctgttttaggaccataacacagatttcatagtcaagcttccggactgggatccatctagttctgtacaagacgacttgaaacaaaaagattcatatatgatctccactggcccatatgaaacaaaaagaagagtcttgtttcaagataagaccgctgatttgcctaaggcccatttatggtattctacaaaggaggtgatcgaagctctcaaacttttcctggaagctggggatgatctgtcaaggagcttaacatataggtagatgcaagtagagatagattatctaccattttagtggttacagattcctttgggttttgcttgcaggtatgacatggttgatttgacgcgtcaagttttatcgaagctagcaaaccaggtgtacaccgaagcagtgacagcttttgtaaagaaagatatcggaagcttaggacaattgagtgagaagtttctggagcttataaaggacatggacgttctacttgcttcggatgataattgccttctggggacatggctggagagtgcaaagaagttggccaaaaacggtgatgaaaggaaacaggtgtaacatcattcttgttcttggaacgtgcgggtagaagaagtagattacttgctcactttgtttctctgtgtacagtacgagtggaacgcgagaacgcaagtgacaatgtggtatgactcgaacgatgtgaaccaaagcaagcttcatgattacggtaagatataaacttaaaaaaaaagattctcgagtggatagagctttttaaaaaactgttatgttttatgatcatcatcatcagcaaacaagttctggagtgggttacttgaagactactacttaccccgagcgaggttgtattttaatgaaatgctgaaaagtttaagagataagaagatattcaaggtagagaaatggcgaagagaatggataatgatgtcacacaaatggcaacaaagttcatcagaggtctatccagttaaggcaaaaggagacgcgttagctatttcaaggcatctgttgagtaaatacttcccatgagtttactcaagagtagctcaaacgaataaataaaataaacaaaagggttgggtttctactttctagcttgtgcctgagataaatttaacatttgtgtaaatttgagagttattaggcttctgatgtgttagtgtaagagactcggtgaaggccaataaaggttgtaacaacaaactctgcttcatctcttccaacaaagatttacttgtgtcaatacctgcaaggtatcctccatgtacatacccactgaacttttcacttgtgtgttctcctgtaaagaatatccgtccaactggggcctgaataaacataaacctcttaaatttctgacagacatgtgtatgtgtgtgcgtcttaataacaacaacaaaatgtgtttaccttgatattttgcagaagctgattatcagatatcatagggtaattactgtagctaccgcgttgaaaccggttgttccaccacctggggacaagaatatcggttgcgtaaggaatggtggccccaaacatgtccctgagaacactcattgcctctttcatcgtctcctggtctgattgagcttcaacgcgctttgattgttcgttggtcaacgtcaccaccagaatgttagagcccgggtacgcattttccatgtgctgttaccaaaagcacacatataagcttgagaggagagcaagcaagttgtagtatgcatacacattattatattattgtgtgaattctatactcttacccacatggatcatgccgctagttagagacactcaagataatataaaagcaatgatagtgttaaatcaaagggacccccaggtgtttaattttaagattagagagtcaatatgtgccacgtttcgaccttaagtggaacgaccaaaaagatgcatcgacattaacaaacaattacaatctcattattaagggaaatttaacctgnnnnnnnnnnnnnnnnnnncgttgttcgtgtgcataaatgaaaaactcttgaccaggaccacatggccagaaacattgagggaatttcaggaagatcttggtgtacaccatcacatcacatttttgtatagcttctgttttccatctctgtcaccaaatataaattttggatagtaagcataataatgcatatagacaccaaaatatttgacttgctatcctaatggctgatacaatttaatatttccctagattcatgcacattgattgattaaacatctacaccttgtatcttttaaaatgttaaataagcataaaaggtaagaccaatgagtagttgatcataaattatgattatatgagaagaagaagagaaagtaaactaacgggtaaaaggggttggaaggagagaagatcagattggagaacaccgatacttgcagacacgatcacataattagcttcgtatacggaaccatcctctgtcttcaccactaccccattcatagactgttgcacctccctaactacctgccattaattcccacaacttcatcacactattgctcctccaatatagattactaatataacacacagctttcaaagttaagccagctggtttatgagagaggcaataaataaaacacgctcattcatgcataccccacaataatgcttcccaagaaactatcaactttcaattgaaaactgttactatactaaacaaaaatatagctacaaggacccggaatgtaatcaattccactatacaccaaaggctgagagaaccttagcagaaaaaaagataatgcaaatcaatcaacctaatagagagtgacaacagctaaaaagcaaaagtagctttccaaataacgtcaatatatactcttttaactcaaaacctaatcaatatcagagatcttactatacctggtttagtttgaggcggttgtccaagatatttccatgtgaggtaacgagaaattcctcagccattttataaagtaaacattcgtaacctctttcatcagcaaccaagaactctctttcaccaaagtctacataagtggatattggctctacctctgaaattagtagtataaagaatcaatcaaccaatcaatctgcgacattattatcatgtgtgtttctcaagaactcaccagccatctcaaaatcatgcaagataaagtcaatggctagttctatgggcgtcttcggtgacctanacaccanaccaaaacacattagaaatcgagc

SEQ ID NO: 36664 - DNA, 1718 bp, Arabidopsis thaliana landsberg
tacccacatccaacatctcattgaaatactcacaagcctcgtctaatttgttctcatggcacagagctgtgatcaaacttgagaacatgtgcattcctggaagaacacctttccctttcatctcgtcccaaatcttgatcgccatatccaatctctctttgttacaaaacatcctcaccatgatctcgtaagtactcaccgtcggttcacaactcatcgtctgataaacttcatacgcttctttcgagcgctgcattctaatcaaatgatgaagaattatatcataagttctagcatttggcccaaccccttttaatctcatctcatcaacggttttgtatgcgtcttccattcgctgtgaccagcaataagcacctactagcgcattgtaagtaggtgcttcaagaggaaacccggaactctttgatctctcaaagaactcaagagcatcattcaacttcttctcagagccaagtccattaatcaaactacagaaaatgtgaggacttggcttacaattcctctgttccatctcattgaagaatctaatagcttcttcatacttcttcgccttgcaatgcgcattgataataataccgtaagcgacaacatccggttcaaaaccttcgtctttcatctctctgttaacctcatcaactctcaaaagattcaactcctgaccccaaccttcaagtagaatagtataagacttaatatcaggctcaaaccttttctttttcattttatcgaacaccttctgtgcatccccaacatttctagatttgctcaaagtatcaagcatacgattaaaatcacttgattccatcttaaacccaaactcttccatcttatgaaacgcacctatagcttctttaactttcctagctctagcgtaacgtctagagataagagcaaatgtctctttgctcaaaagcttttttgctttcatgtcgtctactaaactccaaatgagtttgaattgtttgatcttacctaatgattcgatcaatgcgttgtagtttgaagtagtgtgcttgaaacccttttgattctctgcccatttgaatacagacaaagctaaaacaccagcgttgcttagcttcttcagtacttcttcgattaaggctggtgaaagtttaacagaagcttcgttcagcaaagtttcaacctttgaatccgtgaatttggtgagaatcttggagattttctgggggttttgcgaagcatcattagcagaaacttgggtttcaacagaagaagcgtgaaatgatccgtaaagtgtaaagtttgaagctttatgaatccatggaatcgattcgagactcggtgacgaagacgaagagattcgagagttcacacgtcgagagagattcactccggtgactctgaagaatcgagagaagaccattggaggagaaagtttagatctttaactttcaattaactaagatacaacagaggaacaaaggtttatcaaatttgcgaacaaaagttctctaatggctttaacaaaggaattacaaaatctgggaaagagaataaaaatatctcctttctcttctctttctccttctcctcgtataaatacagcagccactgtgttgttgcccaaagaatttaaccttacagagactgaaaacaatgtagtctcgtgtgttcgattatcacttgcattgattcgattgtgaattcaatcataagaaaattcgttttgtttc

SEQ ID NO: 36665 - DNA, 1486 bp, Arabidopsis thaliana landsberg
  unsure (1)..(1486): unsure at all n locations
cctgtctgactatttctctacctactggggagaccggagctccctcgactgtctctgctattggaaggatagggttgggaactgacctgcacaagctcatccatggacttgatacaaaaccgactgctcagggatctcatggtggaatgtcgagttatcagtccaaagttactgatcccaccggtaaaggtaagttttttttcttctcggaattctgattcaggaatttatatcttttgacttgtgtcctttctttattctaggagctggagaacaaccgagtgtcgcagcttttgggaggaggaacgaaacaggtgaagatgatcacatgggactgggaagagatctccgggagaaaagtcatggttttgatactaagtcaagacctgaaatgggcaagcacataccggcgggagactatggatctagattggggaaagaatctccggagcggagtgatgaatttgatctgggaaaagatttgccgacgagaactcaaggtatacaaaaccctcagggttttgattccagaggtcagaggagaggagaggagatgcaccagcctaatcagagcagctacaccgataagatctcattagcgacttcggtcgtagcagacaaagctgtggcggcgaaaaacgccgtcgcttcgaagttaggttactccggggaaggcggccacgagaatcgtgtggaaggagcagaaaatcctagctccgctggtggatacggaagtacggtcgcaagtatggtgactccagtttacgagaaggttaaagagacaggagctagtgtaatgacgaagttaccattcaccgggaccgggacagagcaaggacaagacaggggcgtctcggcgaaagaattccttacggagaaactgagtccgggagaggaagacaaggctttgtcggaagtggtcactgagaagcttcatcttggaggaggcgnnnnnnnnnnnnnnnnnnnnnagagagggatagtgacacaatcggaggaggtggagaaaaggttaggagggtttaaggatccgagctcggaagcagctacgaaacagggtgaagcatatgcggagaaaggcgaaggagggattgcggagaagctgagaggagctgttacttcttggatcgctggtacgacggaagaagtgacgcaaaagtctacagaatctgttcaagactctacacagtcacttggctccaccattggtaatacacgcctcttcctgttaaacaacgttttcggcttttgacggtggtaatgacttttaatttggtgtaatgatggttagggaataaaatgggaattacgggttcgggaggaggtgaggcaagccaacaaggttctatgcctttgcaaaagagatttcaagaatctggaaactgagattctgcttcttctttttaaatgtatgggttgttaatcctttctaatgtgcgttgtggtttgatgatccatggcttatnttgatgtatctactactagt

SEQ ID NO: 36666 - DNA, 3542 bp, Arabidopsis thaliana landsberg
ggcatgagatcatacatctcctgagtcccggataattgataagtaactacttcagtgccaccaaatgaagacctcccatgatcagaatttgaaaagcttccaggttcctgaaggtcaccctgagattcattcgcagccttttcctgatctcccagagaaacttgttcaaaatcatcatccttaaaggctctatcagctgaactgatcccttgcaaagtcgtatcaaatgcctctatcctattgtgcaaaggattagctatatcagcttcagggagctttctttcatcatcgtcttccattctataaacttatggagagtacagacattcacagcgttttctcaccctccacctgttacacagagcaaaagttgagcttctgagaaaaatgcatctgacactgatgaagatgagaactaaagtcgacactgtgattgaaccaaataaacctgcaaaaatgcatctgaaccaatgatccatatatatactcacttggatctactaaatttaacatatacagcatcaaaaatctgcaaaaggagctcaaaaatcttcagaaaacaatcaattagaagattctctgtcagatctcagagaggatcgattttgaaaatcataagaaaattacattccgagtgtatcatctagaactatgaaaggataaaatgcttatagaaatcaatgccgggagagagtacgcacggatcggaccggagaaatgttcggagatgatgaaccaatgaatggaagcgaatcggaagctcaaacaaatctggacggaatctctatccgccgacggcgcaacgagagcttggaagacggagaatgcgtaagattccagaggacgacgaaagtaaagagaggtgagacgacgatcggagaaagactagcgaaaggaggcgacttgggcgcgcgggagagagagaaagaagagaagagagattgtggttttttactgatttgggattttagcaacacataaaagtcaattaacactaaagttttcatttaattcctttttaagtattttgctattcatgtcaacacaaatttatttctttttactactctcagtaaagtgattcatttatttacttcaattttttcccaacagtaaagtgattcatttataaatctttttttttccaacaatttcatttacagtataaatctttatcttagacattagacaaggatgcagaaaaaacaaaggtctaccagacacactagtgtttaagtgataaagaaaaagaaattaatattttcttaccctaaaaattaataataatatttttttacactaaagtctaaaccaaacaacaaatcatctttctattttttctttagcacaaccatcaatttagattgataactagtcatagtaattttttaattgaaaatttgtaataacttatgggctttaaatttacctaaaagatatacataggcccaatacaaatctggatactggataccttgacttcttcaggccttacccatttcataagaagaaaacttttaaccgagagaacacagcgttttagatgattttgttttatttttatcacaagggtttgagcaatttaaacaaacagaggaaagtattacaatggctaattaatggtctgtttctttacgggaacggcatataacgtgttggtcctgtgtaatgtgataccaaaggtctcgtccatatccaagtcctctgaaacgacaccgttaggaagcttccagtcaaaggaataaagaagagaagcaagcataagagacactgttttcacagccaaaggcaatcccggacatattctccgtcctcctccaaacggtgtaagctcataatctctacctttcacatcaatctctttccccataaacctctctggctcgaactggctcggattctcccatacgcttgggtctcgtcctatggcccacacattcactagaacctgagtatctttaggcaccatgaacccaagaacctccacatctgattccgcttttcgtgggactagtagcggagcagccggatgtaacctaaaagtttccttcacaaccgcttgtaaatatggcaatcctgagatatctgactcttgcacaacactgttttgacctaacacacgatccatctctgcctgagcttttaccatcgttttagggtttctaagtaactctgccattgcccactctagagtactagagcttgtatctgtgccagctgtaaacatatcctgaaatacaatcatatataaataagtgagcttgacattgtggaaccgtatataaagattcatgtggtttcatctcaagacattgataaaaagaacataacattgcgaaaccgtattcaagatgtctttatatgatcaagtcatatttttgacatttccgtctcaagatttgttggaagattgcgagtaatgaaatttcatctcaaaacgaatgaacagaaaattgactacaatcttgattatctgcaagctggtagaacttaccaagagtaggtgttcaatatcgttattgtcgagctctgcttcatctccttcgttgaggatgagaagcgaatccaagaaatctctgttggaaacatctttagagtaattccctaatgatttttctgctattttagcatccatgaacccacggaaaaccctaaacaacctctccgtcagacccctcattgccttcctattaccttgtaggtcaagaaaccccataaatggaaagtagttagcagcgtctggtttcccagcagcttccatggcaccaatcaccgtgtcctgaaattcgttggattttttcgagtcatagctaccgagatcaaccgaaaacagaatgttggatatgatattaagaactgtggtgtaggatgcacgagaaatatcaactgcttcttttctctcgctgctttcattcatgaagcttacaagctcttgcactttcttcatccgcagagctttagtggcttcggtacgctgcggtgagaacatgagagtcactgacagttttctcaacatcctgagacaaatcataacagcgatccattatactctaattggtgtctttgttacgtttgcgtttatgtttgaagattaacaattggaacacctcaagacaacactctaaagtttttactcgttacaagcgtcaataaaccgtaatttcgactaagattgtatccaaaaacagttgaatttattagaaaccgacaaaccgtaataaaattattaattatgtttacgtacaaatacaaaattttagtttaaacaagcatttgaaaattgttaaactaaatacgaagtggtaaaagaaaaatgaaattaggtttgtacctccaacgagcggacgacggaggaagccagatgacggaaacttcttcgtgaccaaagcaccgtatagagtcattggacttacggccagacatttggtcgtgtgttcttagtacttctcttccagcttctggtgaagttatgacgactgagtttagacataacaaacttaagactcatgattggtccataaatttttgcgaggtcggcgaat

SEQ ID NO: 36667 - DNA, 3015 bp, Arabidopsis thaliana landsberg
  unsure (1)..(3015): unsure at all n locations
gactactattgttttgttcaaatcttctgtgcaatgtaaagttatcatttaagaattaagataatatgtactactacaaaatcataacaaaatgataaaacatcaattgttcatgaaggtgtattaactgcgttgaatttttactagctcatatttagtgtcttaaagagcgcatgcaatatcgtagttaagactgggaggtaataaacttagatcagttgatgttattgtccgaagctaatctttgtttggccgtctgacgtggcacgtaaaaaccaacttaaaagcttcctctatataaataccaacaagctcttcaatcccaaaacacatccattccattaccaaagtacaaaacataaactccttctgtctctctcctctctacctcaatttaattctcctgatttgttttttttccaccaaaaaaaagagataacaaagaaaaacaaatagctaaaacatatggcggtagactccaacctctcttcgcccttgggacctccggcgtgtgagaaggacgcaaaagcccttcgtttcatcgaggaaatgacccgaaacgccgacaccgttcaagaaaaccttttggcggagattctcgctcgcaacgctgacaccgagtacctccgccgcttcaacctatgcggcgccaccgaccgtgatacctttaaaacgaagattccagtcattacatacgaagatctccagccagagattcaacgcattgctgatggagaccgctctcccatcttatctgcccatcccatctctgagttcctcactaggtttgttcaccatactttgttctctatctttactttaccgattactaaatcaatcaaaatccataaaccaataactcctaaaaacatttttccagctctggaacatcagccggagagaggaaacttatgccgaccattaaagaagagctcgatcgtcgccagcttctttacagtctcctcatgcccgtaatgaatttgtacgtcattcacatgaataaaacttttttaaccataaaaatattacgtagctagacgacaatatagtgacgtatgatcagtttgttaaataaagtctttattatttgttcaagcgttgacaatattgtctctttcgggaacaggtatgtgccgggtctagataaaggaaagggaatgtactttttgttcgttaagtccgaaacaaagacaccgggtgggctaccagctcgaccggttttgaccagttattacaagagtgaacactttcggtcacggccgtacgacccctacaacgtctacacaagtcccaacgaagccattctctgtcccgattcatttcaaagtatgtacactcagatgctatgcggcctccttgaccgcctttctgtcctccgagtgggcgccgtctttgcctctggtctcctccgtgccatccgcttcctccagctccattggtctcgcttcgcccatgacatcgagttaggatgtcttgactccgagataactgacccgtctataagacaatgcatgtccggtgttctcaaaccagatcctgtcctggcagagttcatccgccgggagtgcaagtcggacaattgggaaaaaatcattacccgaatttggccaaacactaagtaccttgacgtcatcgtaactggagccatggctcagtatatcccaacgttggaatactatagtggtggtcttccgatggcttgcaccatgtacgcctcctccgagtgttactttggtttgaaccttaacccaatgagcaaaccatcagaagtctcttacaccatcatgcccaacatggcctacttcgagttcatccctctcggtggcacaaggccgttgactcgttgatgtaaagatggtaaagagtatgaactcgttgtcacgacntatgctggtctctgtcgataccgagttggtgacatccttcgagtcacaggtttccataactccgcacctcagttccacttcgtgaggaggaagaacgtcctcctcagcatcgactctgacaagaccgacgagtcagagcttcaaaaggcggtggagaatgcatcaagtattcttcatgaagagtgtgggagccgcgtagccgagtacactagctacgcagacacaagcacgatcccgggccactatgtcttatactgggagttgttagtgagggatggggcgaggcagccaagtcatgagactctgactcgttgctgccttgagatggaagagtcattaaactcggtttaccggcagagccgagtcgcggacaactcggttggaccattggagattagagtggtgagaaacggaacgttcgaggagctgatggattacgcaatctcaagaggtgcatcaattaaccagtacaaggtaccaaggtgcgtgaactttacacctatcgtggagttactagattctagggttgtgtcggcgcattttagcccatccttaccgcattggacgccggagagaaggagaagataaggacaggcccatgttttttccttggagttctcgtgaagtcaaaggctttaaaattaattagcggtttggtcttgtaatataattagattccttgctggtgctttagtttttcttctcgcttttaatgtgtctttttactcgttttttttcactgtggaatctctgtgtgtaatttggttgtttttttctctacttgggacaacatatcctgattagagacgttttttattcccagggaccatgtctactttgatggaaatcaatgccattcgattagtaaatttgttagaaaagtttcgttatttatttacaatgtacttatttagcagctaattaattttcatgaccgagagatatgacaaaacattagtggaacttcattttagaaaagaattaatcatatcttacattttgttttcgaaaacttaagaagtaaattttgagttgtggagccaaatcttgatattaatttttcagactaaaaactgaacggtcattcatattgaagtagaagaaaaaataattcctagtaaacaagaat

SEQ ID NO: 36668 - DNA, 2314 bp, Arabidopsis thaliana landsberg
cgaagacattgaagattcgccgttgggtctaatacgggatttgaagactgagcttaataagcttttgttatcctttgagacaaccatgttcgaatttcaagtgagctcgagctgaagaagatgagcatgtctataaaaccctgaaacaaaaaccccgacggggttggtctgataaattctaaaccttagggatgataatctaataaatcatataaattagcgagtgatcatgtaaattaacaagattagttgaagaagaatcgtcaaattttgattctgtctctgggaatttatcttactggtggattcttcaatgcagagattatgaatttattgatgaacatcgtcaattcaaagattctctttttatcatttacgctactacttcctcttcttctgggtcaatcgtcaatcgttgaatccgattcgatttgcctctcttccggcttagcttctacggtgacaatggcggctccgggatcggttcagaaaggtgatgaagagtggcgtgcaattctttcacctgaacagtttcggattcttcgtcaaaagggcactgagtaagtttttgcagagcttctatggtgcttaaaaattgggaattttggtaactattatcttcgattaggaatcctggttttagaaaatctaggtttcttatttcataattcgcatcatttgtgtttctcgagttaaaggtttcaactttatctttgattagcaatatgttgatcattagatcttctcaatgagtacattacttagaaattttctgctatagatgttgaactgttaggataaactcaattctattgagtatttggagttatacaaattttctgctatagatgttgaactgtttggataagcttccatgaaaggttaatggttcttcaaggatactatctttcattacagtttttttataacagatatgatctgagtattgtttttacctacgactttaagagctcgactgtagaacttggtttctctgtttggttaagtttatcggttcctatagagcctttactatgaatggattgctatggaaatgaccatgaagatgtctgcttcgtctttagggtttaggtctttctagtatttgattatcatattgaatagtttatgactggatgggtatataattcccccttgttcttgcgggtttgtgttttgttgatttcagatatccaggaacaggggaatatgtcaacttcgacaaggaaggagtttacggttgtgtaggatgcaatgctcctctttataaatccaccacaaagttcaacgctggttgtggctggccagctttctttgaaggaatccccggtgccattacccgaacggtaaaacaaaatactctcagagcacatacactttctccatcaaagtgataacaaaaatgaactctctcttctctgtgttttttgcttacatttgttggtttatcagacagacccagatgggagacgaatcgagatcacatgtgctgcttgtggaggacatcttggtcacgtttttaaaggagaaggtttccctactcctaccgatgagcgacactgtgtaaacagtatctctctcaagttcacaccagagaatccgaccctgtaataatatgatcacagaaaaaaagacgtgataatataggtgtgttgtgtgatgcttctgtctctctctcgtactgtgtttttgtcttttttctgtgagactaatgtttagttttgatggttaataataaggtcgttgaataaagtctccagactttttgtatcgtcatggcagatttttctcaggctggtaaagttaatagtgttactagtttgcagagaaaaataaaatgatttaagaaatgactcaaagcacctggtgtcaaccagagttttggcatgggtatgcaccaagaggtccaagaccaccccgaaatattcgaattatgggttgtcttgctttttatatctctctattcttttggctttggatgcatcatactattgtaaagccagttggatgttctcttaaactctcatgttgtggaacatattctccatggtcatcgaatgcgtcttgtgcttaagatagcatttgaagtcacatggaaagcttcatttatagagcccttaggtcgtggaagataacctgctgctattctacttgttccgataaactatgcaaatttcgccatacataccaacaatcgacgaagcagtttttagcgctaggtccagtaaccttatacacttgtttacattgttttctagaggttctttgatgaagacaggtaacgtaaatgtgatacaatcttaacgttagctgt

SEQ ID NO: 36669 - DNA, 1314 bp, Arabidopsis thaliana landsberg
ggcctttgctaaggctatactgactcatcgtccagtcgcgagataaatggtcagcaacatcatcctccgcatctttggttcttcctcctcctctgcctgcgcctccttcgccgtcgtctttcacaccccaaaaccataccttcttcttctccatgcttcagatccctctctctttctttttccaaaatcaaaatcccttgcggataaacacgcaaggtttttttttttttttctccgaattcgccggtttcgaatttccttttatatccttttttctgttacgtttgtttctttcttttttgttgtgggccccaacaggtaactattttccctcctttttcttcttttgtagccacaaaaatagcaagtatatttcggttcattggtcttttaatgctcatagaaactttcaaaattaacaaattggcatgtttttttttccgttttgctctgggaactgaatattaactatggttttttgcttaattaggcttttgtttgtcccccaaacatactaatattaccaatacttaaaaacatcatacaagtttctgttgttcaataattggcaaaattcaaataggaggactacaatccaaaaacgcttgataaatcgagaaagaagaagccttagatgccaaaaggtcagcacacccattcacttctcttccataaaaccgaaattcaggcttgaagtaccttcgtggcgaggtgagaatgtcatcagtgtaactgctcagccatggccataaaatgggatctctcacagcctctattaaattcatagaatccgactcaaagattacctcctcaaaacccatattgtcaatgcatttcatggcccaagagagagctgcagcttcagcctccaggctcgaatataatagcggatatgcctttgctcccatccatctttccttccctgtgtcatcccgcaaaatccacccaacaccgcaccggttccaatctgccttccacgctgcatcgacattacatttatacttccctaccggcggaggttaccatttgattgcggaaagagttccaacaggtttgtgtttgtttagtttaagtaagcataaatctttaagtaaagcataaatcttcgttcataagatctcaacagaaatgaactacaaatctctaatcaatctacagtggtattcatatcatatgactttcttgttttaacatcaattctaacaattcaactattcaatcattgaccacagtggtttcttaacaatcaagttattggatctcataggccttgataaccataaaaaaacattagtttggtctgactgtacgcca

SEQ ID NO: 36670 - DNA, 4207 bp, Arabidopsis thaliana landsberg
atgctcgtcggagtcagagttggttgcgagtaccattgtgtttgagttatgctgaattgttgaatataaaaatatactatatcagaagcttttcacaaatataaagaaagtaagaaagcaaaaactctcttaacactaatttaagacattcatataactaactccccccttgaccctctcttccccttgaattggggatttggtacattatttcaacaacttattattgtcctcaaacaattaaacagagaacaatatcagaatcactgcatatttatttcctgatttgagaccacatgcacaaatcgatggtcaatctgtctcttcttcccaagatcatagaccagattataccaaataccatctaaattataaaatattaatctcactatatctcaaatacccgacagacatataaagttggtcttgtgaataaaatacctttggatcagaaagtttctacgtactgtattgaattacgaggaacgattacaacagattatatacgtcttgtgatatatattgagagagataaggagctacaaagattcatgtttatctcctggctaatatccatttagatatttcagaatatatagaaagatgctaatgttatttacgtaccgaaatttcaaaaataatatttcaaaaaaaaaaaaatagcggtacaatgcttaggaaacacttttgtcagagtcgtttaacgtgcgtcagagctttcttgtagtacacgtctcatgctgattgggcaaattgaacaaatcatatgcagagaatacagatgatagggtcttaaaaagatggaacaaatatgtgaatttttgtgattattattattactattatatttattttgtatagctcgcgagttagctcggtttatatatgggggatcaaataaggtaaactgatctagctcatcaatgagctgagtttagttgagcgacacccttacttttagaactacagaataaacaaaattaagaattcaaaataccaatataagtctcgttctctctaggaagttctaaactctcacagtattacgcaccaccaaaaaaattgcataaacggagagcgccctcacaaagtcagacatcttttaaacgtacatacaccagaatcccaattcgtctatccgggaaataaaagaagaaactccggagaagggatcatgacgagccctcatactgctcctttacggctcttgctgccgcattgtaccatgccgctgcagccattgcacctggatctggaattgatgcaaaaatctcagctgatacatagcttgatctcccggcctgttttacacaatctcatccgtcatttcaaaatatgaaaaccacttatagcataaacaatggcagaccgaaataatggtatgctaaactcacctgtgcttgcatctgtatggttgattccgctccggcagttgccgcttcgcctgatagaatgaaagcagatattggatcctctccagcgctcagtttctgttcttatcaaaagcaaaaactcattactacttgcgcaggttgcaattatctaaattgtgaaagaaagtaagttgctctttgtcacctcctcaagaacttttgaagctgggatgagcgcatctaacatcgttctataaccggcagttgctccaccatatttgctgacagcagagattgatgacttgagtgcttcagaccctgattacaagaagaaatcagattcataggccaagatgtgccttttggaatactaactaacgacaatgcaagcaacgtatatcttacagtgtttgggagtggtttctgattgagcgttagcttttagctccgcgtatgctgccttgcagaggagatggtaactgttttcacaagagagcccgtaatgtcactttaccaataaaacccaaatgcatgagctgtctataacgaaagaaaatgtaaaataatttcatgaattacattattccgcttgtgccccccatggctcttttgattgatagaccaatctcattcactgtttccgcagcatcattgagtggataactagaaacaaaaagagacatggttaaattttttgtcaagaatctctgtgaagtctgaagaactcaacataaagagaggtatatggggaagtgagagtatcaaatggactcactagtttttcatgtcctccagaatagctgttgcacctctgtacatctacaatattgatgcaaacccatgtaagataataatactaaatgaacataatataattatgcacagtagcaagtagcaacgtctaaaaaacaagacttactgttgacccacaatcaccatcgcctacttttccatcccattcattcaaactatccttaaggctgatgatcacagttgctgctgcttgaatagctgcctcaagaacttgaccttctttactcagctctagaggtcggctttgagactggtattgccaagttgtcatgaaatttaccaaaaccatttatcaacaaaccttgatacctctaaacaacctatctttatcatacttgtgatgcatacctccatgctttttattgatcgagaaggaggaacaggaacaggaatcttcgctggtggccggttgcctgcaatgcaacaaaaattttgtatctaagactatattccaaggaaaaaattcatggaaaaacagaaacaggttcaatctcacagaccatcagtgccaactggccaatttggagccttggttggagcatccaattggtctaaaatcgaatggtcagccttcatgattgaaatcgagaatcctgggaaaagaagcatcgtcagaatgataacaggagtatgtaacacttaactaaatgaagaaatcgacagaaactcacctgccatatcaagagaagtcataaaaaagcctgtatacaccctatcaacggcaagtccaaattccaactgcagtttagggactgcttttccagcagcaatcataagttccattaaaggtgtgcctcccaaactgcaaaatcgaaaaggagaaactaagttctcccctaacaaccaaatacacagaatcattgaaccaaaattgatatcacagcagcagcatttggtgcagttcaaattatggagtaaatagacaaatttccgtttaaatagtaaaatacatctagtgtggcttacccattgaccatgagaaccactctgttaccacgagtaattggaacataattggtctcctgcagaaatggaaaaataattggatctatatgactgaggaaacaagacacttccataaagatagcacatataagtacatacaggactaagtatttgctgaagaacatgggacaccaccacatccacaggttcaacgtcaaccacagcagcaccaggttctccatgctgagagaaaatgatacaagatgtcaacgtacaaaccaaaacactgaagcaaagtgaattagtgtgcaaactcggaaagatagaaaataacatacaattccaagcccgagttccatcttctgtgcgccaagacgatctgatgtaacctgtccaggaagtgtacagacggataatgcaacacccatggtaccaaccatctctgacgcacattttgcctcagcagcaactttttctagagaaagaccagcagctgctgctgcccccgcaacctaccatttgccaagcagaagcaaacaaaataaactgatgcttgaagctttatgttcagaacttcttattgattctaagctcgtgaagacaaaacaatcaatcaaaatatagcagcccaaggtctcagacatcacaatttgaaaagatacagtaacaaaaacaatatcaacgaacagtaactgcatactaaagacactgatttagagtgtggttagagaaagggaggaaaggacgagagaaccttatggacaagaactgttcctgctaaccctctgcgtccagcgatgccacgtggcgggggtaaagcgcaatcctctccaacaattacagtctacaaaggagattctattattcttctggcaaaaaatctcaactgtgaagtagcaataacgagcagtacctcaactttgtaaccttcagattttgcttgttcagcagccaaaccaaagttcaagcgatcacccgtataattcttgtcaagagagatgatggggaactagattaatcaaaaaagtagagacatgaatctatagtcctctgcaacaataaaacgatatgtatgt

SEQ ID NO: 36671 - DNA, 1930 bp, Arabidopsis thaliana landsberg
  unsure (1)..(1930): unsure at all n locations
ctatgctatggtcctctaacttctgtattctgcatcagccagcatatcaggttcatttacttttggtttatggtccgaaaaacatgatgttcttggtcttgtggatgatagtgagaccctctttttcatcagagctaatggcgaagaaataagtcaggtcacaaaaagaaacttgaaggtttctgcaccagtattaggattaatggaggacgactctgatttgcaaccatcatgcttgtacgtttccttctgttcatatttcttattgattaagacttacagagtactttgttcaaaaaaaaaaaaagactaaaggagtactctgggatcctaatgtgtccttgaccattacagtatacttgtttgcttaaggtctacggctgatatgaaattttgactggcggtctgtgctaatgataatttgcctgcaggtgttcgttcagtatacttacgtcagatggacgtattcatcatgtcgagatcagtagggagccaagtgcttctgccttttccaagcatgcttcanatagtgtctcaaagcaatttccccaccacgttttctgcttgattaccatccagatctttcttttcttctcattgttggggggggggcaggcatatcatcgtcagggagttctggtaagttttatacaacttattttagttgaggaaagtttggaattaggagtaattaaaaagctacacttgcttgaaatcattcaatttggcaaaccatagctgcgtactattatatgagaatgctacctatactttatcagtgtttgtgatagttgaatgaaaaatgtggttgttgaaatatttccgatgaacagagatgttaggttcatgattctgcgataattaatgttttaatttacttactttcaggttcatcgtgtatctcgctttggcgtaagtgtcagaatttaggtctggaattgttgtccaccacaaagtttgatggcgtgtattgtgagaacaaagatgatcagttggcatatccaaagactttaatctcccctcaagggtcacatgttgcaagtcttgatagcaatgggtgcgtgcatattttccagttagataaagcaagattgacactttcgtgctgtccttctgaagacagttctgattcactgaagccagataagtcgctacaaagttggaaagaaagtgtaagaaatgtcgtagattttacttggtggtctgatcacgcccttgcaattttgaaaaggagcggtaacattagtatatttgacatcagtaggtgtgttatagttcaagaggatgctaccatttattctatgcctgttgtgtgaaaaagttcagaaatattaaggaccccttttttttttagaaaggtcaacacaggaagcaaaatcagctctggccaatgttgacagggacgctagtgaatttcatcatactagggagcatagtatggtatggaggctaatatcatttactgagaaaacaattcctgaaatgtataaaatcttagttgagaaatgccaatatcaagaagcgttagatttctctgatagtcatggcttggacagagatgaagttttcaagtcaagatggttgaagtcagaaaaaggagtcagtgatgtgagcacgattctatcaaagataaaagataaagcttttgtgctctccgaatgcttagatagaattgggccaacagaagattccatgaaggccttacttgcgcatggactttatctaaccaatcactatgtatttgctaaatctgaagatcaagaatcccaacaactttgggaatttcgtttggctaggcttcgtctattacagtttagtgaaaggcttgacacctatttggggataagcatgggcaggtatatatctttactcttgctatcttctcttcctttctgcagataggaaacctggtatgccatatagtactagt

SEQ ID NO: 36672 - DNA, 1680 bp, Arabidopsis thaliana landsberg
gagcttagcaattctctctggtgttttttttgaaagatatgaattatctgtctcagctagaaccttcttcatctgagcaattcttgcctgaatctctggtttagtagaagcgtctgcgactatagttgttgaattagctgtaattactactctacgagaaacacccagctgatctgaagttgcacccatgagcgacatgcctaaatctccggaaagataatcagctcctgtgtatatgatttgtcatgttatcacctgaaaattttcagtaagaatttacttggaaagtacaaatgattgataaaaacctgtcatgagtgcaatgtcttgtagtaaagcctttttcccatccaacattcctggacatttctcatgtgtgacattgatcagtccttgcttcttgttcaccatcagtatgtcaagcacttccgcagagatatcttctgcaattataaggagcggtgcactcagttgtgaggttttccccagtagcggaactaattctttggctcacctgattttttgatccgtcacaagaatttaaaataaaacgaattgccgccgtagatttctcctgcttgtgatgaaatgaggcgacatatagccgttgtcaaactgtacaaaagaaatttgctcatgaatcacagaaactcaatggtttgataatgttaacaatggtaagtgtgaaactgccattgtgaagcctttaaaacatccaacttaagtttgaaactaaccttcattccttcctcaactataacagacgtttctgaagtggaagatgattcaatggagatgacaccatcagggccaatcttttccacaatctcagcaatcaaattccccacaaattcatcgttaccagcagagattgaagccacagctacagaacacaaaaaatccctattatttcaaaattaagacaggagttggatcataattatttagtaataagtataaagtaacctttaatatcattcttcccttgaacaggaatacttttcatctgcaacaccctgaccaactctttaacagtcttattcattccattcttcacagaaacagcattagctccaaaagcaatagccaaagaaccagctttgatcatttctctagccaaaatgattgcagtggttgtcccgtcacccgctgattcgttcattttaatcgcaacctacacaagatagaaactcgcaaggttcagataactaattgataccatttagagctcaaagaatgaactaacaatggggaaaagaaggggaatcatttagccaccatgaatatgaataacctcttggattaatgttgctccagcgttctcaatagtgtcaggaagctcaatagatttagcaatggtgacaccatcgttaatcactttgattgtatctttttcagcaagcactacattacgccctgcgtcgtggtttccacattgaaaaaaaatcaattcgaaatcccagagaagggttggtttgctcataatcagattctgcccggaaaaaaacttcaaatcgtagccaaaatcgaaatctaattcactaacctctagggcctaaggtgatggaaacagcatcagctaacttatcgattccggcttttaatttctctctgctatctttaccgtatagtattctcttagctccagctctcaccaccgagaattttcgaggttcgttc

SEQ ID NO: 36673 - DNA, 1522 bp, Arabidopsis thaliana landsberg
aattataattacaaatagaaaataattgtcgcaaaaccactaattaaattacacacgtataagcactattctttcacacgtgtggcgttctttgtatgtaatgtaaccccccttccagtccacactccgttcgtccttctcacaagtctgattgcggaaaaagcagagagagagagaaagttcgagcggaagagaagcggaaagctcgaggagtcatcaatggtgacggacgatagcaactcctctggacgaatcgtactcagatttacctttcaatctcctctcttttttttttttttgatttattatctgattttgctcgtatgcgcatgatcattcgcgttttttcagctgattgttcgtgaaatccgtttgagttcatcaaattataatcgctctcttacttttgttcactgttggagttgatggaccttatagaattagtgtttttcctcattgcttttgttttttacacgatttttgttttgatttgggcttctgaatagaagtctcatgtagatgatgatgatgatggtgaagaagaagaagatagactcgagggtttggaaaacagattaagtgagcttaaaaggaaaattcaaggagaaagagttaggtctattaaagtaagagagtttctatacttgatgttctttactaattatactaatgtctaaaaaatttgaaatcatttatccgtttttgattgttttcctgggaatgtaggagaaatttgaggctaatagaaagaaagtggatgctcatgtttctcccttttcatctgctgcatcgagccgagctaccgcagaggataatggaaatagcaatatgctttcttcgagaatgagaatgccactctgcaagttaaatggtttttctcattttgtttgagatagagactatgttcctactaaggatgttatatcagcaagtgtcaagcttcctattgctgagagaataccgccatacactacctggatatttttggacaggcatgcaccttttctagttctcatttttgcgttggtagcatgctattctaaattcagttgaacaatagactagaacatcaaattcagttttcatattatgtgttgtttttcttttctgaaaaaatatcttaaccatgcagaaatcaaagaatggctgaagatcagtctgtggttggtcgaagacaaatctactatgaacaacatggtggtgagacgctaatatgcagcgatagtgaggaagaaccagaacctgaggaggaaaaacgtgaattttccgagggtgaagattccattatatggttagttttgcagagagtgtaaattatggactctcatgtactctgatgaggaaaaattgtgatactggtatttgaagaagtacctgggtggaatttattaaccaatgaatcacatttgttgatgctaaaaaaagatgtcatatttcgtattcatatcaaatttcattctgtaagactcttcattagcattaggtttgaaatatatctcactatatatgaatttcttcatac

SEQ ID NO: 36674 - DNA, 3371 bp, Arabidopsis thaliana landsberg
  unsure (1)..(3371): unsure at all n locations
ccttgcaaactcatgcccctaattcaggtaaatgttattcatcttggtctttttgttatgaacacaattagctaaaccctgttgttctaagctgcagaaaaatttatcagcttctggtgatgaggcctggaaacaaagggaagctgctgttttggctctcggcgctattgctgaaggctgcatgaatggtctttaccctcacttgtctgaggcaagtttggttttgatccacatcatctcatatatatgatttttctttgctcagttgatatacatcaacatgctaacgccttatttctgcagatcgtggcatttcttcttcctcttttagatgataaattcccgctcatacggagcatatcttgctggacgctttctcgatttggcaagtatcttatccaggtatgacttgaacaggatatatcacactttaactgcttcaaacgatttttagatgattcactgtttttattttctaggaaagtggcaatccgaagggttatgaacaatttgagaaagttcttatgggtcttctccgccgactcttggatacgaacaagcgggttcaggaggctgcctgttcagcttttgcaactgttgaagaggtacctattggctttgcaatgtggtttttggtggcatttgtcaatgttggttgaccatgtaaatcttctatgaacgtgtaggatgctgctgaagagttagtgccacacctgggtgtaatactgcagcatctgatgtgcgcttttggaaagtatcaggtcattatattcccttaaagtaactggctttgccagactaaatctcagtggtggctattatctaccaaccattgtttctatatgtctacccaacatacaatttttatatccagagacggaatttaagaattgtttatgatgccattggaccctgggcagtttcagttaaagaagagttgaacaaggtataacaattgggtttgtacaaggttaatctgatcttgtaaatttagctccttgactagtgtttttcaaatccataaactggtggtagtataagtttttttctttgcctacttaagtttcctctctcatgcagcctgcttatcttgagattctgatgcctccactggttgcaaagtggcaaaaactaaaaaattcagataaagatctatttccattgctagagtgctttacatccatttctcaggtatgggctacttgtcaaggtcttaagaatatctataaggtcttgatacagttgaannnnnnnnnnnnnnnnnnnnnnnnnnnnnnnnnnnnnttatagtgttggtagttttaagatctctgaaaaagtatcctgggggtggttggtcagctaaatatccaaaacttcctgcattggatcaaagattagttttggaagcctgaaagggctattaatactaggatataacagttatgaatgtcggactagttcatcttgacctaaaattagactggttgcagcatgaaatctctatgtctaacaaattgtgttttcatgtttcaggctttaggtgtaggattcgctccatttgctcagcctgttttccagagatgcatggatatcatccaattgcagcagctggctaaggttccattcagaattctgcaatttcatctcatttaagatttagagtgacttttccagttttccttcgtcgcaggcttgcatgtacataactattgcatgcttttgttttccgtttgatcaaagttcgtttctgttgtttgtaggttaatcctgcttctgctggggctcagtatgacagagaatttattgtttgttctcttgatttgctttctggacttgctgaagggcttggcagtgggatagagtctctggtacttcctttttttgatgtcttgcacttactatttattactcataagttcaccaactgaataaattttataattgctctggccattgttgttcgtataacatgattgagttgatggttatgtgtctaatttatggcggataacacaattgagttgatttcctaaaccagatatattcttattttatcgctctatgcaggttcaacaaagtaacctaagggatctgcttctcaattgttgcattgatgaagctgctgatgtcagacaaagtgcttttgccttgatgggtgatctagcaagagtacgcttcatattcttttatacttattttctttaacataaagaaacagcaagggaagtgacaactcgtagttctgtgagattatatgttacaatttcgactcccttttgccagttatagtagtgaagtaatgtttttggctactaccgacaggttttcccagtctatctacaaccccgcctgcttgatttccttgaaattgcaagccagcaactggttcgtatccaagttttgttgatactataccaatttgcttcttctatggcactgatcatatatatgctttgtacagagtgcaaaccttaatagagaaaacctttctgtcgcaaataatgcttgttgggccattggagaattagcggtcaaggtaataccaaaatactatttcttctgttgtagcttgaagtttctggttaaaagcagactcgtgactggtaggaactcaatgtttcaggttcgtcaagaagtctcaccaattgtggccaaagttgtctcttccctaggcctgattcttcaacatggagaggtgatttcagcagcctataaaattgatctcttggccacgtctaagtctatcaaataactgcggtatttgacagagtattcctaattttattctcttgtgaagcagggtgtcaataaggcactagttgagaacagtgcaataacccttgggagactagcatggattcgtccagacctcgttgcaccacacatggaccactttatgaagccatggtgcatggcattgtcaatgttagtgaacctctttgttaaatttggagtcttttcccaacctctgctccagagaacaatttcttatcatactttcttttcagggtacgtgatgacattgagaaagaagatgcgtttagaggattatgtgcagtggtaattctctctactctttgctttgtgctcgaaacatgaaaaagtttgatatttataagtgttctccacaaattcaggttaaagtgaatccatcaggaggtgtcagctcacttgttttcatatgccaagccattgcgagttggcatgtaagtgaacagaaaccaaactgtgctaaattcaatattgttaccgagctttggaacaattgattgatacacaaataacaaccttttttttaatcacaggaaataagaagcgaggatgtccagaccgaagtctcccaagtactgaacggttataaacatgtaagctatgctggatttaagttc

SEQ ID NO: 36675 - DNA, 975 bp, Arabidopsis thaliana landsberg
ttcgagtatcaccgaaaatatggagtgggccaactaatattcgcacacgccgtttatttcccacgtgggcgataacaactgaggctgctctcttctcttcacaacgcatctcatgcattttgcgctattatataaacacccaacttcatctcgaaatcttacaccaacacacaaagattccattacaaataaacaattttcatatatatctataacaaaaaaaaacaatggcgacctcaagcatgaagagcattccaatggcgatcccaagtttctccatgtgtcacaagcccgagctccttaaggaaggcaaaagcgaaggccaagaagaagaagggctaagctacgagttccaagagatgttggactctcttcctaaggagagaggacggagaaatcgttacctttacttattccaagggtttcggtgccaagctaaggagattcaagctatcatgtctttccaaaaacattttcagtcccttccagacgacgttgtcctcgccaccatacctaaatctggcacaacctggttaaaagctttaactttcaccatccttacccgtcatcggtttgatccggtttcctcatcaagttccgaccaccctcttctcacatccaaccctcacgacctcgtacctttcttcgagtacaagctttacgccaacggaaatgttcccgatctctcgggtctagccagtccaagaacattcgcaacccacgtaccgttcggtgcccttaaggattcggtcgagaatcccagtgtgaaggttgtgtacctgtgccggaacccgtttgacacattcatctccatgtggcattacatcaacaacatcacttccgagtcagtgagcgcagtcttgctagacgaagcttttgatctatattgccggggattactgatcggatttggcccgttttgggaacacatgttgggatactggagagagagcttgaagaggccagagaaagtct

SEQ ID NO: 36676 - DNA, 1907 bp, Arabidopsis thaliana landsberg
  unsure (1)..(1907): unsure at all n locations
cattaatgaagtttgtctaattcccggaaaatagcaaaataatataactagatttttcaattttattatatataaacaaaagctgatgtaaacaaagtcaaaaactaaaaactccacaattcgatctaaagtctaaaccaaaacttagctaatagagggaaacaaacaaaaaaagacgttaacccaatattaaaataatttaaaacaatcctgcttttgccaaatttgaaagctccattgtccaatcctaggaatccatgtgtcatctcttctttgtcaacatgaaaacatccaaaagaaatcgaaacaaaaaacaaaagaaaattaggaagcggacgaaataagtctaggtagtgtatctatacaactctgtgcacgtgtgagcaacaagatctcttcagcttgaactttcccgtggcacgtataagtcaataccgggtttggacgatgattttggttaaccggtttagttttccggttcgattgattcttcaagtcaatatgtaccgaaaatagagattgaaccggtctgtggtccgagaatttcgactctcccctcacgtaccaaagttgtttcattccgtcacctttccacaatatccgatcacacctgaaataaatgattttgaaaacaacattagaaacacaacgtttaagatcatcatcattataaaatatttagagcatgttaattatcttaccaagccggagttcttcgtttttcctttgattattcggtttggacaacgtaattatcagagtttattcgatatttataggttggtgcgaaataaatcttcccttcttcccatcccttaaaaattctaccagctctttgttctatcttaagctgaaatagaaaaaagaaagattcatgttttagtttaactactcttatataagcaatcgtgacagaagaaccaatcaattttaaattataaattatattaacctgatctttctctagaagtgattcccaatcatggtttctaagctgttcatgcaagtcactgctcgcccttagccgataattcaaatctccgagccatattactttactgtaacacaaccatgtatttaaacgattagaaaatgtttaccttactaaaaacctagtattcgaacattaatttttcatagacttactcatggtccattattgtctccggtcgagaatctttagaagaacgtgaaaatcttgtcctcttaaatatttcggtcacatctaagtttcttctaagctcgtcgccttctttttctccagaacgtagatgcgtacanacgaaacatagacttgtcttatgcaacgacatgctgatcgaaaccgagccctacacaaggttgtacatcgttagctataccaagcttacagattatcaaaatttcttagaatcagttttgttgaaacttagactaaccttgtttccaagatatcccatgataccacggccaacacatgaaaccttgaggttggttatacgtttccggagatcatctctaacccacacacacaaaaatatccccaccatctgtttactcgccgcaaggctatagccgcgaggaggagttgaattgcatgggattggggtatcatctgagaggcctgagaagctgaaacggggctgttgtgatgatttcgtatgctcgagctcatttggcgataaattgttggtgttgttcaaggcttctcggataagagacaaccacttagccgcagggccattatcctcggctccaagtacgttaccggcatttaacggcacgatttcttgaaacctaaacaaaacaaagtattgatgttataattactccaaaaaatgtatattaaaagtacgataaaaccaattaatatgattatatgcataccctagcacgtaaatgtctgcatcagccggagatttaagcca

SEQ ID NO: 36677 - DNA, 2723 bp, Arabidopsis thaliana landsberg
gtatgaaccactttgtccttcttgtcagaatttcatcgtccatcatctaggcaaaatctttaacactgatctccacacaattaccgatctcaagctcattccattcggtaacgcccatgtctccgatgatcttaccgtcacttgccaggttcttttcatttctccctatttttagttggtcctatatatatatatatatatttatctcataatcttattctaaatgattatgtttgataaatttgtgaattaagcatggtgaagaagaatgcaaattaaacgcccttgaagcttgcgccataagaacttggcctaatcaggtacataacataacttaatgatcaatgtattccttactctctatctttgtgacaaaatgagtatgaaacatgtgatggtttttggaaggcagagattgcactacaagttcattcggtgcgttgaaactaacacgaatgcttgggaatcttgtgttaagaagtatggaggtgaaaaagcgataaatgattgttacaatggtgatctctctaaagaggtaggtgtacacataaataaaacactcataatcatcatatacatttacaatttttctatatgaatgtctaactgtttgttgtttttattgcacagctgatacttgggtatgcaaaccagacattgagtttgaaaccggagcataaatacgtaccatggatgacactcaacggcgaaccactctacgaagtatacataacagtctttatatattaatctgactgaattgtgtttctaatttggtgaaaaatcacttactgattgtgttttatttttggcagaatattggtgattttgtggacttagtctgcaaagcgtataaaggaaaggctgctctccctaaactctgttattcctctgtcttgtctcagaggacaatgatgcttgaattttcctatgttgatgaagctatcaatcactaagttaattatcatactactaatggatttaagcttacctttgggaaatcttaataaaaacacgtgttatgaacgttgatgaacctttttatgaaacacctgaattgaactatattaagtttttttttcttttttcttttttcactgaatgttttcgaaattgaaatcatctcagtatgtagtgtggtgtagtggaaatggaccacaaaggcattatgaacaaattctcaaacttcttttaatgtgagttatctttatcctgccactaaaactagctttctaagagatacaatggaaacaatcttgagaatacaaccagttcatcctattcattaagaacagattgatttgaaattgtctaacatgtaagtaaatttgcattagtctccaaatgttttttgaaacgtacgttacagtttacgctttttagtgtaacggcgcacaattcaaacgtggaaagtagaacggcatgcattgtgctacaagtatagaggaaaatgatttttaccatgttgaataatgagttgaagaatatatctttcttattcaaatcaatcaagatgctatattgctataagatgatcacttttaaatacagcacagtatatgaaactgatgagacagctctcttaaatcttgcttccttctagaaatcggctatagaagtctaaagcctcccgcggtttgtactcaggaactgtatgtcctgcaccctgcaaattaccacaagcatagaaaatataacaaacattgtttttcaaaatgagatggttatatttgagttgagattcaatgcttaccttgatggttaaaaatgtgagattgtttgcatatccttgcgtatacctgaaaagattgtacatagaataatgtagaaaccttaggagctcgacataagtcatatattcgactaggcgaagaagtattaccccgcgacttggtcatttgatatccatgccctccattcatcaataactttgtatccaagagattttgtccaagcttccgagccagtaaacggaacacacatatcgtgatccccgctacaaagaaaagcttatttcattactctctaaactatatagtatatggcttcagattcattttatatgtttttgtttaagtacctgtaaatgagagctctatatccacttagtgtaaggtttctatggaaatcgatcatgcttcctgcgtcgtgatagaatgagagtttcccactgcaaagttcccaccttccaatctcgctctcctgtataatgttccaaacacatcaatgatctgttttcataatacatagcaatagaatcagacagagtttgagacctctttagtatgaatagctttcctaatctctggatcgttcaaccacgctgttgcaactctatcatcctgcaaacaatcattcattgtttcagcttacaatcttaagtggtgaaacagagaggtacatggttttggtttacttacaatgcaaggaacagtgacgtcggcaagaagttgagaccagctagggacaatgcctggatgaacaggcgcacgaactggccacgctcgaccaaacattctttttcttataggtaaccgtttttcagttttgcctagctgaaggagacttgaaggaagcgatctaatgtcgaatgcagatagcgatgttccgtggtaacatggctcaagaatgttgtatatattcaactggttagtatctgacatgtaagaataatattagaccatcatcttcaaacattcttaatgtctataagaatttacatg

SEQ ID NO: 36678 - DNA, 1025 bp, Arabidopsis thaliana landsberg
ccgacatcccacctgagtatgttatgttccaaacttcttgcatctcgttcaagggagtgtgacagttttttttttgtttttgtaattgagatttttggtaattgcagtgcaactttgattttcgaggtggaattggttgcttgtagaccgaggaaaggtgctagtgttggaagtgtttctgaagagagagccaggctagagtaagtattataaataccatttggacctaacttttgacttgttatcatgtgtgtaaatatgaaaacttttttgcttcatggttgcagagatctgaagaagcagagagagattgctgcagctgcgaaagaggatgataagaaaaagagagaagaagcaaaagctgctgcagctgctaggattcaagctaagctagacgctaagaaaggtccaggcaaaggaaaaggcaaaggcaaagctaaataagtcgaatgcaaaagacctgtcactactatttcatgatgaatctaaatcaaacttttggaaagggagagtcatcagttacatcatattgagttattgaccattacatgatttgtttggggtttaattcgcacgcacattaataacataaacaagtgttcgaaaccaaacttttcaaaccatgtcggaagcatcatcatcaatctcatcttgttcttgccatcctgaatgagctctaaatttacagacaggacatgttccttgctgtctcaaccatggatcgatacatcctgcatgaaactgagcaaacggatatatgtctgagtcgtgacacagtaaagagctggaagattttcagtttaagataaaagtaaaaatggaaacctgatgcaaacaaggtaaggtgcgaacgatttcccctacggtaacttgttctaggcaaacactacatgtgagctcatcttctgttccttttttactttcattggcagaatctagcatcttctgcttttgaataagaggaaaacgacttgaaaaaataagacattgttaggccactttacaagaacctttttaccgagcat

SEQ ID NO: 36679 - DNA, 958 bp, Arabidopsis thaliana landsberg
ataacccagaaatgagttagctacgatcatgtatatatatgtatgtgtggttgtgtactttaatggatcagagagaggaaataaatgaacaacgcagagaaaaaggaaagaaagaagaaaggtacaagagaggatgacgaatctcagaaacccaagaaccccactgacgctggcggacacctcggaacttcttcgaatgtaccattcttctgttttaaattagggttcttaatttctctgtgtgtttctgacacgaactaagaataggagagaaagtgagagtgggagagagattcctcgtctctgatctttctatctccaactactcacttaactctctgcttttcccacgtcctctctactgatatttattgtgtgtcccctatctcttccgtgtcatggggttattgggttatatatagcgttagaaaaactacatgacaagatagcccaagtacaaatacttgttttgctacatataatgaatccttttccatttgattatacttgtcattctacaatgttaataattactctacaacgtacaaatacttgatgtcagttcataatcataccataaaatggtaccaactaccaagtgatcatctatcttattgcctatcaattcgtctcttttcttcattaattatgtgaatatttgataagaataaatattgttttaaaaatagatcacgttttactgtttaagtgtttatcgctaatgcaaactatcgaatggccaattacgaagcctagtggattttggtaaccaaatgcataaaatcgtactaaagataattataatgatgtcccatgtgaattcaattattcatatagatgtctttctatttataaacctgtattaactcatattaagtttttgtaaagattatacttataagaagactgatcacaccccacacctcttgccgtcgaatttattccgaggacatagcaa

SEQ ID NO: 36680 - DNA, 1857 bp, Arabidopsis thaliana landsberg
ttcggatctctgaataaagcgtaccatcttttacaagtagttttcaatttcgttagagactttgccggaatcctagagagtatctccgattccaaatcgtctggaagattgggaatcttcgtcatcgtcgttttcgtcatttctaatctcagctctcgaggagaaaattaagtacaaagactgttaacaaaacttatgaagatatatattgggcttttattattataagcccattatcgtttttcttggtttgtaagttacaaagacacgacatcgtttcattaatggcttctaatttctacatattaatttgtaatagtaactattctgaagatttatgttcatgttacttatattcctatactttatagtcttgtgtattccaaaataaataaattattgactagtaatatcaaaaccaatagtaatggaatttactaatcgagatccatcgactaacatttaattttgattcccaaaactaggggaaaatccggactacacccgatatattttattaaggaagacttcaaattaatttagttgatattggtacatgattaagattaaatcgggaatctatattagttgatgttgcctctcctaagaattttttaagttagctgatgcgatggtatatctttaggctaattcttacattggtttcaaaaacaggttgatcttttgtttgctgatttgtctattatcattttttgagttatatatctacttaaggccctgaatgttttgtagttttttttaattgattttagtttctgggttttggattttggtttttgatttttgtagtttttgatttttcatgtagattttagtttttttaatcctgaatggaaatttatttaatttttagtttttctatataaaaaataaatgtcgcgtaaattattttaaaaaacccacaaaacttggttttaacaaataagtaaaatctactaaaatctggttttcctactttttaggaaatctactttttgcagaattatgaatggataattatttggtttttgcaaaatcaaaatccaaaactactccaaaaattacaaccattcaaggcctaaattgtcttctaaattggatttaacatgtatgagaaattctttgagaataatgaaaaggattttcttctttagctcttgtttgaaaccatttagtaatattgttatttggttgtgtgggaatcattgttttagtttatttttgtttttttcctagttagtttagttggttatttctttaacgaattctttgatattttgttatgagcaatttctaagttttaatatgtttactattgttagctatgaattttgaacggcagtttcatcattatgattatgataagtaaattgaaaaatgtatgtgttgcagctaaaatagtgaaagagtcgccaaaagtcgacataattgaaactccttattttaggcttattttgtgtatgtcagatagcctcattagcagataaataactacaatcgaagaaaatactctgttcttgaatttcaatcatttcttttacaacccttgttgtatcttgagtattggaggttgtggttttgcttttgtcgattaaaatggttgctttatccacttcttttgtaacatatttgaagagatatttgatagcatttgaagtattacaccattccacatttttgaggttgtaaatggagtcacacttaaaacccttttggtagtggaatcgccggtttgcagatatgaatccttgcactacgtttaattgtagaatgaatgattagtttggattcgtgttgggtatgtatattgaccatataatagacatacctaagagtcgctgagcagtaattcacaac

SEQ ID NO: 36681 - DNA, 2124 bp, Arabidopsis thaliana landsberg
cgctgttacggagatctaagatactcgtccttgataaagcaactgctgctgtaaatgttagaaccgatgccctcattcagaagactatccgagaagaattcaagtcatgcacgatgctcattatcgctcaccgtctcaataccatcattgactgtgacaaaattctcgtgcttgattctggaagagtatgtattttatttttaaacactctctctctttcaatctcacactctccttgtttctcagctaacctgttctattccaatttgttaactcaggttcaagaattcagttcaccggagaaccttctttcaaatgaaggaagctctttctccaagatggttcaaagcactggagctgcaaatgctgagtacttgcgtagtttagtactcgacaacaagcgtgccaaagatgactcccaccccttacaaggccaaaggaaatggaaagcttcaactcgctgggctgcagccgctcagtttgctctggctgcgagtcttacttcgtcgcacaacgatcttcaaagccttgaaattgaagatgacagcagcattttgaagagaacaaacgatgcagttgtgactctgcgcagtgttctcgaggggaaacacgacaaagagattgcagagtcgcttgaggaacataatatctctagagagggatggttgtcatcactctatagaatggtagaaggtaaacaaatatatgcatctctacaaatgcttatgcaaaatcttaatcaccacactgaaacattaaagtcaaatcgtgctcttatattgaacgcctgctttccgctgtctacgttttcagggcttgcagtgatgagcagattggcaaggaaccgaatgcaacaaccgaattacaatttcgaatgaagtacatttgactgggacaacgtcgagatgtagataagttcatgttaaactaggaatcattgtctcttccgtaagaaacatatatttatcttaaccacaattattagtctggtttccatttcataaacttaattttcacctgcaaagaaaatcaaaccctgttgtgttcttcgtgataagtagagaaattacttgagtatccttctaactcataaatgggatctcatgattcatgaacaaccagcaacacaataatacccttttcagattttggagctggacaaagttgtaaagttgagtttctcttacagtcattcatatacaaaaacctcttcactgaagcaccaagaaagaaacaaacatcaaaaagggaatgaggtcttttcttagggttgagattcatcggaatgttgggatgtgtcggaaacatctgtaccggtttggccattaacggattcaaacccattggcaaagacattagctagagcagtcaacatctgaaagacattgggaaggcttgatttgaggttgtctagtgtcattctcttactaacctcgaccgagtttaagtacttagttttctcaatatccactcgttttctcaaggcttcgatcttggcttgtttgattgacaacggatgcttagagcccaaactcgttgagcttacttcctcctcttccattgctaaaatcccctcgagccttctttcaatctcagccagtgaaattagctctttctcaagcctcctctcaagtttattgcatttcctacgcaggttgtattcctcagcttgttgatgaataatagatttaattgacatcagaaagcttttaatggcctctgaagttacctacgcacacccaaaacagttgcatttgcacgtattaaagatggctttcatagagccatgaactagaataatacaaataagctgcaagtgatagaagaaccttatcaggaagcttttcaaatacaagctgccactctttgcagagcttacgagcagcaacaggcaagctacttctttggttgtcttcgttagagaggcgatcagtaagttggatccacgtacagagtgttttcacgtattctcgctgggaatttactaacttgcaaaagctattgtaccagcaagtaacctcggtctctagttcattaaccgcctggcgtttgtattccgaactgagatctatactcgggtaatccggaagatggttcagtcgctgggatttatgaatttgatct

SEQ ID NO: 36682 - DNA, 1222 bp, Arabidopsis thaliana landsberg
  unsure (1)..(1222): unsure at all n locations
ccgtggaatctattctggtgtaaatcgaagaatggagactaatgttccggagaagaagatccttggtttcccggaagagatgaattcgacaattcagtttttatctgttgagaaaacaacantgtcgtcttcctgtttctataaaattcaatataccaaagaaaagttctacaaagagaagaagaatatctgtagaagaagaagaagaagaagacgagaataaaacgaagttgagttcttgggagaaggttttgagtagcgatgagattttgaggttaagggaagtttcaagacgaaagtatttgacggatcgagagaataagaaggtggaggagttaagggatgagatcaaagacgagattatgttgaatgatggtgtgaagatgattaagaaggaagtaattgagtttagatataagagagcattgtatgagttggtgaagaaaacagaggatgatgatgatgttgaagggtataggtttccagatgcttatgatcaagaagggtgtattgatcagaagaagaggtttgatgttgccaaggagaggtattgtgagcgaagaaggagcgggagagttgttacggagcaagaagcttgggaggatcatcaggctcagaaagcgagagtgaggtttggtgcaaaggataagaagcaagttgttgatgggtatgagtttgtgtttgatgatttgacaggctttgttgaggagtctagcgaggcggaaactgggaaacatcgaggttgttattcgaagactgctgcagagaaggctcgggaggggagggagtttcttccgattcatgggtacagggaggaactgctgaaacttattgaagagaatcaggttcttgtcattgttggagagacaggatcgggtaaaactacgcagataccgcagtatcttcaagaagccggttacacaaagcgtggaaagatcggttgtactcagcctcggagagttgctgcaatgagcgttgcttcccgagtggctcaagaggttggtgttaaacttggacatgaggttggatattccattagatttgaagactgtacttcagagaaaacagttatcaagtacatgactgatgggatgctgctacgagagctactcatagaaccgaaactcgatagctatagtgtcatcattattgatgaggcgaacgaaagaacactgtccactgatattttgtttgcgttagtgaaggatgcagccaaggttag

SEQ ID NO: 36683 - DNA, 4207 bp, Arabidopsis thaliana landsberg
tcggaaatctatgtcaaacttttggtttcattcttcgctgctcacgttctttctccatttgatgttttatgttttaggagctactatagatgttcaagccctggatgccccgtcaagaaacacgtagagaggtcatctcatgacacaaagttgcttataacaacttacgagggaaaacacgaccacgatatgcctacaggaagagttgttactcataataacatgctggactcggaagttgatgataaagaaggagatgccaacaagactccacagagctcaactcttcaatccattacaaaagaccagcatgtcgaagatcacttaagaaagaaaacgaagactaatggctttgagaaaagtcttgatcaaggtccagttttggatgagaagctgaaggaggaaataaaagagagatcagatgcaaacaaagatcacgcagccaatcacgccaagccggaagcaaagtcagatgataaaaccactgtttgtcaagagaaggcagtaggaaccctggagagcgaggaacaaaaacccaagacagagcctgcccaaagctaagcattcagtgttgtaccgagtggtaatttatatggctgttttaacatagattagtacaggcgatatggttatagactgtacagttgttgttcaggcgggaccagatttagattagtgtttaatggaatagtatgctttaatacctttatgtaaccacttccatttggttcaaataagagttacaggaagagaaggtaacacaacaagagcccttctttgttgatggagcctgtgtaatagttgtagcatgggatgtatatgatttgattcaaccttattaatggttatgagacaaaactatctattacttccagttctgtcttttgcattacattcttggagacgtttattctttcacttccatgcacaagatgagaccaagattcggtccatccaaccaaggtacagagcaccatctctttcttcaatcgcatacccgttgctgtaatctctcaagagggctctaatggtggctgaaatgattgagctcaaggggtatggctcaaaacccgccatggaaaaccttgacttccatttcccgagaagctcgtgtctttcgatcctctcggctccttcacaagctatgatgttgacgacatcccttgccatgcagtgctgctcgatattgatcctttccttgtgatttctcggaagcataacatcgatagattcgaacattgccgtgtaataacttaatgtctcaaggaacctaggaaggaaaggggaagtgttcgtgttgcattcttgttccacaagagtgactactttaggtgatagactcttcaccatcctcagcaaccggtccctgtggttttccatgcttacactctcatctggcaaatgatgcagcatgtaagcaaagttcactccaagggcttcgccatctcggacatcaagattttccacttcaacttcacaacttggccttgaaaccgcattgaacctgaatggaacatcaaacttctttgcaagtttctctagtctcttcttgactgtaaccaagacagatccatcaccaactccggtaattcgaatatttggagccccaccaggcctagctgcaaaagcctggataagtgctatccactggctcccttgtccaatttggaagtcaataatgtgaatcctctcttcatccttcattgcttctgcaatcgcaccattcgctgacatgtatccaaacttgaaatatggacaaacctcatgcagaacatacacataagataaaaattcataactctctggttctctggactggagagacttatatatcgaactaccagaagcagcaagcctagcaacaagcccttctaacatataagctcccaatctctggattggctcaccagaaatcgaaaccataccgcgcaactcacccatacaccatcgtgccattagaagattattctcagaaacagcttttgcacaagcaacaagtaccaacttcaagtctccccttgatattgcctccactatcaataacaaatctttagcatcatcaggccacatggagagttcatggcagatagcatcatcgatactctcagctatctctggcagtggctgcaacattattgaacctcttacattgtccatcacaaataagcaagtaagaatctttgaacatcaaccattatcctcaaatgaccttttatttatctgatcttcataacaaacacctgtagaattcatagacaaagtcattaatcagagactgaattagatatcaatattgaacaataatatccatggagatcaaaactctaacaagaactctagtatcattgaaatcaactcatgactctatgaatctacgtcagccatgaactacttcatcaataaacaaggcatacaagagttccaatcctaaacaaactaatttgacaatttctcttcacactttagagtaaagcttgctagaaagagcaatcatttacaacaaaccaacatcaaacttatcaaagaagaaatgttttcatgttttgtggataagaagaagcagagcatcaaaatcatcaagaaaagagaataaaggtttgatttttatgagaaaaacaaaccttgtgtaggttaagaagtgatctttcggtggaagtcgataagggatttggttttgcaagtgagagatccaaccaaagctcgcagctgaagcaaaaggaagaatctttttagttgctgtagtgaagaaaataacacatcacatacgacgtcgttttaggcttaaaccgaataagacccgatcaccgacttgacacatctcgcttaaagtctctggtcaaatgggaaatagtgtaagaagcaatctaagagacatcagaggacgacgatcgatggatcctcggatgtggcacaaagtcgccgctatttccggtgagatttaagataaagtaatgatcttttgattttgatcttgtgaggaaaggtactgattcggatagaattggtttaggtatggctgctcttggtttgggaacttatggtgctcatgtctttaaaccagagaacccttcttacaaacaggttcagattcttgaaaattgttggaaaattcgatactttgttggatttctgtgagaaagtttaggtttttttgttgttgttcaggtgtggcaaacggcttcactttaccatttggttcacactgctgctcttgtttctgctcctagcaccaaatatcccaacattgttagctttctcttcttgtactctgtttctctaatctttgtcctttgagagttgatggagctgacatatctttttcttgcttagtttggtggcttgttgactgctggaattgtagccttttccggcacgtaagttgttatctttttgtttctcagattcttcagtttgagatgtgtatggtagagcttttgtgctagatgtttgttggatgtcttgtcattgaggttatagtagtgcattcatggatatttgagctatttagatatgatttggactttctagaattcatatctaatctctagcagtagcaatacttgccacaattcttcgtggctagggagattttatcgatttcgacatgtgtccaactctgaagcatttggaaaccattgtatcacttatttaatagcataggtctttgtatttgagttaatgaatggtatttgtcccctttgtacttcctttgatatgtgaaggtatgctctttggagaagtaactatattttagatgcttagtagataactttagttttgtgttcaatagtctatttccgggtatgagtatgtgagaagtttcatgtgtgttgaaatgttgttgcaggtgttatatggtagcgctgcgggaggacagaaagttttcgacattggcaccattcggaggctttgcgttcattgctgcatgggcaactttacttttctaaacaatctcataaccatctatattgtcaagtttgtggtcaagcttatcctacatatgaactcactgtttttttttgtttacctaagagattgcttaataacaattctgtgtcgacaaccgttaagcatcttcctttacttgttcagtttgttgctaaagggattatgtaaatgacgaccatattaatgtaatcttattaccatacaatttagcagaattctccataacaagaacctccaagttccaacaaagatttgttta

SEQ ID NO: 36684 - DNA, 4601 bp, Arabidopsis thaliana landsberg
actgtaatctatctggataggaaacggagtgactctggttgtgatgaagattgctcttctagtattgatggtgaagatgtttctatatcacggtttggttatgagcttatgcagtcacctctttctcctttcattggatcaaacaacattccagaagagctgtaaggtctacatgaaaagtactcttccacatgtagattattcacatacgaggaagtcttgtcaattacctcaaactttgcatctggtatgcccctttatatatgctaacatgagtttagcttgtgtctgacttgatattcatccttttgctttatgttttctgtttccagagaacttggttggagaaggtggtaatagttatgtttatagaggagatctaccagatggcagggaattagctgtcaaaatattgaaaccttgtctggatgtgttgaaggaatttatactggaaattgaagtcattaccagtgtacatcacaaaaatatagtatctctctttggtttctgtttcgagaataataatttgatgctggtatacgattatctaccacgaggaagccttgaagagaaccttcatggtaaataaactacatttgatattccctctggattctcatactagagaaagatccatcgtcattgttctcatttcttgaatcaggcaatagaaaggatgcaaagaaatttggctggatggagagatataaggtggcagtgggtgttgccgaggcgttagactatctgcataatactcatgatccagaagtaattcaccgggatgtcaaatcttctaatgttcttttggcagatgattttgagccacaggtactgctacatcacaatcttaatctgagttcattcacagatgcaatttttacacaagtttcctgattgacattaaattatattggttcagctctcagatttcggattcgccagcttggcttcaagtacctcacagcatgtagcgggtggggatattgccgggacatttgggtatttaacttgcttcgttacaccatctcttaaaaactatcaccattccatcaatctgcctcttaactttcttctttctttgacagttacctagcaccagagtacttcatgcacggtaaagtaaccgacaagattgatgtctatgcttttggtgttgtattgctcgagctcatatcgggtagaaaaccaatctgcgtcgaccagtctaaaggccaggagagccttgtcttgtgggtaagcataattgtccacaaactcacattttctacttcataccgttattctgcctattgaaatcagattataggaagcaatgttactcttccatgtccatatgaaatgacttaagttgcatctctttcccaggcaaacccaattctagatagtggaaagtttgctcagttactggatcccagtctagaaaatgataacagtaacgatctaatcgagaaactattgttagctgccacgctatgcatcaaacgcacacctcatgaccgtccgcaaattggccttgtaagcatacgtgtcatttatcttcttggtttgcaatgaatccttattctttgctcctcattgctctctttcttttgggatatattcttatttcaacctcaggtcctaaagatattacaaggggaagaagaagcaacagagtggggaaagcaacaagtgagagcctcagaagacgtgagcgcatatttgacaaatatagaatcacacataaacctcgcattgcttgatttggaagatgatgcagcttctgatagcagccctgaagctagtagtatctctgttgaggaatacttgaaagggcgatggagccgcactgctagcttcaacttcaactaataatttttactagtttaaccccgaaaatcccaaaatttgacgatattgtaagttgtgtaaattgtaatcgattttctgagattctcaagctttaagttgtgtcaatttaggaagagtgaatagctcttgtagagaggacttaagttggaatttgtcttctttgttttgtcagagcagaaaatgtttcaagtgttccactttcatatcggttttaaaagtttaaaaatgtacaagtgttccgattcggttttaaggttcagttttataattttagtttacttgtaaaaaccacataaaaaaataactaacttgaatggaaaagcatacaagaaactcaaagagaaggctgaagcttatccttgtgtttgggcttcttataatattgttgtctacggtggtttttttgatgtggacagcttatagatggaggaaacgtcgtaagaccgaagatagagttcgtgttcttcagacaaaactttctaaactcgtcgaaaatgaacaagcagcagtaacagcttctaaatctgctcaatcagtggacaagtcttcttcaattcccgacaagaaaacgtcttaattagtaagttacaatcagaaccattgtctctgttagacttttgacgaggttagtttcttacaacggaatcaatattcccggggtttatctgtttcgtcacagtatttgtgttctttatcagcataaaattcatgtacatgaatgaagaagagaaaacgcttattcgttgaaacgctaaaaagtcatgttaagcgttgttgttcttatagatggagtaaatgccttaaaccccgattatttgtttgtgtgtcaatgctataccaactgaattaacattaccgggtttaactttgttttgtttgaacttttattaatgtatcggtatataatatcattcttaaacaaaaacatatacattttgatgtacatgagtgagaaagacaagaaaacgtagaaatgatgaaacgctaaaaagtcatgttaagcgttgttgtactaacagacggagtttctggtgcagtgtaacgctccggctgaagaagtgagtactttaacctgtttagcgtttgcgactgtgaacctttgatctgggccgtaattgggccgtgcttttccaacacctttgtgtaggccaaaacaagctccgttctcgaagtaatcattcactgagtagaatttccattgcatttggtctccattgctacgtttcttccaagttatctacaacaagttcaaattcaaatgttagatgagataaaaaaaaagaaaatgcgttttgtgttttagcgttttccattactacttgatacggacctctttgcttccggattttggtgccacgaaatagtttgattcactctttacacgagggctcatgcttcctccaattgcatattgagtccatccttggtaatagttattggcaacatgagcatatccatgtctcactctgtatatttcacatatttcatccaaattagaaatcgaaatatcaataaacgaaaatcaattagtctaggcttctgtcaattttgtaccttggcattctctggttgcaattaggaccaaagtggttaaacacaacagttaccctcatatctttgtcttttacatagccatcatcatgtccaagaagcatgaccttgtcctggttcctaaaccaattgttcgacactgtgacgtcagtactccctagtgtgacatctagaagaccgtcttcgcaatcatagagagtgttgtggtcgatccatactttcttagccgtgactagcctgatagcgtcgccatccatgtgtccaagttggatgatctttgagtcaggtcccatcactgagcttggtggatgagctttacaatcatggatcttaagcccatgaatgatcacatcggtggctctatagactatgaggcaagcgggacccgagatgtgaacactagcacctcgaccatcgagtgccgtgaagctgctgattagaagcggtttatgaagcttgatcttcatgtttcttttgaatgtgatccattttttacctttgacgagtgttgctccgtatcttagggttccaggtttagggttcagaggatcatcagacgggtcggttactttgtattgtgtgactcctttaccgatatttcccgtcatttttccggcaaatccgactgaacaccgcgcaagctgattgcgggttctacgccaatgggggtttggtctccaacatttgtccatcacattcagtttcgtggcctccaagacatttgcgacaaacaaaacgatcaagagtaaaatcaacgcgatgttcaagaacctaaccatgtttcttgattcgagaagtgaatcaagattttcaagaagaaggtttttgagaaaaggttgagattatgattacaagctttgttgtgtttgatgatttgtgtattatagatggagtttatatatcgcagtgatcgagttaggtttttgtttaaccaacaaaatgttagttttatgttttctatttagtatgagttcttgacaaacttaacaagttgtaagttgtaacaacttgaagcaaacatctaaaagtaaaaaagaaatagtggaactgttgttattatgagctacctcgtttttttcttagcttcctatttttagtattgaaatgttgagctttgatgattcgtatcatagcgtgtcaattcgattccaaaaaaatatatcctgctgcacatatcaatagtttttacagctactacc

SEQ ID NO: 36685 - DNA, 2174 bp, Arabidopsis thaliana landsberg
tgataattgttgccttggttaatgttttgaatttgggcatgaaagtgtgtgttgcatagacttttcaaaagtatttaagtaaatgcttctttgttgtttttttccagtttgagaattcaaggtttgagtgaaaaagagatgggttttgaagccttgaattggtactgcaagccagttgcagacggattttgggaaaaggaagtggatggtgcgtttggagcctacacgccttgtgccattgactcactagtgatgcttgtttctcactttgtgcttctgggtttgtgtttctaccggatatggatcatctttcacaataccaaagctcagatatatgttttgaggaagaagtactataactgtgtgctagggttattggcttgttactgtgttgttgagcctgtactgagattggtcatggggatttcactctttgacatggatgaagaaactgattttcctccttttgaggtgatttcggaagagtagctctgattcttaatcatatatggtcgtctggagattaaactcacatgcccttcttgttaaaatgaaagctcaagaatcagaagtaaagtacgattatggtgttattcattgacaggttgcatctttgatggttgaggcattcgcttggttctccatgcttgttttgatcggactcgaaaccaaacaatatgtcaaagagttccggtggtacgtgagatttggtgttttatatgttttggttgctgatgctgtgctgctggatcttgtgttgcctctcaagaactcaatcaataggtttgttattgtatatttcagataaatgaaatcaattggggtgatttgacgttgaatctcaggagttctaacatattcttgactagggaaatttttttgggcattggttggtagctttagctgtgaagttcataataaagtttcctctattttctattgcagaactgccctatatctctttatcagttcaagatgttcccaggtttgttagaacaacgtcctccttacctataagcttgcaatttattgttctgagaacttgcatccaaaagcttcaaacttacaggcctcactgcttaagtacctcatttgttttctgttgcaggctcttttaagaattcttcttcttatttacataccggaactggatccttatccagagtaccatattctaaacaatgaatcgttagacaatgttgaatatgatgcactgcctgggggagtgaacatatgtcccgagcgatatgccagcatattttctggtacatagcccctgaattgataaacaaaatgtttcccatgttaggcaaataatatacaatagccatgatttctttttgttccactgatttggatttcttatttacttattgaaaaatgtaaggaatatactttagttggatgacgccgcttatgcagttaggctacagaaagcctattactgagagggatgtttggcaattagaccaatgggaccaaacagaaactctgataaaaaggtatagcagtagtgctgctttgcttctgccttctgcagtattacttcttttatatctatgttaaaggtttcgttagaatcaagtaacattcttattcattggataagttatttgacagattccaaaggtgctggactgaagaatcacggaggcctaagccatggctactccgagcactaaataatagccttggtcgaaggtaaaaagctgacaatttttctaaaaaccgtctattccactgtagttgtccgtaaagccacacattatatatactggcattaattttttctttcccgtctttgtaggttctggttgggtggtattttcaaggtaaggatactgtggttgtgctctttaaatcgtgtttgcttgaacacgttgtctctcggttggttaagatagatcctaaaaactctcttattgttattttcttgtgcatcaggtctgatctgcatccacagtaatgttcagttctgtctttgacaactctcaagcaatttatacatcatgttttagcgtgttacaggttgggcatgatctatctcaatttgttggaccagttatactgagccatatcctgcaggcaagctttctttatggccaataatttatgttttccacgtactcaatgttcattatattttggctatgcagactatctcacatttttaa

SEQ ID NO: 36686 - DNA, 1889 bp, Arabidopsis thaliana landsberg
ctccgctttggaaaataatttgcttttttttcattggaggaggtcttcaaagggactaataatttttgttattagttaatagttatttttcctttagttaattactttatatactcgaaacaatttttctgtgatcatcttttttatttcaaaaattcattatttttgtaaaattttattgaattcaagagttggctcccgaaattaagcttaatacatacacaaactgcatacatacatacatacataaatgtatagattataagtatatatgtacgtctgtggcaactatagacgctctccaattagttcttcttcttcttattgttcttgtcatgtagaaggaccactggagccgctggtatactaaaccaccactctctcaaccgccttattaaccgttccgtgctagctctccttggtggcgagtatcttgtgaaaagctcaacaaatacaaccgaaagcaagtagcgtcccggaacaaaggccatcatcgtcgctgcgaccacaatcgcaatcgcaaacttctggctcgcctgaaatagcggtttcaaaactgtggttagacacagctttaggagaagcagtttgtgttaaatataagagggaaggctgacctgagggaaaagcgagaataataaagctcggaacttgagaagaacgatgtttgcgtcttgaatgttctgttcgagctccgagatcccgttctggactgccaaaagctgttccattgtgttcattggaggaggagcagttactttcagctcgatcatgagcttttctctgctgaaacatcttgtgagaaccatgaagatggcagagaagagagacgcaagagcaaagacataaacaagccatcccctccaaattatgaaagtggtcaagagacagaaaacactagactttgtaggatcatcccaatacaccacagatagaattaagttccaggtttccattattggaagcatcagttcctgccaaagaaaagagaagcaattcattgtttcagacaacgcagttacaaatcttcctgtcaaactttccttttctttaccttcatcacggctaagttggtgtcaatgccacccattttcaccccattaatcgtctcttgcgctagaactactttctcgtatttcttgcgcgactccttcactgctctctctaatggattcacatctccaaccactactttacctaccacaagactactcgtctccctcctgctcctaggacttgaccctccaaacacagaacccagctgcgaaaccatatcagaagctgaggaatgtaatgtccctggtaaataaattacacattaacttcctcggaaatttcatcttttatattcatataataacgcacacgctttaaattttcacactcttggtcaagataaagaaaataccattaggtataagttattttgaataaggagtgttacctgtatctttggatttatttgatcgatggagctctcttgaggtagacatctctgcaagcgtctcaagaatcagatctccaccgggaagctgatcgcagagattgaacgggagaagattttcgtaccgcattgcgtttgtcaaattgagttcttgaagagcttggacacgcataacgccaaggacagcctttgaaagtgcttcgtctcttgccaaaccggtgatcttgtacttgtttatgtatctatgaacatataatacctcttgtataatagtgagccagtaatcacggcgtgtgtggcctttaagctctgggaattccattaccactggttctgatctacaacagatagccattaaaagctgttaactgaccatgcacaaaacaaaaagagcatgtacaagagattacaaatttacaatcgattaatgcaaaaagacacggcc

SEQ ID NO: 36687 - DNA, 2268 bp, Arabidopsis thaliana landsberg
  unsure (1)..(2268): unsure at all n locations
aagatattttaatggatttagacttaaaactgtgtaacataaaactgtgaataactgaataaattaatcagataactatgtatgaaacattattgataaaataaatcagaaaaaatcattaaacccataaataaatatgagattgagtatttaggaaaaaacttaggattttgttttgcatttaggatcaagtgacattcagaatgtatcggaacaatcgaaacgtaatttctttccgtttcccgttattgagacaaatcaaaatcacaacattaatttgtttctggctttctgctaccacatggaaaaaaaccccaatggataataaatagagtgactttgattgaatacaagcagtttttttttacaacaataaacaagactataatggattggtatggactcttttgccattcaaatgttgaatatagtgtaaaaatgttgttttgatttttttattattttaaatagagattacgaaagctcactcactcactcaaatccatccacttgtatcaactatcaagcatggttacaaaacccatcccatatagggtagtacttcacatgacaaaataatgggagttttatttcacagccctcctcaatgaacattgaacaaccagaaccagcaaagaatatcctaaattccagtttacagtggaaatgctgaatccctcacaccatatttattcagaatacaacaaaagtcttttttagaaaaacccgaaagaaacagaggaaaacaaagaaaatctaattgttacagatactcttacgacagcttttgatgtggttttttccattgcgtggttggttctcttttagagtaacatagatttagggttctcgatgtatcccttaaatgctttcaaccattcagctccaatggcacctgcagtaagaagaagaatattagatttctacaatgatgatgaatgaatgaatcaatgatgatgaatgaactggattaccgtctactacgcgatggtcacagctcagtgtaacaggcatgtaagaagcaaagttgaattgatctggaccgttaccagggacaactctcttttcagctgttttttttttttttaagaatcagacacaacacgaatcggttattggatctttggtaaagtagtaaaaaaactctcttctgcattgagagagagcataccggatccaactgctagaatggcggcttgaggtggattaacgactgcacagaattgcttgatgccaaaaggtcctcccaagttagagacagtaaatgttcctccctgagaaaacgagattattagcatgtttactgaaagatatgattagtgagtaagataatgaattctctcacctcataatcttctggctttaagctgttctcttttgctttttgagctaataaccgaacttcttctccaattgtggacagacccttcctgtctgcgtcctggaatcaagaaatttatataattcagcaatctgaagtttgtgctacagccaagggttaaacactattttgaacacaccttcacaacagggacatacagcccgttttctgtctgcaccgcgacgttgatgttcacatttttaaacctatagagaaaggttacaatgtttgctaccacaatcatattcaaaagtttgtcaatgtacttactggcggatgtaatcgtcagtccatgaactattgcactgaggaacttttctgagagctaatgcagcagcctaaaaacgcatgatatcagtaggatattttagaagatctgttggcttgcatgtaaagtatacacaagaaagatgtaccttaacaacaagatcattgacagatatccgtttcccaccagaagcctctttgaatgaattaagctgactcctcagactgcatttacaaattcgcttagtttagcttacccattgacagcgactcaaaatacatcatccaaacctttatacttacgccataagtttgtcaacacatgtatcgacggttaagtaatagtgagggatagtttgctttgagaatgccaaacgtgaggctgtgacctgtcaaaattataaagttaacgaacgagatttcagaatcgttgaacctattgaaactggcttaaaggnnnnnnnnnnnnnnnnnnnnnnnnntttcgtatctgagaatgagggatgtcaacatagttcaaagctggggccttagaatcagttgacttatatggcttctcagtagctcctttaccacttgaagctgaccattggaagatgtttacgacacacggatgagtg

SEQ ID NO: 36688 - DNA, 1573 bp, Arabidopsis thaliana landsberg
cgagcagctttcagttatttatgctctgcctaagcttgttgtttcttcgtttacacttgttcttccattctttcctactggaacttctgagagaatggaagacgaaggagatgtggccactgcttttactctcgctaggatactctctaatattccgacttcgagaggaggaccgactagcctagtgaccttcgatatacatgccttgcaggtctttatctacaaccctggtcacctctctttttgttctttgagttgatggttttatctagattctgccttgtcttcgtttggattgtaggaaagattctactttggtgatactatacttccatgctttgaaagtggtataccattgctcaagagcagactccagagtctacctgattctgataacgtaagtctctttccctctttttgtcacatttctatcatgttgagtagattatcaacaagattcaattcattttggttactgatcttcatttgcttcagatatctattgcattcccagatgatggagcatggaagcgtttccacaagcaactccaacattatccaacggtactatattttctcatacctagacgatatcgcctttgcacatctcattagcatcttacagtgaacccatgtggatcgttttaggatttagtaagctggatttaattcaggagcttgttcttcaagcttacattagatctaactccaaaagaagcattgcatcatccaatcttgtacagaaaatctgtacattaaccttttgacttaccaagtaatcctacttgtcgttcagattgtttgcaacaaagtaagaatgggagacaaacgaatagtgcgtatcaaagagggagacgctgaaggaaggcacgtcgtgattgttgatgatttggttcagtcgggtggcacattaatcgaatgccaggttctgtactcagattcaactctcaaaagtgtaactctgtactcacttcttcataactaaccactaattcttgttcccttcagaaagtcttagctgcacatggagcagcgaagataagcgcatatgtaacacacgggatcttccccaggagttcatggaaacgtttcaagcttgacaccaaaggttactacaaccattatacaaatgttttgaatcagtctaaacagagtcatgccagtttctttgcgatgtggctaaaatcttggttttcttttctttccgtgatgcaggtgatcccgcggaaggtctgagctatttctggatcacagactcgtgtgggatgactgtgaaagaggtgatgaataaacctccttttgaagttcttagcctggctggctccatagcttctgctcttcaagtttaagcttatgtgattcgagaagaaatccagccgcaagtaatttttgggtttgaacaaatctgatttataaactttggtgtatagttctcgatcaaagcattttccacggaagaggttatttgttgttaatgttctgtaggaaaatccaaaaatgtaataatgtttcttctgtcaaagagagaaaaaaaaaacaatgtttcatttcacttcttttatacttgttcgtt

SEQ ID NO: 36689 - DNA, 804 bp, Arabidopsis thaliana landsberg
tacatatatatatatatatatataatgctgcatttgcgtttcacgtacgtttacgtcaaatttgtttgttaaagtgcttaacattttctattaaactagctctattattttaacatataaacgtaacacgaaccgaaagtttgatgaaatcctctaatgatacttaagtttaatcaaaccctctatgggcatggatataaagttataattaaagagctatggatcttggctcactcgatgatgtaatagggcaatggttgttgaatttcgactatagtccatgcgttgttagtgattggtcggtcggtccatatctttttgtaatgatgtgaatcgtgttttttcacttcacacactcattatccattttatccaattggcatgcaaattattttccctaagtcacaacaaataattgactacagaagaagattccactgcacatttacctccattgcccatttaatgatttttctcgtctaatgaattttaatgagattaaattaggcttctgtgagtgtccccactctatgaaaattaaattaaattcatacttttttgtgacaaagcaggaccacttcttagtcgatatcgagcctagttaactttgaaagagaatttggttcatacaatctcaacttatgattctttaaatagaactatttccagagacttgcgttagatcataactgtcttcctgacagatacatacgctgcatatatatgtattagcaaaattaaactagtgtttttcagattccagagagccatattaacatttttactaaacttgttgcatctccc

SEQ ID NO: 36690 - DNA, 2561 bp, Arabidopsis thaliana landsberg
cacacaaccggcgaggaatactgcctgttaaattattccctcggagaagaagaattctgatgtattgggtgttgatgaactccggaatattcccagacaatctgttatttctcagatcaagcacaatgatattcttccctagcagtgtatctggaataacccctgataaattaatgtctcgcaggagtaacacttttaatgccccatatccagaaatggcttgaggtaagtcccctgataaactgtttgcagagagggccagtagttgaagactggacatgttgaataacgatataggtacttcaccttccaacaagttattagaaatctgtagcgaatgtaagtcttgaagttggtcaaaccaacttggaataacacctgagagattgttgttcgaaatgtcaagcataatcaaagatctcaagctctgcaaacctcttccaatctttcctgtaaacagattgttatccatagacagctctagtattgaaaaaaagtttgatgcttctggaaaaacctccccacttagtttcttatgtgatagtttcaagactatcaaggaatcacaacccttcaaaaaacttcttggtagcttcccatggaaacttctgtgagatatatccagaaattcaatcatttccatgttacccagagaagatggtagatttccttgaaaaccattagtcgttagattcatataatgtaagcaaggaagtattcacccaatgttctgaggaaagagttgatccaatccattaactgaaacatccaggtaaagcagattatgatcagattgcggtagctgcaagcttgtaaaagagttattctgtagaagcaaagcctcgagttttgtattgttctccagcagccacgatggaaacttattattgttagagagatcaacatgacgcaaatccttatggtataggaaaatgaggaaccttcaccaaattgcaagctcctagtgaaataacactcaactgaaatttcggcttccaagaacttcccaactctacttgaagtgagttagattttgaagaaaggtttaccaaaggaaagcttgataacccgcccgctagtgcgatcacactcaatgaccttccacagacagtaatcactctttgtgtcattagtccaacaaagcgttcttttcattctgaatacagcttttggatccatgtatctgtcccagcagtaacataatccatatcaagtattggcccaaaaaacaccttcccttccatagcaaatatcaatatgagacaaaaagtgaaacaaaagaaactcaaacgcaatatgtgaatatgagttcaagcaaacatctccccacctctataagaatttcaaatttccagcggaaaacacccagttcttcaagaaatatctgtaaatttgaaaagtcatatctttagcgtctatactaactcacttagagtagtatggtaagactcgttgggcatacaagtcaaagtctctctagaaaatgagtggtttagcatatgatatttcgcttgtcagtagccaagtaaattaacgaatgagattattgcaacacaggcccaagaattaaatttttgaattgattttttaaaacaactactcacaatcatatataccacaaaatgattcaagtgttgcttacacattcagtgaataaagttataaactttgaattctgttaaacatgtgaataactaaagcattatatgaacaaaaaaatctaacctttaaagtttaaactctctgcggtaactgtattgatgatgtggcataatatgccacgtcagaaacaatggatgttaccgccaacaccaaaaacgccaccgtttccagcaaacattttatttttgtctccgcccaaataaaaaccctacatcctcacgaaacggcggctccaccgtcgctgtccatcaatcggagttataaacagcaattgggtcgacccagaccttagaaatgaagctggaacagcgatcaagacgtaccggaccttcgactgggagtcaaaaagtatattccggcgagctccggcgagacgcataatgaggtttcgatggtgaggatcaatattaaaaaagttggtaatgcatcgccttttcttttcttttttttttttttttcttttggcatgggatcgttacttccttttttttcatctctgaagtgaaattttattgataataaacagatcatatatggttggcgaaaaacaaaaaagaaacagatcatatatgggccaacaagttaaacgaaaactaagaaaagcccaagagaagtccatcgtttgcgccttaaaacgattaaatacggaaattaaaaagattttaaaaaaaaactacacgcgtgtatgaactgaatcaaaacacgcgcaccttaagcgcgtttagcgcgtgagacaaaaatccgtggactataaccctccgatttgtttttttttgcataaatgaaaacataagaggaccaacagcgcgtgggtcgagttttcattagtggttttagttacctgagtaacagaaaaattgattaggattaccaatttcatacttaagtttaaaaattat

SEQ ID NO: 36691 - DNA, 1072 bp, Arabidopsis thaliana landsberg
acattagcctgctagatttctccttttattggtcggctgcattaaaaaatctcaaccatactattgtcttcatagaaattgtaaaaatcttcaatcgagattctttttctttttctcatgatattttatggcttggagttggaggtaacattataaccgtcatgaattagtagtccaacccaaaatcaactaacgactcaagtattcaagtgtcctaagaaaccattactttgtttaaatagatgcataaaagaataagattggatattgttaaaggattggttagctaccataaaatacagattgctgtcaactaaggcaattcattaaccatttgtttttttccttatcaattagttaaagaaaatgacattttttttagatggataaatatcaatgtgtcatttaacttaaagcaaaataatgggaagaagtaaatgataatgattaaagaactctttttttagtataacatatctaaaaaacttatcttcaaaatacagaaattcggaagcgaaaattacagttttgttcagctatactttgctacagaaatgtcaaaggctttttgatcagtagacttcaacgttccattgctctgccttcttcaactgcttcttgtaatcaaaccagtcaatacctaaaaccatcacaaagtcattagagtgttattgcttatgcaatggatgtttcaagaattggagtgttatttattagctcttcttaccgtcatttgcagccaatgagaccataatgtcatcaattcctttctccattcccttgagtccacacatgtaaacaaaagtgttgtctttcttcaacaactcccataattcagctgcgtactgtgccatccgagtctggatatacattttctctcctttatcgttcgcttgttctctgcttatcgcgtaatccaccctgaagttctcgggggcctttgctttcatcttatcaaactcctgattttcaaaacaaaaaaaaaaagaggattgattttacttaatgatttggaaggatttgaagaatgaaacccgaagaagagttagcgtgtgtgtgcccttttggtaga

SEQ ID NO: 36692 - DNA, 3051 bp, Arabidopsis thaliana landsberg
tttttttgtaagaccgcggtttctttaaagcaaaaagctttttccctcaaaaaatagtttcttcttaacgaaagtttaatatcgtgctgttttaagtaaaatattattgtacccatggttcaaataataaactcatgtgtatctaagagttttagtgataatggcaatgtaaacggtccaaagatatggaaattataaacgttttaaagaatgtctcaaatgataagcccatgatcaaatcggtgttctccgtaagcctggtacttgacaacgtaatcaggtccgtataataggacaaagacacgccggagagttagacttattattgtttgatgttgatatcatgatatgtagtaatcatatcgcattttactctgctaggattggatatgatcaacatcactaacatattcgaaaaagaatatcaagtggacgagtacgaattctacaactttaccattcgaaagtttaccgtaaactctaaatgaaaatgttttaataaatttacattgaattacagtttaacaaaaccaactaatggtggtatatatgatggtaattagttgaagattagttgtcttgggaaaaaagttactaacttaaaacttggaaccatgcatgtattgcgataatgaatgagcatataaggtggaatcttttgaaatgtagaataatctcaagcatctttcttggtttcttcttcagtagtcaagagcaatacgcgtggaataacccatacgtttactatttttgcttattctcgaaggcgattggttctcattttctcgatcgaatcatccttttaattcaacgatagcctcacgtcgcgtggtcctgacgcactatccatattctttgccactttattctccttcacggaacatttaagttaaacgcaaatatacacgttagtccatatattggaggagaccatattcacaaattttgatatataacacaaaaaaagtttacctgatttttcttctagtacttgatctcatcactcaactacttgcaagtcttgaaactaatcatcaactcaccattcagaatttgtttagcaaaaaaatcactcaatgataactaaaaacccaacaaacatacacgatcatatttcaaacgacaccattgccaatgacttaaaagtttttgaccaatgaaaattttagcgttgagtattttgaatcacgttcagttgctcatcgttattttcagtaactacaaaatgaacacaatttaatcgttagtcgctgaaaattagaaaacgaatatgacatagtcattaatgttaattaccattagcaaatacgaaatgaacataatttacattagaaccaaataattctttctatgaaactatccgaaatccaaattccggatgcattacaagtcaacaggtttagaatcaaattactgtaaaacaaccttatcaaggacttttttttttgtgtttcatcaattggtaagtttactttaataaaattgcaatattaaatttgaaatttgtatacatatttcccttaacttttgtttgtttatatccatatttggtaactgtacaatggggatccacttttgaatcaaaaaacaccacactgaaacaaaaataaagaaaagaagaaaaacatgtgaacccatatccatgttctgtctgaatccgagtttacttcttcttagttacagaggaggaaaaaaggaaaacctaagcggaaagggaatatcccaataaaaaaaaaaaaaaaaaggacagaagtataagaaaagtatcctgaacatgataggtctctctcccatctataacctctgcaatttctctcgaccaaaaccctaatttcaggtttggggttttccttctttcactgtaagtacgagcaattattttcatatatatatgtacctatatatatatacacacttatatacttgttgatgagcctctcgaattccccaatcttaaacactcttcttcaattctacgttcgattttagcgatttcggagttctcttcttctgtcttcgaatttgtacgcacttattagttctatacatatatcgatcgatatagcatgtgtttctagagctcttaggttcagtgattgatcatgtgtgtgtgtgtgttcgttgaattgggggatttaacgggttttgcttacaaatattggattttgggattgtaatttggttgatctctctctcaaattcgagcaggagtgtataagctaccaatttagttttctttccctttagtgagtgctcaatttctgattttagtttgaaaatctagtgttttgacaatgcaggtcaattttgatgaaacttgtgattcagtgattagaatgaatgctaatgagcaaactcgatccgccaatggcattggcaatggcaatggtgagtctattcccgggattccagatgacttacggtgcaagagatcggatggtaaacagtggagatgcactgcaatgtccatggctgataagactgtttgtgagaagcactacatccaagcaaagaagcgggcggctaattctgctttcagggcgaaccagaagaaagcgaaaaggcgatcatcgttaggcgaaacagatacgtattcggaagggaagatggatgatttcgagttaccagtcaccagcattgaccactataataacggtcttgcctctgcttccaagagtaatggtagactagagaagagacataataaaagcctgatgcggtactcgcccgagacaccgatgatgaggagtttctctccacgtgttgcagtggatttgaatgatgacttgggtagagatgttgtaatgtttgaacagggctacagatcttataggacaccaccatctgttgctgttatggatccgacacgaaacagatcacaccaaagcaccagtcctatggtaagtttcttgtttctcattggttagacaaagaactcgtacacccatatgtgtttgtttgcttataaggattaaaagtaactgattttctgagttgtaggaatactcagcagcaagcacagatgtgtctgcagagtctttggggaaatcg

SEQ ID NO: 36693 - DNA, 3638 bp, Arabidopsis thaliana landsberg
gccacctccacttgtcataaattgtattccactataaacaccaaaaaccgcatctctatcttacgttattaatccataattaatcgattaataaattatacaaacttattataatcacctgttgatgctgcttatgtgctccaagcaatgatcatgcccgtttatatagagatccacttcattagcctaaatatatcaagaaaaccaattaaattgtttttttttcaagttttggtattacataattcagtagtttataatatagtaaaaattacctcgaggataggtaaaagttgtttctcaagctctatggtatttccgtggtgacctgcacttttgatcgtgtgatggcctaccactattttccatttagccattgattcttgcaatgccacatccacatcctatatatcattaaattaggtcaatgataatcacatattttgactatattgtaatcgagacaggttttagtatgatgccaatttaattattctaattttcaatgaatttgatgatataactagcttatggtagagtaagaaaaaaaaagttaccgttaagagattgttaaggtatttatttctcggtaatacgcctctccaatcatatacatggtcctttggttcatcaaaatatctatctacgaacggtgttgtatccacgaagaaaatatcgacaatctctacaaaagaaaaaagggttaactaaagagaagttttattaacttgtgttcttggtaatttacttaccggcgttaacaacataagatcttaaacaaatccaacggcagtccaaatccctgagtatggggctgagttgcgcatagacgttacctctataatcatgatttcctaatactgcaagagaaaataaatgaaaatctactaataagtatataaatttttgatagtcaaataactttttctctgtaagtgaaagagagatagttttatgctcagagtatatataaatactattaataatttacttaccattgtaccatggtttttgtaagctagttgctgtgtaaatattggtaaacgaatcttgaaattgagaatcatatggactgattattccatcatcataaaagttatctccagtcgaaatgaggaaatcaatatttaagtccttccctatttttcccatctgatcaatgcaaaaaaatatagacaataattagaaattgctagctgcgacaaacctatccatttaactacaaactaaaacaaaataataataataaaaatctctagtcagtgtcttccttaatccaaagcatttactcataggattatagaagcaaccaataattaaagtgatgacgtagaattgcaacactaatggacagccttaagatgattattagttccacgtaagttacgtaatgaactaaagattatgtatgcaacttcatcttcacggctccttaattaacaatgaaatatgcctcatatattatcatcaactcactcattatatattcagatattattacatgttaatacaactcaggcattactcagtgcagttttattattattgttcgttacttgctaatatataactacaatagctaattaatttgtaatttactcaaacgatgaattcgacgtcaagataacatatatatgatttctcttatcattttcgtcttctcgcttgaattctctcacatattttctaaccacaccattaaaaagaacttgaaactagcttaattacaaacaaggaataaagtttgattgttcataaaaataaggtcatatctacataaacacacacataaatatgtacctgaagagctacttgggactgattataagaacctcttcttccccagtcgccgacaacgagaaaactgagtgaaccatcgggttctggtggttggacgaaccgcggtagtccgccgttgaattacaggcggatagtataataactagacagaaaatagaaaatatgagtttgataggcttaacatctctcaagctatccattgagagactttggagaaaaaatgtaagaggtgatggacctgatggtgggttttcgtgtggctttgtttatttatagctagtccttatgtggacaagaattaaaaatagaaaaaggcaagagaaaaaataatgtaatgaactttgtcactagaaaaataactcttcaaaattattaatgaattttaaagtcgaaaaaaattgtttttcttgtttcaatccgagactatataagactaaaatggactttagacaattacgtgaaaattatttgcacgtcaatgaaaaggggcggtggatagaagtagtctgaatatccatgtttaggtaattaacgtggtatatattgttccacatataaataacatttttagttcccatatatattaacaaggaaattaaagagaattttgaaagaaaaaaaaaaaaggttgaccggactttttgaaggtgattttatttatttatttgctaattgccttacatatgtgaaaggccattgtacgagttgttaatttatacacaaaaggtttgattcataattttttttaaaaaatctgtctgtcataaaaatttgctacaaggaaaaaaaaaattcgtgaataatacacaagtttcgaataaaagagaaaattgttttttgttttccttttccaacaaagattatttgattatgtcactggaagagtgacagagtcattatacaaacaaatatgacaaccatgaaggagctaggaacctcctttatagttttaaaactgttataatttataaagatacaactaattattaacagtaattggaaataggcctctgcaccaattggaaatgtttacttcctcatttaaacttaacgaaaatagtcgttgtcaacttcaaaaattatttattgtcagttaaaaatccatatttagaagcttttttggctcattggtcgacccaaggttcattaatgcttttgtacactaaaaaagtttggggttcgagtcccagatactgtgatttatttgcagattgatagagacaagtgtgcagaagatcttcaacaatgtgcaattatatccattcgtctatgtaacaattctcataatttgcaataaataataaaccttaacggcaaaaaaaaatcaaatatgataagattaagaaactaacgtgtcgcgtgtacaacacatattgatacgcgaggaggagagagagacaaggtcggtgccacccaagatctacgatccggtgcaaactccgcctttgacttcacgaatccaccaccaaactccttctgcaaagttcgccattgcaaatccgattgacttccaccgcttccatctcgaagataccgcaagaagatatcttcaaattttcatcatctaaacccttattcctagcagaagctccgcctcagacctagttgaggtcctcttcacagtagtcgacgaagatattactttggttaaagattggagataagccaacgatgggatggggagatcaaacgatggcaagcgggattccgattgagatctcgtaagaagagacaagccggagaaaacaaactgacaaatggaaagaaaatcttattagaatcggaaacaatacatttacaacaaaagtggtaaggtcggaatacgaattccagtatat

SEQ ID NO: 36694 - DNA, 1691 bp, Arabidopsis thaliana landsberg
  unsure (1)..(1691): unsure at all n locations
ggaacaaagatgaacttagaaaagagatagaaaagatctaattttcaaaagaagaagtcttccctagtggactagcaagaaaagattgatcttgacgattttggttcaaaaagaccaaagtgtctaatgattggggttgaaaagaagaaaaaaaagagtttgcaagaagggtagaaataggagtttacatctaagacgggtagaacaagaagagctagactttgtatgcataaattgttcttggtcttagatggatttcatgattgtctagcattactattttttgagagaaacccaccaaagtgtaaatcttttgaaaccacctccaaaagccttaatcaaaaccgattgagaatgatttatcttccatttgcgagaccgcgccaaacacttaaatgaatgttaaagagatgtttcaacttgattgtaagtctttgctaatagttggagatttgaaatagagctatacactaagaagagtatggagaagtacgaaagagtatgatgattgattcaagcaaatatgaactatctttaaggactttgagttgaatccttcgtttgatattttgtggctatgaatccccaccttcaaacctctttctcttcttatctcttagttcttgcttgaggactagcaagagataagtttgggggagttgatatctagtgtttttggttgttttaaaacctctttttctcttagtttttgttgctttgcattcatattttggcatatagtattgcatttgcatttgcatttgttttttttaggtacatgagtggagtttaaagttttggaactaaaatggagcaaatggagcaaacaaaggagctaaaagattgcaaagtggccaaagaagagaagctagtaggaatctaccaaactggtcgattgcgtggtcgattggtcaggaccagagctacggaggaatatgaatctaccaaagtggtcgatttcgtggtctactggtcaaggattaatgttgcggacgatattgaatctaccaagtgatctattgcttggtcgatttccttccttaaccggatcaaaacccggtttgttccgggttgatccggtttattttctcattactataaatactcttaacctagttttagagagagggagcttttgtttagggataaaaacttctcttgaaggttctttatcttaagtttttgtatgaatcttgggttcctaagtttctatatcaaatacttcttttaaatttctcatctattctctaatgattatggctttacaaagatcaaaccaatttgtatgatcatgatcatgagtgagtagtcttttagagttctttggttagggtagattaggatggtttagatgttggggtatgagattacttaagattcttacttattggttgctattaaggctaaatcaaccttgatcatgttgatttagacactaggaatttcacgtccgaaaggnnnnnnnnnnnnnnnnnnnnnnnnnnnnnttaagtgcttttcataccttaattttggaaattgttgattagggtgattggtggctagatagacttgttattaaggctttttgttcatttgattgtctttggaaattgttgatgattcattgattagtaaatggattcataacatggaaatgaattagtcttgtttagtgaattcataagatgggaatgaataagcccaacttt

SEQ ID NO: 36695 - DNA, 1786 bp, Arabidopsis thaliana landsberg
  unsure (1)..(1786): unsure at all n locations
agggttaaacgaccttcgtgtgctaacctttgatcaacggaaaatttgacggtgtgattccaagtaggctcagattctccggtgcgatcgatgggggttttctccttatgattcttccgagaatcatcgccggtgatccaaacgacggcgtatacgtccatttttgtgatgaggttgacattttcaagatcttttgctgagtaaacgttgagctctaaggtaagattcgccatggctaaggcagagagggatcgaaagagaaggagatgattattgattccgtcaaaaatagattatataaaagaatctacgcgtaaaataatatttatgtaaccgaagcttctcttaaataatcggaaaattaacataaacagatgtgtatctagtggacagtagaagatttccttttagctatatagaaaatcaatcttaggcgttgatttgcacagatctttgacacgtctttaattaggttttgtcttccaatcagacttctttgcactgacgcggaaactttaatttgatacaagagttaaatttctagtatttttctaccattaattgatgcaatgacataatttcattagatcattcattagatatgggaatttataagtttagatcattcattagatatgggaatatcctaccattaattaatattacaaggcttgatttttaagaacattttgggctccatgactgaagagtaacgtagtcaacacggcatgagatgaaccggtttctgccaaaatttattgcaagaattttcagtgtgatatatcggcatggttcggtttgctgagttcagtgatgaacaaacgcacacggggacaacgacaaacaacataaaatgttttttccatctgcggtctcagagacataactttgaactcgtaaaacgaataaccccatagacatgattctgagagagtacaaactacaaagttatttattactttcaaagatcactttgggctccacgactggagtaaagtagttaatgcggtnnnnnnnnnnnnnnnnnnnnncaaggctaattcggctgcgttcttcatagccatggttctctccctaaccggacactccccaattatctcttggactcgtttctccacctctgtagagctcacgaaaccagtctctgattcattcatcgaaatagcaatcttgatctcatccacaatcatcactctattaaacctctgctcagcgtacaacggccaagccaccataggtacgcctattataataaacaaattgaattcaccacaatgaacagtttaagcatatatataattgaaaatgtgtatagatatacttaatttacctgcacaaacagcttcaagaattgaattccaaccgcaatgagtgacgaatccgccgacggctttatgatttagaaccggaacttgcggagcccatgattcgacgaccattcctctgttttcggttcggcttaagaatccttctggtaagagtgatttcaaatccagttctgtcttttctaactcgggtggattacggaccacccacaagaatctctgcccacttttctctaaaccaacagcgatctcaatcaactgttcttttgagaacaaacctaagcttccaaaacagagaaacacaacactcttttccggctgcgaatccagccaattcagacaagaaactgtcttgctatcgttcttatcgtcggttctttcgtttacaatgagcggcccaatggataaatattgcgacaacagagctcctctgctatggcattgatggctctgttttttaa

SEQ ID NO: 36696 - DNA, 2037 bp, Arabidopsis thaliana landsberg
atatagttttttagttcgatctttggtttgtgcggacgttgaacgagaaagcaaagagggacagtgggtgtgggttttgggaagaatgtgagacgcaaataatctcaattcaaatggaatcaaattagatggcaaagacgaggccttgaagtcaagtgccttccattggctttgatcatcgccacaactcctgcagtcactccagcccacaaagccgacgccagatactgctgcgtgtttcttcccgctgttttttccacccaacacacacacacatacacaaacaaatcaatcaaaatacaatcatgtaatgtataatcatatgaattacaagcctttaccttgatgaattgtgaaagatgtcactgttacaccacctatcaacaatgctgatgctaccggcagaaactgttttattttcaccacaacaaacaaaatccagtcagcatcttctgtttgaccaaattgtttaattatatggtctccatcgtttcaaatgcaatttctaagtttgttaccatttgcagttttccagtaaagtgcaaatgcaaacgccattttcatttggcgtttacgtttgcaattaactaatgaaacattttagtatgtttaaggtagtgggttcatttgacaaaaaaaattattaagtaaacgaaaacatataatgcaaacacacaatcttaagcggttaggaggaacatacagacggttgtgatccaatgggctggagttgtgaagggctgtgtgtgcccactgtgtagcgaccacttatgaggtccaaagcatcctgaaaaataaaattttgttttctctaccttcagtttctcatcttcatacctcacctctaatttgctgattcaattataattgcagaagaaacttgcctgccttacaccatcttggaaattattcagataatatctcgacattgcactgaggccatctttgatagctccagtcatagtctgtttcccgtacctgcaccaaaataccccatagcgtatattgctaatatgtaaatattatcatttacatggtctttctaaactattgtattgattcaagctgaggcctataccaattcagagaaaactgcatccaaggtaaacagagaactcaagcttgttattacaggttatcagtctagtaatatggcaagtgtattcatgtctgagagaacagcatggaaacttctaacaatgttgatgtatggttaaaagaagtcatcatcactatcacaagactgtaactctgtaagccaactgtaatcaatatgatcttaagaaggatcacagacagagattactcaccttacgaggtcgcccttaagagcatatgtcccggcatattgcaaactaacctcgtccccttgctcagcccaaactagtagtgaacccaaaggattaaatttttgaggtacgccagaagatattctacagctatataactggaacctgcgctgaaattttgaaaatggtgacaaccacttacttgttctgaactttgtgtaatcatcttcgaacgtggatatacactctgtggaatcgcacactccgatcctttgaagttgtagattcagacttttttggcccatgaaactcttttcatatgatacaacaaaaaaaatattgactgcaatcagaagcagttcaatgaaaagtacaagttttcaaccatctaacaagcttgtatggctctacagcaagtagattttagccgttatgtgcaaccagagacaatatttcatgaagttaaatatgtaaacaatgattttttatcgcaaacaatttagtaaatgcacaaccaagatcccaaaaactcaaatgacacaaatggaggggatttaccaacggtgctttacatgtcccacctaatcacccatgagttgtatagaacataccgtaccaatcaagatgcctactagaaatgaaaatgaaagagagtaagaaataattcaacaaacctgggtaacatttgtgcggtcaagacagtcgatgcagttagatctgataactccatatcatgctcttcgaggat

SEQ ID NO: 36697 - DNA, 2626 bp, Arabidopsis thaliana landsberg
caatcaattcgtcacctttttgatttggggaatgtgacaaagcaatctgggttgtctgattatttccaatgactttcttctctgtctgattcgtttgtttcggcgattcaactcttcttcaacgccctgagagtcacgcacgagaattggattgatggtttttcacacgcaggagaggcgattcgttgtcttcttcttgtcccgttgacctgtttcgatctcagatggtgattatgcagcagctgattctaaattagggcatttaaatccgccttccaggtgaatttttgaaaagtaattaaagggtgttcttgaatggacttgaaaatggataatgttattgggggaaagtttaaacttggtcggaagatcggtggtggctcttttggagaactttttcttggtaaagattgcttcttttaaatatatatttttattctgtgatctgttcttattagtatgtattcaattttgtgtgatttaactttttcccctatgtgaattgaatctgttcttgttgaattatattttcagccgtaagtttgcaaaccggagaggaagcagctgttaagctggtattattcgcatcttgtcctctttctcatcattttgtgacaataacatgtgatttaagattgaggtgacgagtcaaaattgaatttttacttgtaatagctattatgaaataggtatttcattgttttggcttcattcttttttgagtaaaacatgcgacaatgagtccattgcatcaattagttgatgtatcttccatagcttcttaattatcgaaaacttaatatgtctaacgttctgttaaactttgaaggagcctgtgaaaactaagcatccccaacttcattatgagtcgaagttgtatatgctgcttcaaggaggaagtaagtctcatttttttaaatctcaaaatgtattttagttccaattggttacaggaaagaagccaaaggcagacttttattcatcctaaaattgttattttttgttgaagctggtgttcctaacctcaagtggtatggagttgaaggggattacaatgtaatggttattgaccttctaggtcctagtcttgaagacttgtttaactactgtaatagaaaactctctttaaaaaccgttctcatgcttgcggaccagctggtgagtatattacatatatcttgcagtttcttttggttttaataaaatgtctttcttcataaccgagaactttgtttgatgttatgtttccatggattcagattaacagagtcgagtttatgcatactagaggttttcttcaccgtgatattaaacctgacaacttcttaatgggccttggtcgcaaagcaaatcaggtgccatctctgattaattgtgtgactgctctttgatatgaacttctttgagaaaaatgtgactgcttttacatcttggagagtataactatgtgctgatataagaatgtatttatggttaaacttttgagttacttggttttcccgacccgtcaggtttatatcattgattttggattggggaagaaatacagagaccttcagactcacaggcacataccgtacaggtaaaggttttttccttttcccagaaattgtgcttattgaaattgatatagtttaagagtaaaatatcacattttggggcagagaaaacaaaaacctcactggaacagctcggtatgcaagtgtgaacactcaccttggagtcggtgagtgtgttttcctatatgaatttattaatattccaaccgttatgtattcggatctgataagtaatttctcttgctggtgtctctaaagaacaaagtcgaagagatgatttggaagcacttggttatgtgctgatgtatttcctcaaagggaggtaagagtctacaacttccataccgatctttaaactttcttctgtgatcttcattctcaatttggtatctgtttataacagaagttgaaatctttttctctttacattatttctttcagcttaccctggcagggattaaaagctgggacaaagaagcagaagtatgacagaattagtgagaaaaaagtagcaactcctatagaggtattgaaaattcgacatttacctttgagtattatgattagttttacctttgatgacttacctttgatgtgaagaacaggtcttgtgtaaaaatcaaccgtctgagtttgtttcgtactttcgttactgccggtctctacggtttgatgacaaacctgattactcttaccttaagaggctattccgcgacttgtttattcgagaaggttcttattgcacatttcttactcaagcaaataatctctgtcccaccgacttcataattcttattttcattctcaatggcaggttatcagtttgattatgtatttgactggacagttctgaagtatcctcagattggttccagctctggttctagttcacggacacgggtagtttatgctgctttctcttttggttcttaagtttctctctattcaagcctaaaaatgtgtaaaacacttttttgtgtcagaatcatacaactgcaaacccggccttaactgcaggagcttctctcgaaaaacaggagaggattgctggtaaactgcttgttcct

SEQ ID NO: 36698 - DNA, 1617 bp, Arabidopsis thaliana landsberg
ggccatgacttcacattccgacacaatgcccataccattctgattctcacaaattttctttaggatagctatagttatatatgagatatgaatcatgttaataccgcttaatagaaatatgaaaactgagtttacaaacaaataatttctttcacaagaaagataacattttctcaacccactattataaatcgctattgtcaaggctcaagagctgtcattttccataattattgaaaatggtgaagacagctatgtgaaaatagggcaataattgaactttaaatcttcgaaactattacgtttcgcagtcacaagagattatccatgcataagacttcaaaaacaaaaacaaaaaggtaaaaacaaaatcgaaaggaatgaaaccaacgctcagaggtttatgcacatttgcttcaatgttcaccagttatctcctctcctttaaccatcttctccttatgccatttacagaatccttccaccaatgcgtccttcatccaagggtgcctgcaactctctaccgcttcttcaattgtcagccatttccgtgttctcgtctcatgttccggccacgtcgctagctcttctttcacatacaacgcgtacattgccgctttacataaaccttctgggctaaactcatcttggtgtgatttgctcttgaactcataattccccaaaaaatcctgcaaagttccaaaattttcgacattctcagcaccaggcttaaacaaataacaaagggctgcacttacacggtgtgcgtgaagggttttaccataagaatcccacggactcctgcttcttccactgcttccctcgctgcagcctccctgactgtctcatcattctcccatcctccctacatgaatcatcggatatgttactttgtttccaaacaaaggcaaaagcaagaagaaacagcgtttgctttgtaccttgggaaacaaaagtcccggtccactagacgagctgatcatcaacacttgaatcactttcccagattcagaattaccatctttgtcagaatttacatacctaaacggaatacacctataaatgcccgacattgaacttgttaagcacggtccatcatctccaaaaaacaaaattaaagagacatggtcatcaaccaagatcagatacaatcaaaacatgtctaaacatgtcaaaatcctcttttcaaaacatgactctaaaacaaaaaaatcttcaaacatgattcgataaggtgacgtgactcttgttttgcaattacagacataacacctcaacacaaaaaaatgcccaattaatcacgaagcacaaaacaaaataaatcaaagcaatcacttcaatacagggatacgtagagatccatgaaaacaaattcccaacagttacacccattataatcaatcgcatccacaattttcgaataaaggagaaagattcacattacataaaccaaaacgtcagcttcaaagaggcgatacaaacgcagacataataaaaagaaaaaggaacaaggatggataaaaaaacggtacccggcgacgagacgagagccatcctcgtaccgctgctggagacgacccgtacgcgcgaccaaatcacacatgacagaaataaaca

SEQ ID NO: 36699 - DNA, 1928 bp, Arabidopsis thaliana landsberg
aatcacatgaattttttttaggtatggtcatagtacaatccaaattaaagatgtccatgtaattaaaacaaaactaaaaacacagaacagagaaaaggactgatctttttaacaaattgtgcttaaaacaaacaaaacgaagaagagacgaaagagccaaagaggtatattgtctctccagtctcaaactaattaagaaagatctcagtttacatttctggatttttcttctataaaacattaatgcaacatcctgcaagtttgctatcacctaaaaagggaccacaacttctaatacatatggaccattttagatatgtttatgtcaagattccaagtggtaatcacaattcaaactacaccatttattggttatttacttatcttctaagtccaacatgaacggattagtatatttatttaatcttttcggtattctcaatcttagtcattgagttaatatttgttaacatgtatagaggattgtgtttatttaaaactactactctcagttttggtccattacttagtaaaaacaatagtcataataacatggtaagattgttaacctgtttagacgatgcaataatctcattcgttatttagtgatttaagacgtcattgcttgataagtcgagatcataaatctttatcgttgaaaatttaaatggttatgacttatattttaaaattagtttggatttttgattctgaaaacatgcaataattgtttgtgatacgtatgtataattaaatgccaagtgagtgaatcgaaactttcgtaacaaacataatgttgctgtatcacttttattttcccgtatggcagagtggcaacatccatgtgctaaatcaagtagtagcttctataaggagtaggtccatattctaataatgaaatacaactctgaaagttcaaataaatttcattcaaatgccccctgtgagtctatgactaaactattgtgcccacaagccgcttcttccatatcactaccgaaatttaattttcaagacttagttagaacgacataggtacaacaactaaaagaagctttgtatttcattaaaacattaaagaccatttcacgttgttttagttcaaactttattttgaagacgtatttttgatattgataatttggtgaatactatgttgcaaactcaccaaaatagttgatttgagacgacaaaagcagtaataaatctccaaggtattgacaacatgatcgggtgacgagtttccacaatgttttgttttactgaaattgcttgctataggttggatcgctagaagctcctaagaaaagaaccaaaaattccaagttctttcttttcaaactactgagtcagctcccaatttgttttaagaacatggttaggtctctccttttggcggcaaaaaaaatattaaagaaaaacttgattagatcaacattggtacaacaattcaaatagatgccatgtgacacgggcctctcattactaagagagctctcaatagttgggccatcgttgggcttacttgtggcgggggctctatttacctccacgtgctacatttttggttgacagttttctacaatcagatttcacagctaaacatagatgtgttggccgacaaaccaaaacacgtttatatgcgttgtccttaaaaatacttacgataagttatctcattgcttaggcgaaattatcatttttggatggacaaataagttttcagttttatgggccttaatatatattgggcctaaactaaatatagttattaagagacaattttatgggcctaagattacacaattttattattttatagaaaaagtaaaaaaaaaaaaaagttacagaacagagaatatgaagtttttgatggaaagaaacagacgtttacgtttagaaggatctctgattcagcaccgtgacat

SEQ ID NO: 36700 - DNA, 1696 bp, Arabidopsis thaliana landsberg
  unsure (1)..(1696): unsure at all n locations
cgttgaaacttgtggcttgaaaaaggttttgggaagaatggtgaaagttttgaaaagagtgagaaaagattaaaagcaagcttaaagcgatagagatattgcgtaagagggcaagagagtcgaagagctcccgacgccggtgagccaaaccttcaccggcgtcagaaatcatggccaacgggagtgtctcgatactcgggcctgggagcgatattacaaattaattaatttctattgaatatttttggttatcgatgtattagaaatatgttttggttgttaataaatttttcaactatgttttttgaagaaaaacacagtttatttaccaatgaagaatcacaaatagtttttacaaattaattaatttctaataaaattttttcggttgaatctaaatatataggcgagtatacagctatatgtatacatttaatttattaaagggaaaaaacaaacattgtaaacgaaaaaaaaaaatcaacgaaaaaagagaactgttttttttttttttttttgctaaaaaagagaactggttaggaacatagatcagaagaagcacacaaagctttttatatacactctccacccacttaagagtaatcttctcatggttttttatacaccaaatctgatatgattcattttcacttacacaaccacaaaaaaaaaatccaatcaaattaccaaacattgcgcaaaccaatcaaccattttacaccggaggtaaaaatatcttctactcttcaaaatcaaacttattttatttggtttcttccatttctatgtgttccatcttttttttccttggtgggtttcatcaccttaatcttacgacaatgcaagaaatatcatctttactgtctcttctcagcgcttcggttgttagttctttcgctgcttttaatggatctttgattcttctcgcgatatcaatcgcctcttggttagccatcacctacacatatacacatcaaaaccgtttaatccgaaaacgccataccagttccttcacaaatcacaaacaccattggggaccttccatagaccgtcactagcaagaacgagaacatctgtgtgatcatcgaacgatgaatctctaacgtcaggatctgaccgtagatgtgttttgaagcttttgtctccaaaagcacgagaaaccgctagctgcccgttaacccgagggacatctcctgaaaaaccaaaacagaacaaaaaaacatgttttggataacttttatctgaatttgatacgttttggtattatcatcaaagactctaacctggcatgttggatacaaagcctcctttaccctcgatgctcaacctttcagtgtgcggctcatgatcaatagtcatctgtattgcctgacctccttgagatagaaccgcccgagaatcacccacatttgccacccataaacgccgtccattcatcagaatagcggttacagcagttgagccaccacgtgctaagtcagaagaatgtgacagaatggcttggtctgtcttctcataggcagcaattattgatctctgaggatcatacctaaactgctcctgaacacacacacacacacacacaccggtttcaaaatcacaaacacgagccagtagatgcagtgaagagcctatataatagtngaaatttctcacacctntntgaggatattggagacaaatgctttctgtagat

SEQ ID NO: 36701 - DNA, 1311 bp, Arabidopsis thaliana landsberg
cggcatgcactgcaatatcatggtttttattatggcagtggaagtttcttctcccgatagtctcctatccagaagtaaatgagtagactattttaaagtgaagtagttaactagaattggtactaactttcaatggtttattctatcaaagggttgtttagatgcaagaaattctagtccatcagcttgctcaagaagcagcagaggctgagggagaaggtgcgatggcatctgtagcaaatcctcgaaggcctggcaagtgagtctgatattttttgaaaagtatgtagacttgatttgttgtcttatctgttattcaaaatatctttcacttttttactaggggtttgactaagctatattttgcattgatttaatgtcctgaaaagcaatggaattttattaaagtccccataatcatttgtgacatgtcctatatttattctgttgaatccaggaaatctactacagcgtcagcgtcgtcaaagggtcttgctcaacagaaattaaaagtccaagggaaaggctacaaggacaaatgctacgagcaaattcggaaggcggttgaagatcgattcaacaggcttttgacggtgggactttctttttgaaaatttcatttgatggcatagctaaaagtaatgtgtttctctgtgtggtcatcctaacactgaactattgaacagcttgtctttgaagatctaaaagcagctttggaagaagctagaatggtttgtgcgactgtttcccttgctttcatacacttttcttcattttttcttttctgcagtttatgaaattatattcaactatctaatatatttttgtttctcagtagatcacctttagttgactgaattagttttttttttggttcttaataaatatggttgatgaactagtagtatgttactgttctgatacaaaagttccaaattggcctgaccgtcttatattactgttcctgttccataatgattgatgtcaacctcgttttcttctgttatctttcacaaatatatatttatcaactgggttttcactttctttttatggtgttccacaactagattggagaggaacttggagatatttatgactatgtggctccttgttttcctccaaggtttgttcctatctcgttttcctcaagtggacaatgaaagattacagcttaaaatttattctgttccccaagtgaaaaagggttccttagcaatcttctttgctggcagatacgagatatttcagcttatggtgaacctgtataccgagagattcatacaaatgctcagattgctcagtgacaga

SEQ ID NO: 36702 - DNA, 1473 bp, Arabidopsis thaliana landsberg
  unsure (1)..(1473): unsure at all n locations
caatatttcaactaatatcatatagtaatatttaaaaaagcttattgtcctaaattttcaaagatgattgtatgtgtttatggaaagataaagatatacagctttgcagtcacattaatttatcaaattagaaaatttgagatgtgatcgtaccaatggtctctttcaagacttttaactctgaaaactttcaaaattctaatttgggaaatttagacttagttgcaaatattctctaaattgcttaattcacagtcaattttcatcgaatttatttttttagtttcttgttatttaatatacaactcaatctaagttaaaatacaaaaaaaaatgattaatcacaaagtttaggtgaagtgttaaaaaaaattgaatacgattagtaagacccattgaaggagacagcttatacggctcgtatcggcttaaaagattagctaagtatagtataatttgtcttgtctcgaagtatatggcacgtgtcggttattgcaagtggtccagagggaatagaacgagtcagcaattaatgggacctatctctttttttgtntgcagatattcaaagtcaaaaaattcggccttttaataaaaaaaccatttttggccaaaaagaaaactttattgctggctaagaaaaaagataaaaactttatcatatgcatgtgtctttacatatgcacacaaccagtttactttatatgtagagatttactaagagttagacgtgattaaattctttctacttttttttttttactttaacatccaatatttttatcaatttagttgtataattccaccgcaaattcagtattttaacaagtactatacattatagagaaaagaagaaagaagaaagaagaagagtcgctgtcgctccggtgaggatttgtctgagagcggcgatgtctcgtgcttgagaatgctacttccctttgctgtctccatcaacacttcccgcttcccacacgccacgccaatatctctcttttaaatccgttgatttctttgacttttccacctcttttttatatgctttttaaaattttaaaagaacttacaaattttgtttactatcttgcggaaaaaagtataaacatataaaacaattacaaaattgaattttttttatgttttcacttttcactggtatcttaggtcagattctgtaaatttatgtatcttgattgattatcgttttcttaattgttatatcaatacttatgcttagatttacgtataaactactataatgtataatctcatcgaagttaggataagcatatagatatattcgtcaatccccaaaaatgcttcgatggtcaatgtctcacagtctcagtgaatgcaacaaagttacttaatgagtgaataacacagaggacaacagaagatctacgttaacacggatctagtaacgtgtctattatctcatgaatatatcagtctgtaacttttttttatatt

SEQ ID NO: 36703 - DNA, 2133 bp, Arabidopsis thaliana landsberg
ttttaaaaaactgttattgctctttgtgaaaatgattagaagttttgaacattttgccagctttaagtgttacttcttattgcagtattcattttggttgatagctttcgtagttggtgtaaatttcatggttctgaattgttatgtgctgcttggatgttataaagggttatttgatgactagatgcagagattgatgatattacatagcacagtagatataataatgaaatttagttcgtgtatcagctaaaaggggtacagtttagatgcatattctgggaatatgaaaggaccttctagagcaactctgtctgtatcctactgctgggctttcattctactgctttctgatactgtggttatttcagtatcactacatcagtttctcatttattacctgtcagcatgttgtagaaattgggtaaatgatatgtggatggtttgtgcttgtgataaagtatttgaaatttaatgttctatgtcagataaaaagtgtgacgtttagattattccaatttctgtctcagcgtgatgcggagaggatgtgccagactctaaaacacgtttctcctgaaatcaattgtaaaccgagtttaaggccatgcaccttttgtggaggacctacagccacaagttcttttcatatcctatcgaatgaggcagacagtgtgaaaggaatggagcttggtgagttgactatgactacgactacgacagagcaagtaaggaattcttctgtctttccctgatctaggcataggatgtggttatctgttatttcttctgtccagtggagaggatcgtttcaactaacattacaaactgatatagaagtctccactgcatttcttctcagtttttcacctggtcctgacagataaagacttcttttactttaatgggatacaaattgaacttttgaagtggcagtctgattgtctgatactgcatagacttgtatagttttgtttactcggtacagttttaaaccatcattaatgatttgtagcaccatattcgacaattcagtatagttaactaagatttttcacttttgtgctagtgattagaagtagcaatgcttgattttaattagtcacaatatagaatagcttactaaagccacaaaattttctgcgttttgcaggaacgttcagctgcttttgtgttttttaagactcgctatgatgctcttgttgtttcggaggttctacaatcatcaaatcctatgttatgggtgacagacttagccccagaacctcatgatgtgtactggaagaatctcaacattccttatcgacaactttggatacggaaaatagcaacccttgttggtgcagttgctttcatgtttgtgtttcttattcccgttaccttcattcaagggctgactcaactagtgcagctgtctcacgcatttccttttctaagaggcatcttgagcaagtgagtgccctgctggttccttacgcatgtatatatatatggttttgtttcttctggacatgatattagaattggcgttaaaaagtaggcggaactccggtgcagtatagaacatacgagccttctctatagctttcaaaccattggagaaatcaaaatttatgttcttgatgggttttatcatctttcaagttaatcgggccaccaaaaccattttgcaggaactttataaaccaggtcatcacagggtacttacccagtgtgatcttgattctatttttctatgccgttccaccattgatgatgtatttttcggccttggagggatgtatttcacggagtataaggaagaagagtgcttgcatcaaagtcttatattttaccatttggaatgtgttcttcgtgaatatattatcagggtctgttatcaggcaactgaatgtcttttctagtgtcagagacatacctgcacaacttgcaagagcagtgccaacacaggtaatttaccccatagtccttttacatttcagagcaaaagtttgaattttgctaatgttcaagtttctacagtctctgaacattagctaggttacatcttgccaagatcttgcagctttcggattggatatagagttttcttgcgctggaactttaatagtttagtctttttcctcgttccatgat

SEQ ID NO: 36704 - DNA, 2053 bp, Arabidopsis thaliana landsberg
  unsure (1)..(2053): unsure at all n locations
ccatttgacaaagactacatggtttaagcatgaattttaaagccatgtacattagatgggtttcttactaaagtcctaggctatttcaatgagcgtgccactctgttgacagctcgagcatgatccaagcctgtttcttactatttcgtcatcatggtaacagatctaaagcgttgtttgctgcttcagactctgatctaccctcaacaattctcccagctctcactgacattttaactactatagtctaatgttagttcgaatctgcggaacactcacaatccataataggcttggctaggcttcgcataattctgacagagcattatcttaaaccaaacaaataaatctatgtaagttaaaaactgctcaaaacaatgagaacacactaaggtcctttttgaatactcattcacgggaattcataacattcgaactagtaattaagcaaaagtttcatagaattcgatttattcttctcatcgtcaaaatcgttataggacaacttctgtttctcaaattttcagtgaaccgaaattatagtgagattgacccaataaataatcggcgaaaaagagaatatttaacttacttgaaccgaaccgaacccaatatcaattcacctcttgtacgattaaaaatccgaaacagagaaattatgattctctgatgcactgtgaaccctaattctatgtttccgttccttcttcccctttccctcgttcttcacagtttgctcgttaactttcatttattatatacctaatccctattgttttttaaattacaatttaagcattcacagtggtgaactgaaatttgttactaacccagaaaattggtctggtttgtttttttttttttaaatctgtttaaacatctctagttaattccatgtcatgtgaattagccccaattagagccaaaagctgttcatgatcagaattgaagaaggatctggtttctcgaaaaaagtattggggtttgtttttgtaattttaagtaaattatatgagcttatgctagttttcacgccataaagcacaaagctaattttttcaacaagctaactaatttaagacaataagactaacagtggattgaaccctccgtcccaaagagttgtcttcaactatcacatcacaatatttacatttttatcacattattattctacacgaacacacacaataggatcacaaccagagcttaatggaagacattaaaatgaatgattttacaaagtctatgaatgggagacggacactatacgtaatcatacccggatgatactctttccgatgcaaggtttcgtttagtctgagtgggcaagagacaccgcgtgttgtctttgcttttaagccatttcgagcctttctcgtcgtgnnnnnnnnnnnnnnnnnnnncgaaagatttgattccgctcctcatataattcagaaccaacaccgcaagatctnnnnnnnnnnnnnnnnnnnnnnnnnnnaccccatctatgaagaaaccgcaaagaaacatcacagcaaacagaatttagaatgcaaaaaatacttgtgttttgtacatacaagggtgagcaaggagagcgagaaccattgataaagtagacgaacaagtaagaatcgaaatgctggccgttgattaagtagaatccgtgtaacctccttacacatctgaaagacattcttttgtacaaccggattgcgggattgttgtgtgcaatcacgtgaaggtaaacaccacggcacacagggataccagaagagtatttgacgacctcgttaataagtgccttagctgcacaaaaaagttgcagaacttaatattaacaaaaccaagcaatagaagagaagcatcaagccatcaacaaaatatccatatcattggtttactacatggggtcagaatcaataccgattccacgttttctgtatgtttctacaactccaagtgttaggatgtacaccaatgtcccctctcccctcgacgagtcatatcttattagatctaatatatgtacaagacatagaaaatctatcaacatattacccaa

SEQ ID NO: 36705 - DNA, 4239 bp, Arabidopsis thaliana landsberg
  unsure (1)..(4239): unsure at all n locations
atgagatagatcaaagattttctctgaaagaatatataattaataagacagctttttagcaatgacagaataagagtgacagacataatggtaaacaatttactccgtgaatttatagcaaaactaaaaagatttcatagatatctttcctcaatgataaaccatgttcagatgaaaaaaatatcaaatcttggttttgaagggacttatttagtttaaaaggcgtcttttgaatgagctacgttatatgttcagaacattgagtaactatgtggaaatgaaatagcttatctaaacaatgtcgcaccagatatccacacaaggaaaatggaactttggtatatggaacgatttattaaaaacatcagctatcataaaccataacacaggagaacatacagacctgatcagtagttagttctggttgcccctccaatcgtttcagtcggtacttatacactgtaaatcctgaaacgcccttttgtgcccagaacttttcaacctgtacgaagaaagtatggaaatggaccagagttacaccaatgagtaaggaaaaaacataagaccttagatgtagtcctgagaaacaatttttccttgtgaatcgcctttatcagatgcaatattagataaaagttactcaaacgaataataataaaggaatatgtgcaccagtaccttgtacagtccatcataagtgtatactcgtttggtatagctacttttgcaattgtgaccacaagttactctgacaggcacattatattcgcagcagtgctgtaaaagatgcaagtaaaacataattatatgtcaagaacgatgaggtgtatgaactaaaagactagcttaatgagcacaacaagaagagtagggagagctagaaaaaaaaattacattcttaataagcataaagaaatataacatacctttagcgccaaattccctcgttctaaaagttgatcctttatctgacgtttattaccagttaagttatgccctccctgtccagtgtaagtcactgtatctgcattgtctagatcattctcgaactggcccgacataacaatagaaacagcaagcggtaatttgtagttactatactcctatagtgggaagaaaaaagtcagatttatgagtaaataaatgaaaaatgaaacgaaatatcttatattttgggatcaaatacaataacaaaaagacaagttgtattactttttcgtattccattgacatataatcaatgccatttagccaatggttatggaatcctacagcacacatttcagctcttgaaaaaaaacggtgtccaacgtctatacctgcaagccaatgtgatcagaagtcagaacataataatgaaaacttttctgtaaaaatcttaagaccaaagcttatgctggcttggaattaaaatttagggaaagaaacaaagttgtaaaagcacaactaccaaccaacctggaaggtcaccgattatttttcttgggtacaatatcgccttagcttttatcatctggaaattttcttaaaggcttaagtcaacttgcattgaagattacagaatagacaaaccatcatatttacaagaacacaaagtataatgatacatgttgcttaacaaaacattgtgacatcttccatttcttgatagacaaaacaatgttgcatgaggcaactaaggccagaggtaagaaaaatcatgacttgcctcagttacacccttcaaatcaggcctgctcaacttagcctacaataaaaaagaggatcaaaacaggtcaacaacacagcaaaaacgaaatttattatcagcattgctagagcctagagacaaaaaaaggaaaaaccacaaacctggacacagaggagatattgcttgttaaataacctcagacactttgtcactttgagatgaggttccaagttcacgtccttaccattcagagaaacactcaatttctgcttttctttctgcattgcggttagctttggagggcttcttcggttaagggctccatcgacattttcctcttctttctcatgtaactcagtgtcatcgacacaaatttcactctttctgtcactgaggagcttaaccctctcctgtactaaacgcgccttctcatctaacgctttctgtctcactttctgaacccgaacactcgatcttcgctctgtttggtcaggagcattagctcgtttcctttttccagccatcgatcactctttttcccctgaaaacaaaaccctcgaaattccaacaaaagggttccacaaatcgagacacgaacggaacagtattacgaggaaatgggcaaatattgagaggttagagagacagacgtacctggaaaagctagcggagaagaagagacggaaggagactaagcagcgcgagattgaaactgtgaagacgaccaagatgagagttttttttttctcctcttttttttggtataattaattctttttttatttcaaggaggaaagtagacacgaaataaatgtttgtcctctttctttcccggcgatttcaacttttcggtttccctcctaaataattctgtcggatcaatggatgggctttctaaggcccaatttatttaaagaaatattaaccatgttgaaatcgnnnntttttttttttttttttttttttttttttttttgggcaaacaaccctgttgaaatcaaatcagagatttttccctgaaaaatcaagatcactttatctgtgaaagatctgcgggtatttccggaaattcaaaaggaaacagattttaacttcaaacgttgcctattccatggttttttaaatctaaaatgatacacaaatttaaggaggattagtgagaatttgagttttttaaagacttaacagattctaatcaaagatttttatagattctaatcaaagatttttctatggaatctcggttgaaattttttttgttcaagaattatgtacgactcactgccagtgtgtgaagagaaagaagagattttaccagctgctgtctgtacgttgaccttgaaatcgttatcgcaaagcccatctttctcccaaaggcccagccttttactcttttattttccttttatttttggatattcaaggaaatctcaaaagaaaaaaagaaaaaaacaaatcggttaagttcggttcggtacggtgggaggaacaaataagggtaggaaaatcgaaaccgaggcagtggtccatggggagcgaagcagcagggtgtttgacggctacttaacggagcccaacaaaaaaatcctcttttgccttatcttcctcctcccaaacaaaatctctcctcttctcttctcttctcttctctgcggacgtcttgtctccaggtatactctcccttgcttctctactttaggttttctccaatcgccaccaatttcatcatccctctcttcttcaatcattaaattggacttgggtttcttactttatcgcattgcttactccccctgattgtatctcctcctcctcgatctctctctcgggttttggtttgtcagatagaaacaaaagattggatatttcagacacaatcgatcaaagaataaactattcgtcgctctcttctcaatcagccgtaaaagtaagtactttgattcctgaatcagatgttgttacttcattgttttcaatttggacccttatgcataaatttcaattctttgcatcgcttgttacaatttttcacattggtttttttttttcttctctgtggacgactcagaatggcagctgatcagaggagaaagcggatgaacagtgccaatgttattggtaccagttctcgggagcattacagagcaaaaaggaaaaagaatgcttcaccagatggtgctttgcgttccggtgatcacatcactcttgaatgggatcgcaaccgaagtaaagtagtctctaagaaggaacaagttggtctaagttttaggcatcttcgtgaatttgttgatgtcgttcctcctaggcgtaatgtcttggcacaagtatgccctgtcccgcatgaaactttccagttggaaaatctgtcggaggtgctttctaatgaggtaatagtacagtgctattcttgtctaccatctgcgtacacctttgaaatgataagttttcatcattttaatctccgcttatttttctttttcctcaggtttggcgatcttgcctgcctgatggtgaaagaaattatctgcggcaatttctccctgagggaa

SEQ ID NO: 36706 - DNA, 1534 bp, Arabidopsis thaliana landsberg
ctaaacaaactcacatttgcgctctgctttatacggcgacgaagctcccttggctcttctattgatttttataggataaccaaaaaaacaaaaacaaaaagaaggaagagaacaaaagagatctgggtttattacaaaaccaggtttgtttatcttctaattgtggccattttctttttcattgattttgccaaaattttgttaattgtttgacaagtttcctgatgcttttatagatcttttgctctgttcccgctctctccgacaatgaacgacctcttaaaggtttgtcttatctttttcttcacacattttctctgttgcgctttgacattacgtgatcaaggagatttctgctctaatccaaacaaccttttcgtgtatctttattaattgctctctaaattttgaaattagaaactccgaatcttagggtttaaattcgcttggtatacaaggtttctcagaattgacgtttctttagttcggcatttattccgagaaaatccatgatgaagaatgctcctgtgagattcaaaaaatcgtttatagaagtaaaatgatcaaataaatctggaggtttatgttggatttagtgggataaatcaaagatcaaacgttgtgaagcttgtaagtttctaagatgatgtgacagatgttttgattggacagggttcgttagagttctccagggatcgctctaatagaagcgatattgagtcaggacatggccctggtaactctggagatctcgggctctctggtttcttcaaaaaggtaaagcttttgtatccctctgcaactcttctcaatcagtgctacatatgtgtatgactattgagatcatcatatcaattgtttaggtccaggaaatcgaaaagcaatatgagaagcttgacaagcatctcaacaagcttcagggggcacatgaggagactaaagccgtcaccaaggctcttgcaatgaaatgtaatccaaaacgagttcgattttagaccacagaaacaagttcatgatggaagatttagatgaactgaaatttggtttctctttgttttttgttccgcagcaatcaagcaaaggatggagagagatgttgatgaagtgggaagaatttctcgtttcatcaaaggaaagatcgaggaactggaccgagaggttaggcttagagatgaatacattgtttgttgcatctgtttctatgatctggtcatcttttgtttaagacttggattgatatcttcagaatctggagaaccggactaaaccgggttgtgggaaaggaacaggtgtagacagaacaagaacagccacaactatgtgagttttagcctattaaaactcaagattgtctatatacaagtatctttcagtcttccttgacgcttttttcttcggcagtgcggtgaagaagaaatttaaggacaagatatctgaattccaagtaagttagcaaattctgaaaagaaaatgttctctaagaaagttgtcctaagctattatctttgtcacctgcagactctaagacaaaaca

SEQ ID NO: 36707 - DNA, 1660 bp, Arabidopsis thaliana landsberg
caaatacccacttgttcccatgtagctattgcttcacacaggtcaaactgatatgacaatccttcaagctctccagacttgggatctttctgttgttgtacataatccaagacataataataaggtagcccatatttgctagacagtaagacaaggattatgacaagcttaactatgataaccaaatagtcagaagagagaatttgcccatttggggacagtatccttagggaagtttatagaaactttgcaataatctctacccatagcagcttgtagtcccaaaccatttgcactgtgcatcattagatcagttctaatcagctaagctccagattcagaggtaagatctataactccaaacggatcaagagggtataacacaagataaggaagctaacacagatttacttactacgcacttctggaatccgttctgcaaagactgcaacgcctctaaatcttcattggtaaaacgattagactcgtctaaatccacggaatcatcttctttatcattaatcatcttcatacttcagaaaaaatcacgaaatacaacactacaagcatgggacaatgatggagattacttacagagattagagacgccgataatgtagattagaacagcagagattccagtagtcaaacctaataagaatatcagatgcaagagcttcatcgattccccagtagaagcttcagcttcgtgatttccaggagaagacgatgtgaaattctcgatctttcaattcaaagtatccaagttccgatctaagcgagtgagtatgaaaacagcatgtagttctcattctgaagcttaagacggcttacagttctttcactttataaaacgctgcgtagataacttaagacaagccagcgaacgccgaaatgttctagtgagtaacatgaaacggcatcgatttgacggaacggtatttcaaatgagaactggccacgtcgctataaaccccttcattgttcatcttcaaaaaccctaacatttctgaaaaaatctctgcttctttaatttcatcaaaagcagcttgatgaagcttaaaagcccatgatgaaatggtgaaactttttgatatcaatggcggttttaagtgtgggtttcttcgcttgcagatcccattttcttgttcttcccctgttttactgtatctcgaaggtaacaactacgacagtataattctatgtaattcgttctcatatacttaaaattcttcttcttttttcttaaatttgttgtttagcttacaggttcagctcaacactgttgctgctgcaatggagactgtggatgacaaagacagtgatcatcatcatgacaagggttctaataagacgagtaagttactttaaacgaatttgatggatttaattgaaaactgtgcttctttttattcctatttatctttttaagtgattgcaactcatcaactagtttcaatttttgtcttttatctgttggcttaatttgatgttttagtaattttgggtaatttgtattgaaaggtaaagcaccagagtggaagaaattgaattcaaaagaccttgggataaccacttctatgatttcaaagcctacaagaatagtgctaaatggccttaagagtaaaggttgattctttttttaatcatttgattgaat

SEQ ID NO: 36708 - DNA, 827 bp, Arabidopsis thaliana landsberg
gctgatactaatttccttttttcttgtcaagttccacgaagggtaaatctgtcagatcaggtattccaacgttcatgaccaacaagggtagtttcgtcaaatatagtatatttgaaaattctctcttttcgttctctcttaatctgatcctctgttctgtaagaagaaacagagattataaaagccatgggactaatgaaaaaaaactgtttgtttctgttccatgtaacaacggtgtgtatcaaaagctaacacgaagtacagcaagaattggtctgtttcaacataaatttacataaaccaaaattacttttacaaacaaaaaaaataagagttaaaaatcctcagtttttacattctgatccaaatttacactgagattcctccactgcctgaaacatcatctggaggactaatggtgatccaaagcagcgagacggtaatggacacaagcccggaccaaacataaacaatcgttggaacctttcctcttcgacccatcaatcctttagcaaacggatacatatgagtcaagacccataaactaaagaatattcctcccattaacttgccccattgcggaatcacactgtatattgttctcgaagctccaatcactatcgcaacaaggttgactatgatgattgtaagcggcatgatgaataagcctgtccatttcacaatgtaaagatccgcaaagatgtcgtcttcgtcttctcctgaggctttcgatgtcagggtgaaggagatttcgattccggctataactttgagcaaaccttgaacgactgctgcaagatgagcgcttgtgcctccgattaaccaaa

SEQ ID NO: 36709 - DNA, 946 bp, Arabidopsis thaliana landsberg
acatagtttgcaaccgaaagaattcttagtcaccggaaaaagtcgtaacgagcatcaatacatcaaggctcaacaatatccgatgaacatcaccaccaaattcagagaatcccaaacaaacttcgccgttagatctgcaaaattgaaatcttccatggataaatgcagttcatgaattccgggatcatcgacttaaaagataagctgacaaggcttccattattaaacctaaaaaacaggaaagataaaacgattcacatgctttggtaagaagaaattagcctcaattacgttaaaatcaatccaacgacaactccaatccgcaacttcaaatccgatttttaaaattgagaaaattagcttgaaaatcaaattaagctctttaaacaaagaaggatcagagaattatgcagtcaaatcaaaggattaaaacgcagactaaatccaaacaaactaaagcaaaatgaatcgagagaaaacgaaaataaaaacaaaaccccaaagccagccaaccgtcgcttaagaagccgacggatgctagatgcaagctgacaaacgctgtgaaaagcattgacggacggcggatcggacatctctgctaacaaagccagatgatgccgtgaaagaagctgaccaactactgcatgagaagccggtggatgtcagactcaaagccagcgttaagaaattggacaacgttaatggattttgtggaacatcaaaagaaacttggatgtggctctctctctaaaagatactagagagataagagagagaaaagttttgtatatctctatctaatttgatgatactatttataatcataatataaattagacgatgtaattttatataactattcttagtttcaatcaaaaccaataaaaacatgtgggtgtacgggtggtacctaaaccaaatctaaatccaaagcttaagaaaaatg

SEQ ID NO: 36710 - DNA, 4944 bp, Arabidopsis thaliana landsberg
ctaagctttctcgaatgtgtgttttcgtgatttggcttcgattcaaatgtcaatcaaaattgaatcgacgtttaaaccaaaaacggagacaatatataaccaaataataaaaagaaattatagtccacggtcggatataaaaataaatggcaaataattcaagttttggtgatacactcacattaatcaaataagagacgaagatttattggtcgaacgtattccatgcttttgttgtccacatcggcagaaaaacaataaaagtatatatgttctgagaaaatatcagacaatgaatttaatatgttgatggggttcaacgtccatgtctaggtagaaaaatcaataacatgtagtactaaatgaaatatgtttaggttcttctgatttacgcatgtaaacatacatttatactcactttatgcatgtataagtcatatgtagatgattaatttactatagactaagctacgtttatatgaccaaattagctaataatatatacatagctgaagattatttacattttgcaaaagtggaagaaaaatcacaaaacaaaataaaaatggtacaagaaaaatgattttataatcaaaccagcaatcaaagaacatgcctttaagaggacattggacccacaaatattcacatatatcaaaatatagataaataaccatagtgaataaatgaatatagggctatattaaaatataaattttaacatactaattttattacaacactaataagtaataatactaaattttattacaacactaataaggtctcattgaattgtttcattatttcacgtctagttcttttttttttttgtagaaagttccgatctagttctagatatggacaaataattagagttgaaataacatacttttatgtttttcgggagtcaaccaaagtgatgcacaatgttgggaataattcttaacaaatcaatcacattgtcatacttgtaatcttttatcaaatatatgtagctattatttggagcgttcaagttctttacactgttttttgtcgctatgttctaagaaattacgatctagctttacattctactttgcatctccaataactgttgtaaggtcaaaaaaggggtgaagaagcacttcattaacgatcagacaacaaataaggagtatatacattttagcgaataatcagcggaataaaaattgaaaagaggatgggagattatattaccgagaatcaggtgcagtggtttcctttttgccgtcaaattgctctagtggttggagacccagactccgctcacctacaatttttacacatgcattcttaaagattgtttgaaaactcaatcacgtgttgacaattacggcatatcatttagtttatcaaatcaatataaggtataagaaacataacaacctctggcaaggtgactcaagaatggtgcatgttcagtcttagcaatgtccatcttcaatcttagcaatgtccatgtcatctatttttccatttacagtcttcctatcatacataatcatcacgttctccggtctccagtcttgatggattatatgtagtctatgaaagtgttcaagacctaaacaatatttttggttcacaaaaaccgtcccaaaaaaataaaagtataaaattaatcgaagattatttacattttacaatgaagctgcaattagatatataatatacacacaactgaaaattatttacattttgcaaaactggtcgtagaaccacaaaacaaaacaaaagaaatcatttttttgtaccattattttgtggttctactatttttaagattctttaaggcatgatattggacctactattttcttaagaaattaatggaatttataaatatattcatacatattaaaatatagatgaatacaaaaattacagtaaatagatgaatatagggctggattaaaatatatattttaacatactaattttagtgcaacactaataatactttataaaaaaaagacattaatacagaaatcaaaaatccaattaattagataggtattaaaccttttccgaacattcagtcggcgtcgagctaattcacgattttgggtcattgggtctttaggcccatagttattgtaatatatctaatttgggcttacttaattaggccttttattgtagaaattgggctttgtaaaaatcagacgagtatattacagtttaagacacttgaaagtaaggaggaaggacggaagagatgcttgcgaaacaaacgccattaacaaaacaaatgctctccgagctcttacgagcaagttcttcaaagccgaagcagcttaagaagatccatgcgattgtactaaggacaggtttctctgaaaagaacagtcttttaactcagctgttagagaatcttgtagttattggtgacatgtgttacgcacgccaggtgttcgacgaaatgcacaagccgaggatcttcctttggaacactcttttcaaagggtacgttagaaaccagctcccttttgaaagtctcctactttataagaaaatgcgtgatcttggtgtccgtcctgatgaatttacttacccgtttgtggtgaaagcgatctctcagcttggggatttttcctgtgggtttgctcttcatgcccatgtggtgaaatatggttttgagtgtcttgggattgttgcaactgagttggtaatgatgtacatgaagtttggtgaattgagttcggctgagtttttgtttgagtcaatgcaagtcaaagatttagtggcttggaatgcgtttcttgcggtttgtgttcaaacggggaactccgctatagctcttgagtatttcaacaaaatgtgcgcggatgcagttcagtttgattcgtttactgtcgtgagtatgctttctgcttgtggtcagctaggctctttggagattggagaagaaatttatgatcgtgcgaggaaagaagagattgattgtaacataatagtcgaaaatgcaaggcttgatatgcacttaaagtgtggtaacactgaagctgccaaggtattattcgaggaaatgaaacagaggaatgtggtttcatggagcacaatgattgtaggatatgcaatgaatggagatagcagagaagctttggcattgttcactacgatgcagaatgagggacttagacctaactacgtgacatttctcggggtattatctgcttgtagccacgctggactagtgaatgaaggaaaaaggtatttcagtctcatggttcaacccaatgataagaatctggagcctagaaaagatcactattcatgtatggttgatctactgggtcgatccgggcttctccaagatgcttatggattgatcaaagaaatgccaatggagcctagttctggtgtttggggagctttgcttggtgcttgtagggtttacaaagatacacaactcggaacaaaagccgcagagagattgttcgaattagagcctcgtgatggtagaaactatgtaatgctctcaaacatctattcagcttctcgtctatggaaagatgcttcaagaataaggaatctgatgaaacagaaaggtcttgtaagagcttcagggtgtagctacattgaacatggtaacaaaattcataagtttgttgttggagattggtctcatcctgaatcagagaagatacaaaagaagctgaaagagattaggaagaagatgaagagtgaaatgggatataaatcaaaaacagagtttgtattacatgatgttggtgaagatgttaaagaggaaatgatcaatcaacatagtgagaagattgcgatggcgtttgggcttttggtggttagtccaatggagccaattatcataaggaagaatcttagaatttgtggggattgtcatgaaacagcaaaagcaatatctttgatcgagaaaaggagaatcattattagagattctaagaggtttcatcatttcttagacggatcatgctcttgtagcgattattggtagtatctcaatttctcatcctcacaagtgtcaattttactctttcaagtgtgtgtgtgtgtataatatgaaaaaattgcatacacatataaacctccaatagaactgtaaagttttgcactgtttcattttctctatatagacaaaaaaaaaactagaaacctaaagaactgtgagtatcaaatagctaaacatgtccacctaatttaaatgttcccgtgatttatcaacttatcatattattacattcaaatattaccacaacacttgcgatctttcatgcttacaaaaacataaaacacatacacggttcaacaaaaagccaaacaaaaaaaacacataacatcatattgaaaatgcagaaaaaacgacataatagtgaaaacacatatctaccgttcatactgaaaactcatcatgcagccgtcgtcctcccctgagtctcatgacccttagtggtagtgtcatgtggcttagaaatatcatattgtttaacatcttgggccttgttctgcacatgctggcccatttctttgcccttttgtcctgcgtagccaaccgcatcagccattctcctcttagcatactccaattgctcaggcacagtcctccttgtcccacgaagatagttcatgacccatgagattgagctaagcccggttagaccgaacatccccgaggctaaaaagcctgtcattgcaagcccgatagttagagccgctgggactataaccgggctgaagaggagaaatagtggtaaagcaaccattaagccgatcaccgaaccagctagaagtaatccagccaaggcaagtagcgaaccgacgacagggactccaatcaacagggacaataccttctttttaaatgatacaagttaacaaatcgttagattcaaataatatatatgcatgccaatttaaccaaaagtgtatacatataat

SEQ ID NO: 36711 - DNA, 3077 bp, Arabidopsis thaliana landsberg
acccaaatagttacctcataatgtcgtaatctaacacatagcaatagttccaattacattgaaaacgagatttatttacttaaagcgatatagtaatatgaaccaccattacttccacacgattgtatgattaagacattcgtatatatggataaaatgtataatgtatactacgtttgtgtatacttttatagcaaaaatatatgaatccaagaagtgaccaatcataaccaagattcaaataggttatatagtgtgtgcgcgcgctaattgtagataaaaaagtaaatattaagaaggattcattacattattctctcttgcttcagcttgagcaagatgcattaattcatatcattcttgttgaaaattaaccctcatggtgaagtgtttttttttttttttacaatggcctaatggtgaagttacttgaggaagaagtagcctgacccggtaagaacaaaactgaggagcccagctaagaaacaaatcctttttggtaattttccgtcatcgatcctcaacaccatggcttcatagatcggtaagcaattcaccaccgcgaaactcgctagcatcagttcaaggacgggtccttctccccaagtgaaaataccatataggccacgcataaaagctagcagattcatgatggcgaccgtagtaatgggcaagaacatggacgaagagggcccaaaatcgaagatctcttgctcataccgcttcatttgttcattatcgtcgttggatttactcgtgacattgaatccttgagtggagaggtttagggttttgagagtgaactctgtaaaaccaaagaagaaagaagagagtcctctcaccatccacattctttgatcgttccaccatttccgataagttcctccttccaataaaaagtttgttaaatcttgcgcgtacccaccgagaaacaagataatgtagagccagagccatggatccgatgccttggggtaggcgctaactccatgtatgagggcaacttggggtaaaattccatagacaacgagaggaatacaccaaaatggccaaaatgcatagtggcaataacctaagctcattaataggctcaatggcttgattccataggtaagtggattgtatcttgaaaaagctacttcaagaagtccaacggaccatcggatttgttggcctattacatccgttaggcattttggggagtctccataaaatgcagcttttgtcgggctgcaaaaaattgatctccatccttcacaatggagcataaatcctgtgaagtagtcttctactaatgacccatatctgaaacctatctgtaaagtttgacaaatggctagtaagtaataacaaaacaatgtcacagaaatcaagattggagagtcgattgttttacatgtgaatgcaaacatacttttttttcatttttttcatttttatgtgtgttttgtgtttatgttaattacacaagaattttgttaatatgtttataaatatggattttgagaagactagttgatgtaaaagaaacaaaatctgtaaacataaccaaaaaatcaacatacataaaataaagctaaagttcattttaatcttaccttggatccccaattggtgttgcactcgtagttacatcctgctacatcgtgtgccaacgccaaaatatcttgggctttaatgggcttatcggcaatccgatttggcccaaatgtttctatctcaggcaaaatcaaagtagtcggaggcccataaaacgcccgtcgattgaagaaacacccagttcccatatgaactggtcccataagtccatcaaacccaaccgtgttgatgtcaaatgggcgtttgagctcggatgcataaatatcatttttgtttactccttgaaatttttgaggaaattgcacaaatcctaaatcaaaattgattttagggtctgacaaatagcacagagcatgaagtggtgttgtaggattgtttgagtacatgtcacaatctagtgttagaatgattggtgagtttgtcatcacggcagatacacgtaactacaaagaaaatacatgttgtggttaacgaaatattacaaatatagaaatgacagtttaaccgagatatggattagttgataccaaagtattaagagcaccggctttgaaataatgtggtgaaactttactcttttctcttgaaacatatataaggtttggcatcatctctgtttcgttatgttgtagcaccttcaccacaaattaatagataaaaacgagtttttagaaacattaatttgtgacgaaacttttaccatgcattacaaaatagttacataccataataatggtaggatggtcatgacgagtgaatttatctgtccacagatcgaacacacaactaaattgatcgcatgcgataaacgcagtctcaacttttccgctctcgaccacatgttcgactctactcttcatgtcttcgtacatcatctgttccaccacacaattaaatatctttttctcatgggtgtttcaaactttctaacaaataaagacttctctgctgtcattaagaaaactaatacatactcctatcgtttaggagaagaaatcattaaagtgtcatgattgtactgcaataaatgaataggaaatatcatgggtatatgtcacagtctcccacaaacttttggggtcgtaaaggacaaaaacgccattaagattgtcgacaagaacgtcgtaaggctttaaaggacaacagtgactattaatctgttatgtgtaaatttctgttgacctatgtattaaacctaattatacgtgattagttgatggtaatcaacatataaatccaaaccattttctttatatgatatttacttagaaatagaaagaaaaaagtgactagttgataaatactccctatgttcctaaatcataactagtctaattgtaaactttttcccacatattaaaaaaaacatttaaaattgtgataaccaatgcttagttttttgtgattcaattgtctataaatctaaaccaagaatatttgattattttttgtgaaatctataatttatcatccataac

SEQ ID NO: 36712 - DNA, 894 bp, Arabidopsis thaliana landsberg
gactatctgcaagatatatttaaaaaaatatttaattgaaattacaattaaaatgtttaagaacgaatagagattttataattttttttaaaaactcatcgcttgagcaccaagtttcgcattgtaataaaaatcctaaagtaacaaaaccctgctgaagtttcccatattaaaaccctagctagaccaaaattgtgagcggacaagttcacacttttcttgacgattccaaaccactttggctccgattcagatcccgatggacgctcccgaacaatctttttcttcgggagaaatccttggccgtcgaagatcaagaactcgccgtcggaactctcgaggactcccacgcagcgaaaccagagaccgacgctgcgattcagcttcccaacaaatccaagcctgataaatccgccgtcgagaaggaccgtgaggattttcgggaagcagtggtcaaaactctcgatcggcttttgttcgtccataaatctttcgatatctaccgtggcgtggctggactttacgatttcggtcctcatggccgtactgttgaacttaatgtacttagcctctggcgtaaggtgaggattcattcattcacatatatctctggcacaattcggtagacaagagctgattttgaattttctttgatatacagtgttttgttgatgaagaggacatgatggaggttgcttgtacagctttgacaccagaggccgttttcaacgcatctgggcatgtaaaaaatttcactgatcttatggtcaaggatgaggtagatggagcatttcaccgtgcggaccacttggtcaaaagttattgtgaaaaccgaaagaaagatcctaccatctctgctgagaatgctgctgaattggataaagttatagctca

SEQ ID NO: 36713 - DNA, 608 bp, Arabidopsis thaliana landsberg
tatatgtatgagaaaagcttggttttttttttcactactatatttgatttttaggttgctattgtttttttctttcacaaacactatgaatattaagatatcgggaagagactctccgttagagagaaccattcaggaaccgatgtaattagatgatgatgatgatccagctttgtatattgtgttttgcagatcataccagtatacccgaaaccattcttgaacaaggaagacggttatcatcaagtgttaagaagtgatcctaattctggtttagttgcagaaacctgaagtcgacttggttaaaggactgaattggatttggattggtattggagccggttaagctctaatgttcggttattggaagaagacttggtttgactcttgtttacaaggagaaacataagactcttgttggcctagagggtttactaataagacttgtatataaggtctttgtagtcgtctttcttattcattccgttagaaaaacagactctgtaatcttcttcttcctcttgaagctccattgttgtgagctgagagaaacacttctttgatagtgaattgctggtcagaatccagccgagacgtaggcttgctca

SEQ ID NO: 36714 - DNA, 2210 bp, Arabidopsis thaliana landsberg
  unsure (1)..(2210): unsure at all n locations
ttcgtggattcggtgcctggacctcgttctaattcagatgaagagaagccttgaattgaaaggtagagacggccataatcatctacagtcaccaagcattattaaaataacaagtattgatatataaatcagagtattatgaataaaatgaagctgcagttgtagtctccttgtatctctattacaattctcttaaatgaagcaagaaataggcgtagactagtttccttttcttttatttgtttcaatcctatgctttggtcatatgttatgttgtagttctctctaaatggatattttctttaaaaacttttttagacatatgtctaacaaaactctgtaaatgtagttgaactctttagcagcattttgcatcaaaccggatatgagacataatacgcttgagtgtacttataagaaatttgtctaaatgaggtgagagcgtaagtgtacttataagaaatttgtctaaatgaggtgagatttatgtttaacagatcaaaaattaatgatttatgtttagtctttcgcgttgtcgaatccggaaaagaagcacaaagcttgaaagtactaacgaaataaaaaggcctataatcacacaaatcagactgtacaaaaaaagggaaaaaaacttaaaagcatcaatgtttcttattattcgatgatgctatgacataaatgcttataaactattcacaaagtcgttgattcagtctatcacgagtttctaagtttttttacatgaaggcttactagagtcaggacctcgcttggcgtacaaggaaccagccgctgatatattagaaggcagagagaccgtcgcagagagaggttggaaattagtgtttccaacgaaccagtagagagcccatttgaggttgcagagagtatactttagtgctttggtccaactctcttgcttgttgaagctctgtgttattgaataccaaataaatatgtccttttcgatcctgcaaaaaagattttatatgagaaacttgtaagtttttccattgcacccattaacaaaaaaagataagcgacgacaaagattttggtctaaaagaatggggacttgcttgtatggaaggttgaggcaattatctggtggaatattgttctcttggtcctttgaatttgcaaaatcagcaaagtctttaagacacatcaaatacagtgtcatggctttatcgtaccgagtgctccaaaacaagttaacaggaccaaacctgccgaagattatcaacagcttttagttaaaaagggtcaagaaaaacaaagacaaaactcagcacaggacatctgttttcagttcaaccccaataacaaaccaggacaagaatatgcaatttacttacagctcataagtttcgttgttgctgtctacaattctaggataactccccatcggctgtattttaacttgacatcttaaaaggggttactggtcaaggataaacttcatatacagtcaacagaatcaaacaaaaagggtaaaataaggaaaaggactgtgagatagttataaggatactgaaactttggccggaaatagttacacatcgtatggaggagaagacaggcttggccccaagcagcattgatctcatcccactcaacctaaatatgtttcatgttgtttagacaaaaatatgagcagaacgagattataaacatacaaggaatttttttttacttacttttatggcagggagtcggccagggcgaaaattgttaattgtaccaaattccccatcattccgtatggggaaggcatcaataagcacatttgtcttatttaataactctaaatgtgcttgtgaaacttcaatctttgccaagattgcatctctctcttcctgttaacaaagacatatcttttacactagatctaagaaacgagtgttacactgataaagcctaaacctaatcaagtgctatggctactaataccacaataagagagaactattatcaagtgctatgaatactaataccacaatgagagagaactattatcacgannctgtgaagcaaacgaatgaaggctctggactctctaaagtatcatttagtaaaatgaaaaataagggagaaccctaagagtatcaccagaaacgcacctgatgggcaattaaattgaaactgaaaattattgaactcttgccaattcctattccagaaaagtcggaaaaacattgtcaaaaaat

SEQ ID NO: 36715 - DNA, 4742 bp, Arabidopsis thaliana landsberg
tattcttgaaaagagtagaatcactacttcattttcagttatataagatcaaggtattaatttttgtttacgatttatttacgttgctaatttacaattaaaataaaaaatattatgtaaatataactttaattatttataatatagttgtcttatagaacacattcattttttaaaacattcatattataattttttaatgattacatttttgttgaaatgtaaaaataattttatagattgtatttgtactatttttataattagaattatttattattgtaaaatataaattattactaaaattttagtaaattaatttggcataattaatattttgtctacattgaaggtcctatctcttcacgtcgacgaaagaatgtaagttatataattttttttatatcccatttatacgattcattcatatatatatatatatatatacatttaaatatttttcatattttttagaaagagtattggtcgccttctgaagagaatattgtgcttgaactatatgaagccgggcttgttaaagtaaactataatacatatggtctaaaaataccacatcgaaatcgtattattagcgaactattaaagaggacggaaaaacatgttaatagttcgataaaggctaaaaacacgatagatacattgaaggaaaattacaaagaatgggtagacttaatggataaaacaagtgaaagttcggatcgcagaactggagttatcggtatggatgacgattggtggcaagaacgtgaggtggtatgtaacaccccctcccaaactaccgaaaaggcatgccacttttcctagaaaacattattccatacttattatctatccttaacacattcacattcgccttattcaagaagcattcttattaaattcataaaaagtaactggtcttaagcaacaccgaaaactcgcaaacataattaaagaaatttaaaggaaaactgtgtctttgtattattgaaaaataaacccaaatcccaaagaacaccatgaagagagacaagcttgagcagctattcaacattatcttcaccttggaaagaaggggaaaaagggggttactcattgagcaaaacatagaacaatttcttaagctatacaacaatcatcataacacacaaccttagagcatctccatcaataagaaactcaacaaatttttcaaacaaatttttttttagtattttattgtaatttagttatataattaaatttaattttttataaagatgaaccaatgtaatagaaaaaaatattatcattagatagagagagtatctaagagtttctcatatgagaaactttctactctctctctctttcttttttattattgatattttttttattatgagaaactctattaaaatacttccaatgaaaatggtcttagataccagcaatccacctaacatgctttaacttctaacaatatattcataacaaccatcttattatgggttaagacaattttagtaaccgataaattgatgagagtaaagaacacaaaagtgtttagcaagaattatattagactatcatcataataaagatgcaagatttattgtcttgtataaagatgaaataaatctaaggctcatcaaaatgataaactaaatgtaaataatataattaaacataatatcaaatttactaacctcagatattgacaatccacaatgttattaatataattagacataatatcaaatttactaatctcggatattgacaatccacaatatttccataatcatatcttgattttggtttgtaatctctatcggtttcgactcggtttgggtcgatctcatcaatcttccaatagaaatgtcattcgaaatcaactattgctagattcagaaaatttggcaagtttcagtatgtgttgtcaaccttgggctcacatggtgttaaacgtatgcatgatacatattctggtgcatcaataatgtgggcacgaggtttgccttgtgtgaaatgatgtggattatgcactaggtatgaggccagacaaaaagagcatatgttacctgctattaaaagtttagtagagagaggtggtattgtttacgcactcctctgttttaattcatgataatgacttttgaaggtttgttaacaaggcaaggaagttcaacctatctttttatatacaattaaataagaaatatcgttagaatatttttggcggaaaaagtatcgtcagaatatttttggcaggaaaaatcactatttcattatgttaacctaaaacatttttaaataggtgtaaaattgtcattaaaaattaaaaagtgtataaatgaaaatgaattacaagaaggggtggaatttaaaaggggtagccttggatgggcattcctaacaatttcttaaattcttattatattttatgttcattattatacataaactcataacattttgatagttaatctcatgaaattactagtcatttttttattaaactaaaaatcaaccaaagaacaatcaaaatttgtttttcttattccctcctcttaactagccaatcaaaatatagatggacatttttagttcaatcaagatacaatatgttgtagtgttaatttctcgtaatgcaaatgtaaaggcggacaaattggcacgaaaaattcgtactgaaccgcatcatatcacttttgtaaacaattttcctcacaattggctcttttgagctctaaataaaatctgttgacaaaaaaaaaaaaaaaatcacatccaaaaaatatattttaaaatcctctataaatcttttaaaaaatcttttaaatacccttgtaaacccttaaataatttttgaaccattttaaaatctcttgtgaacccttacaaaaggttttaaaaagacttagaagagtgttaaaaagttcttaaatcctttaaaaacccgtgtaaatcctttaaaaatctcttaaaaatccttgaaaatctatttccagccaattatttttttttgtggaaaaattttgacgggatatttattttcgaaatattttaggcgggaagataagtatttcattttgttaacctaaaaacattttaaaagtatgtgtaaaatggtcattaaaaattagaagatggtagaaatgaaaatgaccaatagaaaagggtataattgaaaagagctagtggcattcttagcaatttttcttaagaaaatcaaattagagtatttatacttttatctttttggtctactaatatttatgatattctttaaaaatgtattcatttaaactattggaaagggtataaatgtaatatataactttttatagagtatataaaattaggaaatttaaaaaagaaatatatgaaaagttttccttgttaatcagtcagtatttttgtttatgtaagaaatatattactcattttcttgtgttcttttctatcaacttaacacacatgtcaaaacgctcccagacacaggaatgagacatcctctacacccatgtcttctgacgccggtgagacttcttgccgccggcgtcgggataccctcttaatctttttcagttcttctcaatcctttggttccttttatcttcttctttaagcgtttctttcttgaaaaatccaaaattttcctccctaagcgtcttcttctctgtgggtcctctatgcgacggaagagtgaatcgatactctaccagctctgcccccaatcatccctcggacgtagctgtgtcttggaacccgccaaaagaagattcgcaatactccaccaccgttttctcctaaactccagagcagtccttcaccaacacatcaattggctctcgatttgtaatagcaccgacaacacctttagtcccttctcaccggatttcgttgatggcaggaaaatctcttggaccatcagtggtgctttttccggtaagaacatcgacgacacacgacgagctcctttgctggcaggtggttccccttgtgcttcaccgtcgaccatcatctcagagttacacgacgacattgatctttcttcccttctcccaaccgcagcaaccctagggtttggtgggatgggacttaatccttttgaccgcccaaatgcaacaatcttcgctcttggtgggctgggcctcactccgctcggctgtccactaactctaaacctaatttaacccatatctaggtttgatctttttagaactttgcctgatctctctctaaaacactgcttcacgataacggatggttgtagactcaattcaatcgttggaactttatttttagaggagccttgcaattacaactctcgaaacatgttgcatagagtagattggttgtcccagatgcaagtttagttttgaagtttaatggaatagttttgatctcgaaacgtaggccatgtgacgctgctcacgcctctactcttttatgtgaacatataacgagtctgaaccttcccactattacgcttactcatctagtcccatgtcttttgttgggcgatgcatctcaaccctcttggatttgttggataaaaccgcttcggcttgctcgatcaacctctttctcaagccttcttaaaccgaataatcttggtcttttgattagaagattatatgcactttggacttgtcatcttccaatgccgaacgcatcaagcttactcttctaaggagataccttccctggaaccttactcctctaaggagatatcttctctaaaaaaaaacgcg

SEQ ID NO: 36716 - DNA, 3812 bp, Arabidopsis thaliana landsberg
ttacattcatctcaacccattgatcagtaacttttaaaaagaatggtatttttgcgagattgaatttttgttctcaaatccgagttatgttaaagaaaattagtttatattaatttggtagtttatacatttaagtacatagaaaatataaatgacatctctgccattaggttaacattttcgtgttgctccacaaaatttcatcacaaaaggacaaaatattctggctagatcatactaaactacaaaatcaatcctcgtttacataaacactctaaatagagttatgtacgacatcatttctaaactatgataaaacactaactttcctcaactatttatcattgaatacgacacatattgcaattagctaggtactagcagtagctcgaacttcgtaacattgcttttgtaaatatcaacgaatttttaagttaccagtgtactctcaacatttgcctaacgaagttgggagttataaaacaattattcaaataattaagtaccatcacctatgtatattctcatttctcaatacgttgagagcgtcaatgttttgcgtgcacatgcacaattttcatgtgttgagacttgagagcgttaaaaatctttagagatatctctttatgaacaggaaaatccagccattagcgacaattatgtcgttccctccgttaacttctttcgaaaacttgatccgagaagtaattttttgagtattcaaatttaccaatttgctctacaataatagttttatttgtgtttttgtataaaacctataatttatagttaagtgttctatgaatctcttaattttttttgataaaagatctgcaaatttctttcaatatgcatatgtttgatcgtatattttacatgtaatttgaggtacatgcactttaatattttaggatatcgcacgcacctccaggtgtataatgaacacacaatataatgaacaaaaatcccaaaaccaaatataatgaacaaaagtcgaaaaaaaaagtgagaataattaaacaagactacttctgaatgtagagagagagtgataggctcctcattaaatagatggacgagaatatggacaatactagagatgggacctgactttattcgatggcacattactaaatgagggcagtattttcacaacacacaaacaaatttacaccgacctcgtgtcactttaagttttgtttctagagaaacatgcactcagtttaatgccacctcaattttcaattaccatggacatatgaaaacatttacaacaagttcataataacattgtttcaaattcaagtatacaattcttgaaaagagaatgactagtttatggacgagacgagacataggttttgataaatttgcatttgtaggctttgtttgcatctcaagtttggctactcgaatttttcgttaactctaataattacacctatcgacaatctacatacttctcgcgtgatcgagttgacaaattctatagtatcagtatatcacgctcatcaaatcagaaaacaaataccattctctttgttaatcattctgcttacgcagcaaaactttaattgagtaaaactattttgttagagattgtgaaatctagaagttcactaattacttaaacagggcagacgggcagggaacaaaacgcttccacatttcttttatcttcttttctctagtcctctcctgtctttatcttaaaaaaagttaaacccttttccaatttcttttgatactttaagaaacttaaaatgaattagttcaattatgattttaaattacccgctaatcaagttgattatgcctttaataagacaaattcaatatcattaacacacaaaagaagaaagaaaaacatttcaattttgcattaaaaagcagaagagaaaactcaaatgttaaataaaaacaatgcatgaagattatgaatgaaacgagtatttggagattcattagctgtatcaaaaactcaagcaatgtttaatctgactcatgttaaaatctgatcatcatgctttattactactacccaataaagtcactagctcaactttcttcatctttgaaattcctttgagtcctcttgattttgctatggctctaagttctaccaacttcagtgcactcaaatcttcgtctttcgcagtctcttcctcggtagtcggtattgagagactcgtcatcatctgataactcatctataacgaagttatgatcctcctcatcttcatcttcctcttggtaaaacgactctagtttcagctctgacactgattcgagaatagcaagttctggttcagattcaggttcatactcagcctcaggttcaggttcatcatactcagctgcagactcaggctcaggctcgtattcaggttcatcacgcgactctacttgatcctttttctgggtccaagtcacactgtaacttgaagcttcatcaaaaatggcctcactagaataactggcttgagatttatgtctcggtacaggagaattacgtttgaagcttgatgctggcctggtaaagggtgttgcattatgatctttgtttcgcgaatcgaaacgactggaactgtgattttgtctttctgaagcatcatcatctctttggagctgcttctcagaattgaaattgctaacttgtttcttgctttgttctcctgagtgcttcctcagtaacttaagaagggagtccactgtctcactctcttttcctccctgtcctttagaagcttcttcagtcttcttttcttctttcttagcagcagctcgagcccggagctgaacttggactttcttgaaaagctccactatctctttctcttttggtccacgtgattaagtagcctggaattttggggaactggatagagagagtaaaggaccgtttttgaaagacaacatgtcgtcttcaagaccaccatctactaaaccatccttatcttcgtttcgcctgtttctgcctcggaaaccatgcttattgtttcttgagaaatcaggattatttctcctatggcctgaagaacttgctcagcacacaaaggaagttttgttagtagcagattgtagatgtccattctcgatgcaacgtttgttaattcgacaggacgagcaaggcaatacggcgagggttctttttgacacagcagatttagagacgctcctgctatctgaagctccataaactgtatttaacaaatcaataccatacagagtaagccaaaccgctacatatataagtatataactaagaacttcagagtataatctgaaacagataccagacgacaaagagatttgaacattttgatacaaaacaagtatattgaagcttaacaaaatcataaagtataaaatcttttcactttctaatgacgcgatgcataattgaaaatctgacccttaatgctgaataatgtgatgaactaaagcacacagcagtctttacctcggatccaacttctaacatattcaaaaccttaactcacagagccaatgcctaaggaattacgcgtgaactaaagaaaattaagtaagtcctacaccgaaatagcttcgtaaacatcttcagggcacaaatgtgttcaaccaaattctcaatgtttcttagatatctgatcaaatgtcacagaaagtaatgcctaacacaccaaatttatgcaaagattaaacctttcatagtatatacctaacataatctaggtagctaaaacagtcctgatttttcgcaacataatcttactgggttctgaaaatttaacataagcaaaaatgcaaatttttgttttggattaaat

SEQ ID NO: 36717 - DNA, 2143 bp, Arabidopsis thaliana landsberg
gcaacaaaaagatgaacgtctcagattttttttgattcaattttaatatacaaaagcgataaatatcaagaagataattgggtacgtgtattgtgtactatttcaaaattgatatttgcttccataacgtaacgtaacgtaagacccaaagattaacacttggtttcttcatggtcgtagattattaaaagtttataactaatgacgacaaagtttaaacgaaaaacaatattttctcaattttcactagttttttttttattccagaaaattattagtatacaaccaactatttttacgattataaacttttatttgatgatattcataatttagaaaaaccttaaacggatcttaatgtcaatatcatcagctcatgcaccgcctctcggatatgttgacaaaattaccccatacaatataaaccaccaaaccataaccacaaagggtatattcgtatattataaaaatatctgaatagtcgaacttgtcgttacactcaaaaacgaaatctttccctcctctgttctcaatctttctataaattctcttcttcttcttcttccattttcccaacaacacaaagtctctctctctctgataaaatcttaaacccacctcgagatcatagtcttcatcaattagccataaaaaagcacaatgctttcttcaatcaaaccatcttcgtcttccttctccaccgctatctccggcagcgtaaggcggtcaattcctacgacgctcaatttttctcctttacccatcatcaaaaactgccataaccaaagctttcactctaatgttgtctcccatcaaaagcctctacacatttcatctgcttcgaatttcaaacgtgaggtcaaagtcgaagcttacgaggcagatcgatcccgtccactggacatcaacatcgagcttcccgatgaacaatccgcgcagaaactgaaaatcggaatctacttcgcaacttggtgggcacttaacgttgtcttcaacatctacaacaagaaagtcctcaatgcttttccttacccgtggcttacttcgacgttgtctctcgcttgtggttctttgatgatgcttgtctcttgggctattagaatcgcagatgctcctaaaactgatctcgagttctggaaaactctgttcccggtaagtaattagggtttattgtgtgtagttgttgcctcaaaagtttcaatcttttttttttacgattgagagctcagtttctggaatactctgtttttccggtacgaattcatgatttactctgttttctggtaaaaagtcatgatttactctgttttacggtaagaattttagattctctgttttcatgtaagtatttatatcttctctgttttcatgtaagaatttagtgtactttcgagcatgaaactgatcttgagatctgtctttcggtaatggtttaggtattttcatgatgttgttgcttgatggatttataattttgtttgttgtctgataatgaaagagtgtgttttgatcgatgttcctgtttttttcttattcttcaaggtcgctgtagcacacacgataggacacgttgcagcaacagtgagtatgtcaaaagtagcagtttccttcacacacatcattaaaactggtgaaccagctttcagtgtcttagtctcaagattcttcatgggagagactttccctcttcctgtctatctctctctcttaccaatcatcggaggctgcgctctcgcggccatcaccgagcttaacttcaacatcactggtaaaactcacaatcctagaatattggtttcacatggtgacatttctttgatttatggtcttatgtgaaactttgtggatttttttttgtagggtttatgggggcaatgatatcgaatttggcatttgtgtttcggaatatcttttcgaagaaagggatgaaagggaagtcagtgagcggaatgaactactacgcttgcttatcgatgatgtctcttgtgatcctcactccatttgctattgccgtggaaggtcctcaaatgtgggctgctggttggcaaaatgcggtttctcaagtcggaccaaacttagactggtataatctaaaaaccaaatcaataatctttaattgtttgttaagttttataaactccaa

SEQ ID NO: 36718 - DNA, 4442 bp, Arabidopsis thaliana landsberg
aaggcttatgtctttccaaactcaataacttaaaaacatacaacaaaagttacatctcaaaagaaagaaaacaaaaagaagagaacaaacacgacgtgtgtgattcataagagctttgtccttaagttttaagcaaatcattgaccaccatttgaagaaatagtagtaagaacatcagtcaccgaagccatcacactcagtgctgccttcaatacgtcttgagaacatcctggtttcactatcgtcctcacctgaccaaaccccaaaaatgttaataaatatgaaagtggcgaagaacattattcgatacttacgaaattagcagagaaaaacacaaaaacaaaaaagtttttacttggtcaagatattcctgcagcttcttgatacgtcccatgtaatcttgatcttcaacacagagactcactgctttagcatccgcaccaggaccatcgtactgtagcggacctgggtttcggtacatatcttccatcaagaatttctgcgcgttttgtctcaatagactgcaaaatcatttgacaaattatatcacttgatttcatgttcattctaatctttgtctaatgagtgaggaacaaaagcttactcgtatgcttttcctttcaagtcaactgaagctggatgaattacaggtctaccaatcgtagtagaaccagaattttgggaccaacgcttaaccgtcatcattgcctaaggttaaacagagaaagagattggggtcagtaaaactgaaacttgaagtcagaaatcaacacatatactaaacaactttagccttataaataagagacaaaactcaactgagataggcgcagccccgcatttccatttgtttacaggactcttcaggttagtcactgtcgccatgtaaccattcaaaccagctgcgaggatgtggtaacatacatgtccaagaacctgcatcaaagttataatcaatggtgtgaatgtccataatattgaagttgcaatagcattttagtttggcgatcacatacataggcgtagtcacaatcgaattttgatggaagagatccacgagcttggtaaccaaaaaagtgacagatagcgttgaatttcttccctttgtaggttccttctttctgtcattttcaaaacttagttttagggacaacttgaatattcaggcaaggttattcaaaaaaatttgaaaaaaatggattgtgacaagtgaaaaagatgtgcaacataccaagcgcttgttcatttcagtctccacaagataagccagaagtttctccgtctcaatctaagaagaaagtaaatgagcaattagaattccaactttttatagcacagtaactccatcattttctttcttcttacctgggatagctgagcagaatcatcagactcgggatggagaagtagctgcagaaacaaagaagacaatttatcataagaacacatactcgtttacatgtgagaaaaaacaaagaaaagtaccatgtcaaagaattagaacctgtttcttaatgaatggaggcaaaaactcaaacaaagcagatgaccaaggtgacaactgagtagaaatattatcaacctgcacaccctccttaagcaatccatgaatttcctgcatcgcacaacaacatgtaaatgcttactatgttttggaactcaagaaacaataaaaaatagcacattaaatgataaatagaaatgtttgccagtattgaatcgttaccttcaacagagcatagagttcaggaatactctcaacaagcccttcaggaattaggatgactccatgatttttgtctgatacaaatagacagtttatcaataaagttagggaacaagcaaaagacatcacttccaacataccaaaagctcgttttagttatcagaccttgttcggctcttgcttgaacagcatcacagatttgttttatgatgtcaaatattgtgagcttagatgctgtaacctcctcacccagtatcacctgagacaatcgcatcaaatgcaaatgagaaactagatgcagcattgccaagactatcgattgaatatattcagaatttggaagaataccatgttggggtgagactgaagtgtacactcaagggcaacatgtgaatgcttccgacccatgagacggacaaagtaataatactggcaatacggaggaaagtatgttattgagaagaaaatttgataacagaatcataaggaacccaacttcgcaattatcaaaccataataaatttcacattattaaccaacaaaatataggttggttatgagtgtcctagcaatctttctaaaacatgataacgtttggaaggaatcaacatttaccttctctgctgaaagggcatcggtgcagatattgctaatgagctgagaattcacctgtacacagtagaatgatattagtctaaataacgagttaaaatgttattaacctgaaaagaacggtgagcgaaatgaaagaatgttggctacaatacctacaaagtaaaagaaaaaaaagcgctagatttcaaagttaccttgcatgtagtatcgaaaccaacatttgcttccacaaactgattcttaagatctccattaatagtgaccggaacaccaactacctgaaacatattggtaatttctgctgttagcgatatcaggtgaagtgcaaatgtcactaaagtgattcatgatacaagatcagacaaagaaagagaaaaactgggaagaaattaggacctttgttgagcattttgcttcagcaaaaaattcagcaagatgagcggcatctgtgtttgatgttacacctaacaaataaaaacattgatttagaaaattctgggatgaacttaaaaaatcatatttacacaagttaagaacaaaacatctactaaaacagacacccgaaaaagaggaaaagtaggtacctccaatgataactaggctatccaatttcaaatccgtgcatgcttttagtgcagcattgacctgttcggttgttctaatctgatccttggttcttccaagcatatcatagccacctaatacgacatacatttaaatgccatatgtcagaaagcagcagagataaagttctgaataatcttaatcaaaccaccaaccaccaaccttggtttttgtaagtttggaggacctcatcagtgatctccagggtcttctgggcaaagagaccttcagaaccacctgttacaggtagccaaagtttcatattaatgaccaggcacacatcaatacgaagtaagatgtgactttatagtaagcaaacaatgaagttacagaaataagaaaaccaactaacagataaaaaacagggacttacccaaaaatccaagcaaagtgttcttcgcgttgtgcactttgagagcctcgtatagaccccaaactacattgtgcccaccaggagcctgccttccacagaacacaattccgaccctacaatagaaaacaactagctctaaccaacaacaaaaccacagaacaagaaattccagagatctataaatatgcagatgcatgcacacctcttcactggatgttcagtaatgatctgagcatcagcaactttagcagttgccctgaggaaatgagccaaaggctggcctagagtatgtgggaaggcacgggcaatgatatgagcatcaccagcctttgccacagtggttccatcaccaagttcaacacggacagtagtcccctgtaatgtacattgaatcaataacgaattaaactacgaatcatccaaccaaaaaaaaaactacgattcaatcactgttccagaaaatcactccatcatggtagttcacgttgaaaggcaattctacctaccacactaaactgaaatgttaaatcagacgagtaagtataaaaggatcataaaccctagatcccgattataataacagtgtaaacagatctgcatgaacggaaacaacattgcaagttcctcgagtagacaatcaaaataaacagctcgaagggattcaaaatattcgcgacgtgacgaaattgtgagaaaacgaaacagcagaagagatgatatcaatgaaaaacatagagatccaaacattggagacagtgaacgagagaaggaagcaagagatctaaggaagatacgaatatacaaataaaaggaagaaggagaagtacctggagacaaggaggaagctcagggtggtactgagatcggagttgttgaagaggagagagttctctggggattccgaaatctgaatccatgggcgataactttttaggtttttgtgagaaattaggttggtgagagtgtcagagagactcagagaagattcagagaaagttttttcctttggcccgtcaacagtatttatatagtatgcgggggacttgggaaatacgaacaaccaaacagccaaaatttggtcttcttcttttttgtctttcagtc

SEQ ID NO: 36719 - DNA, 2075 bp, Arabidopsis thaliana landsberg
taattgtttgtgtttcaggagagagttgccccctttaacctttccgaactaaaatttttgtcaacttgaagaggcgattttcttagatgtttgacaaaacatttttaccaaactaaaaaataaatgccatggtttgtcgacaaagtcaaaaaaaaagaaaagaagaaaaaagcaaattaaaaagctatcaaacaatgtcctccataagtaattataagatatgtgactatatgaaaagaaaacaaaacagccaaatcaaaatgctcaatcagcttctacactttacacatcacactttcctcttacaactaagcattgcatcaattcattttccacatttcttgctttcttgtcatcttttctacttcaacattagcttaaccacaaactaattttcttttgagaactctaaaggcaaaaagatccagtcaataacaaaaaaaagaagagtaaagaaacaaataaagcatataaataatttttaaaatcaagcaaaaagttattaaaaggatctctatatcattaaattaaaacaaaaagctgccaaaaagaaatgaaagcttaatctttatattaacataatcataatcatagtgataaaactaatacaacattgattaaaaagagcttactagaaacaccgggagctaacttgcacgtgaaagaacttcaaattacgaaaccatccttaagtcatacaaggcgtataagcagagttcaagggccttttggtaatttgacatcacattatcgcacaaccgtttggattctcatcgctgaataactcaaacgaatctgacggccgaggttgacaagggttttgatcggacggttgataaccggtgtgcatgtacgcatacgaatacggtgggggaggtgtataatacgacgcagcgtctacactcaccggaggttgagcaacgttataacttacgccatacatgacttgcggcgcataatagccttgtgcaggataaggatacagatcgtgacgtggcggattattagtggttgttatatggtggtcgttgatctgattaattggacggtcataatctgttgcagtgggcggaggaagtgattgagtacgggcaggtccatcggtaggattgttagtagtagccaaactttgccctttctttttcttctttttaccaactttgccattatcagggacagctccaccggtgtcttcagctttcttctccgccgccggagccgaagaatccgccggtggtgacggagatttttccttcccagaatctttctccttaagaacgtcctttttttcctctttcacaggaccggaagtttcaccgccgtcagcggaaagacacttttcgtcgacgggtttttcagattccggtttatcacactctccagaaccgggtttttccggattatctataccggaagaagtagcttcattggttatttgcactttctcttctttcttcttcttcttgttcttctctttcgggtcgacgggtttgggtttgttgtcaaccgggtcgggtatctccggcagttgttcagcgtttttaccagctttgttaagcttctttaacagaatctcgggcgagatgattcctatcaccgttactttatgctgtttcacatcaatgtccactttaaaaacacctataaccacaaaacaaaacgaattatggcaaaacatttttacttataaccaaaaaaatataagtgaatttttttatgttatgtaccttcaatgctggtaagtatttttttgacttttcttttgcagccttcgcagtgaatagaaactttcaaggtgcatgactacgagtacaaacaaaaaaaaaactcaaaacttttgagtcgaagagtataagaaaaaaataatatgtaaaatgtgggaaactatgttatagttatgtgcatgaaggggaactaaataacttaccttgtaaggaagtggaagaggtggtatggtcggaggaggaaggtcttgtttgatttgtgtagattgcccttgcccatgttctgtttttttagtttctgaattcatatcatctgttgccattacaaaactcaaagaagttgtaggtctt

SEQ ID NO: 36720 - DNA, 3464 bp, Arabidopsis thaliana landsberg
  unsure (1)..(3464): unsure at all n locations
tatgacctattccagcttcttccaccaaagatccaagttggtgtgttcttttcaacaatgccaccagaagctcttgagatcacaaggaagttcatgagcaagccagtgagaatcttggtgaagcgtgatgagcttacccttgaaggtatcaagcagttctacgtcaacgttgagaaagaagagtggaagctcgagacactctgtgatctctacgagactcttgccatcactcagagtgtcatcttcgtgaacaccaggcgtaaggttgattggctcacagacaaaatgagaagccgtgaccacacagtctctgcaactcacggagacatggaccagaacaccagggacatcatcatgagagagttcaggtctggttcctcccgtgttctcatcaccactgacctcttagctcgtggtattgatgtccaacaagtctccctggttatcaacttcgatctcccaactcagccagagaactaccttcaccgtatcggaagaagtggaaggttcgggagaaagggtgttgccatcaatttcgtgacccgtgatgatgagaggatgctgtttgatattcagaaattctacaatgtggttgtcgaagagctgccttcgaacgtggccgatctgctgtgaagggagaaaagaagtccgcttctgttgctgtgtttgctctgccgtactagtatcaccggagaagaaaggttttcttgttttgcaaggcactctttgatctgattttgacccgtcgtctatcagcgatttacatttcttaaattttcttagttgttgttctctcctctctctcccagctacgaacatatctctctcttcttgaccatttttaagtttaagtcatatggagtatttatttcttcactattttaatattcggctttgttgcttgtctttgattttcgtatcaatcaaatcttttcatcaaagtttggttttaagctttttcaaatctatatctcagcattaaacttattttatatgtttatgtcaaactggttaaaatgcttggctcacaaattaattgaatagtcggggttactttttttccattgcatcaatcaaggatgaagcattggcacactctctcaggcgctgctttaacgacaaatctactgatcaaaagtctgtttggacacagcgacgaactcgctttatctttcgtttttcatgcatcttctttatatttctagccttatggaaaataaatattatatctaatagttttgatgtactatttcctttttttctcaaaagaagtatattcaaaattttatggatgtggattcaatgattccgagtcaagcctaccaccgacaagggtttttcacttttataatatcaaagtgaaattattggtctgaacttctgcaaagtttcttcacgaaactatgaaagaaattttatttcctgtgagaaattacaggtttggacaaatccacgtgcctattttgaaatagttgggaaatcatcacatccacacaaacctaaccatcattataaatcataagaaaagaaaaacacatgaaaagtctagtgattcatacccattatacgtattcattttcaatctagttctaagttgaataacttaattcgtttgaagaaaaaaagagggaaaaaaaacacaagtaggtccttgaccaactccacatgacaattgtaaattgatttctaaaaaagatacctttaattatttggaaaataaacatattgttttattaaaatttccttttataacttttaaaaagacaatcaaaatctattaaaaacagagtcgacgacgactcttcttcgttcagaccaaaactctcaaactcagccatggcgaattattacgaaccgccagcttctggaaaccgtcgagacgcagtgaaaggttacaacagcgggagcttcgacgattcagccggcgatcagagtcaaacgaacgattaccagttaaagataaagaaaagcaaaagcgttccaaacgcggatcgtgcggcgtcaagaagctggagtttcagcgatccagaatcgcggaggaagagaagagtcgctggctacaaagtttattccgttgaacagaagatgaagggatccattcgaaagagcttcaaatggttcaaagacattatcggtatttcttgatataccttctctcaactttcttaaaatctcttctttgtgctgtgagagttaaatatctgtaacgaacaaaaaattgatagtattttctttctcttgcaactatatgtagaagaagagtctttgaacttgaatgagacagataatgaatgaaatcagttttcatatctacatgtgaatatgaccatacttcttcagttacaatcaaaaccaattctttcttcagaaagaaaaagaatctatttataagaaactctattcaaattctttctttcttttcattttctttagtatacacacacaaactcacacaatacaacattctctgtccctttctttgttgcctattatcttcaatcccaattttcttctttggtctgcttccttccagttccaattaatggattttttttctcgagaaagaggaaacttactggatgagttcaactatgttgtgtggcggaagttgtatcagttgatgctgagacgccactcagaccgctcataacgctcaatatggagtgttttctctggagccttcctctcagctggcggatcttggcatcaacacgagctgtcactccaatcttggtcttctctctagccttggatctttccctcgtccacatacattcgtcctggacgtcgattctgaaatgcttgatctcttggatgatgtgatggtccaaagggtttaacgatctctgcaacgaaaggtaagccaagtaggggagtgttgtggcggctatgaccagcagtgaggtaagccagaagattggtgcaggtgctagggtttccgagagcatgtggaagatgttttttgagacttttggaggtaacatgccaaatagggcaaggaagatgtaccaggtgacgatacttccccagatcaagacgtgttggatccatgtgaaatggctcatggttaaagctatctgtacgttcactgcccagatgatgcacgtgaacattgcagttcccattgcgtccatgtctgctgtttggccaccagaacagaaagattggacatgaaagatgccaatgttgagggaaaatatgactacggatgcatagactccatttgccatccacccgatgattctgtaccagtcaaagaacaggttcttggggccttgctggtacagtgctgggaactagagagagagaaagttatattagaagaagggttttaggggtttagattgaagagatataactgagcaagagaggtgtaaacctgtaagcagacttctgaagacacgtcttgctcaaaaactccaagggcgatgacagggagagatgtgagagtacgttnaacagca

SEQ ID NO: 36721 - DNA, 4305 bp, Arabidopsis thaliana landsberg
acttttagtttcactaatttgaaccactaaatttgttgaacatatataaacagggtagcaattggagcagggatgcagagtatggtagcattagtgaacttagcatcttattatgcaattggtgttcctttaggtgtcctccttgtttacgttttcaattttgggattaaggtacatcatatatatgaaaactggtatccagtacttcattatgatcaatcattagaacttttagaattttaacttgaataaatgatattgtatgcagggactctggtccggaatgttggctggagttggtatccaaacgttgatattgtgttatgttatttacaaaactgactgggaattggaggtaatttacttttaatatataactcaaaatttttattagaaaattcgtcatattaaatgtataattttatctaattacaggttaagaagacaaacgagcgtatgaaaacgtggactctaaatttacctgctgtacaatcgactactatctccacaagagatgaagagagaaagtgaacatacaactaagttaatttaaagaaatcttttaagaaattctttataaaaaaagaaagaataatttatgttgtattgtggttgtgttttgcattccctaagaatgaagtatcggtgttgagattgcattattaggttaatgcaactctcataactttgaaaaaggttaagaaggatgaactttttcttttatcagagaaaaaggttgttctcttgttcttcggatatactctttctaaacaaaaaaaaaattgtgggaggtttgaaattttaacttctttcttgattttttaatggatgtaaattttgtgtgtggggaaaaaaattccatatgtatgagtgcttgtgatcgtgaatttttacaaaaaaaatattctcatatatatttcgaggaaacgttacaaactttcataagctcaccatcaaataaaacactcatttattcccgttgaagtcaaaacgttccaattttccccctatttatgaaccgatcctaatgaatgttttttttcttcctttttacttctttcatatcaccattttaaataataatagtaattattatttttctaacgtttaaacaaaaaaagaactgcaaattttatagtaacaattcaaatttaacaaagcgatcaaaacatgcatcatttagtgtacaagtactaatcacaaagaaacaagttttggttggacaaagtatagaacaaacacactaaactgaagaaaatagaactttagcccaccaaaagttgaggctaaaactcgagcagtaatcacatagttactatcaagataactatactttggaatgaaagaatctgaatctcgatgaagtttatcttggagaaggactttcttttctgttggtttggatgagatattgctgaaaattattgatgatgatgttaggagatccaactaagttgtctgcctttgcagtgcacttggagacttggagtgagaatcttagtttatgagacatattttctgatttttcaatctcctttgatttttttttaagttgtaataatgtcctagttgatttccttgtaaaaggagcaagagcacgatgttcttttatttctaatttaaagaaaatgatgggagtttaatatatttttcgaggtaatttaccttcacatattttcttcagtagtatttattattttcatattagtaattagaaataatctcttctaattagattataaacgttaagaatttgctgcattcaacttttcctattgtgatattaaaaaaaaaaaaaaggacaatccaaaaaaaagggaaaaactggtctttgaggtcaggtcaggtcttcttcctgcaaaaacaaaaacctcagaaatagagaaaaagtttcaatctttcttcatcttcttcctccaaaatccttgatttctaaaaaggagaagaagagaagagaacgcgattaacttgattcaccctcctccttcaggtttgggaggctcgaatactcaggaaatgaaaggggcaagtggtgctgttaagaagaaaccccaggtgttgaacgaagctggtgaggcggatacggcggtggaaacagtcggagaaagccggaaaattagtggagacggtgggtttggcagtgacgacggcggagggggaggtggaggtggaagtggagagtcgattcttcgcgagattggtgatgataggcctacggaggatggagatgaagaagaagaagaggacgaggatgaagatgatggaggtgatgaggaagatgaagaaggagaaggagaaggtgggcaagaggaaaggccaaagcttgatgaagggttttatgaaattgaagctattcgtcgtaagagagttcgaaaagtaagctccttttttcgtcttcactcagcaaatgtggtttgtttttgttaaccataattagttgaggttttaggttttctaggtttaagataagtatcaaacgtaggttacacattggtgtgagaaagtggctgctttagtagttagtaatcatcgtaacatagtagtttataacgaaccaaagttttgattctgtggttgttatatgttgtaggaagaaaatgatctttaatgtttgatatcttcttggatttgattgattgaatgattctgattctgcattttggtactgtttttctttctgtatctgtagggcaaggttcagtatctcattaaatggtcagtttttctaatctcacttggtttcatttttaagtctgttgttcttgattaaacatatgtttttccattgacataagttataaactcggttgtgaaaggcgcgcatggcctgaaactgccaacacatgggagcctttagagaatctccagtctattgctgatgttatagatgcctttgaggcaaggtaagtaaatgcaatcttatataaaagttttgtgatacttttgaattgattgtttcatgcattttcttggtttaatgtatggatttgctttcttgtttcatatgtttcaaagtttgaagccaggaaagcctggtagcaaacgcaagcgcaaatatgcaggtcctcattctcagatgaagaagaagcaacgtttaacatctacatcacatgatgctactgagaaatctgactcttctacgtctctcaacaactctagccttcctgacattcctgatccactagacctaagcggttcgagtctattaaatagagatgtggaagcgaagaatgcttatgtatccaaccaagttgaagccaacagtgggagtgttgggatggcccgacaagttcgtttgattgacaatgagaaagaatatgatccaacacttaacgagctacgaggaccagtcaacaatagtaacggtgcaggatgttctcaaggaggaggcattggttctgaaggtgataatgtaagacccaatggccttctcaaggtttatcctaaggagcttgataagaacagtcgtttcataggtgctaagcggaggaagtctggttctgtgaaaagattcaaacaagatggatccacaagtaacaaccacacagcacctacagatcagaatctgacaccagatttgactacattagactcttttggtaggattgcaaggatggggaatgaatatcctggtgtgatggaaaattgtaatttgtctcagaaaaccaagattgaggagttggacatcacgaagatacttaaaccaatgagttttacagcatctgtatcagacaatgtccaggaagtgttggtgacctttttagcgctgaggtttgtctctttagctctttggtcatttctcgtaatttgatttcatatttgtacaattgtacttatttggttactctcataggtctgatgggaaggaagcattggtggacaacagatttctcaaggctcacaatcctcatctcgtaagattatctttatagctttttttttctgcacttactcatttggaagtttcttattagcttttctaatttgtttttcccacaccagctgattgaattctatgagcaacatctcaagtacaatcgaacgccttaaatcatccggaatggtaagaatttgtttgtacacagcccttgtaggtagaaaagattagatggcttctttattctagcagtgcaacatgtagagtcgaggtagcgacaattggattttgtatcgcgtctccgggaggtttcagcttgtaatttatctcctcgggttcgttgtgttcactctctatctctatcatagtaaatcttgttacttggacctatgcttcttatagcgcaagccttcttgtcttgcttcttc

SEQ ID NO: 36722 - DNA, 2582 bp, Arabidopsis thaliana landsberg
actcctacatcactcgacgagaggaagacagtcgtctcttatttttgaaaactcaaacacttaaaagaaaaactgaaataattaaacggacaccaagaaaaccatgagacaaaattggctccggttttggactctgcttctgtttgatgttctgcgcctttgtgcttcgattccatcaaacatcgataaagtttattttccagaaccagtgatcttttgcaaaacgtgataactcgtctcttcgatcattttgctatattttgccacatcatcaccaactgctttgatatcctctgttaattccaccacgtcccccgtgagggtttccatgacttgtttcgtgtccacctcatttgctccatcctcagtagcatccttcacagcattcaacatagacgtgatcttgctttttagcgcgcggacttttccagatatggaattcatatctactttgtcggtttccatacccttatccatttcgtttgctatacggtgcgctttcttcagagcttcttcctgtttctctcgagcttgaattttgttctctaaaatagtgtggacgcctacccatcctatcgcaatcagtggtaatgatagaagccctgcaacgcccacgcacgcacccacgcctgtacatagtagaaccatcgatccgacggcaacagcaacaaacgcaccgatgaaaagcacattcgaaattatactccatttctttagactacttatttccatcccaatatttttaagttcctcaccaagcttttccttagtctccttcactctttccagaagggattcttgctccttgtgcatcaacttgaacagagtcgtgaacttatcgccatcaaaaggatttcccatggcttcaaacttcttcagctccctcaaggtattttcatacatcttcgtttttatgccaacatcattttctatgtctttttcaaagtgtgccacggccgttacaatgaaacgttcgcccctttttgcttcatggacgtattttgttacattctcggcaatgtccaaagtcttcttggcactttcaaagtaggtttcgaccaaagatctcagagataagttctcccacaatacttatccatatataatgatgtagtttgacacctgttggtttacttcagctaggtgcttggtgaactccttgtatgctgcgtgttggggcagtggcaccaacccagttttggcatcagaggtgaacgagtttatcaaatttgaggttttctgctgaagctcagaatcaaaggatttgagttctggatggtctccacatgcggatttgtaagcacgaaggtgtgccgagtatttcaacatattctctttggatagcaccatcgatgatattactaaaacgaaaaaaaaatcataaaaatgtagagagatttaggacagaattttggatacaccgagcttcccaaataagatatttcgaaacaatatttaggatataatattcagaacagagaaaaaatatacatttacttgtaaaaaattcacgaagaaaaagaaaattatgataataaatagaaaataccgacaattggctaaaaattaatgtttttatcagaaatatgaacatatatataagaatcaaaatgagttagagattaaaagagagaaaattaccagaaatttgatcagaatacaagaggatattttgagctttcaagtattagctagagttgaagtttgaatgattagttaggttagtgatctacaagtatttataggagaacataggagaaacctgtgtgttggctaagttacaactataacctcaattaaataaataaatatacatatatattcctaaaatcaactttataagttgtatacagttatacctgtacaaaataataaattatatcgcttcaagttgaaacttgcgtaaaacataacacaagtgaataatataatacgataatatattttttgaaaatcctatgtaatcgtttaatcccatcaatgatcaatatcataaattaattatttgtacaaatatatcaattatatatttatttgataattataattgtatatattatatgtaagaaattttagtgaaatataatcctagtatttttttttttggcttaaattcgcatttattcttgtttgaatttatttctaatattttattgcatcaaaaagttttgatgttgtcttctagatatgaatatgatatatatatatatatatataattgtaattggttctaaaagtatattttatataatgaaatcatttttatatcttcatagaaaattaaaaaattacaaaattaagaaaatctccttacaaatttattaatttatggataagttaatacttttacaaattaatagaattttaaggtaccgagattattaatttatagaggttttactatatgtgaggcaagtaaattaatttcttattagaatattactcgagactaccatatcaaaagcttatgcaatgggattttcttgcatataagaattagctaactccaattagtatgaaagaaatttgggtagcaatgacaaaaaattatatcaagattgcgagagcatatgataccatac

SEQ ID NO: 36723 - DNA, 1358 bp, Arabidopsis thaliana landsberg
atgtttaggtttccaatttgtttatttgttatgcaagtatcaaatttatgttggaattggttttctaacacggtgaatgtaacaggtctatcgatgttgaagacgggagatagacagtggttctttttcactccaaggaataggaagtatcctaacgcagctaggtcaagtagaggtactgcaactggttattggaaggcgacaggaaaggatcgagtcattgagtacaattcaagatctgttggactcaagaagactcttgttttctatagaggtcgtgctcctaatggtgagagaactgactgggtgatgcatgagtacactatggatgaagaagagctagggagatgtaagaacgctaaggttagtattatagccaaaactcatctgtttctctttttgatttatttgtagtttaactaaactgtcttaccttcaggagtattatgctctttataagctttataagaagagtggggctggtcctaagaatggtgaacagtatggtgctccgttccaagaagaagaatgggttgatagtgatagtgaagatgcagatagtgtcgctataccggattatcccgtggtccgttatgagaatggtccttgtgtggatgatactaaattttgcaatcctgtcaaacttcagttagaggatattgagaagcttctcaatgaaatcacagatgcacccggggttaaccaaagacagtttgatgagtttgttggtgttccacaggttagtttcttctctaataacatattggcttatgctttctttcttttttgggtcctttggttattctgttgtgcttccttcactaaatagatacttgtatttgcagggtaatagtgcagaagtgatacagagcacattgctgaataattcttctggagagtatattgaccctcggacgaatggaatgttcttgccaaatggccagctatacaacagggactcgagttttcagtcccatttgaattcatttgaggctacctctggtatggcacctcttctagataatgagaaggaggagtacattgaaatgaatgatcttctgatccctgagctcggtgcttcttcaacagagaaatccacagagttcttgaaccatggtgaatttggtgatgttaatgaatacgaccaattgttcaatgacatatctgtttttcagggaacttctacagatctgtcttgtctgagtaattttactaataacacatcaggccaaagacagcaattactttatgaacagttccagtaccagacacctgagaaccagcttaataactacatgcatcctagtaccactcttaatcagttcactgacaatatgtggtttaaagatgatcaggct

SEQ ID NO: 36724 - DNA, 2050 bp, Arabidopsis thaliana landsberg
atagatactgtatacgtggattcagacacttttttgattggcttattctgatcagtatgggggcaactgtaaaacaaagaacatgttctgttttttcttttttttgctcatcgaacatgttccttctccattgaaatgacaattttaattttctgttccatcataaaaaccataagaatatccttttgtaaacttaaatagtttaatgaaaaaaaaactatttctgtttctgtgctagttgaatattatcctttggatcattttagatatccagacacgtagatttcttcccactacaacaaatcaaaccaaaagggatctttggtgattataagaaaaaagggaggaaatcttggaagattacctaacaaatcaaggaatataaatgttagatcaaaaccataaaggccattcctccacaagtaaactaaactaaattaaaaagagattaaggttaggttataaaactgtacaaccaagacaaaaaccctctatagtcgcttcaccaggtaaacaaaaagaaaaaacggatcaatttgctcttatattatcacccaacggcgactatatcaagtgtcatccatgtcaaactctcgaaatttacttgatgttcattactgaacatcaaaaacagaaagagcatagacctgttccaccagaaatcttctcaatatcgcttgcattcctataataaatcttaccaacagagatgctactgaggatagtacggtgggcggtactgaggtggtggcatcccataaccagtttgctgcacataaaagacgggtcgagaagctggagctggaaccgagccaaatagagcccttgggttgccatatgggacagcaacaccaggaagtattgagcttaaaagaccatatgggttcacttgtaaaatctgactaggagtaggcaaaagtggtggttgttgtagcggcctcagaggtgggattgtcaaattatattccatacttgaaccattagcaactcgaggacgcttattatcgaccttttgttcttgtggttgttggggattagcaggtgaattgaacttagtggcacgcttcctctgagctttctgatcctccaactccttaacacattcttcgagtttctcttccatgaactcggactcgatgtttttctctttcacgactttgataactgctctcaaagcacttagttctttatcagtagcttcgttctgcaccttaagagagtaattcccttcagcacaaactctcttagcagcttctctagagttcttcaaactagttttcaaaatcgaaactggttcaaattcacccaccatctcattctcgtaaatgaatctaatagcaacaagtaatctcccagtatccaaaaacttctgaacgagaactcctattcgatttctatctaaaccaatcttcatgcagatcgttgttgcttgtttatacttagagatcaagaaaatgtaatcacaaatctcctcagtactaaataaagaccctaattcaaaagctgcaaccaaatgcaaaaaccctaacgcttctgatggtttgttacctatatttggtttccaatcataagcaatagtcctagctctttctctcaaatcattcgtgagattcgcattgatctcaatcaaagcttctaataacaaaacgaagatcctcttcacatcgatcgctctcgccgaggaagacgacgatggtgatgagcaatggtaagaaccttcgattgcatctagaaccaaagctgctggattctctgagcatcgaatcgcattaggaagctcttcattgatagataaacgcttcctcgaattctcaatcatgtagttacccaaaccttttccatcattcttctcacaaaactttctcaattccggccaaaggactggtgtctccgtcgtaaccgccgtgggagtttcgatattaccggaattggaactagtcacggctgattggaggcggttaaacactgaagactggagagaagaaaagtgagagtcaatctcagaccatgagaggttaaaagatggtgaaaggagagatcgatgagcttg

SEQ ID NO: 36725 - DNA, 4130 bp, Arabidopsis thaliana landsberg
tgttaactgacaagccaccaggtaatgtctctttgctgcagatgatgattagttaaaatgtcttgaaacatggatgtgaatatatagaaggaacatgtgaaaaatattaatacatagatggtgaaaacctgacaacaatagcttccaaattttcatctacgatagaagggccatatggatctgtaatgggttcggcttgtacaaccagctcgggcttgatagactacacaagaacatggagaaaactcatacaacagaaactctacttcatcattctctttccctctcatttcacattaagaatgacaagtaattgccaatataagagattccacattctggagaaattaccttgacataggtctccacattacgcatcctttcttcaatgggttgaatcatgtcagagaactgtacacacaaaagagtgaggatgagaactgcaacaaagcaatagttttaaatcagagaaaaatgatgttcaaagggtgtttgttcttttgcctcttgatcataggaatatcattccaactcgaaatcaaccaaagtgactctacttacaaatcaatctcctgggactatcaaacagaaagatatggtactgaaaaatgaatgacatgagacttggaaagagctcatcagcaaagcataacagtttcagactttgagctttaaaccccacaaaacaacatcagaacaaagatgttcaaagggtcctcttttgcctcttgatcataagaacatcactccaaatcgtaatcaatcaaagtaactgaatttactagctaatataagaaatcaatctcctgggtctactaatctaagcaaaaagggaaacaaaagttaccaactttccctatattgctactaatctaaccaaaaagggaaacaaatctacaagagactgaaagtgtgatcactatcacttacttgctttttcgtcaacattgggccatcacagactcccactacgatccgatccctggccagctccgccgccgcctgatttttccatcccccaaaaaaatcgatagttgtacttcaattctcaagaaacccatacgtaagcagaaaccgaagagagagaagaaaaacccaattaccttgaggaacattcgatgcccatcgtgtaatcgatcaaacgtaccgccgagaacgacagctccaaacgaattcgccggagacatctttgaatcttccggagctgccatttagggctcgtctctgaattttctgatttggagactttagaacaaataaatggagttcctttggtcactcgaatcgaatccgtagcttcagacacacaagaaatcgattcccactcccaaaatcctcaactctcctctgaccatttgtaaacccattctgctttaacatgtgtgtcgttttctttctataatgtagtttttcaacaaacaaaacggcaaaatattcctacgactacattttaaggaaagttgatacgaccgttttaaggaaagctattacgatgacgtgttatggtacggcaagacggcgccgtttaaagaatccaacacgacgtagtttaaggtaatataagacgagccgtttagaccacaccgttgaacaagggaatgaaataggtttacattttttctttgtccgagcatcggtcaagtttcacatatgaagccaaactagcaacaacaatctaagagtttcagaaactatctctgctcagtagctcgtcgacacagtttggagtttctgtctccttcggattatcttgttctatcatcaataataaacaacttttgaggacaaaacaaacaaacaaagcaaggctacaaatattctgcaaaaaaagatgttccaaagtcacagagcttgttgttttgttggtgtgaagcattcttgcaagaagttttgaagctgtgaggaatacaagtcaggaaagttccggtaatgatccacgtgaggagaggacttgaaattgaaagaatgtatctttcttccaatcttctgttgttctcggatgcggagctcaacggaatgagatggaacaactttgtccccggagctgtaaagatagagctgaggacatggaggatggttctcatatagtttttgaatgatttttgttagcctcctgcgatacaaacaataactcagattaatcaacctaatatacaaagaagaagcagatgggttgtctactgtgtggtgtgaagcttacgtattgacgtctgggtggtttaagaagatggggaagagtttctccagagatgatagcattatgttttcgattcctaaaggttccttcttttgtggtgttgaagcatcctcttcttttatgggactgtttggttctgtggttatggtggagctacgcttcttcagtatagccgcggtaaaccccgctgcccaaatctgcaaaagaacagaattcaattgttgatctataaaatctgcacaggtgtacgcattgctaatcttatgcaagatgaatgattatgatggcttattaggactacgcaatgattaagcaattttcaacaaaaggggcttcagaacaaactcaggcacatactatgaagctcattttatcttgttcacatgcctaagacatcatatcttgcaagagaacaagatcacattcacaagatatataggccgatgtactataaacctgtgagtgatggctacgtaaccaaaagaaatcagcggttttaactcatagctatatagtcttttctaagtactgagttatctatctacaaagctaattgcttagatatcaaaatcaaaagtcccctagccatggttctgcaaatgcttgtaatcgatacaaagttcttcaacatagaactcaaactagcaaagctttcacactagcatgaaatgaatcatgattgaaaaagaggacaacatagctcaaatagaatttttcacttcacaacaatattgacatttccacttccaatacaagatcttgaagcagtggagaaaccattgaatagcatttaaaactcttggttacatgaaagagagaacaaaccttagtatcaagaggatctgctcctcccgagtcaatgatacaacccttaatcctttctactaaatcttgtctaccaatgaagctctctagcaaggcaccatatctaccaaaagtaaaaaagcccaccatgcttaaaattcatcatctaattcaaatcaacactaaatcacaatcgcaatcacaatgtaggattttgaaggattttggtttcatcaacctacacaagccaaccagtgttactgaaactgtgaaacaccaagcatttctctctaccatcatcttctttctccgatacccaattaaccaattcattcccaaattcagctatccttcgttcaagccgccgaccaagatctaaccggagcaaatccctaacgtcaacagtgaaagtaacggcgttaattcccctggagttgtaccactcaacgtatctccttagatgtttagctttcgctcctagccaaccaaggagaaccaccgtcgtctctttcccctcgttcccgccgaatatcgccgcgtttccacctccgttcacgatccgtggagctctgttccagacggcgacgccgtcgttaggttcggatcggaatggattagcgtgaacggcggtgttctcgagacgaaacgttgacgttaggaagaagagtgatctgaagagattcgcattcgcagggagcgaagagcaccgtatacgagcggcggagatagaggattttcgggtaacggcattgtgtagtagctgatttgtggaattgatattacggggatctgattttagattgagcttactgagaagaagaagacgattgagagcagaagaagtactcaagattcttgtagttgcttccatggcggattttggatgattcgcagaaaccaaaaggctcttctcgtcaaatcgctgataagtgatgaataaatatctgaaaagaaaataaaaatagaatatttataggaaattaaacactcttgctgcattagcgggtttcccttatgccttggagctgattcaatctctcttttcagactttgaaatgttccattttggtttacaccatctttttttcggatcaaagagtacaacatatcttgaattggacaacagtct

SEQ ID NO: 36726 - DNA, 2394 bp, Arabidopsis thaliana landsberg
acgtgttaatgtcccatccataataaagtatattaatcgattgtgcatcaaaaggagcttctttgaagtatgtaagagtatatatcagagaatcaattatgcaaatgtatatttataagtgataaagctataagtgatgaattagataacagtttcaatatactagatgtatgccccatcatcatcaattaagaataagctcaatatttaaacgtttgtgtatgaccccacaatataataaggctatgaatcaaacgtgtaaagtaatattgtttccttatgagaattaagtacacaagcatgcctttattgaccaaaaaaacacagccttagatgcttttagtaatgaaacaataaattaaatgaaactctgatgaatcaataacgcgtaatgatatttaagctttaaacaacaggatctcattcaacgatatgatggaataaacaatcgatactaaaatataaaccagacaagtcatatgatgcaatatttaatcacgactattaaagtatgatgaaccgagtgctgataaatatgaggtaacttactcgacgtgggagagaataggaaacggtgagatcggagatggacgacggcaaagttttgtgttaacttggttggctagggcttctgataacgtgttgtagaacaattaagtttaaggattgttcttatatattgttcatgagtaagtaataaggagatatatatgagatacaacttaaggtttagattagaacccaagtaatgtagaaacctctagaatatcctaatgggcccataatagacatccatataatacatattttgtgtgaataacttgagagttttaacttatgttttcgacgttgccggtgaaaaggtaattaagtagttgaattttcaagtcttctaaattccctatggtcgttaaaaggatgaagacaaacaaatataaatgtatggtataggttttccaaattcttacataaagacatttagatgatataaacaaatgtttatctttgttgatttatcaaatgaccacgtttattttgttacttttcttcttcttcgtcacccaatgaccattctttgtttgtctcaatttcgttttctgattaaactaattaataaagccatttaatcaaaaaagatttagtgtctttatgtatttgtccactatttcaccttgacttggtctttatgcttctttctctctctcacggtctctctttaagtcgcttgctcatctgttctcaacacaaatcaaacccagcagacacactgttcacaaatcatgtcctatatgcctacttcttgtctggtcttgttcttcctcttattcttattccaccctcttccttgggccctaagtaaagaagacctagggtggtgtgaggctctgtttcagtgtggtaacaacactgctgatttccccttctggggtgggaatcgtgccaaaccttgcggtcatccgttgctggagcttcactgcaacaataacaatatcacctctttatacatctcaaatcaagagttctatgtttttcagataaatcaaacatctaatactcttacgcttgccagatcagaccttctaggttctttttgctcctcctatgcatcgaataccacaaccttgcctgccgaaatctttgagctttccccaacttacaagagcctaaccgtattgtaccattgtgatccaaagctttcttaccgctcgagttatacatgtcctgctctaggtactttttcaatgtctcaaagccttgattaccaatattcttgccaaaacagtttcacagttaacgtaccaacgagtttcaatccagaagagagagggttgaatttggccaatttggaaagtgctctaagaaaaggttttgaggtgaagctggtgattgatgagataccatgtcaacaatgttcatccactcgtggaatctgtagtttcaacggtaccacacagagttgctgtaacgcaacctcaccgtcaggaggagttagttgcgtaccatctcaacctagtggtaagtttttgcgtgcagattgaccattgtttttcaaaaacaatataattatgtagtttccctaaaacatagagtctagattttgagagttttcgcaaatttatatcctttacatgttatatactaagatttttcaaatccaaaaaccaaaaccaaaatctaaaatccaaaaaccatttaaaaaatctcaaagattcatgacctaagtgttattcctgttccttaccattttcttattacgaaaacacaatgatgaatctgtctctttctcttagatgctttatgtgatctcatttagtttttttttcaggtgatgagctttatagacgatgcagtgaaagttttagctgtggcagtcagagagatctcaattacccc

SEQ ID NO: 36727 - DNA, 2922 bp, Arabidopsis thaliana landsberg
  unsure (1)..(2922): unsure at all n locations
tctaactgttctgtctacttgtactaaaaattacatataaccaacattctagagcaatgagcattacttgtttagctacgaaatcaatgatttgcgcttcgttgagattgcttcctggttttctcactatgaaagccattggaatctctcctgcatcctcgtcagggaaccttgaattcatgatccatgtcagtatcagaaacacatttcaagaagttacaaatttgagtttaaaagactcacggaacaactgcagcatcaatcacatctggattcgagtgaagaatctgctccaactctaccggtggaacctataagatgacgcttttgattaatattaaactctaaagactatatcttcttcttctgactcgtaaaatttacctgataagccttgtatttgattagctcctttagccgatcaacaatatatagaaaatcttccgaatcaaaataacagagatcaccagtctttaaccacccttctttgtctactgtctccgcactcgctttctcgtttcccacataacctgtgcccattaatcacaggtttatagtcacatcaatgatcaaaatcttgatgaagacattagacttcaaggatcatgaaatccgactgagtcctagatttcttcttatatgctaagtcatttagtgaaagctcttgaatgttcctcaaactattgcatttgttacacagtcctagattcttctatgcaaagtcacaagtctcgatttaatttgacacagtcctagattcttatatgcaaagtcacattaatggtcaaagtcttgatataatttgacagtcctagattcttatatgcaaagtcatttagtttacaccagctcagcacattgcatgttcctcaactattgcatatgttttatgatacctttcatgatgactggtcctcggagccagagttcaccagtttttcccggtggcaaggattctccggtggatggatcaacaattttggcttccatattctcagagatacgaccaactgagccatattttaccatctcttcaggtccaaacgttgaggcagctggtcccgagctctctgnnnnnnnnnnnnnnnnnnnnnnnnnnnnaaaccagaaagttaaaagtcatataaatgattcaaaatcttgatgaaaaccaagtatcatgaaactggacacagtcctatatacaaagtcatattttgacactaactgtcttatcagttattacctgtacaatatctacatctgggaatttctgcttattcctttctgcgatgtctttgccgagtggagctcctgcgtagccaagggaacgcaacgaccggagatcgtacttcttcgtgagctccgatttgaccaacgctacaatcaacggaggagagacaggcataccagtaaccttatatttctccaccgccttaaacatcgcctcgagttcaaatctccctaaaagcaccaatgtctctccaagcgagatggctcgaatcatcatcatgaaaccaaacacgtggaagagcggaagcgagaacagtccaacgcgatcgtaattaaccggatcttggagagtccgttggtgagatacggcggtcgaggcgattaggttacggtgagtgagcaaaacgcctttgacccgcccggttgttccagaggaaaagaggatagcggcagggtcggattggttgacctgaacctgaaatggattaaccgatgaagaatccgatcgatttaaccaggagagaaactcagtcgagtccatcagaacagttccgagaggcaaagaagaggattgaagcttcttaaccgtctgcgatgtcgcgaacgcaattactggttcactgacttcgacttgatgactcacctccgattcagatccgattgggttcgccggtgaaacaacaacaccgatcgacatcaaagctaagtaaagcactggtatgtccaacgaagaaggagagaggataaaagcgacatttctggaggcaagagaaggaaatcgctcccggagagatacagcaagagaacgaactctacgaagaagctctccataagtgaggttatcaccagagctcgagttaactaggtaggttaaggcttcaatgtttttcccggcggtggcaggtggtgaggatttgagtaggagagaaagcgcgaattcggcggcggagagaggttgatctataggaggtagagaaagagagggacgaagactgtgatagattcctgtccgttgatcgaagccggagctccggtcaatcaaacggctgtcgttggttttcgtcagcattctggaagacgattagagatacagtaatcttttcgtcggcggtgaacatgcgcgcctgcgagaagatatgaactcacataaattaatgcatacgtggcaatctctaaaccaatcatgttttttctttttttttaacggcaaatcgattttattatattgttttttgtttacaaaactactaaacaaaataactaaaaaggctgtcaagtatcaacgttctttcgtcaaagatctgtgggccataaatctttttacacgtgtctcattcttattagttagagctcagtgatttgtacgaatgatgaaattttgtacgcaaaacatggaaaggaaactgtacatttacagtagatttatatgtacacgtgtctaacgccgattggttgcagctggactagtattgctttgaggagcaaggcacccgagctataccaatagaccagcgtttgtgacaatcgctgccttgagaagcaatgagcctgacctagaagaaacctacagacctgtgttttctatgtcgacacatacactccgggacaggataagctatcacgtcacgatctctccgccctctccgtgactcaggatagccttgggacttacggtgaagcttccgagttagaaaactgagctcggcatct

SEQ ID NO: 36728 - DNA, 1740 bp, Arabidopsis thaliana landsberg
  unsure (1)..(1740): unsure at all n locations
gtttgtaactttgtataagctaggcctccgattattaactgactcggtttttctggatcaaaccaaactgagatttggggtttggttaaccgtccggtttataagagtcagccagtcagttagattttgaaataaggtcggataacagtttggtttggtttatcgaaccaaacggttaaccatttgtttaaaattttccaatttaataattttacggatattttacgtaatgatatcaaaaattcttcaaaacactacgtgaaccaaaaaaaaacaattcaaatatttttaaagtctcaaatgcttgtataaactattgatagtacattttcaggatatattataagaagaggaatattaaacaaagaaacaaaaatacaaaacagagcaacaagctcgataaaatatgagaataaatagtaccaacttttacacaacaaaaacattaccaattttttaatatgtcagaaaaaataaaaaaaagtaccaactttataaaatgaaggaaaaaagagtcaaagcacgtggctaaatgaatcggccggtggccagagtctccaatagatctctttaataactgcgtggtctgaaaaaggaatcttccttccacggccactaaattcactattttcattcacatttattattttcctttataaatacaaattcatttctacacaataatcattcaatacacataatttacttctttctttataactaccatattctcaatcacaacactcgccactgtttcgaatagatggcttctatttcaaccccttttccgatttctctccacccaaaaaccgcacgatcacagccgaagaaattgcgagttgggacccgtccgatcaaagcttccgggtcagaaactcctgatctaaccgtagcgacacgaaccggatccaaagatctcccgatccgaaacataccgggaaactacggtttaccaatcgtaggaccaatcaaagaccgttggnnnnnnnnnnnnnnnnnnnnnnntgaagagttcttcaaatcacgaatccgtaaatacaactccacggtgtacagagtcaacatgccaccgggagcttttatcgccgagaatccacaagtcgtggctttactcgacggtaaaagcttcccggttttattcgatgtcgataaagtcgaaaagaaagatctcttcaccggtacttacatgccgtcaacggaactcaccggaggctaccgtatcctctcgtacctcgatccatcggagccgaaacacgaaaagctcaaaaatctccttttcttcctcctcaagtcatctcgaaaccggatcttccctgagtttcaagctacttactccgagcttttcgattctttggagaaagagctttcccttaaagggaaagcggatttcggcggttccagcgacggaaccgcctttaatttcttggctcgagctttctacgggacgaatcccgcagatacaaagctcaaagccgacgcaccgggtttgatcactaaatgggttttattcaatctccatccattactctctattggtttaccgagagttatagaagaacctctcatccatacatttagtctaccaccggcgttagtcaaatctgattaccagagactctacgagtttttcttagaatccgccggtgatattctcgttgaagccgataaattgggtatctcacgagaagaagctactcacaatcttctcttcgccacgtgcttcaacacgtgggtggataa

SEQ ID NO: 36729 - DNA, 2163 bp, Arabidopsis thaliana landsberg
tgtctagattccatcaaaagtcttatctgtatgttttatcccacatatcaaagaaactagtaacacaaatgtatcaatgtgtatatatgtatgtgtgtatcaggttctgtttccaaacgaagcagtagcgatgatattggctaggattgttgcagttttaggtcctatcgaaacagagatgctaaagaaaggtcaagagacacataaatacttcaccaaagagtatgatctctaccacttaaacgaggtaatttttcttaatataaccaaaaatacttgagagttattgcttgaatgtgacgcattattcttgatttaggagagcaatgagattgaatacataatcacagaagaatcaagcttggaagaacaactacaagttagtgatgaattgttcttagattttgtaaggactctacttgagatcaatcctttgagacgtccaacagctctcgaggcacttaaccacccttggctctcttcttcttcttacaactgattttgcttcttcttgtgttggttgtttggttttgtcttattctttgtttctccagtttttttccctcttggaatcttgcttgtgatttttgtattgtttagtcgctgtaattgtgagattaatatgtgtatagaacggtttttacattgatttcacattgtaagtaaaaagcttgtgcggtgcaatattttataaccttgatacatacatagtttctcagttaccagttgttctaaatcaaattaaacgttggacctatgaccatataatgtgcatatattctctgaccagtgacgaccatatatgatccatcattttggtcccttatcaaatatcaattatctatgtttaagatcattgtagaccgaatagcgaagcaaatcctaattaatatccaggtagttccattagttactacaaattatatcctccacatgcatagttatgaaagaagaaaaactgtttattttccttgacatagtttagttttccattttatttttttcaccaatagtttagtttttccatgtatatctcaattatgaattaatttaatatatgtaaatcatcttacaatagattttacatattgaaaaaaaatatagactctataaattacattttcttcaatatggttaggtaaattcactttctggagatatcagagcaaagatcattttgatctttcaagctacattatacaatacctcaaaagctttttgaaatggtgcaaattctttctcagagacacacatttctgttaagccaaatcattcgaagatgaaacgcataagaagccgtactgatttcattttctcaccctttttgtcatacaaaggcacagatcgaatccctggtcttaactctgcaacaggcaagcatgtttgtccaccaaaatcatccttcttcgacatatcatactcatgcacttctaatcgtagcagggccagctctggaacggttaatgggaactcaaacacctcatcccaagctggtatccaattatcctccagtgttttcgtcttcttcattactgtatcccctggaactccagctatcccaacctgaatatgcatcaaaagctcaaattgttatattgcaagcataagagacaagaaacagttctatctcaaaacatttgtgtgaggtttaaggcagggaatcaaaaattgacccttgtatagaagtcaggcggtgaatattggtcaaagtgtgtgtggcggaaatcaaagtaccagccttctcccatgtatacagttacctaagggaaagaataagttcactgagtttgatcggatttgaattggtaaaagaaagaccaaccagagaatcagatatctcaccctaagtgttgttttcacaggtagagtagcttttgggtcaaatatgtcactatccgaaccacttttcagcagaaggtcaggtttcttgatgtagccacatccgccattggctctaaacattccctgcattagccacaatgatcttccatacccctgtacatggaaaaagatcacaatcaaatcagctgaggaataaggttgatgtcctgtaaaatgatggaacatagctcctccaaaataactagaagttttactactacgtagaaagaagttggtaatatagcagaaggagatacctgcatattgaaagccaccattgac

SEQ ID NO: 36730 - DNA, 3572 bp, Arabidopsis thaliana landsberg
aagccgaagaagagtctcttgatcagtccacttcccactaccttctccaggtgcctcagcaggttccattagtataaggggagagggggacatatctgagctgaacttgccactgttaaagcattccgtgcataagtcaaaatctgcctgtcaaaatttgaatattagcatataagttacaaaaaaacgattagagaaactagcaaaaaaatgcagtttagagataaaacacctgtttcgggcagtggtagcgcttgcgagagcaatcagctgaacaggaattgcagtgatattcgaccgctggaccctcttgtttcagcaattcatcagcagccatcggatcaggaaacaaccctgatggagtagcttgtgctgtgaaacgaggcttgtgaacaagaggagggcaagcctcatctacttgaaatcgatataaactgttaagcagtgactccttatcccctaaatcatcatgatcagaggctgttgaaccagtatctgttggtggaaatgggtggaaattgattaagccccagtagtccaagaactccatcacctcttgctttgcttccgagtctccaacctcgagttctgttaagtcttttaattctatttgtatgtttggattggaatgaaacttccccatgatccaattccgtatttccctatatacctcagaagtgcgaccctccaacttgccattgaagaaagagggcaatgaacgttcctcaagcgggtgaattttttcccatgaaaaccaaccttcaaagaatttgaagtacaggaacccaaattaaaaacaactcctttttatcataaatgcgagggtgagaagttgtgaaaaatcaacaataccaacaactcaaaatctaacttagatatcatattaccacaagaaaaggactaggagcatcagttcatagcctaagttttttcaaatgagattctactagataaaatgagcatgcacattctactttgatccgccatatgatgatttctagaaccaaacccaattccaaatctctccttgtttccagacgaagtgatacataaatcctagactacctaaagttctttactttgcctactttggaaagtctctccacataaagtttcaaaatttgcaaagcaaaacagtaacaaatgtaaaacgaaatcaatattttgcatttagtctcaaccaaaaacaggaagaagaagaagaacgaacgaaccgcaatgattaggcaccacatgaacattactgtcacgagatctaattgcttcaaaatcagcttcgatcttagcctccaaagcctcccactcacggatcgccttattcctctcttcctcctccttgggcttctctccatccgcacccaccgctacattcaaaacctccgacttaaccccatccgccgccgagggcataatactcggcgcctgacgagctctagttaaaggcccattatgtaccggagaaaaagaagcaagcatcgccttctcacgcgtcaacatcctcttcgacggcgcagaagagaagaaattagaacccccaagagcattcgctttccttttcaaacctccgccgcgtcgccgtggcgccggcatcggctcagatgccggagaatctccagagctaccagcaaaagctagggttccagcagaatcgcgtcgtttttcctccatctctcaaaggtcacacacacactctctctctctctcagtgttctttgcaattgcagctacaaagaagagaccatttgcaaaacgttgctattcccaatcccccaatttcgcttctcttccccttcaccgtttttgcatttttaactctcttttctttttgggactggaatctgcaatgtgttggaaactcggtcacgcggcttgagtggttttgttcggtttaaatcaatcaatctcgaattagccttccggtttttaccggtttggtgttattgatgttgaattgaacaaaataaatcaaactaaatcgctctggtttctttcggtttcactataattttgtgattcttctgcttttaagaaatttagataaaaaatctcttcaggggaagaaacaattttcaacgaaattttgtttaaatcttcttcatatttaagagaattaatgccaaaccctacagcaaacagcaaaaaagaaaaaaggcaagtgaaacaaaactttcctacaagggtttgtttggtctgatatatacaaaaaaaaattaaaattcttggtgtaagaaattttcgaaattggttcctttaagtgtggtcatgacctcttcccaattctgtacatgttttgacaatgaacctccatgaatcttcacttgcctactctttaacttacgttttggtacctttagaaactcctgtacatcgtctagtctctgcttcattcaaaaacacatataagataataaacaatcagtaactggaactagttcaataaaaaaatatgtaataattaccgtgaggttcttgacaacatcttcgtagtagacaaggatatgtcgagtggtattgaagtaagccaaagctttcaaagtcatttcttgaatctgtctcagctcatttattaaaagtgttgtgttgatcattggtttgtaacctgctaatatctcagcttctttggccgaatgggtgtgagacttgtgagtcccgtttagtagcttagcatctctgtcataagagtttgcgagtactgatatcatgcggcgcaataggttttttctgaataggaaaatcgcagagacgcctcgggttttgaagtattctactatttcttcatgatgtttcattagaccctgcataagttttatccccaaaccaatcacattacaacgtaaacaagataatgaaatatgaagaatccaccaataaaccaagataggagatctaacagagatcagaaccatcagaatagaatcaaacacatgtgtcaagagcgagaagtacaaacagaaatcaatcaaaaccagaaccagtcaaaacattttatcagcgtttacaaccacaaaacagttctcccctaaagcagaaatctctattatggattcaccgatctaaaacctatagctcagtactatacttatattagataacctagacactaaccaagtaacgacattagagagcatctcatagtataggatctgctctaagaaaatatatcacaaattgataaattcagcatctaagctatttagtaaccattcggtaaaaagagactagcaaatttctataacattcagaactttacctgattaagcatccatttcaaaccaacagcagatgtacactcgttcttagaagcactacttagccaggctaaattgtatactctgtgcaacgtgtcaaaaatgggagaggcattagccctcctatctttaaccgaaaagatctacccggtcgagctaatgttagtctgatggtgaagggaagggtcaaaccaaccgctaccggatctctgcatcgagagtatagcagaatacctaacgggattgcacgaacatttcgacgtaaaccaaatttcaacccacaacagataggcataagaaccacgaacgcaaattgaagacaca

SEQ ID NO: 36731 - DNA, 1444 bp, Arabidopsis thaliana landsberg
gtaaagtaagaagataagggtttttgacttttgagaaagacgaccgttcgtatcgtttgcttatgaaactgatgcaatatctttgtgaatgacaagttttcttttgatgaaagttgatttatagccggcaacgtatatatgtgtttttagtttttccgaaaagggttcgctgccttcatggttcatgcacatgacttagtgaaaaaatgagggaaaaatggagaatacaggtaaggggtattaaagtaaattggtaaataagtcacatggtcatcttctttataaatatgccacatctggtagaataatcactaatcaaatttactcatttagccgtcacctctgaatcttcttctccgatcttcaaacattccggccgccaccgagttctttgccgttgcaatgtcttcctctatgaacgtagcgacgatgcaaccactgactttctctcgccggcttctcccttctgttgcttctcgttatctctcttcttcttctgtgaccgttactggatactccggtagaagctcggcttacgcgccttctttccgttcgattaaatgcgtctctgtttctccggaagcttcaataggtgaagcaatgctcttcgttttttcttttaattttgggtttttgattgtttgatttcttaccgataaaatgcgggaaaatggttgaaccacatttagctcaagcttataatttctattctctgactaatttgattgctttgattgtgaatgtgaatcttcttaagcgtgaaaacagttctgatacatgtttttggacttgttctctgcagtaagtgatacaaagaagttggcagatgcttctaagagtacaaaccttataccaatttaccgctgcatattctctgatcagcttactcctgttcttgcttatcgttgtttggtcaaagaagatgaccgtgaagctcctagctttcttttcgagtccgttgagcctggttctcagatgtctagcgttgtaagtatagaatctttctttgtacatatcctttttatctgttaatatatgtctcagttcctaattgtttctttgatgtgattggtctcgatagggtcgttatagcgttgttggggctcagcctgcgatggagatcgtggcaaaggagaataaagttattgtaatggatcacaacaatgaaaccatgactgaggaattcgtcgaagatccaatggagatcccaagaaaaatctctgagaaatggaaccctgatcctcaactagttcaggaccttccagatgcgttttgtggtaagagattcttcttgattgtctataataatcactttctagaatagttaacttaaaagaaggaatgaagacactggttttaaggactggggatatgtgatcatggattggatgttttcgagacaagctcttgcttttgagtgatatttgaaaatgtcaagtttcat

SEQ ID NO: 36732 - DNA, 2634 bp, Arabidopsis thaliana landsberg
  unsure (1)..(2634): unsure at all n locations
ctacctagactaaacaatggactgctcccttatcaaaagaaaaaaaaaacaattgggctccttgactctactaaacacaatgggcttcgtgagataatataatgagtccattagtcatctataaattcagtgactagcgaaaaacatgagaaacatatcggaagcttcttcaccaacctggaaagagaccaccggtaacgtctccaacttatttccctcttctttccatttttttttcaatttacttcttcttcttcttctccagtttcttctatcggtttatttttcaattccatcttcattgtttcgcagacccatagataggctttgatttagggattttaatttcaatggctgcgatcgcgaatccacgcttgctgcttaattattcctgcgaatgacattttcttaagtttaacctttttattttctgttatgttgtttgctcgtttcgaatgaggtcactttttaactcgttcatggatttagcttctaaaaattgatctttttttgcagaaatatgaattaggcatatatatatatatatatggttttagaggttaatgtacattgtattattcatttgtttcattcttacaaaagtagagctaaaaaaacctgagcttttaagtcaaagccttattcaaaaatgtttttgctttctaatttctaaagcttaagcattgatgttactgttttgtgatgttcaggtggactggaatcagttttggtagagagcgttgttaaagtttcgtccattaacagtctgaagagttcttcctcaatctgtgtgaccaccacttcgtgctcctcctctatctgtttctcattccagtctcgtctttcgatttctctagcacatgcttgtctcctctgctcacttgttccgcgttcaagctctgattctctctttccctgcaaccatccttttgcctcgcataccaattggttctcaaagtgttgagtttcgtggaatgagtttgtcctttgcatcaattcatctctgaaatagtccattatcagatgttcttcgtggatccaaatggcgtgtctttctttgactcggttccatagctgtgctgccttctcttcaacctcatcattgtattcatcttcactctctctatcaacagtatcacaattctcatcatcatcatacttggtatctgtctcttgtcctccttccatgcaagatgcttcatccattgagccccattcatccaaattgaaaggactaatgttggccaaagactcaaaccgctgaatcgtttgcatgagcttttgttttggttcctgcaaaatcatttacataacgtatgtttcagactttnnaaaagtctgaaaaaatctaagaagagaacttgcttcgattgcaatgaaggaaatctatactcactttccacattgtcaaggcattgactgaaagaagagtctgatgtttcgtcatattcctcatgttgaatctcaaacactgagacagggctgttgtgctccttttcacactgtaagttctcctgaccatgatcattacatattagaccaaccaaatcatccaactagtaaagtgcatagggtaataatttcagtatgttaaatgttactcttataagactcattcattaagttgttagattcgtagtcataaaggaattaaagggtacatgctattatatgtaccaaggacaaagacagcttctgttttgtcttcatgtgaatttatattaacaaacagctgcacgtgcatttagagacagcatgggcgaccttacggttgaagcaaagtcaacccataagatctctattctcagatcacattgtcactttatttctttcttaattttgatttgattctgttttctctttatttatgcatgtagtagtcaaagtatgtgattaattaatgttataagtacgagtttctatttctcttaatatagtattcttacctcaggtcccacttcagtgtcggctagtattactgctgtgcaagaatcttcgccgacgcagtgtaagttgtttttaacactctgtttttcaccgcactcctcaacgttacttccccatgatgatggtaaaaactccgatgtaaaatccaagtcagaccaactgctgcaggatgtgccgctggtggtggaggatcctgtggttgttgtcgtgttcttggttgtgtactgatgaggttcaaaatgtgatatgtcctcatgcaggtccttagatgagtgccatcgcacgatgtctttgacccgaataacggtgatgcttgcttggttttctgctttgttcttggttgctaaccgccgagaaaggctccttggtaagatccccgatggagcggatttgatggtgttggaatggaggttcttgatggcgttaatcacagcctgcaatgcattggattgtttcctctttggtatcattgggaaagggttgagaggatgccgtctgggaatcgatttgaacccgtttgaggaacatgagttggaatctcactagagacagtctttgagcattctcgaccttagctccatcctgaaacactctttggctcaggtacgcagctgaccttcaagtccactgaactgacgataagaaaaagtcataacaaaaagaaaatatcttaaagacgggagtggg

SEQ ID NO: 36733 - DNA, 3382 bp, Arabidopsis thaliana landsberg
ctcgtgaattgtgctctgaagaccaccaaccatatgagtttacaatttagaaggaccagaatcaccaccagtattttttttattggaaggtggtttggtcagatattaaaagagggaatccaaaaataatatgaaccaataacaaaatacgtgaacttttacatattaccttccacgtttggcacttgccagcaagactttcaagtccttgctccagttcttcaacattgcttttcagtataaacgcgcaagaatccttgaaaccacccggtccttcaatggactgtaaaagtgtatccatttctcgggccatctcatttatctggtgcaaaaaaggaagagtcagttacgctaatggtatcagtccagtaagtaaaatactacagcaaggcatgattgtgaaagcatgagtgtcggatgactctctcctagaaaaaacatatccacacgaaaaaatcattgagaaactaattactatcatgaattcatgagtaaaccttacattactgggttggtttgacatgttatgctcaagtctcagaggtccagtactgagcggagttttgtgctgctgatgactggctgatttttcgaaggaagatttcacctgttgtgacaattgagaggcacggatagaaggtattggctcaattttctctaccccttcattagtgtcctgattttggcctagcagaggacttaaattgctcagcgctgatactctaccagtctcaataacttgtacagatttatctttgatgctcataggagggtttacataaccagttccagactgtacagattgcttatgctgagtatctctcatagaaggaaagggaccagatacaaaatctggaggtgagacgcttttcccacttgaccatggctgagatgacgtattttgcggtgactgcaaaattgcgttctgcaggccaggagatccaaaaaaagctgctgtactctttgactccacattggcctgcaaatgcatagaattggactgcgcaaatatgtctttttgaagcttttcggaaacagggagagcaggaccgaatcctgcaaatttgttggtgtcatatcctaaggacatgggtagttgcccaaaacttgttccggacaacttaggaatcatgctttgttgagcatcttcaacttgtaatggtttttcagcatacggttcttgcttcttgttgttgtccccagacactgagcttttcacagactcgaattccttgctagaaatgttttcatttggcaacctttgttcagtagagaacttctctgtgttgaggtgtttctgatcattttgtactgcaatattcaactgttgatgtttttcagaagattgtttagaaaggtcatcttcaatcaaaggggtataagcatcttctatatcagaagaagaggccaaatcagtatcagatgaagctggccgtcctgcaacaatgttcgggaaaacaaattaatgttttttaagtaatgttgtcaacagcaatgagttaaaccactgagagttataatttctacctagcaacattaaacatgaccagcttcccttccaaagtgaggcacacaagaacaaaatatggttgaagttctttaagttcatcatctccggaacggacattaacagtcccctctatagaaaccctatcgatacagagtcccatgactgtattgtcatcgttgttttctgaaaaaacaaattatcttctttatattgaacgtgtcattgtaggaaaagtacacatacaatacagaaactatggactgcataccttggagcccaatccttggcaaaaaggtctcacgatcaatatcaacaacggaaactgcacttttatcatcaccagatgaccaatccagtaaaacaatatgctcatctatgctctttctgtttgctgtgaccgccagtttgctgtagggtgaggtgaaaacacagcaacatttaccatcttcacatcgaaaatagtggtagtttacatagtccgtttattaatataaaaagaggaaatgtcaggaacaattaaactgactttgttgcatctccaaacgaaatggataaatataatatgagctcaaatttaattctagtatataatgcggaacacgtatcatagttagttgtatttgaaaaccattctcgttagaacattcttggtaatttacagcccttccaagatagtttatgtatggacaaaaactttaagattccatatacagtgggaaagaatgacaaatggctagcagcgagcaagaaaagtggagtatttatgaaaagagaaatcaaaataaaaagaatagaaagaatagtaaaattagcctgacgtaccattggtctatgtagctaaagagtaaatgaggtccaacaccgaccgggacaagatcatccatagaacatggaaacaaatcggagaaggataaagcaaccagattggttgaaccctgcaaagaagttcaaaaactcacaaatcagattaaaaaaatataagtaaagttacagatcctattgttttattccatccgaaaaggggttatgcctaactatctacgcctcagcagcaaaatcaatgcaatagaaatgttactcacatcagaaatcttcccatctggactcctgataacctgaacaaggtaattttcttccctgccttcaatcagctgaaagcatccaagaagaatacagttgttgcgtacccatctgatagaatcaactgttgcagagtattgttagtaaacagtcattcattgagagggcttaacttgagagccatttatgacctttgtaatggaagtgtgatgggagatagcaggaaacgagaaatttcaacaggatcagtttgtatatatcacgaccaagccccagaatacagtatgactcagtccataagaaaagatctcaaataccttacaacaacaatgaaatttgaaacaaaacggaaaatactggtaagaaagaagaaggccaaaacctgcaacatacctttcacgaaacagtcttcatcggaatcaccaatccaagagtcaaatgatagtgctatgcaccgcttctcattaatttttgacgaaaaaatccgaaggctgttatcttgagctacagcgatataactcccttttgaactccattcaactgacaaacaaaacaaagtttacaagtaaattcctacagagtcgatcttacataattgccaaaaacatgcttttttgctgaagaagtagcaatagagatgaaacaaaccggcgtcaacagcatccataacatgtctagggggtgcattatcaattccatgaaagagcttcccagtattcgaaagaacaagataagaatgcttatcattccttctccaccgaaaatccttaacgaagcctgactcatcaggtg

SEQ ID NO: 36734 - DNA, 1634 bp, Arabidopsis thaliana landsberg
  unsure (1)..(1634): unsure at all n locations
aaagcgactatatatatatctcattgttcatactagtaaagatgacatactcccacaagtgatacctcattattggctttgtctttcaattatttaaggtctgagtgtctgacttctcattgttcatactagttaagattacatactcctacaagtggtacctcatttttggttttttctttcaattattttaggtcttaaataaattatttgtagttgtatattactaacgtagtccaatctatgcatcgtctaaaacaaaatttatgttagtttagacggttaaagcggtcatctatgcatcgtctaaacgtctaatcgggacctaggcaactgtatagtgtatagactgcttttaaaagcacttgttttctctaataacattttgttttgaaaacaaataaattatcattagtcaacttgtcagtaactacaaaaccgccatccaaaaattatatacaagaagccaaacaaatatattttagcagatttagacaactcaactgcccacgttatagaccatgcaagactgttgaaatgagcagatttatgacatatttatatctttgtcttctagatatatcatagatagaattacaattttttgcaaatttgctttgacgtaggtaaaactagagcatactttatataagttatctatgactacgtcaagtttacgtttaccggaagacttgcttaatctgcattgacaagcatatttacaactaacacgaacaaatcttctatgtaaacgtctgcttttattttagatggactgctactgctagaataatattaaaaagtttacgtgcattgtgttgattatttacttttggaatagttttagcatatagtatgcaaagactaattcaatgttgtttattagaaaaagagagtaattcaatgtagtaaaagaagtgctttaaaaaccgatttaggcggtcgcgtaaacctccattaggcgctaggttctcggaaaacgtctagacaaccatgcactttgaccacctaaaatcatatagattttgtttttagtgtattttatcaattttcaactaagttttgtttctatacatatagttataaatgttcatataatgtatgatataaatcaaataaatgttttggttctgtattaacatttttatttatttttctaatagatatttttatatgtttattatatgtaatattatatttatagtgtttaatgtataaccactttaaccgcctaaaaattgtatagatccccgattaagtgttttaggtactaggcattggatcaccgcctgcttagcacctataaacctttttgaacattgagtaaaactaatgctaacactaaaatatcaaattaagtgaatatagttggtaaatcttattcnnnnnnnnnnnnnnnnnnnnnnnnnnnnnngaccaaatttccaccatgtatgtaaagatcagatagaaatcaactattatagtttgtgtgtatattgtttccaacaagacatgcttctatcaattgatattttgtccacattttcaaatttctgattcaaaaaatattgatattagcccattccttaagaataccaccaaaagttttaatttcaaaaaatatcacaaacacaaaaattaattttggaaaa

SEQ ID NO: 36735 - DNA, 2344 bp, Arabidopsis thaliana landsberg
ctccttatgatcacaaatacaggtttcactcttttgttttttgtttttcttgtttctcttccatgtcaagctaagaagacgattaccattttaacttgatatatatttcaactatataacttctgattctttcatttatgaggatcggaaacaagaaattaactttactttaggatcatagttaacaaatttgtattttattaaatgaatactgaatataaaaaaaaattgtattctttttaatggttggtgatcaacttttgtaatttattgtgggtaaatactatgaagtatatgcactagattaactaaccttattttctatgagttaggtgaataactatttggttaggttacaagtttaccctcaaaatagtaagagtttcatgttggttttaaacaaataacatgttatgttatcttattggactattttatttgaaaaatgttttaatttcttcataaaatatataaattacgtgcaaataaaaaatgctaggtggtcaaacaacacaaaaatgttggtttccacgtttttttacctcaacaacaattgatttttaataataatattttcttaggttaatttgaaaattttaactacttgacgactaaagctccctttttactcaacatttggaatattcaaatcctagttccctaatattcaaaaaagaagatctataaatgtgaaggctattgtagaatattcaaggctcccattattactctcgttggctaattagcttaaaagccgcctttgcttttggcttttgctttttggggataatttatagtaattgaaaaagagaatgtggaacattcaaggcactcattacttgatttcaacgactgatatcaaatctgatatattactataaccaaaagtagaaaaaactgtacttggttgttgtatcctcaatagcgtcatcaaatagtaacatactattgaaacacaaagtactgataaattaaatatgagacttacttggatatattcatgcagtaacttaagagatatgttcaactacatgtagaaaatgtactagattattgaatatgactgaaatggaaatgttgactacaggatatgggaggctttcttagtggttcttgtggtttacacagcttgggtttcgccttcgagttgggttcttgagaaagccaaggccaccactatctatcaccgataacattgtgaacgccattcttcgccatcgatatcatcatgacattctttgatggttaccttgataaatcgacttaacctattgctgatgaccgtaaacagattgcatttaagtacttgcgttcttggttccttcttgatcttgtttcaaccattccctcataggctgctatgagaatctcatctcagtcttatggattgtttaacatgcttcgtctttggcgtcttcgcagagtcggtgccttgtttgccaggttagaatcactaaacttttcttctttctttcattattttctttaatcttgactttctctgtttaacagactagagaaagaccgcaacttcaactacttttgggtccgatgcgcaaaactcgtttgtgtaagaacatcaaaatgttttgcttcttataatgttatctttattcaaactactacactctcgatgtagtaatagtgtagatactaaccaaccagagcatttttgcaggtcactctttttgcggttcattgtgctgcatgtttctattaccttatcgcagcgcgcaattctaaccccgcaaagacctggattggtgcaaatgtagcaaacttcctagaggaaagcttgtggatgagatatgtgacttccatgtattggtccatcactactctaaccactgttggttatggtgatctgcatcctgtgaacacaaaggagatgatatttgatatcttctatatgctcttcaacctcggattaaccgcttacttgattggtaacatgacaaatttggtagtccatggaacaagtcggactagaaattttgtaagttagcatcttcatatccatcttcaatctttgaagcatatccatcgcggtttataatattttgttctcattttgcagagagatacaatccaagctgcttcaaattttgctcatagaaaccatttaccacctcgtctgcaagatcaaatgcttgcacatttatgtttgaaataccggactgactctgagggtctgcaacagcaagaaactcttgatgcactcccaaaggccattagatggagtatatcacactttcttttctactccctcatggataaagtctacctgtttcgaggagaaaaaaaagacgtgttttttaaagtggtatcctaatgacaatgcatg

SEQ ID NO: 36736 - DNA, 2209 bp, Arabidopsis thaliana landsberg
tgtttgctttcaggaattcaagaaatgtgtttgtatcgattgacttgaacttgaaagtagcaatgtatttcttgaggaattcgtcaaaagcagttcttccaatctgaaagttttccagtaaatagatgaccattattgtaaacattacataacaaaacacctaagcgaagagggcaattcaactaacctggcgttcaattcgcaacacaaattggaatcctttttcatatgggacctgagaatatacatcatctggatcaacaccttcttgtttgttccacagtttagtgcactccaagttgtccttaaaccgttccatttcatcagttaaacccctccaaccaatgccaatgttcaaagtagctatatccgccccttgaacaacctccacaattctcctctctgcgtaagttgtaaatccctattgccatgaacatgaaataaacactttcccatcaacaaggcaaactctaaaaacggacacacagttacacatcctaatttgtagctaaaagaagcaaaagcacaagacaattcaaagctacctcattcaaccagaagtgttcattgttgatattagtgatcaaattcccagtccagctatgtgcgagctcgtgagctacaacttgagctccagtggcgtctcctttgataacagtaggcgtcaggaaaaccattcttggattctccatacctccataaggaaaactcggaggcagcaccagtaagtcaaatctctcccactcgtaatctccaaacagcttctccccttgcttgatcatatcctccgttcctgcaaactccagagcagccgcatctagaacttcaatggcggcagattctgtgtatacccgagtcctaggtccaacttcccgaaaccctaactcaccaacggcaaaagcaaatagataaggcggtataggctgttccatagcaaactcttccacaactctatcctcaccacaccacagtgacgaccccagcgacccagcctcgagatgtttagcctcctcaggaaccgcaagcctacgacggacgtggcgagccgacatgacggcagagagcgaattcggtatgttcataacgacgtcgtaacggatcctcgcggcaggagtgtcctggcatgggaaaatggatctggcgtgaatcgcttgacactgcgtgtagacataaggatgcaatttggagaaagtttgaagcggcgaaagccactggagagcggaagcagaaggcgaagtggagtagacaattagcagtgaagattgaccggagaggactacgacaacttcggtgccccgaattcgatccggtgtggtggagacggagtaagggataggctcgagagtgagaggatcgaggaccatagcaatggaaatgcagcgagtatcaagagagagttcgccggagaaggcggaggagagagtgaggagagcggagccatggattatggaggtgttgaaatcgaggtagagggagagagcgacatgcgtggtgagaggatgagaggaatcggtgaaagagtgtggatcaatgggtgccattgctgagtgagagaagcttgcttagggttttgaggaaaggggcagttagagaggtggagaagagagtgtaaagcgggagaaaaagaaaaaatgaagaattgttgttcgatggtaccattttatgatgataaataatgtatttttggaataatttggttaatggagaatcatttagtgcataaagttgaaaccgttagatattaaacggcgactaaatacaatgttaaacccaagttggatgaaccaaaagcacaccaagccaccaacaatcctgagatttttaacaaccatctttttgggcttgagcctctattgagcttcaagttttaggtccatgagttatatactcacacgagtaatctacttagcaacaaacaacgagtttacattttggtattggtgtcagatttatcgtctcattatttggtgaactctattacaagatcaaacaatctatttgtttttgcatttggctcaaaagctacttggtaaaaacttcgccaaaaaaaaaaactctcagtaaaaattacaattattttttcctgatggtttaagttgttgatgacaacaaatataaaatctgatggttgacgattactactattaggagagtcaataaacgggtaaaagaacaagtgctgacggcacccacccgtcaaaaccgacga

SEQ ID NO: 36737 - DNA, 1701 bp, Arabidopsis thaliana landsberg
  unsure (1)..(1701): unsure at all n locations
caagtaccaggcgatacaatcaagagcttagctgaattaatcaaaagcgagacgaagaaggttgagtcaggcgcagagccattcataaatagtactctacgttacatcgnnnnnnnnnnnnnnnnnnnnnnnnnnggcatgaatgagaaatacgagaaaatcaaaatggaatggtttgaatgaatttatttcttgcattctgttaggcaaatcatcaataatcaatggcttctcgtcttgttgcagaagcatgaagagtaatcttgagaaataaaacttgtatcattacttttcatttcctagttacactctctaccaataaacatgtttgcaaagtttaaaacagtaacatacaaaatatggtcagctgaagaaatggtgggaatgaaaactgattcaaaacatgtggtgtttgtgtggaattatgcataggactgaattgtaaaagcaaaagaaacgttgattccgacaaactccattaatattaagaacaaaaaggaccagtcaaacttgggtgtctgtccattaacacattaattcattcattgttagaagattaatataccaaaaccaaatacataaaaacagagatttccaatcatcatagaatggagcatgccttctgcgctttgctcttcttcttcttctgcttnnnnnnnnnnnnnnnnnnnnnnnnnnnnnngtcaaacaccgccttcacattctgcactctcacatcatcaacattagcattaacattaacattagaaatctgcaacaagggtatatatactaatctacgtacctcttgagttttggaactgcattcgatgtaagtaggtgctcctatttgcttcctcagctcctctccctgagcagtagtaatcggaacagcaccaggatggtcgataaagaactgtttatcatctcgaagatctggagagcaaaaacacaaactcagtcacaactaataaagtaaaaggagcgagatcaggaaaaaacaatggaaaactcaccaagctttgttccacaaggacgatggggcaccaggcgcgtaatgtttcaactccgggatccactgcaaacacaatttgtgacaatagttcaaaaaatgtgacgaaaactcaataatatgaaacaagattgatggatttttaaaacctttttggagacgttttcataactggctttactgataagagagaaggccaaaatgaaaacatctgctccacggtaactcagtggtcttaatctattgtaatcctcttgccctgtttattcatacccaaattttcaaaatcttcagatccaaaaaacatattccaaatttcaaacaccaagatatataggaaaatgaaaaacctgcagtgtcccacaatccaagattcacagtgcttccattaaccacaacattggcactgaaattatcgaaaacggtaggcacataatcctgtatatccacaaaagaaacaagaaacatgagatatgttgttgttgtggtaatgaaacaagaaacatgaaagaataattgggacataaccgtagggaaagtgttgcttgtgtaagaaatcaacaaacaagtttttgcgacagctacatcaccaaccgtgacgcactttacgaacctcgtagcgctcatcttccctcaaagtttattaatttcagggaaatgtatgaaacacaagatcttagagagtcagcctttggaattggagattcttg

SEQ ID NO: 36738 - DNA, 838 bp, Arabidopsis thaliana landsberg
cggagatgcaaaaggagcgttgttggacactgaatttgctatgcgtgatgaagataacaatgttaaagcattgtttcgacaaggccaggtacttaaaaacttattgttcgacagttttctagaacctagaccacaataacgaaaattctagatttctcatgagaggaagatggtgtctgtttcttatctgcgtttgtttataatgttaggcatacatggctcttaataacgtcgatgctgctgctgaaagccttgagaaagctcttcaattcgaacctaatgacggtgagtgattaatcaagcatctattagttgtggtttgacatgtttggttcatcattatcaatgtattattagagaaatctaactagcatttatttctgtgagttgatttttcagctggtatcaagaaagaatatgctgctgttatgaaaaaggtcggtatgcggataaagaacctaagttctttttgcagttactttacttctagtataaaatcttagagctgacgttaataaccatgtgtgcagattgcctttagagacaacgaagagaaaaagcagtaccgcaaaatgttcgtatagggggggtgctctgcttcatttagggtaagcctaagatttgatgttaatctcagaaaactgacttagtataagctttatgtcaactaatttttttgatgttgtctatgtaggtttggtcggatagtgaggaagaagactaacaaaaagtgaaaagaagcatataaagaaagaaaacattcaaaaaaggacttggggaattgtttctatttccctcattttggtaaacatgtttttacttttgcatcatggcaaag

SEQ ID NO: 36739 - DNA, 4434 bp, Arabidopsis thaliana landsberg
  unsure (1)..(4434): unsure at all n locations
aacttaaaagaactactccagggggttagatccaaaagtgaaaatgacagcatttgcatcctccaccatctgatcagtatagccgctctgaggagttaactgtttcacccagtgttttacaatctaaaaaaaaaaggtgggagataagattgatagtttcagacaaatagcacaatgaacagcatgtgaagaaacttaaaaacagcaaagtaaatcaatggacataagaacatatgcctgaccagtctatttcatattgaactatgatctatgcttagcccaaaatcaacaaccatacacgagtaagaaccaatacaatgaaacctaaaagaccattataaacacaataattttattcttgtcgattcagacacccaattagcacaaccatcaaaagataacacttgtaaatatacagaacaaacannnnnnnnnnnnnnnnnnnnnnnnnnnnnnnngcgtcctagaacttcctctcgccgcatggtatcatccttgctctcgtagagtccctcatcaaccaagtacttgagcatataagaaaatacacatcagataagccaaatcaacgaatcctttaaacagtggaacaatttttgtataaacaaaaaaacaaagctttaccttctccagctccacattacgcttaatatccgccgaagaaggcccagcaagagagagcggcttcgtaattccatagcttttaggagaattcagcggcggcaacgaaccacctaaattttgagtacccaccatcataacacgattgataatcctaagcgatcaaagcagaagcgcagcacaaaaacataatctcgcttcacgatatgattagagggagatcggatcagacccccaggtcaagatggattcgagacgggaattgcacaaggagaggaaacaaataaaaaggagattttgaaaatcggaaaccctaaatcgatggaaggggaaagagactacggtgtcaaaaaaagtcaaagaagaaggagaatctgaaagaggttaaatcgatggactaggaacagagagaagagagaaagagagagagatgatggatcgagaaggagaaggaggtatgagggagatggagagagagagagcaaaggttggggaagatattaggtacacggcgattcgattttataattaaattttgattagtggattaatgtgtatgattattttacggagggagccgataagtctccgttcaaaacaagaaaacattgtaatcattttgaaaacaaatctaaattagataattttgttcagatttttaatttaaagattttaatggggttagtgggattattggtaactagaaatcatgtgtcgatggaaaccaactgatttaaaatcaccatctgttaattttaattgataaagttgaaaactggtgtgttgtttattagattttgatataattttgatactatattggattttaacatattaaagtgtttttaaataaaagatacaaaagtttaggctgtatatacaaaagtttaggctgtatatacaaacatgaatttcaattagtgatgtaataatggatttccttgattaaaaattacaaagacccaattctcatggttttgtgagattgcaaatattattttttttttagtgagggagattgcaaatatttttaataacaaataggaacgactttcctaactgtctaaaacttatcaaattcatgtaaaatttattaacactcgaatcttttctttccaaatatgtaattcattatactcctaattggaaaaaaaactttattattttagaatccacttgtgtgatatttaaatcctaaattgattcatgaagatttgtaaagtttttatttttttgctaatcaaataaaaagtctggaccggttatttgatagtttaaaaatgattcccttctgacaattgcgtattaagatctttctttatactaaagcgttataaagatttgtaagataaattttctcctctcagaaatttgatttttaagctaaaataactattcgatctatacattagcttgacattattatttttacaaaacaaatcagtttttataaatgctatttttcaacaggatatgatatttctctctttgtcatgaacaatatcatatactaagaaaaaatgatttaaaaaacaaaaaatcttaagaaattaaagaatagaaaaattgcctatatatttttgacaccaaatagagaaattactaagaatatatttcgtaaatattaagatattcttatcgtttaatttttgtcattttctttaaaggtataataaagataattaatgagattttatccatacttctgcatttatccacgaatcaattatctgaaaaccggaaattgacaaaaggaaaaaccagccgccgtttacgctggtatttcggtaatgtccgtatatcataaagtaacggtgagccaaaacgacgtcgctttctcgttccttacttctataccactctgagctctgagaattaaaactcacatacatacatacgcttcaaattcacagtcgctttacgtcaccggagagaaaaacactcagaagaataaggttttcttcgatggcttctaatggcgtggacgagcagattaagttggtggaaggacctgctggttatgtactcgaagatgttcctcatttgagcgattacattctcgatctccccgtactacttcctctctctatctctatacgattccatcgattattctttgaaatcgacattttcatggatcggtggttatacgatttacgaatttgatattgttgccgatttggtggttcgtgtatagcaaatgcaaaagttgtgtttgtataattggtttcgcctatttttagcctatatgttgattcggactgttgatgagatcctggtctctatcagggagagaattacataaatatttatattcgtattagtgcatacaaatgtgaaatgttaaatcaatgtcaacgtggaaattgattggtgcacatatgcttactcgtcaccgaatgtttgattagatctattaatcacttactattttctaaatttgatgctaatgtaatgaggttcttatacatgtagagtaatggaagaattggattgtaaattagtcttgccatggagaaaaaaaaaagctttttggttcatatttcaaatcatgctatagcttcgtttcattttatactttattcacttttgctgataccttctctaacagacttatccaaacccgttgcaatcaaatgctgcttattcagtagtaaggtaagttgatgttgtacttatgaacttgattgattgaaagatgacggttagttaatagggttcatattctgtgtgattttcaggcagtattttgttgatgaggatgatacagtccaggaaaaggtgaaactcactgacgctttcctttcttacatttgttctcttcgtaagtgatcatgtgatatgtttagcacattgctcattttccctttcgtgtgatgtatagattgttgttcacaaggattctcctagagggacacattttagacgtgcaggcccgcgccaaaaggtacttcatctactccatgagtttcctttgctctgcagcttctgtatttgatgatgtaaaaactgctgatatatgattatatattgtgtttaggtgtacttcaagccatctgatgtgcgtgcctgtattgtcacttgtggtggcctatgccccgggcttaatacagttatcagggagatcgtgtgtggtcttcattttatgtatggtgttacagaagtgattggtgtggatgtgagttcaatttttgtacctacgatttatgcttttagactgtattttctagggatgatgatctcattgtatcccaacttgtagactgaatgctttgttctatagctgctattgcatattgtagtagagcataatagagcaatgtcagttttaatagcaaattacaatggaaagcaaatactatgttagccattattgattgagtaggatttgttttgactcatctggtttctgatatcgcagtgcgggtttcgcgggttctattctaaaaacactgttgcactaacgccgaagactgtgagtgacatccacaagcgcgggggaaccatactaggaacctcccgagggggacatgatacatcaaagattgtcgacaacatacaagatcgtgaaataaatcaggtattcaagaaaaattttgttttgttgtttcagtttgtttgtgttctatggagaatagttataccaataagagtcagttgctttgtctgctgcatctgtgatataggtttacattattggaggtgatggaacccaaaagggagcaaatgcaatatataaggttagtgaaatgttgcgtattattgttggatatacctatctaaaacatattttgaagagaactgtctaattaa

SEQ ID NO: 36740 - DNA, 875 bp, Arabidopsis thaliana landsberg
gctgctcctttggtttcttctccctttccttctcttccactggtaacttctcaagaagaccagcggtatcagaggcatctttgctctcttctttctcttcttcagattcagctacttccttgaacttttgcataaatgctttgcaatctgatcatgtaaacaagacttgattattatgcaactctactatgactttgaacatcttatcaacagaagggtgtcataaacacacacaaaacgctttccaatactacacacagctcagatccaagctacattgaggcaaccattattacacttaactgtttttgtctatgcagatcatatacatgaagctatatagttaacttctctagcttgattgccacctttgataggtttttatcatcaagtaactaccatgatactcttcaactttcagattagcgaagaggtgcatatgaaatctaccagagaaactaaaccaaatctctaaattggccaaagacactacatcgaaaacttccaaaacatgctgttaaacagcaatatcactaagttcaagatcctccaatgatctaagccataaattaacagtgtctacgctcgagactgctgattaagaagctcaattatgccaaaacagcatgcacaaagaggtaatgataacgtcaaagctactataacatatgcacagggaccgtcatcacacaaaaactagacatagcagtgctactattagcaacaattacgtagtaagatccaatcaactgagaaataaagaaacacaaaagcaaaattcacactcactctcaactgaagcaaaccggatacagaagagctcatctatcaattcaccatcggagaaatcacgagcgtgcaatgacacaagactt

SEQ ID NO: 36741 - DNA, 1632 bp, Arabidopsis thaliana landsberg
aattatgacccaaccttccttattaatagttttaagttaacccaaatatgtaaaaaagttttaatgtaacgaaaccaagacatggcaacaccttcttcagcttttagtatccttcatgctttatcaaactcacaccatccccaaacaaacataacacaaaacaaacactatgctctttggttagcttctgtcccaaacagatgtcatctttagtatgtcagtcgagattaagataatcctttagaaaatccatttttcttgatcatctgaagaagattcatctaaccatgattggtggatgtgcatccacgtcagcctttgcttttcctcctttcaattttaacccattttcagttatttttttccaatattatttaaccaatctaatcgtttgaaatcttaaaaggatcataaatcaaggtttaccttataactcagtaagacttttgttgaacaagaccgtacttttccctctgtaaacacgagctagacattagaacatggaagcaaacttctacagtatacccttatgatgagaaatcaaacaaatcagttgatcgtattttctgctaaatcatttcctagctcgataagtcacaagtataagccatgtaattgaagaacaagatttcttaccagataactcatgctttacaaattttgcaagccatgtatctgaactgatatgagaagacgtaacattatccaaccaaatgcgaaacttcttttccttcccatcaccgtataaattttccatctcatctatccattcatgtataggtttctccactccagacggatgaacaaaaataccaagtggactctgaaacattgcaaaagcataacaattacgtcaactaataagtctacacaacacaagcaatcaagaacatcttcaaaaatatcaatttgagcacttgaattccattacgttagacgctagagagctttttttgtcaaataaacacacttacagagagcgatttcaaattctgcaagtacttgtcagacttttccacctctccacaacgccatctctcataaaacaaataaaactgaacaacctcatgagcaggattcaaactttccccatgaaattttcagtttccataacatctctggagagacatttggtcccaaattaaacctctgaatggcttgtataatcccacccgcacacctctcactcgcatggattatatttgcattgtctttcgcattttcagcataccattccaacaactcttcttgagcattgcttaccttaaacagtaaaaatataagcacaatcactcacgcgtagtcaagtatgatcgaacctaaaaaaaagcagttgggaactaaccattacgccatatacgtcagaaatgttgaaaagctcagcatcatttccagagtcaccacaaacaagtgtgttagaaggctgcttgccttcaatatccaacttgtcaagtagatatgtcaaagcaccttgtttgccagctcctcttggtaatacatcgaaagcatatccgttgctataaaccagcttcacatccacctataaggacgtttattactgtcatcagcaccatgcataacaaactatgataagaatgtagccatcaagcacacataaagagtacacacaaa

SEQ ID NO: 36742 - DNA, 2080 bp, Arabidopsis thaliana landsberg
  unsure (1)..(2080): unsure at all n locations
cataccatcataacagttaagtaggaatccatcagatatttatatatttaacaaagcaactaaaaatctgggggagtgggtccttttctatcttctaaaaagatcttaattgtaggaaatagaatgtttcagattaagcatactaccgaaaaaatccggagtttgaattgcagcaatagttctgaaatttgaatgaaatatgtataacttacataagcacgccgtttctgatataaagcttcatatgctcgatgcattgtctggaaacagatataaccagcattaagaattccattnnnnnnnnnnnnnnnnnnnnnnnnnnnnnnnnnaacgcctacattgctggtaccagataacaagtgatacactcctccaatagagaaaagagcatacaaactttctgaatatctgaaagtcacaaagaaacagtttggtcttcagttagttaccattctgataagactgaacatatttactttcagcaaatgaacttaagagatcattggcttaaacacattacattgacgaataaaatatggacgccggattgaaacagaagataatcgaagctctgaatgatgcttcagtatccttcaagataataactgaaaccctgttagcaacgactggtgtaagacacggtgaatagcaaacagcattagcttgtagagctcaaaagactcttgacttgacttatttctagacacaataatcgatttaggatgaatgtcaaagaagtacctaaatagatagatagcagcaaatatgaacgccaagttactaacagtgaaaccagacaacaccatcacagctcgaagaccaatcaatggaaccaaaggcgcaaaaactgaatccaaaaagaatcagttactaccggaatgatacaaccaaagtaaggaatcaagtgggtagatgtctaaattacaaaacctgtgcgagagagaagcgagatgaagaaaggaagcagaggcaagaaggcgtaagtctgctcatactcatagccacactctgtgattcggagaaaataaacactgtcccagacaacactgttctcaagggatctcgaagctgcattggctactagaaacggaaaagaatcttctttgtgatacaagcaaggaggattcagtgcagcggatgtatcgtacggttggagtaagctccgccacaaaatggttaagaagagaacgagaagtcgcgagaagatggcgtatttgatcaagatggtttctttccttgatttcgagtttgattccaaagctttcgccattgatcacgagctcgtattcgagtataaaaaggcgacagatggttctcgattgcaagagtccggtgacgatttgtgattttcgatcttctcgtcggagaagaatgtgttactctctaaatgtaaaagagagtttcaatttaataaatgaaccggtcggttcaataaaagggaaagtcaccggttttagaaaattgttccggtattatccgggtcattaagacgctttgatcggttcaatccagttttaaaaacgctaagatgaatgtagcgtttgtgaagctaattaaacgagccacgtcatcaagacatgtcaacaaaacgcgtcataagcccaatcacgtgagggctggtaattggtaatcgcaaaacgtagatcgccataaattaaatttcgaacagacaaaaaaaagaaaagaaatcaataaataatcatttagtccctttgtttgataaaccctttaattgaaaaaaaaaacaaattacttctctttccttcgatcatcgtcttcctctggttctcagatctttgaatcgagcagaagcaattttaaatctcctatcaggtttctctaaatccatgctcaagtctaattttacgttttacatttgttcaattttgtatgagatttgcttccgtttgggatcggaactttgagaacgttctgaagatattactttactgtgtagctcttgaatcaatttttccgtttgatgtcttgtattgatgttgttattagatcgttaattttctttccgtagatgatgaatgtggattatgctgaaattcgttataaactttggatttgatgg

SEQ ID NO: 36743 - DNA, 1971 bp, Arabidopsis thaliana landsberg
ataaaataaatatgtatgttaaatcgatgcatagattggagaatgcatttttaatatttggtccagaatagttctgattcagctacaaagattacctaccttattaaacctgtaactggttcatgatagaactcggcaaatctgcctgctgttgcaaactctctattaccctgagtaactcaaataaaactaagtaaaccacaaaagaaaagtgtcagatgagacattcaactatcaatcaaatacataaaaagcaaccttttcgatataagcaaccgcacgatgggcgtccaactgtgaatcatcaggaagaaatgcagccccagtattatcatctacaagtatcgcaggctcctttaacaacaactcaccactagacaaatattcagttcttaacccagcttcagatagctcatgaaccttttgcttcagagcaacacattcctcagtggtcctaccaatgagcaagcttcctacaggtgacaacaatacactgagctatatcatctattttcgttgagaaatggaacgtaactaatggtgtatatatcatctattttcgttgacaacaatacactgaactattatttttgttgaacacgacgaaaatgacattgccaaaagaacctgacacttcaactttgtttgatagttgaatgtatcatctgacacttttctttcttcactttagtgtatagaacccaatagactaaagtgaagaaagaatcaacacaagatcatgatcaacaaagtcgctcaaagagctccaaattctatacaattgtaaagtgggtagtcagtaaaaacctgtctttttccagccaagcaactcttcaggatcaagaccatcatcagtcaagctctctgcaagcttgtgccagagttcatggctcctcaaggtcaagtcccacacatcactgcctggtttcttgtgtgtcatccatatatatccctgccctgaaatccaaaaaccacaaatttcaagttaagtcaacttcattcacttcaagagtccagctttatttgcagaatccataggtaatgtactaatgtcaatcgtcagatccaatttgtaagagaagggttgagaattaccggcaccggtggcgccggagcaaggtacggctttatcgacaacagcaacagattgatccgacccggtaaggaattggcgggctatggttaacccaatgatcccaccacctacaacaacaacatcgaccgagctacgagaagctgtgacacgtagtgacagagaagctccatgttgggttctcttggtggagctccgagatgaaaatgggtagctcagtggtgttaaaaaggtgggtgattgaaggaaaatggaaaccattggagaagaaggtttttggtatcgtgaaggtttgaactttcaaaagtcaacgtaagaattagcaaagtatgacacttcagttttattatgtgccaattactatctcagtgcttcttcacatttccacctactaatcatcttcttgtaatatggagttaatcatccaagtaggaacatgaatccaagttcctcaagacatgaatctaatatgatatccgatcccggtttttttcggatatccgatccgtttctacaagactcaggtctgtctgtgccttggcagtagaatcaagaatcttcttagtattacaaagacgattgatgtcttctcaccaagttctattacaaaatcaagccttacagcataacattatattgatggtagattaaacactacgcataaacaacaaacacctcatctgtgatcttcaagcttctactgtgttataccaacactatgatcttctgaaatgatgggagtggcattgcagttttgctacaatcaggcccgaaaagctcagaatcgttatcttgctaaactacttactaagattgcaaaaagagcgaggagaataactcaacttgttacaaagatggatcgctgtgatccggagaag

SEQ ID NO: 36744 - DNA, 4033 bp, Arabidopsis thaliana landsberg
ataacgatctctgtatgtgtaattccataaaataatcctcttgatgacaaaaataaaattaaaataacaacgatcatttgtctcattgtagcatcatagtttgccaagtagcattacattacatgcacgtagacatgaataagctacgtgtgaataatatgacattttgtttcttaatattactgactcaaaaaactataatattattctaaagtttctttttctttagtagtttcttgatcttgcaagaacatcatacaccaacttcttttttcttccatcttttcgtcgtcgaaactcgaaagtttcatagaaagtttgtatttaccatttacggaagatccttcgattatagtatttcgtacaaagatatatcagtttccctaattacgacaatcatatatatattatccgtatttattacattgaaatcatctccctatgcaagtaaaaatctcattaatacacaaagaagattaggtaatcaataaatgtaattagataatacgaaatatgaagtatggaaactcggaggatcttccgttataattacttttatccattttctctgtatatatatagaaagcaaaagaaagcattttcatcacctaccatcctctgttttcatttcctctgtttttcaaacttcctctgttctctcatggctccacttcacgaatctctgtcatcaatcaacgatgtaatcgaatccaaacctctttttgttccaataactaagccaatcttgcagccaaactcatttaacctatccgaagggtctctctgtgccaaagactctactccaatcctctttgatgttcctcaaaacgtaactttcacaccattctcatctcactccatatccactgatgctcctctcccaatcctcctccgagttcaagccaacgctcacaaaggagggtttctcggattcaccaaagaatcaccctctgatcgtctcacaaactccttgggaagattcgaagacagagagtttctcagtcttttccggttcaaaatgtggtggtcgacggcttggatcgggaaatcagggtcggatcttcaagccgagactcagtgggtgatgctaaagattcctgagatcgattcctacgtggccatcataccaaccattgaaggagcttttagggcttcacttactcctggtgagaaaggtaatgtcttgatttgtgcagagagtggctcaactaaagtaaaagagtcatctttcaaatccattgcctacattcacatttgtgacaacccctataacctcatgaaagaggcttttagtgcacttcgtgttcatatgaacactttcaagcttctagaagagaagaagcttccgaaaatcgtcgataagtttggatggtgcacttgggatgcttgctacttgaccgttgatcctgcaaccatttggactggagttaaggagtttgaagatggtggggtgtgtccgaagtttgtcatcattgatgatggatggcaaagtattaactttgatggtgatgagctagacaaagacgctgagaatcttgttcttggtggggagcaaatgactgcgaggcttaccagcttcaaggagtgtaagaagtttagaaactataaaggtggatcctttataacatctgatgcatctcacttcaatcctctcaagccgaagatgcttatctacaaagcgaccgagcgaattcaggcgattatattgagacggaagttggttaaggagtctggggaacaagatctgaccgaacttgatgaaaagatcaagattttgagtgaagaactcaatgcaatgtttgatgaggttgagaaagaagagtctttgggttctgatgatgtttctggctcaggtatggcggctttcacaaaggatttgaggttaaggtttaagagtttagatgatatatatgtgtggcatgctctttgtggtgcttggaatggtgttaggcctgaaaccatgatggatttgaaggccaaggttgctccttttgagctttcacctagtctaggcgctacgatggctgatctcgcagtcgacaaggttgtagaagctgggattggtcttgttcatccttctaaagctcatgaattctacgactcgatgcactcttatcttgctactgttggtgttacaggagccaagattgatgttttccaagtaagttgttacattactcttactctgtcttagatactctggcttttctttacatataggagttgttgttaatgttgtgtgtctgtgtttggttttagaccttggagtcactagcagaagaacatggaggacgagtggagcttgctaaagcttactacgatggtctgaccgaatccatgatcaagaattttaatggaactgatgtcattgcgagtatgcaacagtgcaatgagttcttcttccttgccacaaagcaaatctctattggcagagttggtaatatatataaagctaaagccgtttcttttgattccactagtgtttgagcattaacaaaagttttgaattttgctcaggtgatgatttttggtggcaagacccatatggtgacccacaaggagtatattggctacaaggagttcacatgattcactgttcttacaacagtatttggatgggtcaaatgattcaaccagattgggacatgttccaatcagaccatgtctgtgccgagtaccacgccgcatctcgagccatttgcggtgggcctgtctatctcagtgaccatcttggcaaagcctcacataactttgatctcatcaagaaacttgctttctttgatggtaccatcccaaggtgtgtccactatgctcttcccactagagattcgctcttcaagaaccctttgtttgacaaagagtcaatcctcaagatcttcaacttcaacaaggtaatcagttttaaatcaaattcatcgtttagagatcagaactttattaaaacccatatgatttgttgcagtttggaggagtgattggaacatttaactgtcaaggtgctgggtggagcccagaggagcataggttcaaaggatacaaagaatgttacacgacagtttcgggaacagttcatgtctcggacattgaatgggatcagaatccagaagctgcaggctctcaggtgacctacactggagattacttggtttacaagcaacaatctgaagaaatccttttcatgaactcgaaatcagaagcgatgaagataacccttgagccatccgcgtttgacctgttgagtttcgtgccagtcacggaacttgtaagttcaggggttagattcgcacctctagggttgatcaacatgttcaactgcgtcggaacagtccaagacatgaaggttactggtgataacagcataagagtggacgtgaaaggcgaaggaagattcatggcgtattcgagttcagctccggtgaagtgttacttgaacgacaaggaagctgagtttaagtgggaagaagaaactggtaaactcagtttctttgttccttgggttgaagaatctggtggcatctctcatctgtctttcaccttttaataatttgtttggatttttgtttttcgttttccttttcttgcattttgttatcagaagttgggttgtcaatttctgtttggtcttttacttttcaatttggagacttctcaaacaaattttaatatcaaatggattttctttgtcggttaaatttgagatttagtcaaatatcttttaaattatattaaaaaggtcaacatcattggtcaatttattaaaaattattctaacgaaagtaaactttaataggtttggtccaacatcattggtcagattggttcgagttatgcgtaatttttaccaatagttgtatttgtacaattgagtattactctttagaaagttgctgttttttttttttgtgtgtgtatgtgtatacaagaatcacttttgccaaaagttaaaaagaactttgtttgtttctgtttggatcatagtgaatgataatgaaggaatgacccatgatgttgatttctagacaaggcgatggga

SEQ ID NO: 36745 - DNA, 2628 bp, Arabidopsis thaliana landsberg
caaaggtttggtcttatcaatacagcttgtagatatgtgtttcaattcatcaaatccaaaacagtccaaacttaaatccatttgtctaggtttagtatcatcacatacctaataaacccaaaacaaaaaaaaatctaaaacctcaaattattctagaaaaataatcgaagctattattaaaaaaggtttaggagaaggatcagaacattggcttgatttcctctgttgagaaggaaataaaaatcgcttagtataatctgattcgatcatttggggaaattgtcatcacctccattctccttaataccaatcttatagtttaatcataaaaaagacccaacaaattaaaaacgaatcacaattgaatctagtgaacctatctaaaggcaaactcatcaaaaaaacataaaagagacaaggatcagaatattggcttgatttcctctgttgagaaggaaataaaattcgcttagtataatctgattcgatcatttggggaaattgtcatcacctccatatctcttttcaaaaaaaccgcgaaagttttaaaatcaacaaacaaacccaaatcaatcgtaataatctaaggagaaggatcagactaattggcttgacttcctccgaagaggaaattctattcgctcagtataatcagattcgatcatctggggaaattgtcatcacctccattctccattattaaccaatccaaatctcgatttctaagaacaaaaaaaacgagttcaatgttgtgtatgaactaaaacctaaaacaattctataaaacactaatacaaaatcagatttaccctaatctgcaaattcgagctgattgaagaaaaccccagagggttttccgaagaaaatcaaaacgaataacagatatagggaaacgatttggcgtcagctcatacacaacgaacataaacaagtacggtggtaatcagtaatattgacgcacaatctctaatgagaacataacctaggaaaccatatgaagaacagaaggataagaaatctagcggaagacaagtcgacggcttgttatttggtgttttggaaatttagtcaaaagagtatttataggtgcggtggtgaggcttatgtcggtctagaaaccctaatacgcgtgttattcacgtgacttgtggtattaggaatttctattgggtcctcctttatattttggtgggctttgttaacttccaaagaagttttaatatttgatcaatttgtttctgtttgcacaaaacaataaaaaaacatatcaatttgttttaatgtttttggaattcacatttttgaaaagcaaaaaaaattaggagcaaactttccacaccaaaaaaaaaatgaaaataatcacaaatatcaattttatttgatagtttactttgtttactaattcatatgttctgacaaataagtattactattgagcttatttatcatgcaaaagatttgagattaagaaatagattgagcatggtaatcaaatttctctccccatagtcacaatgaaatcaatctatatagtatacagtatatgtatttcctctcttctttcaaaaggagtacagtataacgataataaataatgaaataaataaatcagaaaataatagtgagacatttgtaataacgttttgcaactaaactaatctgtttcagtttcatcttcgcaacattttcagccttctggaaccaagaatcatcactgtcttcttccattaacattgttctctcttcatttccatgaactggatttatgtgaattttcaatatctgcgacggtaccacttgatagtataaaatctccgtcgtctgccgtgtactaatgagcattttatggtttactataatctcttctccaatcatttcgaatcctgccgagtttggggttacgtttgagttgtcgttgtcttgtgcttggttctcaaacgagaaaaaatcgtcgatctctatgttgtctattgtattggtccgagatccgcctgtaataaatatacaattatttccgattagatcattataatcaacattttatatggttccaaacttccaattataatgagttttatatcatacccaccataaaattcaagatcttgatcattactctggaaacttggcaaaatcaattcttgttcttctatataactctgttaacatcatatagattatagagacaattaatatttggtcttcgagcatatataaaatataaatgacgaaatcaaattggtaactatgaaataaaattacctgctcgtcaagatttccaatgtgtatcaaatgatcatcaacgttgctgttgtagaattggttggagttacttgcagcgaaagtaaagtcgtcgaacccactttgaccactgttttgatgtagtctcttggagaaatcgctggtttgagcctgcgagttttctactcgcaatggtggcaatgacatttggtgttgaaacatctcacattgcacttctgtattcacctatatagtaatacaacattttaagatacatgtatatttgattctgtatatgatacggaatcaactgtattaattaacaaattacctttgattgagtgaggtatggtccataaggagatccgtaatctgaaaagcttgtag

SEQ ID NO: 36746 - DNA, 118 bp, Arabidopsis thaliana landsberg
ccccaaattttgcctttaagtacttttcgggcatttcgtgatttggctatattacggcccaaaattcttgtcaacattgtttcgaatttttcatgcacaaagctcgtaagctagtggg

SEQ ID NO: 36747 - DNA, 635 bp, Arabidopsis thaliana landsberg
cgatcacttttgatccacaagaaaaaaaaacagtattcaccgtttgattttattctatttctatatgttttcgggttgcgtcgtgatttctgtatatatagaatatcaatctcgtccatgtttgaagtgtaggtttttatggagattattccatatacgaaatgggattgtaaggttataattagggtattgatcttggttagatgtaaaacaaaatttactaatattctgtctcagcttatcatttaccaaactagctttttctcattcatttatgatcacatcacgtccacattaaaataaaacaaaaaagggatcaattatcacaaaaacaattcctctagaaaattattcttttgaggaatatattacaaaaaccagaagtgttggcatctctcaagaagtaaaaaaaaaactcgagagagacacacaactcaacaattacaagtctgttgtataaatggaagatgatatacacttagctgggtgaattcttcctgcaaaatttgggaataaatgtacactcacaagatggtgttgatgtgaagtgctttgaggagagatgttgccatttgcttcaccagaacttggcctcctgaacgttgtccatcacgtcgttcttctatcagattctg

SEQ ID NO: 36748 - DNA, 1598 bp, Arabidopsis thaliana landsberg
cgcttgaaattggcgaaaagaaacactacgatcataaggtggacgtttacagtttcgccattgttttctgggagttacttaccaacaaaaccccattcaaaggaaagaacaacatctttgtagcttatgctgccagcaaagtaagtaagccacaatttcaactcaaaatcacaggaacatgaattgattaagtcctttaatatctgcagaaccagagaccaagtgtggagaatcttccagaaggcgttgtttctatcctgcaatcatgctgggcagagaatcctgacgctcgtcctgagtttaaagaaattacatattcactaacaaacttgctcagaagcttaagctcagacactgatgctacttcatccaatagcaaagccaatatagctaccgaggattcaacaagcagtctggttcaagaacgtgttgtctgtgattgtcccggactaaagatgagcaagacgaagaagctgaagaagaagacgaataaactgatgaatatgatcgtcccttttctcaagatcttcaaaagttgtatgtccaagtgatggaagtagaaactctctggtaaaagataaaaggtatagcaatacgaactcgacagagtaaaacgaaagaaaaaatggttaggctttgtgctttgttcttttttgtttggtatttcaacaatttatgttgaaaaatagtatgccaaactaattagtgtacggaatcgaagaatatgtggtataaataatagaatcatcatataatttactctatgaaccatgattattctatcgtgttttttcacctaagtaaacacaattagattcacgtttcataacttagctaaactatattttgattccgtgaaaaatacacatttaatgacctcctgaggacttttaataccgtaacaagtttttcaaaaaaacacaacaaaaaataaaagaaaaggtatcgtcagattttggcgggattggaccgtttaaacagaagatcatcaatttggtctcttaagatgaggtgacgtaagaaacgacggcagtgatgtcatcaagctttcctccgtaatacctgtagccagcctcctgagccgcagttgcgaaagggctctgccgttttttgtcgactgctctttgacgtgccaactctgcaatcttctgagctgtgcctttcgggtctaaaccggccctcaccgagctaaccaccactcctgtgatctcttcattgtataaattatcatacactccatctgttccagcgacaatgacatctccagactgaacatcaattgtgaatacctgattcatataaccacaccagcgtgttcaattcaatccgtataacccgaaccacaactgaaaagtgtattcaaaatggtcttattaagctttgataataggaagaatacgcctttgaaactgacctgaccggagctagggacgtcggcactgttcccactctctaattgataagtgaagttgaatccatgctgctgaaccggagactgaaacaccgtggttccctctctaaccaccgtgaatccactgtctccgagattaatggcgtgtaatcccttgcacaaggagaacaaacactcttcaacagac

SEQ ID NO: 36749 - DNA, 2007 bp, Arabidopsis thaliana landsberg
tcccagtatgctcttgcattggtgctgaaagaaagcttcaaactatactgtgccattaatgatggaatcattaatcttgtagacatggtttttataaaactctccttctcttgtttagtatcaatttgcttctattgagtgttgctaaagtatatatctatgctcttgattcagttctttgagatgtcaagacatgatgcagttaaagctctaaatatatataaacgagacggccaacaggtaaaagctctaaagctatagactaaatccccatcttcactaaacttgtttattgatgttcttccactgcacaggctgaaaatttggctgacttttatgaatactgcaaaggtctagagctagcgagaaactttcagttcccaaccttaagacaggttccttcttaacttgtgataaatgaatgtgagattgatcacctcaaaaggcctaattttaaaaacttgtttcagcctcctccttctttcctagcaacaatggaagactacattaaagaagcgcctcaaagtggttctgtacagaaaaagctggtacaaagttttactctcatcatatttggttgatgttgtcctgttcatcaatatcagtcttcttatgaattatgattgacattttgttgtgtttttcacaggagtatcaggaaaaagaggaagaagaacaagaacaagaagaagcagaacactctgtgcagcctgaagaacctgcagaagccgataatcaaaaggaaaacagcgaaggagaccagccgcttatcgaagaagaggaagaagagcctaaagaaaaaatagaagaggaagatgctaaaccttcaccactgatagacactgatgatctgctggtgagtcttcttcatctctatacattgcagtagataccaaacctcaatactcattgaccctttttcctgtgattggagcagggtctgcatgaaataaacccgaaagccgcagagatagagcaaaacaacgcattctctctcgcgatatatccaccaggtagagaagtaaaaaaaactaacccattaagtaaaatcttacatttccattatatcaacatttatgaacattttatctgcaggacatgaaacttcagccccatctaatagtctaagcttaatagaagcagggggaagtggttgggaacttgcactagtcacaccacagaacaacagcaacaataacaacaatcctcgtcccgttatagcaacaaaactcgtaagtctctcattcgaatataaactcgatttttctattcctactcatatgttgcctatgtttacagggcggaggattcgacaatcttctactagacagtctttacgaagacgatacagcaagaagacagattcagttaacaaacgccggttacggatttggagccacggctatacccggagcactagcttcatcgaacccaaacccgttcggggtgcaacaagatcctttcgcaatgtcaaacaacatggctccaccaaccaatgttcaaatggcaatgcaacaacaacaaatgatgatgatgaataaccaaagtccatataataacaactattcaccatatcatcatcatcaattctcaccaaatccttcaacttcttcatctcctaacccttttggtgaccctttccttgctctcccagctcctccttcatctactacacagcagcaatacagtcctaatcatatgcttctctagaatggtaatcataatgacttgttttttcttcttcttctacttaatctcgatttgattcaggttattattattctttcattcttttctagtataagactcttctacacttgtcaggattttttcttctcttttgttttcccttaattttagtacttatttaagcttaatattccttaatcctttgtatttttcctctatcaacggtaagaattaacggtcagcgcaaaaagtggagggaaatttataatttgtgtactttggtttatctctcgtcactaaaaacccgtaaaaacccgt

SEQ ID NO: 36750 - DNA, 2545 bp, Arabidopsis thaliana landsberg
cagcttaaagcttttatttgggtgaatgtctgaatgatgttatgtagctgaattgtttaatcttcagaattagagatagagaagaaatagcgaaatgagtaaacgagattctagtttgtgctcaaagtaatattccttcatgcaagatatactcttcgaatatacccttctcatacctttgtggctttgtttccggaaaaggacattctcgtcaattcgtctcgctatgaaaggtattgggcttacaaaatatgaggcccgttttatagcccactcaaattctgcttctgtgcttgaggttttccccaaaacctccattgacgcaggaaggaaggaaggaaggagcaaatatggctgccactgttcctgcaactactcgttctgatcaaacatgggattttagttggtatgttctgtaaattctctttctttgcttctctgattagggaaaatttcgattcttctctctaatgattcagctcttagtttcaattgttcgtaacgtgtttgttctgaatctgatattagaacatacggattcgataatagaaatcttgggtctgacacatttcaaggaatagactcaaaagtttcgatctttacctacataaaccagctatacgaacctagttagtttcaatgcttagctcaattaggttaaaataaacttctaaacatcctttgtagtgcttgggttagtgttgcacaacggtattgagaatgacactgttatagactttaataaatttggtatgttttcaataatgggagttgttagagattgatgtaacagagcttttggcaatgtgcagtaatttggatgtgaattttgaatcagaagaacatgctttgattgcttatacatcattggctgttgataaagaggtttgaaatttctcaattcacttccaacatatgaatacaatctaatttccaacaagcttttcactgatgttagagtttcttctgttgtgaacattaatgcagttgcagcctgataaggtgagaagagttatgtcagtatcaaacaacaagctttctgtgtgagtttcttcaagtccttcttcgtcgttgaatcacttatcgatttgaaactggctttagttagacatctcttgtccatagaaccttttagcttacttcttacactagttttgatcttttctcactggataattttacaggcactttgaagcaatagaggcaaggctgcttcgcgcttcgttctctgcatttgtagacgttcttacactggccacaagaacaattcaagaatttggtcaaaagtaaaacaccaatatgaagagaaaaaagcttgattctttctcattactcttcaagaactcaaaattacattgtgtttcttcttcgagctcaaatcatcttggggttttcacagatttattcaaacaatgtactcccaagattattattgggagtattattatgtagtgtgaactcgatttgagaagtgaaaaaaagatggttacatttaaagcttttgatttgactacgttttctttgtttcatttactaagtaaattatcacttagtggagactctcattatctcttaatcatcttcaacatcaaatgtatctatcatcgtaacatataacacgtgcatcatctaatgcgataatacacaaaaactctattcatttaatatcgattgtgaatttttagcaatatgatcttatcaactttcatgcattgactttgactagaggaagtagaaaaaaataatcgtcatcatcattaaagaagcaactaacctacacacaattcagcccccgtgatcatatatacttaattaaagtcacacggtaattaattaagattaacatttaatgatttctaatacgctttgggactcgtaactcccattacattgcaatccctatgaacattcatctttgtttttacagagactatatatgagttcgtcaaaacattcctctgtttttaactattctgctctgtttctatcactgtttcttcaacaaatggatcagaactctcttcatcatctcgattctccaaaaatcgaaaacgagtatgaaccagattcgttatacgacatgttagataagtaagttggaaaccctttgatactttttcttgctaaacaagttatctctcttttctttactgttttttctcattcgtttttggtctacaggttgcctccgcttgattctctcctagatatggaagatttgaaaccaaatgcagggttgcactttcagttccattacaatagctttgaagatttcttcgaaaacattgaagtggataacacaattccatctgatattcacttgttgacacaagagccctacttctcaagtgactcctcttcctcttcaccattggctatccaaaacgacggtctcatttccaacgtgaaagttgaaaaggtaacagttaagaagaagaggaaccttaagaaaaagaggcaagacaaattggagatgtctgagatcaaacaatttttcgataggccgatcatgaaagcggctaaagaaactgacgtgggactcact

SEQ ID NO: 36751 - DNA, 2308 bp, Arabidopsis thaliana landsberg
ttgcacgagcatacgcaatcagctgcttagtgtctgattctggaacaccttcagctataattgccacaactttaatagtcggctgcttcaaagcagccatggatgaagcagcagcactataaaacagaagaaagaatgaaaacatcaacaaaactatcacaaagaggcaatgctaagtttattccatgaaattctcataacaaacctcctaaaagatgcaaagttgatgaatacatccgctgttggatgcgcagcacaagctgcctcaatgctgtataacagaaaacaagttaaaacaaaattttcacatagttagttcctctcaagaactcacatgacattctcaaaacttacgcggcatgaacagggatagcgatttcctcctgcccgaaaaagagcttttgaaaaccttcagaaccaggatttatgattccagcaacagaaggcgtttcacgtcctgtaaaagcaaatcatctttaacatcaaaacttgatccaaaccaactgaaaactagacaatgtaaattgttatgttaccacagagaaagtcgaaatcgagcattcgttgaacaggaagctgcttatagttgtagaacaaagcttgtgtggtacgagaaaaaagctgtcccgttgccatagctcagatagaaaaaactgagaatcacaacaaacaaaagagagacaatgatcagatccacaagctataaattgttcctatctcaatgtcgaattcgaaattaggcaacattacactaattcgataatcactaacaaacagatctcatgactgcattaacgaatctgggattgagagagaaaaaaagtgccgatttttacgcaaccctcctcgtggatatagaaactttggtatcaaaaacacgaatcggaatcaatacagatctaagaaaaaaagttacgaattgttagaagagaacagacctggtcacgacccgagtcgagtcagtgattaaggagagaataaatggtggctgagagaaagagagaggaatggtttaggagaggaagcaccattaatatagagaaatgggagggaaacaaaagcttctcacagtcatgtggcttattggtaggtagttagttcacaacttctttctacccaaaattgatttctctatcttacattgacaaagagaaccacctaacagtttttttttattacaaatttgtttttgtaacatcttttgttttattttattgcaattttggtcgttaacatgtcgtccttgctggtggtgttaatgaataggctgttttgtcttcaagattcagcaatattttttgaagattgtgaatcacgcattcatcaaaacattgtttaatgtgtttttgaagtattttaaaagttagaacgtgttataatttcttcctaatcacaaacataaataaatgtaaagaaacatgactaatgaatacttggagagaatgatagaaagagaggaggactctttttttggcttatactttcttatggaagtgaaagtggttaatcaattgtgcaataaaacttatgttcgtatatattgaagtaaagtgataaagatttattgtgcatatatagatgagctctacacgaatatatgcatacttatgtcactttctcttgcttgatctagaacgttatcatactaagactatgtcttacggactttttgttttgtgacttgtcatatggtctattttctgagcgaaaagaattatcgggaagataaacttatgccgttgtgaggtttcctgaccattgctgtggacttgtggtcgcatatttcattcctgaccattgctgtggacttgtggttgcatatttcatactcctacaaagaacggatatgctctacgaattgtttcagtttaaggaggcgatttttcttgaaattgatagacatatcactagagctaaaaaatcacctcgatcatatttgaaatcattgaattttatggtttatgatagttcatctattgttctatacatcgaatatatataacatttatagacaaataaatcacttaaaatcaattaaactcctacgcgtttagaatactccatgttgaaaaagatagaaaaatcttataattttcatattttcattaatctatgggcttgaatggtttaccgtataccagttcacgtggtcatgtttttaaaacgtgattccgctatttttacctttcaaaattttatcaagttttaacgttttcatgtttaaaaaaatgattccattatatagcactagcgtattaaaaattataactaagaaacgtgattaatctccaataactagtttttttta

SEQ ID NO: 36752 - DNA, 1126 bp, Arabidopsis thaliana landsberg
ggacgaggcatgatgacagaactccttcaggtactaaacccaaccataccaatgtttatatcccaagtttacttgtttttctctatagagattcatgtttgatttgtcttaggctgtgcaggagaatgtgagagagacccatttttttcaaggccatttgttctttgaagactattattttttttttcctaccccctatagcttaaagtctgattcaatcttatctgtatcagaaataggaaaacagaatctaactattgactagctcaaagacgtcagcaaaattatcgtgattcattatataaaatgctcataacttcctctatctgttttctttagctagtagttgtatatcattgagaaagaaaaaaaatccaagtcatcagacggatctataatttttggtttttaactatgtatcaaaaacttattaagctgggaggcaaataataaggtaatgaagatgaaaaacaagactttctatagaaactttgtgccatagaaaccattaggaaccggaattggcatggcccggttaatgggaaaaggtgactgcataaccggaatatcggtaggcatgactgtgtaaggctgatgtccattggctgcaaatggttgtggagcatatagatgcatcggttgaccagttgcgattagacctgaattaccaagaaagtgaagtttagtgaaaaccaaaatctttggtcttacttaacatgaaaccataattggacagagaagaatgttttactctgatgctttggatactgaaactgttggggagtaaagagaggacgaggaggcaaatgtgagttatgtggtgctccttgaaccaaatccttataagaacataaaagggaagcggatttgagtttcttgtaagcaaaaaaggctaatgtgattgtttatgtacacaataatattattattcaagttcttcttacctgagaaattggttgcatatacataagctgtcctgatctcccgaccattaacctggaatatacgattcaattagcatttagaaacttatacactattactcaattcttataaacaattttatgaacagaagggagaatttggtgttgttatggaaagaaccctgaggattgggatttacaag

SEQ ID NO: 36753 - DNA, 3874 bp, Arabidopsis thaliana landsberg
aatccctccacgaaatcattttgaaagatgctaccgaagcaattgtttatccatagatatctggtaaataatgcaccttaacacaaaaataatgcaaagctttgaaacattccattatgttatggtttttataattaagaaccctagcatcaatgaataccatcggattcatacaaaaaacaccaaaaagaaacactgagaatatctcttctgcttataaaacgcagagagaatatccatcccgctagtaaaaaaaacagttttttcggatacaagctgaaaaccctaatttaggtaaaaataaataggattagctcgatcgcgatatagttattatataagcatcataaataagggctctaataataaccgtagttattatatccgccggaatatggatattgttgatggtaaggttgcatcgtcgagccaacagggtagtaccctccccattggccggggtatgagctctgactgtaaaaactgggatcatgatgatgatgatgttgatgatgttgcgttccggttttcacaaaagccatttcagcatcttttcctctctttgaacccattagtttcaatagcttgtttggatcgccatgacccgtgacgtatgccattccttcgtccacgtctatccaaaaattccctcctaaaccattatcataaaaagaataagagattgagtcgacaaaaatgtgcgatatatatatatatgcttatagaaaaaaaaaaacctttgattttcttgaggattttggtcatgctcttgtgccattcgggagagctagtgttcactttaaacccacaagtctgcaagaaaacattcgaatatgtaacgaattagcaaaggataaaatgagtaatatgattatgagtatgtaatgatagattgaaaacggaccaggcttgtagatgtacgacttgacgaaaacatgtttgtgtatgaagaaaaaataagaagtatgaagatgtttatgcaaatgaacgaggatggtgtatatatatttatattggtttgaagattacaatttggatttttaatttatttttatatggtaactctatctatatattactaaaatgattccagatttcgagttagtgtcgttaatggtataatattgtatttccttatgtagtgtacccactaatccaaattctaaaatcgttataaattaggatgcaagtctcttctagctccataattacactatactagaatttaacctgcggtacaccgcggactattatttttaaaaaaatgtaaagttattttttaaaagattaactgaagatatatcatattaatttatattttaaaatatagatatctatctctgtattatttagtatatgattactattatttaggtttcaaattttgaagtatagatatgaaaacatatatttttttaagtaacaatgtatggtagattttaaaattttgaatattttgtccgcagtataccgcatgtcgattttttatagctatttttttaaaattttaagttatatttgttttgttaatattgtatgtttttgtgtttaaggttgtatgattgtattttgattgttaattttatgatttcatctgtgatatacctttgtttattaatattgatcaaaacccgtcatcccatataaatctgtctatattatctcgttagctaaatgattagtgttataaaatccaagaaaataaattattattgttctaattccaataatttaggatctcacccgtggtataccgttccttgaatgatttaaaatttatattactaatatagattttaaatttatcatataaagtatatgatttcaagttttgtgcttttaatttaaataaaagaacggtttaaatgatgataaatatagttttttttcttgtatgtgtatatggttttttatgtgaatatttaattattataaattagtatttttattgctatgcaaaatgttgatataaatatttgctataaatcggatttatgcatattttttgaagtaaaattcacgattttgttttttaaaaagatatatgaaaagattgtgtagagatttttagaaacaaattaggcaagatatagtttggttaatatcttcttagatttttttttaactaaataataaatgtcagtggcagacattgtaaataaatcccaactccaagatttatttcacaaaatggctgcaaaaatgtattatagaatagggttaagtttatgaaacctttttgtggtctataaaggcttgggggatgtattccaataagaatttaaagtgatttaagtttttttgagtttgtaaatgattttaacgattttaagaaagtttgtatggtttttgtaaaatctattaaaatctcaccttaaatcatggaatttggatttctgtattttgaactaagaaaatcctctcaaatcctccaaaatcattaaaattcaaatccacaaattgttttcaataacagtggattttaaggtggattttgaaattattagttcaataacactaaatttcatgagattttttaaaatacgtgtttgtataacatatgatttataaattctacacaaatctcttaaaattctaatttcaatacattgtttttgaaagtgttattgactcttgccaatatagtatcccaattcccaacttgtgtttcattttttcatatatctaataaacaattagatgaacacaaaaaaatattggtaggtgatggctcaattggatatgtttttgaaaaccatgtgttaaaaacttaaaatactatccaacttaccccagtcctaccaactttttttttcttctcttggtctgcttacatgtgtctgcttatatctccaaaaggaaatagatatatgaaaattcaaatttaaatatttgcgatttgttaaattttaatcaataattttttttatttttttttatgaagacaacaaataaccaaatttatcaaatctgatcaaagcagatttaggattttacaaatatatttttttaatatgaattttgtggtcagattttgaccaattctctttgaaaaaaaaaaaatctatctataaaaacatgtgttactttgaaaggatatttcaaggagaagaatatatttgactcagagagagattcattcagtaatggcagcctcaggcacctctgctactttcagagcctccgtttcttcagctccttcctcttcttcccaattgacccatttgaaatcacccttcaaagctgtcaaatatacgcctctgccatcgtctcgctccaagtcatcatccttctccgtctcctgcaccatcgccaaggacccgcctgttctcatggccgccggatctgacccggccctgtggcaacgacccgattcgttcggtcggtttgggaagtttggtgggaagtatgtacctgaaacccttatgcacgctctatctgagcttgaatccgctttctatgctcttgccaccgacgatgatttccaggtagagaccttgttcttcgtgattagataaaaatgagacattttgcgttgtgggtcgttggaattgtagcgttatcatttgcgggttgtgataaagttcggatcttgttgatgggatatgttgattctagggcatttgaatgaaattggttctgttcatttatgaaatggttagaaatatggttttggttcctctggttcaatgtctcattcatgtcctttgtgtatttgtgtgaatgaatctttgttagagagagttggctggaatcttgaaggactatgtgggtagagaaagtcctctgtattttgcagagaggcttacggagcattacaggcgcgagaatgacgaagggcctcttatatacttgaagagagaagacttgaatc

SEQ ID NO: 36754 - DNA, 3435 bp, Arabidopsis thaliana landsberg
  unsure (1)..(3435): unsure at all n locations
tgcacatatcagctcacttggagcaaattggtgctgacctttctcaacgcactacaaagcgagagagttggcataatggatactccaatgaccaccaggaagaacaatcaatcaatgctcctgaaagtgttgttgatcctcacaggcagttgttgatgatcttaagtaatataggttactgcaaagacgaacttgcctctgagctttacaacaagtacaaatatacctggttacagtctaggtgggtttcttttttatttgaattcactggtacgatcggcagagtagttggacaaactcagtcatgcttagatgtcagaaccttgataattaatgccaatgtctgaatgacaaacacagtcatggttaaatgtctcaaccaagataattggttccaatatctgaactttcctaatcaaaactttgaatgtaaacgtaagaattactatatggtgttataaaatttactggttatcattgtgtctcttaaatgttgcaggagaaatgatgaagacatcagcgatcttcaagatctaatgatgtctttctctggtcttggagagaaggttctcgaacattacacttttgctaaggtaacgattaatctgcttgatagtttagtaatgttctcgctgtgtcttagagaattgatgcaccgccattgaacaatggaacaaggattgtttgttttcaaatcattcctactaagtttgcatctatttcacttgtacctaggcaaacttgatcagaacagccgccacaaattatctgctggactctggtattcagtggggggcagcgcctccagtaaaagtaagtagcaagtttactctcagttgtcactttttttgcgccttagaagaaccaatgaatagaccattttagcattttgtctaaagaaacgataactaaacctttacttcagggcatacgagatgctgctgttgagctgttacacactcttgtagctgtccatgcagaggtatactcatgaaaaaaaattattggtcgtgttgtggttctttagacattttgacattaaaatgcgttcctcgacagtgttcatagtgtaaaatcctaataactttgcaccgcaaaataaaactgcaggtctttgctggtgctaaacccctcctggacaagattcttggcgtgctgatcgaaggtctaatcgacacttttctgagtcttgtggaagaaaacagatcaagtgacctaagatcaattgatgcaaatggtttctgccaactgatgtttgaggtaacttgttcttttcatcattagagatgctcactaacaaaaacttcatctcataatgagaaacaaagttgtttttacagaagcagagaagctttgcagatttgtgatttgctaattctgtattttcatcacaactgctgcagcttgaatattttgaaacagtactgaattcatattttacaagcgctgcaaccgagtctcttaaatctctacaaggaaccgtgttggagatagctatagagagcatcagtgaagcagtcgagaccccagggcataatcgtagaccaactcgtggcagcgaagacacagtttcagatgacaagcaatctgtttcagcagatgacctcctcgtaacacatacatttcctttctcttttcaacagatttgatcaaatatcaaaacctcaattttgatcattttgttttatttcgtgaacaggctctaacgaaacagtgttcaaacgaattgctacaacaagagttggagagaactcgtgtgaacacagcatgctttgcagagtcagccccattagagtcaacgcctccattacccaaagctacctactcttcctttagaggatcaatggattctcgcaagccagaaactacatgagggctcacaagtacatctngggttcctcccattaatgggcccgacccctagacgaaaaagataatgaagaacgatcgnnactttgtttaaatttaatnnnatttcttnnctccgtttattttgtaccgtnnaaatgcatcataattctcttgttcctggtgcatttttttgtttgtttgtctgtctttttcagactcttatctttatttgtgaactcagataattgggttgtaattagtatatcacacgatcaaagtatctgaaaagcattggaaatttaagcaaagtagcttcttcaagcttgttttagttaagacaagaagtgactaaatacaagaatagtcacaaattccccttacgaaaagaggacacaaaagatttgagtttgaactcaggctgctgtcctcagcggtggagacaccaatatcactccatctcctctcacgaatagaaactcaatcgtccgctttgtagtctgcaatcagagatagtaaacaaaactaatcacatacatgagagacaaaagccacttatcctaatcagatcagaattgtagcccgcctagaggagtcccaacaactaatatgtgtgtgcctaagaagcttaaagaaagagacttctctactagaaacagtcagttacatggaaatgccttcctaatttcgatccaatagcttatatcttccagaacaataagattcgtgtaggatataatctcttgtctaagtaaatgttctacattgagctgaaacttctgtatatagtgaaagctaaaagacacttgtacacttgttctctaacaatatccttaacttgagatagaaactcatcaagatccccctcaaatacctataaagttaactattgagtaagaaaaagcacgtacccgaacaatctcttcatatgtctcgtcatcgatttctactgtagtgatagtttcttcaacatcacccagaatcatattcaaatgctgatcaaacgcctgcccaaagaattaacaacaacaacatcaacatcaaacctaagtgagtaactcaagagtgtagaaatcttccaaaatttaagaactttgtcaaaattaaatttacacgaaccataaattcccaattgcaagctcatcgccataactcgagaaaacgtttttagaaactgaaacttgaaaatcaaaaccctagactttcccccaaaaaaggaccaaattcgacaccaaaacagtgaaatcggcaaaataaagttacaaaattcaaacgaactatgtgtggaacgagtattttaagtagtgacaagttcaaggcactaagcatggcacaagaaaacgtacgtgaagcttgccgcgaagttcgcggtctgaccggagcttgacatagattctctcgtcgagactcagcctaatcagatctagtggctccctcacggtggcttcttcctcgccggacatcgtgtagacagagataccttcccacctgaaacacttctgggagggttttggtaccgacgaatcgtataacctgacacagactctgatctcgcggacacgaacttaacaattttgttctacgaat

SEQ ID NO: 36755 - DNA, 4526 bp, Arabidopsis thaliana landsberg
agacaaacacattctgtttatggttataaacttacgatatataattttatttgtttatttttatatatcttatttgcaatatgctgaaatggggattatttttttgtatctacagtttttttagttaaacaattgtttgaaaagcataccttagcctaatataaaaccattaaacctttgaaagatcaaatggctgtcactttcatatgattatcttatttctactatgtcaaataattgagtatttctttttccttttgtttttacttgcgtgagcaaaatgtaaaggtttccaaagtccaatttgtttttgtttactcgtaatatttgtcaacgtttctactcgtattttatttaatgaaattcaagtgactaatatatacatatgccactggaaaatttgcaatttgtttttatgcttttggaggctgcgttgatacctaacctacttattatagaaaatagacaatgggaagaatcaaatgacatgatcttttatttaaaaacatatgtagatcgtttgaatcaggctgcatgcattgctacctaagtacctaacctacttgcgttgtattagttgttgttgagtatttgggttgatttttatttttcttgttggattcctttgaagcactattttaaatttgtaatatacattattattggataacgattttgagatctctgaatcgtctttgggaaccaccggagtcaactgtgttcttggacggtgaagatataaccaacgttgatgttattgctcttcgtcgtagagttggaatgctttttcagcttcctgttctttttcaaggtaataatcaaattttgggatttgcttagcctctagtttcataggtcttgataatgtgtggttggttacagggactgttgcggataatgtgagatatggtccgaatttgagaggggagaaactaagtgacgaagaggtttataagctgctaagtcttgcagaccttgatgctttctttgctaagaagactggtgcagagttatctgtgggtcaagctcaacgagtagcacttgcaaggactctagccaacgagcctgaggtgttgctgctcgatgaaccaacaagtgctcttgatccgatatcgacagagaacattgaggatgttatagtgaaactgaagaagcagagagggattactactgtgattgtttctcacagtatcaagcagattcagaaagttgctgatatcgtttgccttgttgtcgacggagagattgttgaagttcttaaaccaagtgagctttcgcacgctacgcatccaatggcacagaggtttcttcaactcagttcttgagaccattttctcattgatggttcctgcaagttatttgctattttgcttgaatcttaataatctctttcaagagaggaacaaatgctggttgaatgtaacaacacctttcatggtttatgtctttttatcttctctttagcatacgaaagcatatatatgaacaacaaacctatcaaagaatttagtcgagatccgattggtttgatgagatctgcatcaaccgagcttaacaggaactacagcaggaactttgggtgaagagggatcaagtgtgatgatctcctttcttccttctcctccattctcaactttctctttaaccgcctttgtcactgcgccaaacgcgtttgaaaaccacgaagctccacttgatacataagggtttgccattaaagccgttcttgcactgattgctgtctcttcagcagctgctaaagcagatttcgttatctccctcacctgatatcgctcatcgatatctctcaacttctcattaaccacagttgttcctatgcttagcttttcgctcagacccatcttatcgtcaagcgatgcaatggttgcagaagcgtttgagatcaagttgtgtctgtcatcaaatgctttggctttctccatggcgtcttttccaagagcataacctcttcccaccatgatgttcaccacatcttcagctttcttgacagaaaaaccattaaacgaatgttcctgctacacagaggaaacaacatgaacaccgagagagtaacgaataaatcaaagagtttccggtctttaccgagtcaagtgcaagggcttctggtggtagctgatagttaacagcaggagttatactaacacgaagatctgcaatgacagctccctggaaggaaatgtttttcgctgtaagcactaattcatgaaatatacggaatgatgcatacgcggaaagcaaaataccgttaagagcattgcagtttcagctccttgtgaatccttaaaagtaacatatgcgacctgactctcttgtgtctcactgagatcattagagtaaacattagagatattggtaaagatcatctttaacaagaagatgataatttacaacaagttatttttcataccttcgcatctcgacgtattgaatgtcaccagagaaagaaaagaactctttgacatctttcttagaaacaattagtgaaacattgctaatcttgacagttttcacctgcacaacaatgaatcaatacaaagcctttgaacagacagctttacaacagcaatacaaagataatcccataacacagcgaagatgaaagtttgagaaatgttggttgcttacaccggagacagttgattgggaatccataagaatgttgtgctgagtttgatccgaatcaatgaaagcagcctgtggagagatcatcaatactcaaatttattttgaattaattcatccaaagccagaaactttcaattgagattgatactatgattgaaattagcatctgtggaacagaatctggattcaaaaaaaaaaactcgagaaacaaaaaaagttctgttttttttttaataacaccgacacagtaaagagagatctcagacttcatcacagaacaagagaacagtggttttatccacaaaatcgtagcatgtaactcctttgtgattagatctaaaaatagcaaaaaatatgaaaagcaaagccgaatctaagaacacaccagcaaaaatggccgagaatcgagaatgcttaccgttaccgacattgtcgaagtgattctctcaagagcgaaaaatctcgagtacgcgtaaagaatagggatttcaatatttcaagtccttttgagtctcaaaactgacaaggtacgtttttaattttaaagtgatttacatttcaacctcacgagtcaagagaatatgggtcatgtgaacgaaattgtgaagttcctattattgtattgtcctatgaacaaaacaaaaagaagaagagaacaaaaagagtaatagctattctttgtcttgtgatggctttttgccaaatgatccatgaggtctctttctttgtacatatgtatatatgcctaaccacaacaaaaatcgcttcatcgaatatttaaacacgtataataagatcacaaaagatgatcttcagcctaatcattgtggagatgggaggagtttcttcttcggcatcgattaatataccaagttgcatgttttctcagtcccatgccgatgagaactttgaggcttgtgagcattatatatgttatgacgaataagatgaccatccacaacattctccatgggagtggactgtatggcaagtgtgctgcgtatactggtgtcagtactcggatcacctgaggtcccaaaatatacactcaaaatcattccaagcttcttctttttttacttatcacaattgagtttttaggtcaaaagggaagaggaggaatataccacacaagcaggtgcaaggggaacaaaggtgagatttgtctttctatcttccggacgaatgttcaaagtctgacaataccagagaaagatatatggatgtaagatgacgcagcaatggcattttatagggccaatgtaacagcacaagagagagagagaaaggctgtatgatccatacctgctcgcagagggcttgaagaaactcagagtacgctataggtttgatgtcattgaacttggcaagaaatgaatgcttgatgatgtctatcatcatctcacagaagaagaccgtagtagcattctgcagagtccaagtatatttacttttaggcaacctggaaagaggcttgtacaaaattttatatctaccagagaattatgtacacttacgtagatgaaatttccaaaccatgcaccttcagactcgagaatattttgagccaaaactgacaccaagaaggccgatatgtggaatctctctattgaatctggtagagaaatagtaagggaaacaaaacataccaatcaaaaaccaaagctaacagctggaattacagtctaactcagatcccattttgacaggtgattgaaaatgtttgaagtactaagctaatgatcagagccataggaggcctagtattcaaggcacaggattctacaaagggcacgggagtaaagcttacccgcatatactagaccatggatgttgtccttgctggaacgcttaaagacactgctcttgatctcagcaaa

SEQ ID NO: 36756 - DNA, 2043 bp, Arabidopsis thaliana landsberg
  unsure (1)..(2043): unsure at all n locations
ctgggtatgagtactggagtatataacaatccccgctatagaactttgattgctctgctgcttcgagaaggatcttttcttcacaattgattcgccagacctgaatttttttaaagttagcaatcaaaacactatgttttggttatgtccacatattcaaatacattaatgacggtatcaactaagacatcgtcactacctggagatttcctgtaccatcaatgtatggcttcggttcgtctttagaagaagaagaagaagtcttaaccaggccttgaacgttaactccttgccgctgcaaaagagctggtgaaagaacaaaaagagaataagtatctcataattgaaagtctaaaaatttcagtaatgatcaatgtggatagtatcagtatactcaacctgcgactttgcctctgccttgttggggctcagctatggtacttgaagccggccatgaatcaaacttagatcggaacatcactgtttcatacccttccatcacactgaccaggtttgattttggcggttcagacgaacggaaaaattcctgaaaaaatgaaaattaataatatgacagtgaacattaagaaacaaatcaaaacaagacttttgtttcagtgcatgaggagatatttacttctgcagcttcagttgcgctctttctttggtcgattgaagtacctcgtcccttccaaacgaacaattcaagaccgcaatcgagaatataacatttgttagtgtccagaagctctttcgtcaaacactcagcctctacggcatctgtctgtcccttctcgacacttgaaagaccaaacatgtctcaagtcagaacataatcatcttgctgcagtaattagtcaattattagggagcctctattaaagtaaaaggtgttctacctgaaaagtttgataccatcagatgcagcggtttcgtcatcattgactgctggtttcttaggaagcggagcaaacccaccaaacaagccccaaaactctccagcttcagcatcagccatcatcctcccatcctctacaacaaaaggaaagccattaaactcaatatagttggtataatcttagccttcattgttttttacggtttagttcacttaccaacagctgcgatatcgcactttccatcatggtaagtgtctntaatgtactgaacaacctcaagagcttttgctctttcttgaatactcgacttggaaccactgaattgaaaaattttagactctgtatcaagaataaaaacgtcttcgtggttgagagtcgatcgaacaaacggaacctgtgaataagaaaatcaatgcaaaccaagatgaaacataaagaaccagttgagagaaaagacatttcaagatatgctaattaacttgcctctttaacacggacgacatgtttgcctttgcagatatacagacgcgtctgatgctcctcgggctttacatggttgaaccctgaagcaactccaccttcttgaggtattatgcaaggtttgaagtaggaaagaaacttctcggtttcgtgaccctgtacttctcggtactgaacagcacgtccacctaatgctgaatctaattcaacagtcatgacggctacagcacctgcttcatcctattttcatcaacacaacaccatggttcttatttgtcgaagaatatacaaaaaagaaaacaaaagactagagaatatgaagagactgtacctggctggaatctttaccgagccagtagtgaatatcatgatgcaaagaaccgcttcttgacgctgtggtctggcatgagatagttagataagaaggtataagacactattaagaactatatatcaataaaccaaagaaggaacatgaaaaaactactgacctttaagactatataggaatccccggtgaaaaatttcccatgagactcttgtggaacagtgacaggtttgaagttctcgatgcgccatatttcaatcccgctgtgtaaacaatttgccaaaaataaagtccagatgaatcacaagctacgcagcaaggactacaataaaaaca

SEQ ID NO: 36757 - DNA, 1086 bp, Arabidopsis thaliana landsberg
cctccgtacgaaaatgactctgaggcattccaagaacaatgcatgactagatacggagtcaagcctcgaccccattggatcaccacagaatttggtggaatggtcagtttttttcttcccctccattggatcagtttcttcggctgtaagattcaatatccggctctttggtcatcttttgcagaggatagagacagtactgaagagatttggaagcaacatcatattctccaatggaatgcaggacccttggagccgtggagggtaagtggtactacacagtactattcggttttggttcttaaacagatggattattttcatcaaattttcagggttctgaagaacatttcaagtagcatcgttgcgcttgtgaccaagaaaggtaaacacttctgttatgtttatgaatgttggggaaagttagacagagatagatttgagtgaaaaatcgaaacctaacattgttttgtgtggaacaggagctcaccatgcagatctcagggctgctacaaaagatgacccagagtggctgaaagagcagaggaggcaagaggttgccattatagagaaatggatcagtgagtattacagagatttaagagaagagcaatagaggagccaaacaaaagtttattgcactaaaaatcaacaaataaagaaactaggtgtttttgattcggttcgtgtaacaaagtaaaagcttcaccaggaatttgtattccctcaaacaaaataatctgatgtttgtttctctatggagtgaattctgtaactaatatctgattatatcgtggcattcatgaaaatgttatggaacaaagagggtatcatcgcaaatagtcaaaaatgtcacgcgtatttaaaccctaattagacaccgagaacataagtaacgtacgacacattcttcatgaaacaaatgcgaattcaattagattcctattcttcttcttcgctctcttggtccaaatctgttgtcgaggtaggagagttacaagttcccgaaagtgtatcccttctgtgtcaacttgacggagaccatcatgaataaagggtcttgtggcaggtcagaatttgactttt

SEQ ID NO: 36758 - DNA, 1784 bp, Arabidopsis thaliana landsberg
ataattccttagcgacaggacatagcacgtgttcttaaacaacagtagcaggtctactttatcaacatgtttgctccaagtagcggccgggtatatatccacaagaattccaactataaagaaagtactcaatagatattaaaaatcgaggctcttcaggagtaccattcatgaataacataacagggggagtttttccaaacgattcttgagagcatcagcggtagatacaggctgagctcggtcttgtccagaagctttcgcattcttcttaacagtttcatgaatcgttggccctgcagccaaccctaagcttgcaggagtaatagaaccagcaactttgccaactttattagctaaacttgatggatctgccccttcaagtgtatccacagttttgccatccttcaataagaaaaggattcagtgcagtgacaaagattcaagctttgtcaataagccaaaaaattgcaaccaaacaaagaatcaatatgcctaaagtttaccttgaagaagacgaaatacggcacaagagcaacagaataagcctcagatatctcaggatgttcctcagcttctacctaagaagataaataaaaccaatcaaagtcaaaaaccaattgaaagagataaaattcgaacagagacgacgaaccctaaagaagtgagcacgagggaaatcagtagcgagatgagagaaaacttgatccatctgcttcgaagcgtcacaccaagaagcccagaagtgaagcacgagtggtgctccgctgtggcgcaagttatcaagctcctcctttgaaacgatatccttcacagtaccactcatcttcgaagaggaaggagatgtcgcgtctctctcggaaggatctccaacactttttcttttctttttgtgattaccaatctattatcgagcagaattcttctgttgctggagaaggaaaagagatttatgtaactaagaaaaaaaaatggtcggagagggagatttgattttgtgtctgtatcgtacgtgtcacaaactctcaaaagtttgataactgtcaaatataccacatgacaagtaaactatcttttattgggttatatagttgaaaataatccgctaaacaatgatagtaaattttgttgtttaagtgccagtaagatggcgaacaaagtatattatatgatatgattgtttgcacaattggtaatctcactgttctgctttcttgtttcccacttacttttcttgcttatctcacatgaaacagaaacaatgcatactagatgcttccctcagacataaatcatcagaaagttaagaataattttttagttacataaatatttgtctttaaaattgctcaatccatccatcttctcaaaatatatacagggaaattataggagatggaattagcgcattgttttccaagtgaaatattccaagactcaaataagttaaatgggcttgaaaaaattagcactaaaaggcccacttaacgtcttttcaatttataatttaaagataagtcgaagatataaattgaaaataagttaaatgggcttgttaatgggttaacaacagagacaaaaagccttataacatgtagaagatgaagtccacataattaaattcgtggtttagctttagtttctggaatcttcgtaccaaagtcgccggagatcggaagctaacacgggaagatttagccggaagaaatggcttcgttaggtttcaacctcggcttcaccttctccaatgcacaaattcagcagcatcgaaaagtttccggagg

SEQ ID NO: 36759 - DNA, 2249 bp, Arabidopsis thaliana landsberg
tgcatgttataatgtatacctaaagtacttttaaagaagaaagtgatcaataacacatctaaatagtgatttatgcctaacatgtaattgaaatcatggattaacaagaaataatcatggattaacatgatttcttactaaaaataataattatgcattacctcagtaaaaatagcatattttactcaattaaaaaaaaagtgaaaacatctaatacaaaaatgacattgaattgcattagatacatatgttatatttaatgattcataattttttgtaaggagttgaccaaaaaagtatgtagaatgaataaaagggcagattagtcatttgggaagaacagaagaagaacaaaaagagaggcggtggctgaacggctggctggtcgaaaaaagcgagtaagaaggcccacaccaccaatggagccaccgaccgaccaaaccgtcctcaccatgaaatctaatattatttccttcttttagatttgacccctcagcttttatttcctatttaatttcccctaatatgaatagagacgctttcgctttatttatttcatttgttatggtatcaaaatccacatcacgttgattattttttctatttaaagatttgtttcatttccaagttgtgcaattgaaaatgtatcgtcaccgtcctgaaatcgtcactacaactttttcaataagactacaaaatgacaagtttagttatctacacaatcaatatcacaaaatgtttggttcgacttttatgttcggtggctataaatgggttttacaaagatacatgaacaataataattatggtttacatgttaaatgtatgtctttgtttatatatgagcttaaggaagtatttaaaattcaaaagtggtcaagttagccaaattggcggctattgaaacgtccacattgggtcaaagttcaaagaaacgcagccaatgctcttccggacttttcatcgtactttttttgttattaagaaggaaaactaagaaagtcacaagagagaaattcaaacaaaatttttatattagaagtcccaaaacataattcaaattaactaaactacgtcgtactatatgaaattcttattaaaatatctttttgaataatacttctgttgaataatatgtagaagaaaaagagaataaaaagaaccggttcaatctttgtcaaaaaaaataaaaagatttaagattaagccaactcaacctcaactatttttcaaagtgggcgtttttcaaattttctcaaacatagatctttttccaaatgaatacaaaaatataagggtcgacttgctattataaaaagttcctaaattctctcccgtgctcattttgaaaacctccctctttcgctgcaagcagagaaaaagacgacggagaaattttgaatctgaggttcttttagtcctcgcgaagccagatgctactctctattgcacgtctgtgacagaagagctcgattagggaactgaagacaaagacacggagaaattttgaactcgagaggtttgattttgaacctttgaatctctgggtttctgatttcttcgagatttaactaggtagttgaattgaatcctgataccaccttgaagcgtttttgttgtgctttctcagattatccatgatcatgtgatgcactaatttcgtagtattcaattgctgggattctgaaattagcaaaccttaaaatggttgatttgtggaaatttgtctaaccggttaatcggttaacagagttggaactagtgttatggatgatgaagatgtagaaatagatcttctaacaaaaagtagtaatgtgaatgtattttgtgaagcaagtacaagtgggaacgttgctcagtgtgcaacggttagtgagctcagaaatgggatggattttgagtcaaaggaagctgcatactatttctacagagaatatgctcgatcagtgggatttggtatcacaataaaagctagccgtcgttctaaaagatcagggaagtttattgatgtcaaaatagcgtgttcgagatttggaaccaagcgcgagaaagccacagctatcaatccacgttcatgtccaaagaccggttgcaaagccggtttgcatatgaagaggaaggaagatgagaaatgggcttatatataattttgtaaaagaacataaccatgagatatgtcctgatgatttttatgttagcgtacgaggaaaggaacaagcctgctggtgcgctagcaataccaaagaaag

SEQ ID NO: 36760 - DNA, 2506 bp, Arabidopsis thaliana landsberg
ccgtaaacccaaaaccaatctctgcaaagtcctcggttctgatggagctttcagaaacctatgcttgtgttccatcgacggagagaggtagaggaattctgatctctggtaactcgaagtccgataccatcctctacactaatggtcgatccgtcgtgactctcgacctcaacaatcctttaaaggtctctatctatggtgagcacgcttacccagctactgtggcgcgatattctccgaacggagagtggatcgcgtctggtgatgtgtcggggactgttagaatctggggagcttacaacgatcatgtgttgaagaatgagtttaaggttttggctggtcggatcgatgatcttcagtggtctgctgatgggatgaggatcgttgcttctggtgatggcaaaggcaaatctcttgttcgtgctttcatgtgagtttggttttgcttcttagataaagattggatttttatagtgcttagctcaatgttgttttcgttgactttgattgatcggactaaaggttttgtttttctgctggtgttgctttgattttgttgaatcggattgatattaatcatattgaaattgagcattttgtttcttcttctcaactttgatggattattgactcattgtttgtcttggtttattaggtgggattcaggatcaaatgtgggagagtttgatggtcattctaggagagttcttagctgtgctatcaagccaactaggccgttccgtattgtaacttgtggggaggattttctggtgaatttctatgaaggtcctccttttaagttcaagctctcaagcaggtcagatattcatgtgctccctttctttaaagaaatatgacactttcgatatctgtttaaatttcctgcttgtgagtttctgaattgtttacgagattgttgtttattggtcgacagagagcattccaactttgtcaactgtgtgaggtttgcaccagatggaggtaagttcattactgtgagttcagataagaagggaatcatatatgatggaaagacttgtgagatactgggagaactgtcttctgatgatgggcataaaggtagcatctatgcagtcagctggagtcctgatggtaaacaggtactaagttatatctgtttgttgttccgtattctcaattcttgcctgattccctcatattacgctcaaactacattaggcttaaacaaggtctactagaatagcgtatggaagtaattggtctaacctgctgcagtatgacgtacataaatgaactatcttgggtgtatctatgaagactgaatgacatattctctatcttctagttgttgattacatcatggttgatgttatgctacgtctgtactcacgtgttgtatatgtttgaatcatcaaccaggtgctcactgtttccgcagacaagtcagccaaaatatgggatatatcagacaacggtagtggatcattgaatacaacattgaactgtcctggatcatcaggtggagtagacgatatgcttgttgggtgtctgtggcagaacgatcatattgtcactgtttctctaggtggcacaatcagcatattctcagcaagcgatctggataaatccccctttcagttttcgggacacatgaagaacgtctcttccttagctgtgcttaaaggaaacgctgactacatattatccggtagttatgatggactgatatgtaaatggatgctaggccgtggtttttgcggtaaattgcagcggacacaaaactctcaaataaagtgctttgctgcccatgaagaagagatcgtgacctctggatatgacaataaggtaaactggttctcactttaatttttattcacatgtaggacttgtcaccttgatttctgcagtgtctgaatttggtgtttaggggattgaatgtaaggacgaaacaagtgaattagttttttttctctctgaaatattggcaattctaaagacacaatggtctcttaagattattaacactttggaaagatatactaatgatcttgtggtttagataatttaaaagagcgatcactgaaagccaaatggtctttaccttgtaagactagccgtgactaatattttttatttcgtaggttatctaagtgcttccaagcattattgttattgaagcaactaactcacgtttattcactatgtgattcttattcagatatccaggatctcctataaagatgatcaatgcacaaatgaagagtctatcgacattggaaatcaaccaaaggatctaagccttgcaccactctcacccgatctccttctggtgacctttgagtcaagagttgtgtttcttcgtgatgggaaagtagtgtcaaccatcaaccttgggttcattgtcactgctttggcagtcacacctgatggaaccgaagctgtcatcggtggccaagacggcaaactccatttgtattctattcatggtgactacctcaccgaggaagcagttctcgagagacac

SEQ ID NO: 36761 - DNA, 2879 bp, Arabidopsis thaliana landsberg
attcctctctggcttgttcgagcagcctcaagaactctggttgttcaactcttcaagctctaaaacaaacctcttattctctctcccttaaccgcaatcactgctacatgcccttccttcacatcacttggaatcattgatgcagcattaccctcttcctcaaactcacaataattccctacccttttagagaatctagtgaataagcagcaaatttgtagctttctcatgaaaatcttaaactttttgcacattctcaaaacgtcaacagtagaagtaaagctctgattagtgttctttgcttcttcttcttcttcttcttctttggtggagttgttgcattcttttgggttagagagtttggttttatacactcaccattcatagttaggaaatttctaagagatttcttgattacaacatttaatgcaatcccccatttgtgtatcagctgttctctttctttgctctcctgagaatagtggggcctcacaagaacacgcttctgcagtccaaaaagtgtaacttcacacctctttcctttgtaattaagatggttgatccctctggttcaatcttttatccttgttaagaacttaagaatcttgaaggactttgattatttacgttttcactacaaatcaaagtgtatggcacaagtaaaattaccaaaacaaaaggactttgattgtttaggtattcactaaaattcacgcatttgaagaattactttgcgtgtggggtttggtgtatatactcatagtctcctactccattgcatttgtgccgacacataaaagaagtgaagaaattgtcattatctagagaatagagtatttatcgtataacatgtcaactacctggtggtccggtctgtacggaatcattaaatgtttgttcaaattttctaacaccgttgcgtacttataatgtaatgtaaccccactgaattaagatataaacaaaattgttgtaaaaacagagtactatgtgaaaacagaggaatttggtctttctttggtctaagtttaggaccagccctcctcccactagtaaataccagtgcagtgtgagggatttaagtcattctttctttatttttgttaaactattaattggttacaaaaagagtgaaaatttttaaaaatgaagaaaatgcattaatattgtattgttaatagtaaaatgttatgtgaattcttaaaaagaaagttagttgaaagaaagaaaaaaaaaaacacgtcagcatgtgaattttagatgttgttgaaaaacattggtaaactaaggtcttcttatattggacattcacatggacatggatcatgaagttatgtgggctacaagaaaaataaaatatttttggcccactaatcaaaaagtttctagctactctagtctcattaacaaatccaaggaatttggggtgagtaaagtgtaaacacttgaccagtttattatagagtcacttagagagtatttaaataattcaaaacttggattacttaccaaatagagtaaatcaaatttcagagttcttgaattcgccactatcttctaactcacggaagttgctttatttttgtttctacttagagatgataaaacaattttgtaatcagcaaactcttctttaacctaaagtacttatatcagaaaccacattcatgagaaaccatacttaaacctaatgttaaacgagaaaataattaaccaccttcaatttttgttagtggataaatagagtaccaaacaaaataagtggacaaattttaaataaataaaaatctatggacactcaagttgtaatttattttctccgtatccattttgattttagtccctttgttcccatttctctcctctctctctctttctcgctctcttcctgatttgatcaccggaaaatcttagccgtccgatcaaccaccgtgtactccgagaagatctcttcgattacttcaacgttcttctgattttcaccagctcagatctccgataacattccggtatcatttctcgcttttttttcctccaaatccttatccgccagattacgaaaatgaggagcttgatccgagagaggcatagtgaaagcttatctgtgaattcttaggatttgaatctgaatactcaggctttttgattccttctccgttacatgctgattcaattttgagctcccctgctagtgtaaatctcctcagctcggaaacttagggtttagtttggggtcctttgctcttcgttgcgtaagccatgtttaagaagatcatgaaaggtgggcatcgaaagccctctaaatccgaagctaatgaaccgtctagttatgggattggtctacctgataataggtcaggtcctggctccaatgtggtcgttagtcacgcttctcgtggtgcattggttaattcttctccgtcgccagtgactgcaactccacctcctccgcctttgggctcggtggagccactcccgttgtttagagatgtgccggtttcagagaggcaaactttgttcttgaggaaacttcagaattgctgtttccttttcgatttcactgacacgattaagaatgctagagacaaggagattaagaggcaaacgttgttggagctggtggattttatacagtctggatctagtaagatctcagagtcgtgtcaggaagaaatgattaagatgatttctgttaatattttccggtctctcccaccagcatcacacgagaatacgggtcaagagcctgcagatcctgaggaagaagaaccttatttggaaccttcttggcctcacttacagctagtttacgagttgctcctgagatatgttgtttcgactgacactgatacaaaggtggccaaacggtatattgacca

SEQ ID NO: 36762 - DNA, 1892 bp, Arabidopsis thaliana landsberg
  unsure (1)..(1892): unsure at all n locations
cagaatattatccattaatttatgtatctcatgacagctcatttgtgttcttacattcccacccaactaatgataattataatgtactatatatacgaaataaatgatttcaaaattgggattgaaatccagttacctctataactagatttcacaattatattcattattttgaattatttccttagttttattattagtctatctagttgttctaatgttagctagggaatgtgtcaggctaacttttctagcttgtgttggtaaaactaacattttccaaaacatttgtcccattgacgattatggtgtatacatgcacaaacgttacgtaagcgtcaatcgagtttgtataggattgtacatgtaacgcaaaagcttggtttgctaactttgcttatgttttgaaatttgaaaaatacaatgaccaacaccaacttcattgaaacgagagaaagagaaaaaaaaaacaatctctataacaaaaatcttaagtaggaataagaaacctaggtttttgtacaagtggcgtcaaccgcgagtgtaggaggtcccttgcaatggctcggaccaaacatctcatccgtcactaaaaatacacacttcggttttccaaggcaattctgcataaacaatgccaacgtacgataagattcattgacaataaaaccaacataacatattaacgctagttaattctgctaacctttttgacgagcctcaaagtagcgggtgcgccgcggtttccacgtttaagcgtgttattcttacagtcaccagtgggttggccatagtcggcgaattttatcagagataacatatccttcaccacaaaagatgggcgatagatcgacgctaggcgccggatgatcaatgcatattggcagttgattcggtcgatattctcttggatttaaacgataagaaccggtgatgatattccttgtataaaaacaagacacagaagaaacggataaaagaagaagcaaaacgatgaagccatgaagatgaagagaatgtgtagtttccatttttattctagtgtttcgttcccttctaaatcagaagggtgttgaaaaatgctaagatggtttagtacgcgtagttaagtataaatatgtaatattttgatattgatatatatgataatattagtaattaaagtttcttagagatgcgaatttgtgtgcggatgtggctgcgaagttttctataattaggtttatcatattcctacgagaatattaaaacaactgtttttatttcgcaaagagaacaacaaattttcacactatctattttagaatgttcaatcttgacaatttgcatttattgcttgattattaattatgatacaagtatagaatatcaaaattcaagtgtcatataattagtttcggattagtaaacttcaattaccataagaaaaaaaaaaggaaggatttgacttcacatatattcaagaattgcttcaaaaacaaaaacatcaatcttcagatttggttagcatatactaaaatccaacaatagatcgtctctagggtaaagatacaacaaacattggtttacttatgcatcaagaaaccaaaagataagaggcaacagaacaaacaagaaatagacgaagtgatcatctaacatcgcatcaagaaaaccgaaaacactaaagaagaaagaactttgaagatccactttcattcaaaagcccattgattcaccttgcggatctcagcttctccctctgctgtgaaatcgttctttatattgaagtatgagcgaatctcgcctggagttttgcctgagagcaaatcagcgacagtttgaaatgtgagatcaagaaggctttgnatattgaggatattcgcagccatcataacatcaaagagaatcga

SEQ ID NO: 36763 - DNA, 1993 bp, Arabidopsis thaliana landsberg
  unsure (1)..(1993): unsure at all n locations
attctgtttacggttgcattggagccatagcgtctctgcagaagaagattctcgagctaaactgatctagctgacgctcgcactcgactacttgcccattctggtgtcaacaacagccaagtgtcccctttggatgattctcctgagcttgctgcttttcttgatcttgtaccttatagtgacttgatgttgcttgatgggtctactaatcttgatgcttacttgtatgatcttggacagcctccttttgtataggccttatctctctatcatatatctctttatcagctgtatttgcactttgctttacaagttatctttgacaatctaaagtctgtccctaatgtatgaattccagtatgcataatcagatgcttacttcatcatatgtatgaaaaagggttttaacttcaaaagtaaccatcacatgcgatgagataactcaggtacaagatgagccttggaaggtcagagtccttaccagttttggaccaagtggtaggccaaggtgagtaaagtgaggtgttttagatgaagagcttctttgtaagtcaggtatgaataggagagcacatgcttatgtcatcccgaaattctaccaaacatgaaacattgatatatatgcttctatgatgttcttttttgaggctccaataatacagcctcatgtgtcaactcgtctccctcaggccacaagagtcttgtcctggagattccagagtgcagcaaagtcacataagcaaacatccaaatcaatagcttggtgggtttgatcaaattccaaactgaattatgaatgactctgataagagttctcctcagaaccgttctacgcatcttgttaagtctgtacacattcctgaaacctgcctaagcaaaagagtaattgcagatcacagaaagagagatgagcacaatttggaactgcagacactgatacacaaaccatcatacattgatacttcacaaaagtacatcttgatatgtcagatactatgagagttcttttggtaattcgcattgctactaccaatgtaactctacaatgctaaaaaagagaatgaaaaagaagaagaagaaaaaaagcatcgcgctataacttaagaaaacctaaagatcaataataataacatcttctccaaatcgtatgagctttagatccaaccattgctccttgcttcacatcagtaactcctccacaatctacaatcctacttcttcttacctatacaacaaacaaagcacaactgaagtttcagtaaactcatcaatcacaacaaaacacacataaaaatgaaaactttacctgaagcagctcttcgtttcccaagtttagatttctcaagctccaattgcatctccatcaacatattcattcgttgtaactcaagctcctttgcaacttccattctctgtttctccaattcaatcatcatctgttgcttcttcccctcgattctctcaaacgcttcccctaacttcagaatcgatctcgctagctccctaaaggctgatccttcactcgaatctacatcttcaactttacgatgcttcctcaccacaaatccccaatcacccgcatcatcatcatcttcttcgtcgtcatcatcatcatcatcatcgtcatcgagagagctaccagttgatttagatccagtaggattcaaattagggttcatcaacgccgatttaacaacagcaccggacgatttcttcataaccggaccgattaagaaatcgagtctatcaaagaagcaccaattcgataaaggtttcgccttttcagttttgtacttcttcttcaacgtatcgatccggtttttgcactgtacatcggtctttggccggccattcccgtggcttgaattgacggcgtcggcgacttctttccaatcgttttgccggagatttccccggttgagattgacgtatcgatctccccaagcttcgatcaatgtcgccgtagcgtcttcgctcctccnatccactcttc

SEQ ID NO: 36764 - DNA, 1897 bp, Arabidopsis thaliana landsberg
aattaacattacatgcataaccagagagttgtgtatattaatccagaaagctagcttttcttcatgatttaacttccttggattcactccttctaacttattaacaagcgacctaaacaattttgaattcaagaagaagtctacaattgattaaataacatagttgctatatctaaactaaaagaagttgatattgtaagagcctgagattgaaaacctgaaatgtttcaaagcaggttcaactgcatttaacttctctgagtctctactaatcgatttcaccattaataacttgtcgtaaggtcgactaatgatcttcagaggctctttcccgcggaaaggactgctcgattctagatcattgtcgagtgatcctggatccacaagttgacgacataattctgagatgcacttgaccatctcttcagataaactatttggtgacttatgaacgttttcagaaacatatgtcccaatcaactcatcgatatcagattgctgaagacatgaaaatgtaaaccaccattggtaaagaaagaaactcaaacaaaacaacattaactgtttaacacaatttcttttacctcaagcattgagaaaggaagagatcgatgatatgacgagtccattgcatggggagacattctaaaggaatagcctgaacaatgagacaacgatgagtgactgcggaatattccagagtcttctacaagtttctgcgggctgcagactcctttttttggtgaatcaatgagtttggtacactcaagaagatcctctgatctctctttctcttctgattctaacttagatgtaattttgttgttgaagaatctccggtataacaaaagaagatatgtttctaagtacatcacttgcagctccaaacccgctatttcctccaccagtttcttcgcctcctaaatcaagaattcataaaaacatctttagacaagatattcaaagcgggcttacttgtgttaaaagtaaccaaaatcttattgagttttttctataaccttggggatagaagaatcttcatttttagaatcttccaagaacagtgtgcgtccaaggactgtcttcatttcacgccgaactaagacttcatcttcttgaagcaataaatcaatctgcagagtatacagtaaaagatttgagatctgttttgatttttaatagaaacctaaaaacaatcttctgtgaaaaaatttcttaaaacctcatcacttagactctcctgcccccgggatgtaattttctggactttaaaagagattttagctgttctatctctctctgcaaaagttcatcctaaagaacaattaagaacttaagttgatttgatgatcaagaagattaagaaaaatatataaacacctttgaagagtcctgaccatgtgaatgttgtaaagggcctcgcttgattttttattcttgagagattttcttgggaccggatcgctggaaagaacagaaactaaggtaagacaagactgtaaaatgaaatataaactaatgaagaagaagagagtgacccttctagaacgtttgtgattcgaagttcttgtcgtcatgagtatatgaacaacttgaaatcgcccgcctaatttattttaaagagtttttgtgatttgaaaaaactcacaagtaaaaacgaaccaacagctgaaaatcactgagaacagagcattaaatgagagatataaaacaatttagatagtgacaaaagaaaagttactgaagccgaccaaaggaaaggttaaagaacagaagcaaattgcagtgaatagcattataccacgaatggaatgagactactcactacatatttaataagaatcatacaaagtgaacaataatttttctttttgtaagaatatttggttaaaaatgt

SEQ ID NO: 36765 - DNA, 1136 bp, Arabidopsis thaliana landsberg
ttatgtaataatctgtattatacgtttcatataacttatatttcatcaaaatatataagtttttctaaaattacttgggaaacaattgtgtagataatgaatgtttatatagtttagttagttaatgtaactaaattgtagatgtataattgattcctaatttttatgtttgactcttttgtatatgaatgcccaaaataagggttttttaaggttctttaagaaaactattggcttcatcaatcatgacaatcatgtttagatctgtaatctactgtatggggatattttgtatatatagtgttgcaatgtggattttaatattatgctgcatttgaaattaatttgaaaaggttgcgtttaatattcaaaaatttacatactttcttttatttgtaaagatttgatatttgagaatattaattttgagcaaaaaccaaaaacacatgggttataatctttaaccgattcaaaaattgaaaaggtctaaattaaaaatttgcaccgacctttttgtttttacattatttaacacttatatatcataaatgattcatgtaattaatatttgtatgtgtttgttaaagatttgtatgtatgtgttttcattacagatgaaaggagacttgtgagtttcatatatatatcatctctcttttattgtcatgttaacatttcattattttattaacaaattattaatctaaaaaaaaaaaactcatggtaaacaattataacgtgagttgtcaagttttatgtggtttttcatcttccattctatacattttgttaatcaattgatcaataactgtaagttcccttaaaaaattgaagtttcgaaagaaaaaaaacaaaaagcataaaattttatacggaaccaggaataattttaatttttttttatgttaattagaattttgaaataaaaagttctacatcctccatagatcaaatagtatttatgtgttataaattaaatacaaaaatacaaactaaataattgttgataatttggtatatgtctacgttttataaattatcatgtttgtgtaatctttaaatttaaagataaaaaaaagcagaaattaatttatgagaaaatattaatacaatcaattgttaaacaaaactacaaa

SEQ ID NO: 36766 - DNA, 4288 bp, Arabidopsis thaliana landsberg
  unsure (1)..(4288): unsure at all n locations
gatgttttctaaaaaaaaacattgataaacgtcagatgaattcaaacacaataataataacaatgagctattcgtgcaaaacattgaaaataccttgaagggttcccaacccatccacttaacaatttcttcaatatgattaatatactcttccttttctgcctctggatttgtatcatcatacctgaaaaccagattttcaaggaatattgaacattgtgcttacagaagaaacaaggattgttatagaaaggtaaagatgtatgaaactcaagtaaaagcaaccaaactttttttaccttagataacagcaaccccctcgctcctttgcaagaccaaaatcaacaaacatagcctggaagtacaagcattggaaacgaacataaaaccatagccctaacgaaccatacaccatcaagcaaaacatcccaaaacctcatatcatgtatttcttaccttggcatgtccaatatgaagataaccatttggttcaggggggaaccgagtataaactttccctccagtcaccttgagatgtttgtcaagtacttcctttgtattgctacatctgagaatagagccatcactgaaaaacacttctgtgtgaacctgagaatataaaataacaaaaaatcttacggacgcctatgaattcacccatgaaaaaatgagaatgtaacaacaaacatattataaaaagtttgttccagatcgccacaataaaaagtgaagcaatacagatcatacttagtctactattattaccactgaatcaacacctagatgaatgattatcgatggacgaggaatcagatgtgaagaacgtgaactttaaaatctcaggaaaataaatcagtagatgttaccataaaattttgttctggctgagggaatatagtatatggattaagctcctcttcagatggctctgcggtagtttccaccacagctttcttttcctaaagataagccacagaaatgaagaattaaaatcacaatatacacaacagagaaaaaaaaatcaatgaaacctccaatcacctcgactttggcaggcttctccttcttctccttcttttttgtaggtttttcattatcagcagcggttttctcaccaagcagctcatacattttctcatctatgagtttctattgcagacataagactggataagaaaactacgatatcgtttgtgacaagctaagaagacaggctgctaaaaaaaatgttaacgcacctttacaatcttaggatcggcccatggcaaacttttccggacatgtccaaataattcacccactacacaaacataaatacattattcaaccaagaaacagaataagccggttatgtgacaaattatagagaatcagagcaatggtagatatgcctcaaataaaccgaatgccttagacaggaggtatagagcaaacactaacnnnnnnnnnnnnnnnnnnnnnnnaatattgttttcttattctcttcaaagattcctttaactgctttctcaatatcttctggggaaacttcaatccctgttccaaaacaatgatgaagatctcatctccaaatccatggaaaacacacagcaaattgtaacctcaaagcattgtgttaataaagaaaaacagaaaccctacaaacattggcacttaaaagtaagaaatataatacatgctcataatcgcataaacaaaagtgcttaccaacaccacatgcctcttcaaactcattcagcttaaagtcctcaggaccggtactggcaaaaaaggcaaatgcagcttccaattgggctggagttttaatctgcagattcattaacagagagaatcataaaaactttagcccgtttcccattgacaaaacagaaaataacccaatttctgacaaaatcaaggagccatataccaaccttagagttaacaatgtacttgagcaatgtagggcgatgcacaagagcatttgtagggaacttagtagcgacctgttaagtaaaacatagcctcaataactttcttataagcattgaaacaaaaatctgtggaattttggcttaattagaaatatatctcaccgagtataacagattgccagtatttcgatcgcacccatcagtaacagcagcctatacacaagacaaaacatcatgaaaagaaagttttaataatccaattgatcaaatcatgaacagaatcatacatgcaacggattcaaaatcatcaaactaaacatttcgaattgagattacataaaaattggatttaagtcaacagattgatagaaagcaaaactttttcaaaggaaaatgaaaaacttagtcctcttgtatccaatttcatcagatacaataagaatcgatagccaacacacaggaagaaggaggaggaagaagagagagaggagacctcgtggataacggcggtgagattggcggtgaccttgttattattgatggtattacgagctgttttctcgtccaaaccaatactaatgaagagctcaatagatttctcggagttatcgtctttgagaaccatggcgacgaaactgacaaagtaacagaaacgaaagtgagaccaccttagggtttaatggtgtggaggagacacggttttactttaaccagatgtaacccaagtattgggggaaatatttaaaccggagtttattgattggttaatttaaaccgaagatggctaatatagaaaagagatatattggtgcagtttgaaaatttcgaaccgaaccataaacatgaaatgcaaccgaatccagaccttgtccgagccatcgccaaccgctacgccgcgaatctccgcctctgtttgccgctccgacgaacatctctgcagctcgcgcgagccgtccatggaaatatcattactttcgggtttcagccacgtgcccatatcctgaaccgtttgattgatgtttattgtaaatcgtcagagctaaattatgcacgccaactgttcgatgaaatctctgaaccagataaaattgctagaaccaccatggtctctggctattgtgcttccggtgatatcaccctcgctcgaggggtttttgagaaagctcctgtgtgtatgcgtgatactgtaatgtacaatgcgatgatcactggcttttcacataacaatgatggttactctgctattaacctcttttgtaagatgaagcatgaaggattcaaacctgacaacttcactttcgcaagtgttctcgcgggtttagcgttagttgccgatgacgagaagcaatgtgtgcaatttcatgccgcagctctgaaatctggtgctggttatattacttcggtttctaacgctctggtgtctgtgtattcgaaatgtgcgtcttctccgtctctgctacattcagctagaaaagtgtttgatgagattcttgagaaagatgagaggtcgtggacgactatgatgacgggttatgtaaagaatggttattttgatttaggggaagagttgcttgaggggatggacgacaatatgaagctggttgcttataatgctatgatttctggttatgttaatcgtggtttttatcaggaggcattggagatggtaagaaggatggtttcatctggaattgagctcgatgagtttacatatcctagcgttattagggcgtgtgccacagctggattgcttcagttgggaaagcaagttcatgcttatgtattaagaagggaggatttctcgtttcattttgacaattcgttagtttcgttatactacaaatgcggtaagtttgatgaggcgagagccatttttgagaaaatgccggcaaaagacttggtttcctggaatgcgttgttgtcagggtatgttagttctgggcacataggtgaggcgaagttgattttcaaagagatgaaagagaagaatattctatcatggatgataatgatatccgggttagctgaaaatgggtttggagaagaaggtttgaagctgttttcttgtatgaagagagaaggtttcgagccttgtgattacgctttttccggggcaatcaaatcatgtgccgtgctgggagcatattgcaatgggcaacagtaccatgcacagttgcttaaaatagggtttgactctagcctctctgctggaaacgctctgattacaatgtatgcgaaatgcggggttgtggaggaagctcgacaggtgtttcgaactatgccttgtctggattcggtttcctggaatgcgttgattgctgcattgggacagcatggccatggtgctgaagcagtagatgtgtatgaggagatgc

SEQ ID NO: 36767 - DNA, 1498 bp, Arabidopsis thaliana landsberg
tctctgtttaatcggcgaaatctctcttcttattttatttttcttccggtagatcgatccagctccgagatcaatcatgaatcctgaatagtaagaaccttcttcttcttcttcttctctaatcgttcagatcgattttgaaatttataacatgttatgtaatttagtttctctatagattttcttcgtatcatttttttacaaggagattcatgaaattaaccttatgttgatgctggctttgttaatctgtctgatcaatttcgtgattggagtctcgtttcgttgatcggaattttgattagatctagaataaaattggttgagatctgttgtttctcttccatacacagatgattctcttagtttgaaaattctacgggtgtgacgtgaatccatagtcgattttgattatggtgcttgagattgtgttttgaatatggcgtttagaaatctatgagcttcttcacaatgtttagcaactttgaaatatgtcataagctcttaatatagctggagaaatgtcaaaaatgatttatactctcttacttacatgtgtcttatgcttctttctaatttttttgatctgcagtgactatttgttcaagcttttgctcattggtgattctggtgttggaaagtcgtgcttgcttctaaggtttgctgtaagtattcccacaattctggattcatcatctctggtagttgctttttaacattgtgtacacacaaaaatttgaggatcacatcttggagttcaatacctgttgctcaagactcaaaactcaaaagtcattactccattggattagcttagttctcactatggtatcattgttactcctttgtgttcttatttcctgatatcttgaattttatgtggacaggatgattcttacctggatagctacataagcaccattggtgttgactttgtaagcaccttcatttgctcatcactcatttatatacaggaatcagaataataagtgttaacctttactaatgatatcatgcagaaaattcgcacagttgagcaggacggaaagaccatcaaactccagatcgtaagtgttcttcagctagatatgcaatcataatctgttaaaattttggaaagagcagatagttactcttgttttggtaatcgcctgtgtatacagtgggacacagcaggccaagaacgtttcaggacaatcactagcagctactacagaggagctcatgggatcattgtatgtactcttactctaaccaaccaatcatcttcttgttaaataacacatcctatacctcttgctcacaattgcctatctttgcaggtcacttatgatgtcacagacctagagagcttcaacaacgtcaaacaatggctgaatgaaattgaccgttacgctagcgaaaatgtgaacaagctactggttgggaacaagaacgatctcacttcacagaaggttgtatccactgagacagctaaggggtaatttataataaacta

SEQ ID NO: 36768 - DNA, 2128 bp, Arabidopsis thaliana landsberg
tggcacattgttttttcggatgtgatgcggtactggaaagatttataattgtttgttatacaatgttttgtttcttgtcaggacctcacaattgttctgtcaacacttcttcctgtgatcggtatcaataatgaaagaaaaaggttctcagatatttctgtgggacggaaggtaagtcactgatcgctttcagtctatcatgttttgagccttattttgggagcgatgtattaatattttgcctgttctttattctttgtgttgcagacatacaatgaagtgcagcggtgttttctgactgttggcttggtttaccctgaggatttgtttacatttcttcttaacgtaaggacatcttttgttttatgattatggctctagttattctttgtatatgtaacgcaaaacggtggcaatacctagcactcatattagactcaagaactattccttgccacacatctgtgtgatatttatatgggctttttatcttacatatttgaaatccctgtcttccttgtatactttcaccagaaatgcaagttgaaagaagaccctttgacgtttggtgctctttgcatcttgaaacatctgcttccgaggtgtattcttttatccttcatcagtataacttatcaattcagagttaatttaccatcccaacttaatgatgttgcattgtgttcgaaggttgtttgaagcatggcactcaaaacggcctcttttggtggatactgcaagttctttgttagatgagcaaagtttagctgttcgaaaagccctttcagaggtactgagctggcgtagattttcttatttactactaaaatatgcatgctttagcatagtgcttctactttaatgacagttgatcgtggtcatggcttcacactgctatctggtcggtccatctggggaattatttgttgaataccttgtacgccattctgcaataggagagagtgaccatctgaaggtaagaccatataacataacatatggtattgagtttggactgccttctttgttgttatttatctgaaagtaacgaaatatgagggtaaggcagtccaaatataggtatcctcacgtcctgccgagtgttttaaatgcagtgaagaattagtatccttgttgccattaaccatgattttttttctggtgcttagatatttcatccatcctgcttaagttgttttttaaaaattagtgacttgtcggcttcatctaggataataattgagaaaagtgttggggttgactcttgggtgttgctgttagtaataatctaacgttaccagaaacctggaacatgatcttactccaggttgtgttattgagtcttcttatttacttgctacaagtcttggagtcttcttaccactgtatatacagagtacatatgctagtgttgtttcagacacgtttgaagtactactgtctctgttacttatttttcatgagctacaaaatttctcttaggcaaaaggggaactagttagtccaacacagctaagagcagtttgtggaaaaggtcttctgctcttgaccgttacaatcccagagatggaggtacgacaccttttattttaatataatagaaccatcccattacttatagctttcagattttaatgctaaagagtatatgaaattgcagtacattctttggcctttcctactgaaaatgattatccctaaggtctacactggcgctgttgcatcagtaagatctttcttttgttgcctagaattttttttttcagagattggaccagagttaacattattattggtataattaggtatgtagatgcataactgaactttgtcgtcgtagatcttcaaccacccccatgttgatcgagtgtaaagctcgtgctgatattccgaaccctgaggtaaatttcttcttacactctttcaaatgatatatcgtgtatggcaagatttcaaaattgaaaatatgtatgcacatatattacaattgcaggagttgtttacccgtttgggtggttcttttgcacaaccctctggcaaaagagcaggtagcatcccaaattttgacggtgagtttgcggcagtaacttcagaaatcctgtaatagactaacattttatgttccata

SEQ ID NO: 36769 - DNA, 3587 bp, Arabidopsis thaliana landsberg
  unsure (1)..(3587): unsure at all n locations
tgcaggtcgactctagaggatccgcatttggagagattatcgtctcagctgatattacaagcggatacacatcttcttctaagggtttagacagatcatcaagaacaaagaagctcaggtcagttcctgtccctgaaggctgcagaaacttctgtccaggacctttctgaaaatggaatcttgtgggtgaataaacctctggaaactgtgggataatggtgcaatttggttccgcctttgcaaagaaggtgatagtgaaactgaaaacgaaaggacaacacaatgagagtctattcttaagtaacattgatcaatacaaatcatataagtgaggttaatccaattctgaagaaagatgggatcagtttacaaggacaccgtctctacgtttctgatctaaagttgagtttaaagcttacacaacacattgtagatcaagccgtgaaatcattattcacaaacccatcaagcaaatcatgtaaagtttaaaccttttctatagggaagagtgattccagattgttctcatgagtaaagatctttcctttaatagttcgctaagccttaatttacctatttcgtccgaattatggttgtaagcatcatcaatctcaaaaccctagatatacaatcacatttcacgcaatgttcattcttcacagatcaaagttgaaatcagaacgatgaatattacctgccgtcgagctgagcatcgaagacgaaggaagaatagataggtgaccaggagcgagatcgtctcttcaagccacactgtatctctatgcacattgacatcattcctcaccttcttcgcgttgtgttgctccaggtatggcttaaacgaaatgcgtttgcggctgagacggacagtagtacgccggtctcatcattgggccccaccaattgggctgagcggtggtgaaatactgaggaggctgagggtgataatggtaatggccgtaagaacaagagttgatctgtggctgtggcggtagaggcggagagagatggtaattggagtagttatagtcataatgcggtggaaatggcggaggaggaggaggagggtcgaggtaatagtaaggcggcggcggaggatagtggtggaggtggcgacgattattgttgtctcgtcttctgttgttgttgctaaaggagattcccattggtgagagaatgacaatgggaaagacagagacaagacagaaagcacaacagtgagaagcagagagactgaagaaaaacaagatttggtagaagaagaactagaagatgtcttgttcaagattcgttaatgcttttttgacttttctcttttttactttttaaaccgagtaacaaaacttcttttttccggtttggttttggtattgagttcgggtttaaaatgtggttttagacttttgttgtagaaaattaattaatatgttaatgtttacatcaaataattggttagttgttcagttttcttcgtaactttgactttgtatagtttttaccacctaatcacaacttaccgtgtgtaataattaaattatgctactcaaaagtcaactctacaactatagactatagagattagagacatgtttttctatgagtctacaatataccttacctctcatgcgggaaatcgatttctaaaaacttcgtatctaatgctattactatatatcatgtcagccattaaagttgcactaattagttgagtttgaaccagtaagtatattatttgcatcaaatgttgaatattggatattggatatatgacacaattgagtgaattgattaatggactatcaaagtgggagaggatcagaggaaaggtcattattttgcctgccatcaaggcacctcactggattttgttgcctttctccaacgaaaaaaatcaaaataaatacacacattattgatcatcgataaatgtgtaaagataagatctctctaaatatttgttgtccgccaaataagcgtacagaatttactacaggatggatagtcttaattatacgaaactttatttaaatattgcatnnnnnnnnnnnnnnnnnnaatagaaaccactaatttttgggtataaatcattcgcagatcatcatagcaaagatcacttatactataagtaacaacaccactaaccaagttgtgttaacttaataatgtcatcttctgactgaatctaaattagtaaatataatatttgctttttccactacatataatcctcaactaccacaaatatcaaccgacgaagataaataatattttgtgattagtttggaattcagagatctagttaccccttttggaaagagatcaacttgtgatcacgttgtttaatcccaataaatccaaattcaagaagagtcagacggagttatacatgcatcatgtatcacataatataacttggaaataatttagatgaactaaccaataacgataagtttcaaaagagaaaatcaagacattaattcgaagcatgagaaaaggagaatcaacacaaagcagaagctctgtctcttttctcaactgcgacacaacctctctgtaaatccttaaaaaccctaatctccgagtaatccctcagatcctcgagactcacgtactgttgcttcaccatcttcgacaagtccgtaccagtctcgtgaacccatacgtacggtagacaagtgtcgtcgtagtacagccatctacgtccttcctggtcatcaacgtaagctctgtgaatgcttctgtgtctaagcttcttggaacggccaggtttgagagtgtggacccgttttagaattgaaccgacccgaatctggagctccacgggacggtcggagaggttccaaaagcgggtggaagtggtggcgatggagcaagggagtaaatgcgtccggtcgccgcaaccaccgtagcattgtcggaggaagaggaggaggaaactgagccttgggagcttgtctttgatagactctatcatctcttttgtgaacttcatctttgatgttttcatattcatcttttctctctctttcttcttttgatggctggctcacaagagtgggatactggattttgtatatatgtgtgccaaatagtaaatgcaagaggaatattgttctttaatactatgaattttctaaaagaaaagtgagaaaaaagaagaagacaatttcggtttactagtgatcgtacaccaaacctcaaccaatgttcttaaaccacaattgttatacattgattggtacaaaaaaaagctatgttgaagatccacaagattggaaatgaatttgtttctagattatttacaccatatagaaagaaggaacaaaaactatcttaaccagattaaaccggatagtggaatgtacgccttgctttagtgattcacttgaaaaaactagtctagttttcgactcataaatttaatttacgataaaaccaaaaaccaaatggagctatgcattttaaatattttcaagtctcaattgataatatgatctgtgtattcaaaaaatatgcttcacatactaaaccagcaaatctaagagattattatattcatgtggtgaaggaaaattttgtatgtgtga

SEQ ID NO: 36770 - DNA, 1324 bp, Arabidopsis thaliana landsberg
tctaaattttccaaaaatttgtgaactatactgatgtgtattaataataagttttagttggcctatcaaacttatggaactcgtgatttagcattttcttggacggcacatagcaacaagtacaagtcatgtatagacaacactcaactttcatgacttgtgaccttaaattgaaaactattacacgtgtcttcacttgtgaatgattcgtctaaatgctctgactatcaaatccaatcaatttgaatatatcttcaaatgtttttgtcataaatctacttttctcgacccttcttagtcctaacgatcaatcgttccatttatagaagaatggtcatggtccacaacaattgcacagtttgctttctgtttcaaccatatttttgctgtcggatggttcagtctctaatgattggctagctattagaacgatttcatctaccgaaactatgttccatcataattcatttttcctcttgatttactatttgcgaaaacgtagtagctaggttgcttgatcttttggtttagagtcttgacaaaacctgttgctgattgtcactagatcacagatcaaaaggactttcaaagtataattaatgacaaaatttctaaaagaataatcgaaatgtttcgttattttcatgactggttccggccaataaatgagagaactttttaacaactccaccagaattaaagtcggtccaagggtttgtttgaatgcctttttctgtcctctagaaattctctattgatagagcactttttgggtattaattgcgaacacataccttgaggtgcacgagtagttgactggtactaacaagctgcagcagaggaaagcatttttgcttcattaaatttaagattgaaggaaaataattgggtcgtcgtcgcccaaaaccaaactaaactagtttgactggtactaacaagctgcagcagaggaaagcatttttgtttcattaaatttaagattgaatgaaaataattgggtcgtcgtcgcccaaaaccaaactaaactagtttgactgaagacaaaatatctaattttaattgagtctagtaagtgaataggtaatggctcattatacaacccatgataattactccatttaaaacgctgtgggccaaatttttattttcagatgttatggttgactagaccagaatattgtgaatcacagatgagatacatatatgtaagattgaatggagttcacatactgtttctgttgccgagaagctgcttctatttttcaagctgagacttactttactatgaaaggtttgagataaagctctaaccaatggaatggtt

SEQ ID NO: 36771 - DNA, 1506 bp, Arabidopsis thaliana landsberg
ttcgatacccattataaacaatattctatattcttataaacaataagagagcaacgggctataatactaaagttgaaaaactatcaaaatgatgtggcagtaacattggatagaacttacgtttacgtagctagttaaagttctaaagaaaaccaaacaaccaaaatataattataatagcacatattgaatattcatttatatttacttgtatagtcaaaccattatcttagacaaccctaattaacatcaaatgtttagtccttcgttagttatcacttaccactctgcattctataaattattaagtagaaccacaagtctcgttgcttcaatatctccataacacgtttctctctttctctgctagctctctcatccttctctctatagatggagggagttagggttcctattgcttgcgctctaattcttctcgcaatctcttccataacttctgcctccattgtggaacacaccttcaacgtaattccctcctatcttcttcctctaatattgatttatgatggcatgtattttattagacctatttatagcactacataaaaaaactagatatattgttttattgccattttggtaattctttattggtttcaaacttataacaagatttttctttgaaaataaaattcatgtttttagctaatgtttcgattttatttggttaaaggggggagtcgttttggtttgttttggcaaaaaatgcgtgaaattcagtaggagtttattttacgaactagtaagaccattgacttaccaaaaaataactagtatagaccattgaggcactgaccaagtgatatgtatatcgctaacgacgtgagagataattggattttgctaggtacaaaacttaacggtgtctaggctgtgcaaacggcaagtgataacggtcgttaacggaagcctgcctggaccaacaatacgcgtcaaggagggtgactcgctcgttattcacgttctaaaccattcccctcacaacatcacaattcattggtactcaattagttaattaacctctttttatattgtttgcttaactaatgaattaacctcgtcttatattaatttgcttaactaatactacgatgattacgttttgttttttttactttacaagatgtctagtcgttagcctttcacagtctctcatttaatttgttatccttttcgcatagaataatattcaattgtgtgttctgaatagaaaatatgtgaacttgtaggataatcacttcggctcttcttcttgtttttgtattttggttttagggttatgattacgttagtgaataaacttttgtgctatgttcgatgaaattgttgaaatatgaatactttagggttttgtgtacatgacgcaggcatgggatcttccattattttacggtttgggcagatggaccgagtatgagaaggcagtgcccaatccagcctggccaatgatacgcttacagacggaccgattccggtctataatga

SEQ ID NO: 36772 - DNA, 1199 bp, Arabidopsis thaliana landsberg
  unsure (1)..(1199): unsure at all n locations
gtatgttgtttctattgattctgatcaactcttgttttctcttccttctgtgtttgattttatctcatgttgattgttttgatcaggaacaaatcacagaagcgtgttcatgctcctaatagagacttaccaccaagaaacgagcaattccttttggattttgagctgcttcagagccaattcaatgtaaagtctcgttttttaactatctttatctttctctttgtgatttcgtaagataaagtttttttttttttttccaactctttgttaggatccagagcaattgaggacgattactgagtcagttttgatatctctggtggtgcaatgtagcaatcatgcgcctcgtgctgagtttctactctttgctttgcgtacattgtgtaggattagttatatcaattgggatacttttttaccatcccttctctcttccgtttccgctgctgaggcgtcgttaagccaaggtgttcaagcagcagcggcaacggctggttcttctgctacttcttcgcagtctgtagttcctgtgtctgtgaatccaacgtcattgctgccttcagctcatggtattggttctccatcagcttcagaggtgaaatctgtggagaatgggcagcagattgcaagagctggccagattgtaagagagaatgctatgagaaatagnnnnnnnnnnnnnnnnnnnnnnnnnnnnagtctgcgtcagctcagttgcaagattatcttgattggcgttgaatctagtctcaaacccgttactcatgccgagattttccagtacatgatgaattggcttgttaactgggacaggagagatctgggaactgaggactctgtaggaaagtcgtggagatctgagaagactttagctgaatggttgcggagttgtttggatgtgatctgactgttggtagaagagggtgaatctcgaattccgttttatgagttattgcgcagtggtctacagtttatagagcacatacctgatgatgaagccttgttcactcttatcatggagatacaccgcaggcgagatgcgatggccatgcatatgctcatgttggaccaacatcttcactgtccatcatttggtacccatcgtatagtctcccaaataactgccaatgttccaccaaaagctgtaccacacttacgacattcaccaattacatatccaagtgtgcttgggaacc

SEQ ID NO: 36773 - DNA, 4896 bp, Arabidopsis thaliana landsberg
  unsure (1)..(4896): unsure at all n locations
aacatgctaattattttatttggatctccaagatttttggacatccaaattatttctaaactgactgactcgtgtatttggccggtccaaaacaaaacacgtaggctccaaaagtgtaaaagaggaagctgcgatatttaaaggaaccacgttgcttagattgtccccacgcataacataaatttaacttttgaaggacaaggaacaaagtccatggcgtggcctactcattcaccacagtttcttctcacttttttggccaagtgccaagtgggttaggttaaaaacgtaaaaaagattctctccatctcccaaaaacatgtggctcaaaaacaaagcataacattgctttcgtttctagaatacgttcatttcattacacatctctctttatgcttttggaacttagctaagtttggattcagacaggcccatacttagtctggccgagtccgtgactgttctctctttgtccctttctacgtggccgatcctaactccgtcagttttttggtaatatttacggtcgtttcaaaatgtcaataactttacaattaaatggagataaagattatttactgttaagaaaaaaaagactatttactcttacagtcatacgtatctcataacgggccgtatagggctcattaggcccatcaactctagcttccctaaccaaaccatgtctttcgctcatatatgttcgtttctaatgtagtgttgaccaaacctgcaaattgacattctgatcattttagtctttgataacatatgaaagaagaattgtcattttcaacctaaggaaatttggaaagattcacttttacatggtaacacaaagaagaaaacatatgattctttagattgggggcgggggggtaatgataacttanaatataagtgctttgacattattgaccaaataaataaaaactaccttgacattattatgcgtacataacaggcaattctttttaacacatatcaatggcgtagataaaaaaaacttccaaaacgtacattaggggggggggcaatatatatggggaaatcaaacatataatttggaaaaacaaacatcactgagacactttttgaagtgaaattttatcaatttaatcataggggagatcgtattttacttacattaaaattagtaatatttttctctaactctctttaatgaccaaaagccgttgaccaataaaatctccccgtgtcgtcataaaccggttttaatttccggtttggtaatctaagtcgcaataaaatcctctttgtcttcttcttcttcctctactcggcgaattctctcgagaaaacaaactgaatttttttgatcgaagaagatctaaaaaaaaagatggagagacgacaagcgaagatccatgtctttgtattgataggtctaattctattgaattcaatcaatcaaatctcatctctctctgtaacggagaacgacgaagaatgtgtccaagagtacgtcctttacgaagagcgacactgtttccggtaacttcgtcgtcgtcgatcatgatatcttctggggatccgatcatcctggtttggatttcacggttagcgatctttcaatttacctttttaccccaaaagttcttaactttgatacgtttccttcgataatcccaatgtttgatttatcgtgaaattggtgtttctcatgcttaattttgacctgatctgatctttgtaaggatgtgacaatttagggtttggttgggattgtggaaatttgctatctttgattggattggattggattttggttagggttaatgtgttgattgattcattggattgtgtttgtgtaggtgacgtcaccagctgggaacattgtacagactttaaagggaacatctggagataagtttgagtttaaggctccaaaaagtgcaatgtccaaattttgtttccacaatccttattctactcctgaaactgtctccttttatattcatgttggtcatattcctaatgagcatgacttagccaaagatggttcgtttccattccccttatatatgatcatcttcattgatgcaatctgtattttgtgcattgagcttgagctgttttgtgatgttatgttctttctgttttgttgtttggttcttagaacatttggacccggtaaatgttaagatagctgagttgagagaggctttggaatctgttgttgctgagcagaagtatttgaaagctcgtgacactcgtcaccgtcatagtaagttttctccattcgtcttacaagcctcattcccttgattacccgagtaacttgcttagatgcagtatgacaatataatgagtttttagacagacatcattgaatggcgaaagatgcaacctttatacgatctaacattgttctgtgtttggtgcagcgaatgagagcacgagaaagcgagtgatattctacacagtaggagagtacattttccttgccgcagctagtggacttcaagttctctacatccgcaagctcttcagcaagtcggtagcatacaacagagtttgaacatagcaaaacctcagagcgaggtcttgtgtccagtttatgtttgaatcggtgatcaaaacacaatcctaaacagtgttagttaatttaaaagcttcaatagcgaaagacttactttttgtttttggtttctacacttttataagtttactaatgcagaacttgatgaagcttttttctgaattcattgattagtgattatcattatcttgttattatcgtagacaaattgatatgagatccttaattatgataccaaataaaaaccaccactaaagtgaaagaaaaaacaaagtcaaagtaatatacaatatcatacaaatatctgctaaacgtggaggaaaagaaaaatcgaataattcgatgattctctctatcaaagaaacgaaaaagtcgtattgaagttttgccatttgtttataaaagaagtggctgttcaacgattctaaagtcatttaccttaccattttgatctgttgctctgtttcactgtgcgtgatcgggaagaagaagaaaatgttggcgattttcgacaagaacgtggcgaaaacacccgaggctcttcagggtcaagagggtggatcggtttgtgctcttaaagataggttcttgccgaaccatttctcctctgtttatcctggtgctgtcaccatcaatctcggatcttctggtttcattgcttgctctctcgagaaacagaaccctcttcttcccaggttttgtacaatagtttattcctcaggatgatgttttcttcttctgtcctagatatgagagatttgctatcttaatgtttcactggcttgcaaagatagtttaggatatgtttcactgaatctgagagattgagatatcgatctgttgttatgttttgatggaataatgaagttatatatctactttgttgtgatgtttaaaatgtgttgaaactggaaggatgtgattagataagtggtggtgattttttcaaaacaattttgtgtgtgtgtgtgtgacagattgtttgctgtggtggatgatatgttctgcatattccaaggacatatagagaacgttccaattcttaagcaacaatatggactaaccaaaacagctacagaggttaccattgtgattgaagcctacagaactctaagagatcgtggtccgtattcagctgaacaagttgttagagattttcaaggcaaattcgggtttatgctctatgactgctccacacaaaatgtcttccttgccggggtaagtttgaattctgcttctttactatttgacacttatttctgcatattgtaatgctgaggttattattattatacgcgtttcaggatgtagatgggagtgttcctctctactggggaaccgatgctgaaggacatcttgttgtttctgatgatgttgagactgtcaagaagggttgtggtaaatcctttgcgccattccctaaaggtatgtagcaagccgtttttcgggttttgaagacatctcactgttctttgatctagtgcaaatatgaattaggatgtggttgtgtgtatgcataatgcaggatgtttctttacctcatctggaggtttgaggagctatgagcatccatcaaatgagttaaagccggtaccaagggtggacagttcgggtgaggtttgcggtgtaacgtttaaagtggattccgaggccaagaaagaagcgatgcctagggttgggagtgttcagaattggtctaaacaaatctgaactagctgaataaggcttgtttgtttttttacttgttggactcttgtggctgtgttccacagatttactcttttcatgatattctcactgtagccattctaaggactaatggtgctcttattgctattgtacctgtacttggtaacaaggaagctaagaataaaatattttataacgtctaatgattcagtgtatgcatatgatgtcatattgataaaaccagagctgcaagaacatgagctccaacatagcagttcctaattaaacaacctttggtaacaaaacaaaacataaaactgtaatgaaacataatgacaggtcttagactcttagtaagagcctaaggttaacactgcctgcagatatctccacattctctttacgcagaaacgcctcgggtaagacttgagccatccatttgcagacctctgctttctgatgcttctgctgcatagtcctgactgttttcccttctccttgaagtcatatcaaggccaacaccaccagttttagactccattgcactttcgttgctttctgctagagtcgcgagtttttcggttatctgaaaagccaaggattgtgctctgttatgttgcacttcatggaagacgatgcattga

SEQ ID NO: 36774 - DNA, 1220 bp, Arabidopsis thaliana landsberg
aatttggcattgctgggaacctcgcaactgcttttctcttatccttagtacccaccacagaaccttcaatttgacttggaaattgaacaccactagaaggaacccttggttttggcttccttgcatgcttaggaggtctgttcctctgcttgacctttttcagagtagtcccagtgatagctccagtctcaaagaaaccaggtctatataccgtcgaactatctggaaaaggttgagagagtgcaaggaaattacccgcttcagtgatagacagcgaaggctcagcttccacaagccagtctctagcagttgacggagatgcggtgatacttgatgaaacaaccatcttgtttttgtccccactactcgaaggaatctcatgatcatacccaaaaacaattcctttctctttagacaaatcatgatggaccactagaagagcttcgagacgaagaaccgatttttgcgtgaaaggatctttttccgcttcccttactgattgaatgactctatccactcttattaatttctcctcttcattcgccactctaagatattggcgcataccttctaaaacctcttgagctattcgtggtctgccagtattgggatcaatacccacttggctttctttgagaactccaaagagaggatcagattcactaagaactggagtcggaggaggctttggaataacctgacctttacgacaagcagcagcttgatcttgtcttgccttaaccaagattggacacacgtctttctcgtgggtaagcctctgacattcataacatcttttttggatcttctcatattggaaacggactacagtagcttgaagttgtgacctttcagggtcgaaggctacttccgtaacctgacctatgaggttaccaagggatttgatagctgggacagtgaagttgttaatgggtaaattccaaatttgaacccagataggaatgaactgcagatagttttcagggggattctcataccatctgtcaatcgcaatagaccactcatcaaaggtttgggcaccttttcccagcacgtctttgagatcgtgagcattctcgaaaatgaactgaaacttctctctagtcagagcaatacccttcactcttccttccttctgccatttccttggcatatctcgaatcagacgcttcatctcttgacaatcgggattgagtaatctcccaaccaaactcagagca

SEQ ID NO: 36775 - DNA, 1572 bp, Arabidopsis thaliana landsberg
  unsure (1)..(1572): unsure at all n locations
gggcttagccaagtttgtccagcattataagctgaaggattgtctttctaattcttaaaatttggtgttggtgggtcctgaatgtagactcttgtttcaaaacaaaaaatctactacataaattttgaaaatgtgcatgaaacttaaaaagaaaataaacaaacccacatattattggctttagcttaaatggaaaaaaattgaataattgaataacaaaacttaataaaaatcaaacttatataattgaaaacaaagttaaaagactttatattttcaaagtctcgtaccaatcacccctaactttgagaaaaatgaaaattatgatctatctatcaatccggtctaaataatgagaacctaagctgtctcaatcaataaatcttcaaaagctattcctctgggaaaagatttagctgagaaataaaaattctatcactttcccttggcctaaaaaagtttgccactttctttcccacaagttcctttnttcaattagaaaattgatgttcttggcacttgagaaaatggccaaaagaaaaacccacaatgcacacacacaagcttctcccaatataagaaagagagagaaagcccncngcagtagagagagaaggcatgccttgtcggccattagaacttcaagccaaagcaaaaaccttacttatcctttctccataaaatcaaaatccttattggaatatacactaattgattctcctcatcactatctctctctcttcactttttctttccttttctagtttctctcttttaattcttgggattgtggagctttaaagttcctttttttgaaccttttgagtttctgattctgcttgattccagatcataaccatgatcnnnnnnnnnnnnnnnnnnnnnnntttttgatttcattctatcaaatcactgaaattttcatttgaggaatcaaaagagaaagtttttgcgatactctcatttgtcctcagctgccaaagtaagaaatcttaaagctttgacattttttgaaaactttagttcgtttcgtaaaggttccatttttttgtttcgtgcagctataacttccgataagattgatcagttttgacctttgtgcttggtggtttcttctatggattcacattggtaagcttcttcgttattcattctctagtttccattcatttgaaatgaactgaaatttgaatcctgaaaccaaattaatcagaaccaatgctagatctaaggcttcgttgcttaaagctctgagttttgcattatattgtctctgttaaattgaaaagatttgatttttttttaaaactttggtgtgaaaagaaatgtgaatctctctgtaattgcaggtgttgagggattatatagtgtttctctttgttgagaggatcaatgggttggtggatctttgagtttaagaaagaatcaaaatctatgtttgttggggttttgtttctcttgactcttctggtttggacttcagagagtttgaatagtgatggtcagtttctcttggagttgaagaacagaggatttcaagattcgttgaaccgtttacataattggaacggc

SEQ ID NO: 36776 - DNA, 2585 bp, Arabidopsis thaliana landsberg
aatcactcgagcattccaaattgtcatttgatctcatgtagttaaccgattatgtgttgccagccacaaaaaagaagaagagaatttagacgtcgttccagggaaccaattatccttatgtcaatgtcttacttcactgacttgtcggatttgctattgaatacttattattcagtaggttaaaagttgggtttaaaatatattaattaacataatttacaatgactaatattgggctcgatcgatgccaaccaatggttattgtttactatttagaataaatcaagatatcaaaattcataaaatgactgaaataccttaaagagaatgtaatttgtaacttaataatccaagattaaggaacaaggcaattataatataaattcataatgttagaatcttccagtttctccctaaggtatttgatgctggtaaagttagtattcaggatctctatatcacgttcaagtttggtacaatccttatgtggttaataatagtacattaaacctaaaccaaaaatttaataataatgacatggatttttaagtcaaaccaaaaatcattaatttcggtttggtttggtagggttttgagatacgttttttttgtccaagccaggaactctattccaatttttgatatgggtttatccaatcgtggcatgttataacttataacttgaactaaaccaacaaattaacattgacaattgttcgagtcaacttaacagcacgtgcacatatgcaattgaatttattttttttacttatcaaaagatctcattttgcaaatatgcaattaaccctctttaattctttttaatatcaaaagatctcattttgctttttaagtatcaaaagatacttttattttagtgtaggatattattttctaatttgtattggtttttgcttccatcaattaattaaaagcaaattttacataatgtatatattatctgaaattgttctcttttttttttttttattaagtgtcactcaagatggaaaaatctcatttttaatattatttaatttgaactctttatatgtcttatatgtttcttaccctcttggttaaaactctttcttacatctaaaaaaatcacgtaacttaatatgaacatgaagaatctctaccttgcaattttatatctcttggcggcttcaacacttccatttgccattgcttcggacccaagcccccttcaagacttttgtatcggtgtcaacaccccagccaatgcgggtatgtacatgatgattgcaaatcattttcaataaaaaatttcatatcttaataacactttttcttcttggttactattttcagtttttgttaatggaaaattctgcaaggacccaaagctggtcacagcagatgacttctttttctcagggcttcaaactgcaagacccattactagtccagttgggtcgaccgtgacagccgtcaatgttaacaaccttcttgggttaaacactcttggaatctcccttgtccgtattgattatgcagttaacggacagaacccacctcacacccacccacgtgccacagagatcttggttgtcgaacaaggaacacttctcgtagggtttgtcacatcaaacccggataatcgcttattctcaaaagttctcaacgagggtgatgtatttgtgtttcccgagggactcatccattttcaagcaaacattggcaaggcaccagcggttgcattcgccgctctaagcagccaaaaccctggtgtcatcactattgccaacaccgtgtttggggctaacccagccataaacccaactattcttgcaaaggcattccagttgaacccaagggttgtcatggatctacagaccaagttcaagaaataatgatatcgttatttgagttgctttccctttatgtacttgtgcctgaataaggatcttgtatttccgttcatcgtatcatcacatgatgtctttttttgcttttaccttgattcaattctaaataaacaatgattttccgttcttaataagggatacatgttttgcacaccatctaaataatagagaagcatatggttactcaagcatctacatgaaaaccctagttcagatgctgattacaatgtgtatactttcccttgtaaaagctttgcaaattaaatgatgtattctttattttatagatataaataaaattctgaaaattcatttagcataaatttctttttacaaacatatctcttttagcatgttgaagatactctgccaagaaagttgcgtaactttctctcatcttgaaaattgttaagtattaaacaaatttggaaaaaaataataaaaactaactatgatgagcaccgcatattcaacgatagataatctattggttgaaatttatgtgacaaagttagctattatgtaataacactaaaattggaacctttttttgataaaacctatcatctaatccggtcagtttcggtaaaaaagtatctcagtgtttcaaagtcgacccccccttgaaggaccaccacactataagtcatgagtttagaatttataatcttgagctcattgaattttaacatc

SEQ ID NO: 36777 - DNA, 1557 bp, Arabidopsis thaliana landsberg
  unsure (1)..(1557): unsure at all n locations
ttttaagagttgggtgaggaggacgaggctagctcagaagaatcaagtgaataagaacacagtgatgggacctatcatcaccccgttcttttcttctcccagactcttctgagctagttacgtcttcacctaactaattcaaaaaatattatttgacaaatagttttccttcaatcataactgtcacaattttgttacacatttacttacctttagtacaacataatattgcaaaccaaattaatcttgacgagagtgtgtaatgtaaaaaacgtactaacacaataagttatcagaatctttaacttgcaatctcaccaaagcctcttcacaaatctcaggaggaaactcttttaagaactcagtaacaatacgttcttgatctctctgcatctcttcaatctcctctctctgtttcctcaacaaagactcaagtttctctactataaccccaacttcttgattgatcggtccttgtgctgacgacaacttataattagaccgtggcgcaaacggcgaacgtgagtctccagctccagctttaggagaggaccagaattttctccctgaaggaaatctatctaaatggagcgtctctggagaagacaaacatttttgtaccgctgaatcatcaccgataagtcgagaaggggtccaatcggggatgtgtgaatgtatctctgtgtcgatcattttagctattgttgagatatcttgatcatcggttaagtctagttcttcgaccatttcgatggcgactgagaaagatgtgtctgtctctatattaaatgggaagtggatattgcggatttgacctgtataaaaaatgttattattgtgtcaaaagaagattaagtgatgatctgaaggtttaagataaaaagcaaaaaagattttgaacctttggagtcggtgatacgtagttttaggaagattgtgttgaggtctttacgttggccatgtacggttagtaagcctacctcagaatccgagagtttatccacgattccgtttccgttgtagccattttctgtgacaatgttattgaacttggtgttagaaattttcacatagaaaaaagatagaaatgatcttatgtattgaatttattggtttaaagaaagaagtccatgaaactttatactgagatgaaatgaaataccataatctgattttacctttgtgagagctgacgttttcagtattttccttgtagcatttcagaaaaggatcatcaagtagttccttggctgacaagcgttgcgagacctttgcgatacacttctctatgaatgctctcacttgcggatcagtcacatttaaaagagcggctggtttgattccctaagaagcattgagaaaaatggatcgacaatatgaaagagtcattcttgattggatatgagatgggaaaatgatcacttaccgatgtaactttcctataaatctgagcagcattggtgcattcggaatacggatactcgaaagttactagctcaagcaaacacattccanacgcgtatatatcgacaagtacattatagtcctcttcataga

SEQ ID NO: 36778 - DNA, 3688 bp, Arabidopsis thaliana landsberg
  unsure (1)..(3688): unsure at all n locations
tttcctatccaaaattcgaaccaaaccaaaccaaaccaaaagtattgttctgttttaaacatatgttttgtaaaccggaaaatccaaaccgaactaaaccgagagtaattatctgaatcggtcactcgacggtagcgtgccacaattgaactggtggtcgatccttaacttccatcttcaatcgttgcaaaaccctaatgaagaagcagtgtgaagaaccaaaaatcagtggttttttaataagtaaatggtgagaaaatctgttgaactgtcgaatttgttaataacctatcagctttgctatatttgtttgttccaaattccaattcaagtccccatcattgaaggttaagtagctttgcttttttgtctgccgacggttgttgtagaaatttatgatgttcttgatgcttgtcactttcactcatattgagatctgtctctcgattcatgtttcttcatcacagnggacacaaaatgacctagaagctgagatagtatatttacattgagtagagcaatttagtacttgcaatattcgttttagtagtgtctaaaaaagataaagctttggttgaactccattctaaaacccttacgactgattgagcaagaatctttacattgattatagctttgtttccgtggaaaagtttctacagtccagccatgcaaacaaggcgatggcaacataggaaggagataggagattgattagattttttttttgtcaatcaacaactagctgctgtagaagaaactttagatcagaaaacagaacagctaatcactgctaaagagttttcctcttctttgtcatgagacattccaccatcttgtggattcttgatctttgtagcaatcttcttgctcatagttgtctttgctctcattttaaagttattttcttgaagactagagatcagaattttgttcctgctatgaccggagagagtaaaccatattacatgattccactaaattaacactgttacaggttagaatcacggacatggatgattgctcactcatgtggacttgtcttaacactgacccaaataagccaaaactccttaatagcattaaatgatgtgaaaaagagagaccacatctggaaaaagggtttagggcaaaaaagagtgaagcagacaaagacatcattcaacatcatcaataggtctttgtaagaagagatcagagaagagtttagatggagttaataacaatcatatttatcacatacatatacacatatatgaaagaattaaccatttttttgtttacactactactactactacttgataacaaaattactgcatattaattaaacaaacagaaaaagttttttttttgtgacagaagaaaatgagcttgaaagtagaagaaactaaaaacaaaaccaaaaagaaatccatctagttaggaggtggaagccaaactctcatcactaagcaactcttcccagaaaccatcatccaactctctctctaccaccagttgatgatcctcttcttccaacatattcctctgttttccatgcccttgcatctccaaagccaaaacttccaattccgacatcgaagaagaacctcttttcctctttgctgactcattatcctcaagctccttaatttttttatctctttgtttcaacaactgatgcaaaaacgaaggactctgcattgctctagccagaaacgacatcatttgtctctgtttcctctctgttccttctatcctctgttccatagctatgatgtagcttttcgatgtttgttgctgctgtcttagactcactatctccatcattagcacttgcttctctctgcgaagctcgttgcaagcgtcatggcttggtgaagatgatggagtaaaagggtttctcctcttgatgttcttcaacaactgtctttgtcctaacaaaaactcttcgtttgcaaattcccatctctctgcttctatctttttgaaaccctgtaatttttttaacataagtattcaaaaactaatcttttgaaagtctacatattctcacaaacatcaataattggagtgagaactctttctatgtttttatatgttaaagaatggaacaagtgggcaacgttaaagctgattagtgaataaacaatggaaattgggataagatcgctgactgtttcttttgattattttagtaagcaagttgacacgaaacttgcttctggaagttactaaaccttcttctactccactagccattacggaatctacattttcgatgtttctagaatgctaaattaacaacagattctgctgtagaaaatgacttttttccattaccaagttaattatatagtaacattcagaatacttcgcggtaattttccagcaacaagggaaatgaaagttaaaaaaataaaagaaaaaaacagagcattcctctgctttgaatgctctgttttgtgtttggtcagagaatacagagcagagaagactcacataagtattgagttgtctgatgaaacttgagaaattgctgtgtttgaaatgacgaggaaggagaatcgtggagaaagaatgcaaatcccagacgacaaaacttgttcctcctctgttccaagatacgatgtggtcagtgtttggatcatccaccatctcaaatgtcttggtcagaaatggaggtggagcattttcgtgtaaaccctccattggttgtggtggtggtggtggatcggagccttccgggagaaacgggttcatcatcctgaggtaacgggttttgaaaaacccaattggaaattaaagacaagattcttgatgatttcgattaaccagtctccgaagttgagttcatcatcttcggattttgaaaaactggtcggattaagttcgtttatggcagttgatggagtgaggaaggtaatgtccacgtaagataattttgaggtggctttatataggaagagtagaaagtgagtgatgacattagatttgattaaaatatttgtaaaaattattattatagtacactcaagttagaaattagaaacttctggaaacggttttggacctttttgatgcacattcgaatagtcgaaacttctggaacttcgtaatattggactgtacggtatggttttcacattgttagtattaggacccaccttttgtgttttacaaatataaaaacaaagagtgatgcaaatggcaaattgtaattgggttaagtttggttttaatgttgatgtggctgttgtctcatcttgacatttggcttgggtctaaaccggattggttaaggctaaaataaaaccaaccagaagtactccaagagttgattgacaaattccctgcaattagaaggcctccattaatttctgactagtaaatttcttaggtatttttctttataatatataagttagagatatttataaaatatgcacttttatattaatatatggctacaaaacatttcttctttttaaagcaaaaacttaaacccttaacccaaaagagaaaaaatgggtacatgccttaaaatggactactcaggtaattcagaattggtcggtcagaacagtatctggagcacaacttcgttgttgtattttttctttacattcgtaaaacatagtttctaatcaacaaaaaaatacacgaaaaaagataatagtaattcactagcaaacaatttgtatat

SEQ ID NO: 36779 - DNA, 1742 bp, Arabidopsis thaliana landsberg
catacccatgagtccattcagcttgaataaaaggtccgagcctcaaggttacatacaaaccattcttctcaattaattttatgaacttcaccaagtcggctctacccgaaaaattgaactgtcccatcaacaaaataaaaaactcttcaaaacagtgatttaatcttttctaaaggtttttgtttgttaatatttcaaattacctttccctgctcaggctcatgaacgttccaaaaaacgtatgtctgaatcgtgttcaaaccgccttgtttcgctctcttgatgatgtttggccacatctgagcaaaacccacatcacatattctcaaaaatgtaagtaaaacaaaatttaaagataaaacaactttaactaacgagtgtatgaatcatttacttcaggagtgctacgagggtaatgtatggagccagagtaaaggattcgtctctgtccattactgagaagtgctttccggtcataagtaactccacattgcacagatccaacacctagaatcataaaccctaagcagaaccagagaatcagtctcgaagcagaatctccagtccccatctcccgcattcaccttcacaaagagaagaaccaagctacttcttccgtgtctgtgttggtctttcttaataaggagagagaaggaaggaaggaagaagaagaagaagacgaaggagaaagagaggaagaagaagggggttttattgcacttcacaagtgtctcttactcgcatcatcactgcgtggccgtgagctaccgacgctttcccaccaatttttacgcatttttatttattgtttttatatcatataacggaaatataaaaaaacgggaagatgtaaagaaataaaataaagtaagagttgattatgatattagggtgaaaaaagtggcacgttgattgaattaaagcagctaatcacgctatattttatttcagtttcgttttcttttttttgtttggttgattgatttagtgcgtcagtctagtcactaacttaaaacatagtatgagtttatggctgaatattgttatgggtttgagttagtgattagtagatgttgaaatttcatttaaactgatataaaaagataagagtactttggtttattagtgaggagtcttgtggacagtcgtcaaaaatggattcacattgtacaagtgtcttccacttccaaaatcacagtgtacctgtcatttagatatgtgtacagactttaccatacttattaaattcacattgttccagaaattgattttgtagttttgtttggcctatagttattatatggtcttcttcggtggaatttggttttagtagcctttgaactttgtagatttggtggatatgtcatatactactattttacaatttatttggtaagtttctttgaagatcggttggatataattttgggttcttggatctgatgaaagttcaaatttatcagcccacttgagattaattaagagatgcttccttaatcaaaggattagctgtaagtttgtaactgtgaaaagaaagaagatataaatcacacaaaagacataaacatgtgaatgaatgctcttttgttgcatatagtgaaattccagttttaccctaaatcattttacgctagtttcacccaccgacaccgacagtagtctgcatttatgggtttgactcgtgaattcacattttgactaggggtatttatggaatataactgtgtaacagttgggataat

SEQ ID NO: 36780 - DNA, 4698 bp, Arabidopsis thaliana landsberg
  unsure (1)..(4698): unsure at all n locations
cacccaaacagtaacattactgaagatggaaaagaaatcctatgtgttaactttaacagttaccgtatcaacgagggggggcgaatgctcggacaaaactttgagccagtacctataccccaccagaaaataaacaatataagaaaaagtgacttcatcaaataaaaccagtgtttggaagatcagcatcgacttataactcactctcgttcgccttgatctgatagatcaatcgtgttaggctcatacctggggtaaaacaaatcgattaaacacacgaacataaaatctccaaaatcatgaacaagcagcaaaccaggacatatatgtacaagctcaatacattactcagggacatgccacttacgttttcggatcagctagtaatgggaacacctccaatgtgggcacaagatggagaacaccaacatttaaagcactggcgtcagatcttaaagcactacctctggatgatggaacttcaaaccctccaagcccagtcgtttttgatggagtcattggtacaggagcagttatttcagttcctctacgcacaaacttctccatccacgaaatctgaaagcaaccaggaaagcctttttaaactccaaaacttatctagaacagagtcaagacacacaacacttataactagttgatgtgatatctctctaccattagcacaaggaaagtgggaaaaaagcacttgattccatctcgtttttgatatatacataaaagaaaagagaatataactgtgacagatttgaaaacgaggtttttcttactcttgctttctattattcgtttgtcacacaaaatgatactttgtatataaaaaggaaagaaccagtaaacttcacagcgaaaaatatccatacaagcataaactatgactaatcatcaagattaatgattgagtatccaaaaaaattcagtcagcacacaaaccatggaaaggaacaagtcatagtgcacttcaacagtctcaaagtatccgaccatctccttcggccataatattcagtaagtccatggaagatcaaacatttgccaaaagattccaatttcaagaaaagcatattctacaatgcaactgcctaaagaatactataatggtaaccagcatacactttacccagcacaaggcataaatggtatcatattcccgcactttcatattttgagaagtcccatgtcattacggaatttttttggctgtcagtttcaaagtattaaatagaacaaactgagactttggtaaagcgtaagctaaatttcgtaccttctcgtccaaatcaccgagtggtggtccgtgaatatttcctccagtatatggtgcacccattgggaacctctcaaccaactgatgggacattaaatcatccaatccgtgcttctcatagctcatgaacgcacctagagcacccagaaaaccttcatgtctcaagaacatagcttgcatctctcccttagacctagtgtagtcaagcaataaataaataagtttgagtgaagaaggtgagtacgcatatcacatctagttcaagtttacaagtgaagttaccagaaatgtacagcaaatgaaattgtatccatggtatatgcatgaccccttatgaaaaatcctccaaaaaatattcgcttcaacccaaagcgaagggcattcaagtacgatatctacacagcaacaaaacaaatcagaaactcataatattctcaataacttatcacattcactgatcaaaacttccaaatggaatcatgcttaggaataaaaatgagaaacatttaggcttattcttgcttaagaacttcgttgaatcctttggactcgccaatgcatacctgcccaatattgtatgaaatcatccgcaacagagacaaggaaatatcttcaggtctgtaatcgtccagttccttattttcagatatcgccttgccaaaactagaagctattgttgaagcagagagaccaatctgtatgattgattaatgagaattactagaacagtagtaataaagcattctgagtttcaataggagagtagtcacatcctataacaaatgagatcacatgtagtttgatgcaaagttgactcctaccttggagtaatccatgccaccataaatatcaccaacgagcatgtcaatggcactattatctcccttttggctgagttctagcaattcatcaaaactgaaacaaaagaaaacagtgtaaggtattggaaacaaaaatataaagaaataatgtaaaatcagagctctgtaacctcttgcacttcgttagaagtcttcctaagccccaataggtaccaccgccaacattagttccactcacacgttcaaactttccttcaccatcaacctatactttgaaaagccattgcatgaaatctacaggtccatgcaatcttctgacctcccaattcagaagttcaaggagccaaacacacactgattgtgaaaaaagtagcaaacgtaaacaaataccttgattatgctaacaccagatccaacgttcacaagaagataaggatacaagtcattgggatctatctgtacaaattctttctcaccctccatgtgcgtaaaggcttcatgtcgaatagcctgcagaaaatgcaagaaactaagaataaattcaaaacatacacatgcaaatagacaaaagaaaagtagactaattgcaaaatttcaatagtcttagcagaactttaagtatagtaaaacacacatacagatatccagctgtttttctctcatgtgactcagaacttcaacaaacaaatcaaccggtcacatataatgagagtctgtctttacgtttctatttcgcaagtgctagtaataaaaggtacaaatatgtatgcagagacaacataaatggaatgttgcataaagaaaggtcttaccttgagcaaaaaatttgctccagaaacaagacaatgcatttcatcttctttctcaatactaacgcccagccgttccttgaacaagtctgcaaatttaaatgccccgccacctgtgacctgaaagatacacgtacgcttgactcatatgtttaaaacaagtaataatcaactaatcaaagccgaatcagcaaatcacattacatggatatacaagacttataaatataaaaaacgtttcacctaaaaacaataattatgagggtcttaaatgttacctggtatctcaaatgaaagagcgagctaaatatatgcagaaggagcctcaaaaggtgataaagataaaaacaatcaagtcataaaaatgccattaccttgataacaccagtccccaaaggcaaggtctttgaactccaaggataaggatctattcatttagttgaaaagaaatggagaagaagacgaattgaagagtaaatcaccagaaattgatcttataatacaaaacaacatttcatacactgaaaaggataaaagtaataatacctcggcgatgaagctgcttggaatgaataaaatccaagcactcattaatnnnnnnnnnnnnnnnnnnnacaaaatgaagtctaccaccaagagcaggataacttctcaagttgccattggtaatacccaatctctccttgatcgtcctcttccgcttatcatcatcattagagtagtcctcatgtcgtgaaaaatacaacaactttatcaaagaacctgcaaataaacttaaaagggttcataattctcaaacatagcacttaagaaataaacatcgaaattgccaaaaccaagaagtgacaccaaatactactggaagaaccacaagcactagatcaatggtcaactacagtgaaaataaaaaagaagtgaaatttgttgtcacctccgatatcaagagccaaatgagagatatcatcagactgattaggcaataaaatggtgggatctctctcctcgaggttcccctgaatttcggctttgcttagatcaagctgaggtctagagcctgatctgtggatcggagtaccagaagtagaaggagccatatttttatcagcagcaacagaaacctgagattttgcttcagcttctcttttattgtcaagaattggatcatactcatcctcttgacccgccattttttttttatattaaaaaataaaaaaggaacccaaccaaacccagaaaaatcggatcaccaacaattgcctaattctcccaaaccaccacaaaacccttccttgcaaagtttaaaaagtcaaacgacacgaactgatgatgataagactttccagggtaaagaagtaaactgttcgagcttttgctaatacgattatacgactaagcttataattgcttaagcaggctgaagcggacctagctcgaaacaaaatttgtatttatatataattgtttgttaactaattaactaccacataaatttcccaaaaaaaaaaaaaaaactaccacacaaatttgtagtttttaatgaatttgtaagtggattaggtttggtgtttcacaataatgaccaaactcgaactccacttgccacttatgagtttttccaagtcatagatgaggattactgtgttggtttcgatatcttaattaatccgtcacacttaaatctttatgctttatgattttttgaagtctaagattttgctaacattacactattcacgataaatcactttttcagatttaagatatttttcgccggaatttaaaa

SEQ ID NO: 36781 - DNA, 3170 bp, Arabidopsis thaliana landsberg
tataattttttttaataatcagtcaaaaaacacacaaacaaatatttccaaaatttaaatattttctatgaaatatttaaatatgtttctaagcttgtatttacacattggctgactttggcaccaaaagaggttagtacattaaagcatcctaaatttattaacttgattaaaaatgtgtaatagcctttatcatgaatgttataaatagtacacaatttagtattagccaacaaaattttaaaataaaaatgtagaaatatccatttatatcattcatgatatctaattcacaacacatgacaataggaactaaaagaccattagaccacacaaatcataagcatttccaaaaaaaataagtttattaaacaaaatatgaaaatttgttctaaccaaatttcaaaatgacatttaggtttatatttactccaattaatctcgatttataaacgtatatataaaataaatttacggcctcaactcaaaagattatacaaatctctgatccatccaagcaaaacgtggacgacttaacttagaaagaaaagaagaagaagccgacggcggcgattgtgccgacaacagagaacttagcagttgtcacggcaccactcttgggtgactctgcagtgggtccatcgcttggtccatcagcggcggaagtgctgtcgggggtgggagccggtggggaggagacggtaggtgcctcagcagagtcgctgggactagaggcagagtagtcatcctcggggacgggtccttcggcagccggagaagatgcttttggagaagaggccgaagatgatttaggtgcggcggctggagccttggttggagctgaaggagccttggatgtggcagtcggagccttggttggtgcggcagtgggtgatggacattttttgggagaagctgagggagcgtcggcggcaaaagcggtggcaatagttaaagccaataggaccgaaacgacaaattgacgtgccatttttttttctgttttaacagttttttttattgagattaaaaggaggatactccaaaagctaaagcagtactttttattaatttatttctgtttaatttgtcttatcctatgcagaaatacttcaaaagctgtagaatgtaagaataagacatgggggtgtgcatttatatgtttttgaagatgagaatcattagggaaattgatggatatgacagaaacgatgaatcttataatctacttttagaaagtactttaaaattaagcaggactagaaaccaattcttctatttatggattcgtacacaatttttttttttttgaatactaatattagtagctgagactgagattttgacttttgtttgattcattgattgtattgcagaaaattagaattagagtctcaaaatacattttgggcaatcttaaagagtttactgtactttcgaactaagcccaaattaaaaccccaatatgaagacacaactgacacacaagtcattaccaaaggtccaaaacatacaaacttctgcatggtgaagttttctggggcttacggtttcgaagacatttgttaatgttctgacagagctagaaaacagacaacttctctttaattctatctttttgtttgtgttatatgcatcatttttttgtcatcatcgtttgatgtgcagtgcagtttttaattcctctttattttatttgcaatgttcgaattttcttccttttctactcttcaagactcgagtcataaaccaagcatgatattacgagtaaaagttgggtcaaataaattacgtagcaggttattgtaaagacctaatttctctcatttgtttgcttaagatttaagcttcaccattcaagaaatgacacacccaaataaaactagagaataactcacaaatcaaaacaaaaaaccataaacattagaatggccaatcaagatcaagatcaactgttcttgttctgtaacaacttatgtacgtgtggtagattttctccggtttactcagaccgtactctatccaatctatcaacactcttccttcctctctcaatctgatgatgattctgatgatgctgatgatggtcaacgctcttccttgcctttacgtggaagtcaacgcttctcctagtccgatctaagtgctgctcgaacgtgattctcagcttactcttctttgaaggaccctttggaggtttctctttctcccttttatcaacgctttgcctcggcttctctcttctatctacgctctgcctcggcatttccaaatcgctgctctgtttctctaattgggccgtgctcgccctcgaggagagatctctctctacggttgtgatgaacttcttaaggtgtttaatgtattcaggatagtgttctagatcacagtggttaccgccttcgagccaaagcggttcatatttctctttagagagttcccatagttgttttccatgagaacagtcaacaacttcatcacaagttccctgccacaagagaagaaccacaaagagttatatacactcagttttcgaactgaaaaaaaggaaaagagagtaaaatgaatatggaactcacgtgaatgacgagaaccgggcaattcacaagagggattttgtcgatattctgcaaatattgttaaaagtggacactgtgaaaaagatagaggaaagcaagacaatcgaaaatgatccatctaagaatgatgtatgtaataccttgaagatgtcgaaccagtaagttcgtttaacagggtacatgactctaagtccggaagcaatagcactatgaagaaccacggctcgtaggttaggtaaccgggaagcaagatctaaagtcgggccgctgcctacagattggccgtagaggatgacaccttcctgcttagagccaaaggtttcttcaagacacttataaacagcttcgatatcagcatacgtgttatgctcactcggctacaatcaatcatttaagagaaagaaagatttttgagagttggtcctaaaactcataatggatcatcagaccaatcagattgatggggtaaaggacaaacctttccagtagattgtccatacccggagtaatcgcatctccaacatcacaaccaataatatcaaaaactgaatgattccaagcagatcctagcccaagtttccttttttattg

SEQ ID NO: 36782 - DNA, 3196 bp, Arabidopsis thaliana landsberg
tgttctcgttgctgtgaaggtgagctaaaccacgactgattccttttgctatcttcattcttgtttcccacggaattagggtttctggtcctcgagctgttaaattcaaaatgtcagagatcaataaaaatgtcaactttatcaaatccaaagttagagttttgctttgattttacttaccgtgaagaaatgcagagaggcttcctttagacatgtaatcaaagacgagaagcttctctcctttaggtcctaagtagtaagctcttagtgcaagaagattctgatgacgaatcttgcctaaagctgtgacttctccttcgaattctttgactccttttgttgttttctctctcagacgcttcacagcgacttcattgccgtcttctaatgtggccttgtatgctgtgccatatgtacttttccccatgatctcagctgtggcacagagcagatcatcggcggtgaacacgaacggaccatcgaaatggactagcttgcctcccatttcacctcctgctgatgctgttcctgcgacacctgctgatactgtcttctctgaggtcttgtcctttccatctttttgtttcaaggcggttcgtttcttgatcaggcagcagaggagtatgcagcatagtagaaggaggatggctagaagagctccgatggcgattaggattacgtctttcactgagagttttctgtggtggtgttttcttggttcttgtgatgaggtaggtgaaagggtgaggggatggtggtgatcaggagcatggcatggatttgaggagctgttgccacaaagctggatgttgcccaagaaagagcttgagttgaacttcttggagaggacaggtggaacaggaccagagagggtgttgtaagagacgttcaatgaagaaagcttctccaggtggactactgagagcgggattggacctgtgaagttgttttctgacagatcaagctttttgattccagatatgttccctattgtttctgggattggcccattgatcttgtttctcttcaggttaagctctgtcaggttgtgaagtctatcaatggcatctgggattgggcctttgaggtggttgctttcgagatttagtgaaactagagatgaaaggttggagaaactgtctgggatggttccgttgattgaattgtaagagaaatccaggctctggaggtgtggaagacctccacattctctgggaatagaacctgagagctggttatggcttatagaaacctcttccaacagactatgcttgcagagagacactggaacagctccagagaagcgattgtggtcaagattcagcgttttgagagggtgggagccattgacgaaaaagtcaggtatcaaaccagataggttgttatgctgaagatcaagaaaagtgagggtatatgatctggctacactaaccggaaggggaccggaaagtgaattgaagctgagattgagcctatagagcctcgtggattcagcaaggctaggcgggatggctccagttagctggttactgctgagatcaagattctggagaagagggcagttacccagtgagactgggatggaacccgagagacgattgttgaagagatagactccacggaggctcttgaggtagccaagggaacgaggaaccgaaccggcgataacattgttgtggaggctaagttttctgagacttccaagctgtccaatcttctcagagatagtaccgccaagtcccttccaagggagctgaatggcgaccacttgacctcggaggcaatttgattccagcccagccggagcaaacttgagaggaggcagagttgttccagcttttgagaactcggtgaagtcaatgagttcgtgtttgatagcttggagtgcctgatagttcgcttgagtcaccacgattccatcccaagagtgaccaccaccctccaccacctgcaacagcttgagcagagaagagtaagaaacacaagagtagactcgcgcagaaatggaaactaatttcataaatgcgaaatgggtttttgtaaagatgattcatttcaaaagaatcaaagaataaagaagaaagaaaatagaaaacgaagaagaaagatgagaagagcaggggagcttgagttcttggtttgttctccttcctctgtttttggagagagtgagacagagaaaagtttgatttttagtgagagaggtaatggaaataagtgagtgagtgagtgttgtagcaaaagactaattatggttggagtgaggaggaagaagacaaaaacaagagtttagtttatgtttattgtaagggtaacggctagtttttacttcttggtcctgcgccaaaaaaacggtaagcgagagaaacatgaccaagaccaacggctataaagttatttcgaccgtttttaatcattcattattactaaaaatgtctcgagactcgttggggcatcaaaataattatttcaatggaattcactaatctttatatgacttggtcaaatcttgacacttttggccacgtcagtcctagtaccaatcgtgcggcacactagatatattcgtggtaataatatgtaattttttttgagaaatccttcaaacgtgtggcaaactacactaatatcattcatataaaatgtaacaaacctcaaatagaatacagtgatatcatagtagagggacaattgttgtagcgatcattatttacactaaggcaaagggacattttggaggatgtgtttgaatccatacatatagacactacacaaagtctgcaaccattctcatggagcagctcgtgttcctacttgtataacccataaggaattaaaatcctgttatagcaacgttttgaacattcaagaatcagccaactccggctgccttagaaccgatttctcaggggggcatgcgcgcaagagtgtgcagacgtcgtttttcactaggaattcctctgcatttacgagtatcagaggtccatattcaaacaccaacgtcttgcactgtaataacacaagacacaacaccataatatcagaaaagcgtacgctaactgctatgtgatcatgcagatgcgttgcaaaagttcgagaagaacaccaacagagaaagcagaatgaaatggataataaaaaaacacgtgaaggcaatgttatggatttgagttgatcattttgaccttggtctcgt

SEQ ID NO: 36783 - DNA, 2451 bp, Arabidopsis thaliana landsberg
acggaagctcattggcgggatccctcccgggtgcaccgccaacctttcatgattttttttgacggtctggttctggttctttaactaatttagcttactaaacggataaaaatgaattttagcttactaatttgcgagccctctttttttctatgtcaacaattattgagacctctctatcactagcttactaattacttttgttaagttccggtatttacttgatagaaatcttttaatggttaatatcagttgactaatgaattatatatgatataacctttgatgacatttttttctaagaagttttggacttatggcaaaaaccataacatttaatttactcggttcgagcaaagttagaagggatctcttctctaaactagatgaatttaatctggtcgtgggtcatacctttagaagatgtagggcatttggccttgaacttctagatattaaaaaaaaaaaaaaaaatactctccactcaaacgcagcttaccctcgcgatttcaggatccaaaaatgttttagtgcaaccaagtctagtgctgatgtttggtacctctggattcaaagacattatagctagtgctgagtatgattgttggtagaggtactggagatgcagattctttaatgaatttgattacatataaccctttagaagagaagagatttgatatgtataattcatgtaaggtagttcatagatgacgatattttcacgtttgacatattcatcgtgacaagagggttgcttgggtttgaggtgttggaaacggtggtcgaattaatggacatggtgattaaaggtttaggataaagatgggtatgataccacattagtctattaattaccatgtagaaggttgaaatattgaatgatttattgtaattgcttaaaacacgaaaacgtacatcattttttttttttacaatatagggaataaacagatttactccaaatataaactgatacacaacaagtcaacaacatgtatatctatgtacacaccgattacaattctgaataatagttttcggaagtttttgctaatataggaatttcggaagtgttttggtaattaatgcattatggggaaatatgtatattaattgatatatattggaaaattaaggtatacttaaattttatgtgaaaaccaagattaaaccggtctaccaagagtgtctatatatataacatatatcgcgacgaaagaaattattaaagttgaagaggttgaacaaaatcaatagaggagaaagagagatcaaatggagtgggagaaatggtacttacatgcggttcttgtgccaagtgctttacttatgatgttttgttaccacatctatttgtggtataaggttcgaaccaatcctttctccaccctcctcggcattaactctcacggccgccggatttggatttctgctatgatcaaggtttttcataatcatcgccattgcattcttcttatcaaaaacgttacagttttataacaatatgatggtataatttagtcgttattgtcatatttcttagagatttgatatgaggattaataagttttgatggtagagttgattagtcttggttggtccgaaatcttctcataaaagaaaacatataagctatatttataattggagaaatatgcagattggttattgtttgttgtttaatttttcaggacaatcagaagacaaacatattggcggtacaaacactgcgtaacatagtaatgggagccacactgatggccacgacctgcgtgcttctctgcgcgggtctagccgcagtgttaagcagcacttacagcatcaagaagcctctaaacgacgccgtttttggtgctcatggagatttcgccatatccatcaaatacctaacaattctcacaattttcatcttctccttcttcttccactccctctccatccgtttcctaaaccaagtcgccattctcgtaaacatccctaacttataccctaatccttctggttgcttcttcctcacgtctgagcacgtcagcgagatgttcgaaaagggtatctttctcaacacggtaggtaacaggttgttctacgcaggcttttctctaatgttatggatctttggtcccatcctcgtgttctttagcgttttggtgatggttcttgttctttctcacctcgatttcgtgtcacgcaacaacaataaagaaaaactacgtatagtggatatacgtcgttcctctgattgtacgaatggtggtgaagactaggaatctaggacgcaagatgagttttttggttaaaggatgatgcttattgatagtacatgacgatgatatcataacctccggattgttaataaatgcgcttggagattttctcttgttatgacttatggccttgcttttatgagctgttatagtttgtgatctcaaacctctagcttctatctcg

SEQ ID NO: 36784 - DNA, 3391 bp, Arabidopsis thaliana landsberg
cttaaaatttttcccccatgctaaaaattaaaatttaggaaccaagcccctgctgattgttttgaaaaaggaacattaagcccaaaaattatagacacacatatcttcatttttattaaatgtttgatacctctaaaaatatgtaaattattctaaatatctaactttgtaatgtatgggcgagtaattttttaccaatggagaatcacaaatagcttttacaaattaattatttttttttatttttttggagattaactgtgatgggtaagaaattaggtgttattcactagaaccaaacagaatatttttttattactatcatattttcgtcttttttttattacctagcgtgtctataccaaacgttacaagaaaaaacgtaattacatggaataccactgccacgtcagaatttgctgacgtggattaaatgaactcagccggctgagttacggtatgttgcggcggtatgttgcggctgacttacgtcaaaaatatatgagtcataacaaaacggtgaagtatgagtataactcaaccagacgttacggctgagttgtaaaatgttgcctgagttattgtataactcaggcaacagtatggttgagttaaggatggtcgtccgagttataagaagttatacgataacccagccaacgttatggctgagttatgagaaaacgactgacttatttcctagacacggccgagttatagttttggacggcttagttatggaatgatgtgacggcttagttatggaatgatgtgacggctgagttatgatcgagtgttataaatcagccgtaaagagctcgattactaaataactcagccttgttacgactgacttatgtgcaaaagattaattactataatagcatgcagttacagccgagttttaaaacgttacggctgagttagttgagttacgacattacacggctgacttaactttatttttttttccttttttaattactgtaatagtattcatgttgcgactgacttatagatttgtttgatggctcagttattaggcaaattttaaatgttcgtttggtggcttacttgccacctcgtcaattcaaaacaacgtcggctgcaatatttcatgtcatcattccatgtcagcatcatcaaaggacaaaaaaaatagggccaaattttttcaactcgtcttcttcacctgagttttgcacatcaccggaacttctagttcctcatcgtcttcctcattcttcttcaatttctttcatccttctcccgatatggttgattcatttttggtaattgttgttttcagtaattggatagaaacacaaatatgtatttaacaccgatgaaagagggtgtagatttgtgcagatagatgcataaacaacgcacgacaaatttgtgaagttagtgctcaatgataaagttagacaaaatattgcgtctcttattgtttcgcggtaaatttacatgtcacagttagttatatgcttaaggaaagacgaaaggttgtgtaaattatatgctacagctgagttataatgcttcagggaagacgaaaggtttggtaaattaacatgttacgattgagttatatgcttcatgaaagaagaagggtttgtaaattatatgttacgacttagttttaatgctttggagaagacgaaaggttcggtaaatttacatgtcacagctgagttatatgcttcaggaaagacgaaaggtttggtaaatttacatgtcacggttgagttatatgcttcaaagaagacaaaaggtttggtaattacatgtcacggctgagttatatgctttagagaagacgaaatgttttgtaaattatatgttacgactgatttgtcacgatttacatattacgactgagttacatcacattacagctgagttataatacatatcggaaaacaatatttttgggaagaaaatataaaatttattggtcaaataacaacaatcaaattaaaaacttaagaatatatttaagggagacataggaggaagactaaactgtatgaattaaaacatagatagaagtagaagagtcactagtcaacaaaactgtatgaatcaaaacatcgatagatgtagaaatgtctccaaatagatcgattgagaggaagactaaaagagaatcatgtaaaaccaaagtaaaagagtagctattactgctttcaactcaaacctgtaacgaatcatgtagaattccatagacctctttgatttggatttttatttttgatgtttttcgtgaacgaggttgtgtgtagatctgacgaagcttttgatttgggaccctgtggcaaatgttgtggctgtgagatctaggaagatccagcccaatccagcaatttgaagatctatgttcatgttgtacccaagttagttaaagattattagttctaaaagtttttttggatttggagacaaaaaagagaagaggggaaataaagtgagtttgaggagtgtgagattggtgatgtgtgttaatgacatggataatcaaaattttatttattatttttaactaaaaatgaattaaaaattattaattaaaaaaactaatcaaggattttaaattgtaattacacaaatgctcaaaacatttgagtaattaaaaaaagatgtatgatattttaggaataaatatacttttctatgctatatgagtaattaattcttaatataataaataaatctttgtttgtaaatattctattatcatgaaacgacaaatataatgaatcttatttcgagaaaagatgaactagttgaattagttgcacttcatatgctagattcaacattccggtttagttgcaatttaatcagattatctaaagttgtgttcaaaccgatttgccttttttgctagttgtaatcagccgggcaaaaaaactgtgttgtgtactaatgggccacatattgggctataattaaggtcatgcccataattgtgcaactctcacttcacaatgcaagtggaagatttattaatttttgggaaacatcccgaaaaaacctccatttatttataatatgcctgtttaatacatgcattatgtaactttgcccgtttaatacttaagttaatttttatgtcttttaaaaaccttcatgtttttaaattttggcaaaatcagacatccgagttaacggccattagcactgctaaccacagttaaaacttaaccctatgatgtttactatgtatatacaattgtttttctaattaatatgagcatattatcttagtttggtggttatgtgagagattaccatcctcatcaacccgagatcgaatctcatatccaacaaatattttggattttgtattgtattttttactttcaaaaattcctttttcacttac

SEQ ID NO: 36785 - DNA, 4105 bp, Arabidopsis thaliana landsberg
cgaactattctggttctgccgaaaccaatcctacacataccacgaagagaagataggtgtggtggtttgatatatatgtcccaaaccatacgacccaataacatgactttaaccgttttatgattaaagtcaaacaaaatttactattctattttggactgaaagtatgaaaaataatcctaaacatccccaaccaatgtgaaaaataaaagaccatcaataacaataattaaaatcctagatggtttagttttcgatatttgccatgttgtttagcttacgtaacgttacctcattttactagtaagttaagagctaaaaaaatgtaattctgtaagtttcatcataatattacataaaagtacaaaagaaaattgaaatcaccgaaaacaatggttataaattaattacaaatgccaatggatttttactcaaattaactctttcaaaaaaattctagcgatgagaatcacttggtccttgtcgttgtcttcatccaccagaccaccacacctgtcttctcttcataactctaactctaacaccacaactacagaatccaagatacataaaaataaatcagacagatacatagaaaataaacactaacaacgaacattaattttattagtactgccataagtaaagatccgcaatatattcattattgccgatcagattttgaaattaattaccgtgagtaaaaaattatggaaatatttggtttgcgtaaaaggaaatttgtcggagaattcaaaatagtattggtcttacttacattcagaatcagtagtgatccagttgcatttcctggatctacatcggtagagaggcgtaggactcaaggaaacaaggattgctggggaagaaactatagagatgtgatcagaggaagagtttgttgtgcaactctcactactctcccatctcaaacttatctttgcagatacactactcatcctttttgttgattcttcttcattgacttctctcatcatcttcaactttcttcggtttttcaactccatcattatctacaatattatatatgtttcatcaataacaatggtataacaaaattgagttttctaatgagtttgagctattgagaaagaaaaaaaaaacaccttaggggtaaagaatttgacagctttgtcggatttggctgctgcagcccatttgataagctccttcattcttgaaagtgtggccttacctttgctctgctcgcttttcgacttctctttattggtatcgtcttgtttctccggttgcaagactcttatagcctttttcagatcaaaccttgtcgatgtcacttgttcttctcctccttgcgcttttatctttgccatggagcgaagcaaatgccctctcctaaagctattaagtcttcttaaagtaaaagtgctagagaaacaagccctggctacgtcttttctacaccataaccagattcctctatagctcctttggtctttatgtttagaacctcttgtagatgatcttcttgttctgtgatctttacaatctggatcacatttattaaataattctatcagaaaacaaaatgtttactatatatttcttattgattagccaacgacttgtttattaaaattaccaacatatgaaatctacataaactcaccagaatatatattatgataagtaaagtatgtagtgttgtacattgtgatctaaggatcaagaaatgtttttgttacttacttgttagagttgtggtgggttcatgatcagtacaattgatggaactaggctctgatctccctaacttgaagagccattgaaagatctggtcaaaactcacaaagattaaactcttatgaatatagtccttatgttatggacacatgtaaatgatatggagcacatgtgacgatgactaacctccatgttctggccgaagatgcttttttggtataatacagtaatagagcttgcgagattattcgcttagtcaaacaagattctcccttacacaaatgattagagactttggaacagaagatgaagacaagagatgacttgggaaactaaagaagatatataagagtttaaataatttgtttgactcaatctatttttgagtttatatggaaacacaacgtgggattgtatcaaagttggtttttatacatacatatgtttctttgggttgtggtttttagctcagtagatgtcactttgtttcaaggctttgttgccattactcgctgccacacacttgtaagttatgtcatttaatttcatatggtccttcaagctatttttttttttttttaaattaaaaatcgccggaccatttaaagcatgagtacatgtgtaaggtcattctgcgctactaggtctagttgttactcaagttactttggggataaatttcagttaacgtgtactagctagcttggcataatgatttggatacgtgagagatcatacgaggagcagagcccacttttttggcttgcggcccatttatactctaggccggctctggcgagtggcgagccgcgaggagccatctcccgcattagtgtatcgagcgaaattcagagtttattaaggacataaggagataatgtaccatgtgcaaatgatagtctgtgatgggacatgagaaacatacattctaaggagaagatattttaaggcatcactacatttttttaaccaaacatgagtctcaatggcgtgtagtagaaagactagttatgacgcatctaatacatacatatatgaagattttcttttggcaaaggctgtttcttcaagtttgttgaacggttttgttgcgtgatgtgatacagtgattgagaagtaacaaacaaatctatagatttcagaacaggatgataaaagttgataaaacattgaagagggttacaataccatcaaatctaaagaacaaaaccaaaaaaataacataattgttaaatggcgaaataactatatcggtgggacatcaaaaaaattggagttatctcgtgcttgcttgcgggcaaagtaaatccaaacaataacaataagtgagacaaacacaacgcctaacagtacggaaactacgagtatcatcggaagaaggtactccatattgtttattcaccacaccaaaacttgttttctctatctttttttcttgtgtcttcttaacaaggttcttagggaaacctgttaatttgtatatacaagacctcatttccttgtctccacgatctggcaatcaatgttaacataacgaaaaagttaacatatcaaaaagaatcaaaaccaaaagaagaaaagttaacataacaataagatatgtgtaatatatatgtgttttattttataacaataagatatgaataataaagagactagggagaaaattttcttattacttctcttgtaattgacgttttggtcatgagaaagaattgaggaacaaatgacatttcgtcttacgaatgtgtaatcaaaacaaaaatggtttactcacaaaatgaccggatgtggtctacttaatcaagagttattggaatatatatatattgtgaagggtataggagaacatggaagagtcacatggatattagtactaattactaaagaatccacaaaacaaaaaataataattacagaattaacgatcatgaaaagttaatgataactaaatagaccaatatatacaacttgtatctaaagcaaacaccttttgaaattaacccctatttaagatcgaatatattttaagatagactcgatgtgatatgatttttttgttaattgtttccgaattatgctttaacactctaagagtttgtataattgcggcggttggagtggacaaatccgtttaaggattggactgctttttatacaccatttataaaccacagttcatttttctacttttctggatccatactactatagactatggtttatgaatggaagataatctaccttgtcatttattccaatgccatcgtcgagctctgcgagatcgaacgtgttattcttcatgcccgcatgtcatttatcaaacgtggcctcatctcaatcctctacatgttcaagtacaattataggctatggtttt

SEQ ID NO: 36786 - DNA, 4377 bp, Arabidopsis thaliana landsberg
caactgatcggcttgatcttccgtagccgccatttctctctgcacaagtgaagagatcgttgagagttttaagcgttttgttgctttttttgtgttaagtgtttaattaaattcggttctgtttgttgaagaagattcagcgattccttctgtttcgcatcatctatttatggagtatatctacgtagagatctctggcggttgcgaatcgtgtccagggtcaaatctgtcatttaatgtcacctgtaaaatgttattttttcctttttcctatgcagaattaatgtaccgaaatggaaggaaaaaccagagtcaatactccaccttatacccattaacactgagtttaatttgcatctatgcaaaaaccaggataaggcagtgaacaaaattaccactgctctttgtttttgctttcacaacagaaaattttttaccatttcttttttacctatacaataataaaagtttctccatgtttttgtgcctcaataacaaaacttatgagtcttcctttgtgaacgtctgaggctcactgcttgcaaatgccaaccatacaaccgtccccgtcaagtagaagaatattgatggcacgaatagagacatctacacggtgatcagaacctttgagttaactaatcaattagggactgatcatcattaaaggtaaagctagcaacttacagtccaggaatgggttgagtctaggagaaaaccagttagggccactcctacaattccaggtactgcccccactgtgtttgtaataccctgaaatacataaatattccacaacaagtttagagggaagctagttcttcatacacatatattatatcatagctcattagcatctagcaaggttcatatgagaaggaccaatagtatgcttgcatatccgggtgaaatgtcctgatgagtacaatgaagtcctcgaaaaaggaacatagtgtttctcaatccattacaataaactccttcgggtgcattttctttatatgaagttacttgaagacttttgacagaagatagagaagtagaacatctccaggtacctgataaagcaaaacttgataaggccaagcctgctgtcaaaattcctacaatttcccatggtggcaatccaatgtccacagatgaaagtgtcatgcagatcgctggtgccacaaacgcaatcgtttgacaaatctttcggacctacatggcaaattcccaaggagtttacatatcaaagtgacgacaggttgatctagatatctgggtaaccatatgtgcaaaatgagaaaagggaataaaaaaagaatttgctaaattgagtatagaataaccgatctgcaagagcccttcaagtgaagacccttttggtttgttatacaaggctacatacagggaaaagatatgtgattttataccgtggtagtctcaactccatttgtaattaagtaatcagcaaattgtgaagcaagacttgtcacgacaatcgaagccagtggaggaaggatggaaacctgatcttcacatccacatattaaatcccaaaatgttatacctttgcaaaatgcaagctgaactgatttttcaatattccagggaaaacacaagataaaagcagttttatacttacccaagcagcttctgtcaaatttagactcagagcctcactgtataccggaaatatgatcagaattactttcgtcatcaacaaagatacagaatgaaagagacggaatactggtataaccataaatgtatatttagagaacaatttaaaagtactttcatctaaaccatggccccgggattttatatcaaatgagaacacctcttgtacaaattaagctaatagatattagaatttcagtctacagatatatagcttttcaacagatagagcagcttaagcattgcccagtaaaatttaacatggtgaacagtagaccccacaattacctgaaataagttggtagccaagataaacaggtatagtgaccccaacttccacaaaagtgagtgtatatcattgcccaaacagccgggctttggaaaaatgacttccatggaatttcctgtagtaagatacccaaaaaattgaagcattgacttcaaccaaactataaggttttggtttttcaaaaccatttgcttatttattggccattttggcaccattttaggggacaactacaactagaaatgaaataaaagaacgtagccagacagacaaagtaatagataaccaaccttcaatgagctccccaactcttcctttgtagcgttttctgatttatgcgaagtagagatctcattacctacaaagaaagggcaatcctgattgtaaatggtgttcaagtccaaggtccaaataactgagtggagtattagttataatagttggccaataaacagacaacaaaagattatctagctaagtgtacattaaaagaattgcttcactcccaatacagtatatgcttcagttcaagatggtacgaacttaatagtgggttagagaaggatttacaagtaattctcatctgttacacttctgtttcacatattataaaaagaaacaactaggatggctttcacaatataaatcatagacaaaacgacacagtaagtaaatgcgtaataaatacacttatgtgacatctaagctccctggtttcacaattatattcacgattaaataaagtttgaataagcaaaaagaaggagaaaccacctttatatgaaacttcttcttcattaagaaactgaaacccgacgaaccttcaacatataggggaaaaactgagaatacagaaatactaaaatagcatgttggcatcttggtatgaatgatgaaataaataaattgagccatcaatatttgataaagaagtatagtcagaataacaatgttgtgaaagtctttagtcagtaatcgatgagacttaccagccaacaccaaggagaccaaacaagtaaaagacagattcccaattaaaggtttcgatgatgggaggagccaagagaagcctgcagacatgataatgttaggtctgtgcaagtctcgaagctgtccattcgtcttcattagattattaaccaaatcataaacattgataaataaaaaccacatacttgtaacttctatagtttaagtatcacaataagaaaaacataccccattacactccccaaactcagtcctccaaaaacaaagcctaccgctcttgagcgctccttaacaggtattgtcctgtacccagcaattgaatggcgcaatcaggatatgaaagaagggtctaaaagctataatgtaatctgtgcagccagatatttaagcataaagcgactaaatacatgcatatgtaatttcagttttagttaaggaagggttttcataagaaaaaaatgtccagttcttgaagttgcccatcggctattgaagaccaacctatggatttagtagattatcatatctagatcatgagctaaattaaaagacaatgctgcataagcaattaaacacacatcatttatattcgattaaagtatgagcactctacaaatttgctccagattaatacatgcctggcaataaggtctgtcgcagccgatggggaaacaccttctcctattcccacctggagttacaaatctctgtgttaagacaaagacataatgtaaggctagagtagggtaggggagagaaggaaagagcttaagagtgtctatgggactttttaatttacaagcttaataaactagggaatttgtaacaagaccatgactcgaaagaaactagaatgatttgcataaagcagtataatgacataaacatatggacatgcttaccaaaattcgagaaaagattaaaccgggcataaatccagcaaggagtggaacaagagctgtagcgaaagaccatgtaaagacaccaatctcaagcacttttctgcatcaagcatacaaaatcatgaactgccctgaaatcaaaactgggaagagcctagaaaaaagaagacacaccttccgccaaaaatcttggaaagccaacctccaggcaactggctcaaggcataaccccaaaagaaggaagactggaccaacccagccacagatgagctccatccaaactggtgtgacattggtattatagcaatactcaagttcacctgcaaattctcaccagacaatatacatagtcaaattatatggtcctcacaatcatcaccaaaaaccacctaaagaagaaactacaagaaaaactacacctttactaaattgaactcaaattcacaagaacctgatcctcatatatcatgtaagctaacctaaaaccataccataagaattgcaaaaaaaaatgtttcaattttaaagcgagaa

SEQ ID NO: 36787 - DNA, 3279 bp, Arabidopsis thaliana landsberg
gttctgaaatacaccccctctagcgagtaactctagcttattccacgttgttgcctgggggccctctcaggatgtccatagatgaatgtatgacaaaagtagctgtgatcatccgctatatacatattagtatagtacagggtaggagaactgaggaactcacactttatagtatcacgccaaaaaataaccaacccgccactcaaaccatctggggagatgagaaagtgatgatgaaagtggagatcagtgcacagccgctgtacataagcatccttattcttagtttctacgaggaacaggatatcaatcttatatttacaattgatatccttcaaaaaaggaattgtcagggggttcctcaaaccctgacaattccagtgcaaaatcctcattttggaaggggtggcttcggggtttccacctcccctttagcctgtgttgatggtcgactatgggttttccttttattggttgaagcttcatcttctgccttctcagtttccagtttacgtttgatacctcgatctataggtggaatcgaggaagatctcaattcttgaacagcaaaggtttcattaaaggaaaataaccgaatgtatactaaattttaaaaccgaaaaaaacagaccgaacctaaaccgaaccgaaattttaaaataatcgaatagatattacactttagaaccaaaagaaccgatggccgaatagatacgaatagaaaccgaatggataaccgaacgccaaaactatataaaaatcctctcttttttttgtcaaagtgtctaatgtaacaaaaattgtaagatggttcagtggtttgtttaaaatctccggttatcgtaaaccggtaacttgtaccgataccagaaccgagccaattttttatgagaacaaaaacctcaaaatcacatttttgtttgttgggataagtttgagcggtggattttgtatggagccgccgagttcgagaccggaggaacctccgtcatgggaggacctttacaaaatcaatcttatgccgtcgcagctattccttaagttccgcaaagagcttcaaggccttcgcgtcggcgtcaatctcgaggtctttccttctctatgttcaacaaaactttgagtttcttcttactggctaataaaatgggtatgaagttgtaaagtttgaaacttttttaatgataatggatttgagtgttggagttaagtattcggtttattaggcataagttacatctattgatgcattcaaagagacctgttttgtgctgtggattccatgagatgtcatcactgtgtatttttgactgtgtgtgcttttatataacgaaaccgagaatcattaacacgcgaagcttgtcttgaagttgtaaagtttggaactttatggataatcttccagttgtgtaacgaacccacaaatgatcacatttgcaaagtttgaaaatttatagataatggatctaattatttggtttattaggtattgattatctattgatgcattctcatatattttctgtgatgtttgagctatgagatgtctcatcattgtcttgaagttgtaaagtttggaactttatgaataattgatttgtgtgtggaaataaggattcagttttattagagatggttcacctattgatgcattcttgcttatgttcttttgcatttttgagccacgagatgtgtcgtcattgtcatatttttttgcattttccagttatgtaacgaacccacaaatgatcacattgcaaagcttgttttgaagttgtaaagtttgaaaatttatggataatggatctaagtatttggtttattaggtgttgattatgtattgatgcattctcatttattgtttgtgatgtttgagctatgagatgtctcatcattgtcttgttttggacttgtttggttatataacgaaaccaagaatgattacattgcaaagcttgttttgaagttgtaaagtttgaaaatttatggataatggatctagttatttggtttattaggtattgattatgtattgatgcattctcatatattttttgtgatgtttaagctatgagatgtctcatcattgtcttgttttggacttgtttagttatataacgaacccacgaatgattaccacgcaaagcttgttttgaagcctctatgtccagaaaggaagtggaagtttatatatgagccgctacaccaagaagttcgtgttttatcgaagaagattcctgtcaccagatttctaaacctccaggtttttttgttgtatgccttcttgtgtctctttgtggaaggtggaaatacatgtgttgtaatcttatcatatgcaggttggtgttggacataactttcaaatgaatgcaattggttggaaatggaagcttacttcatgtttgggtggagatggtgtgtctcggattcgaaataaaactactcttggtcttagtcctggtatcgatttccggtttggatggagagctgattttgtactcccagaggttactgggtaagtcacaagctttcatgtattccagtacactttggccttgtgttttggtcacaatgcttagctgatgaatgaaacagggcccttggtactgaggaaccgttattcaacatgagctccgggcgtttagaggcatcactagacagagtagaggccattgtaacccattcagattatctatagccaatccgtaagtgtcggtcttatgtagtttctttcaaactagtcactagatctgatcaaactagtttttgttacattcaggtacctttcgtgtgcaaacgaggacgagatcttgcattatcagaaggcaaacatgtgaaagcacaagcactttggtgttcacaaccaaaacataagaatgtccataagattttgcttcagagagatatgctgaaagcacaagcactagtgggtagtttcatcagttattatactatctggtaatcactagtttgatggacgttcatacaatgcatctaaagaaatgtataatcgttggatcgttgatacaagttaggttagataatgtatttgccaaatctagtatacggcatagcgttttctaaaataaaaccttggatttgcaggtttgtagatggttccgaaatgatcaaattgcaatgaaagtacaaatgtaaattagatatttgagagtgaatcttatttcttatactaggaaatcatttatgtgaatatattatactattagtgtagctaaatagtaaaacttatattacactaggttaggcccgcctatatagcgc

SEQ ID NO: 36788 - DNA, 3150 bp, Arabidopsis thaliana landsberg
  unsure (1)..(3150): unsure at all n locations
ttaataatactaagttatctttggggacaggaggaattgaatcgtcacaggggccaaaaactgttgcttgcttctgccaaatatttccaccaagaaacacatgcttggttcaaatccatcgtgtatcctttcgtttgagctcttttattaaaaagcaccagttgatttacattttctcaatgcattggataagttaacgtattgaacttgttggctacttctgttatttagtcggtattttacatgtgaaacctgctatgtcaagagagcaaccaaatattccacatcatgttatagtccttttcctagctcaggataatccttcacttcaaagttagtgtccttagctttcagcagataacaaagaacgcaggaaagtacagatggtggaacaaccaggccaaaaagctgctggaaagagtccgcagacagtaagaataggaacttcaggtcgaagccgcccaatgtatgctgatgatattcagaaagcaaagatgcgtgccctttatatgcagagcaagaacagtaaaaaggatcctttaccaagtgccattggtgattcgaaaatcgttgctcctgagaagcccttggctcttcattcagccaaggattctgcacctattcagaacaatgaagctaagactgaagacacacctgtactctcgactgttcagcccgtcaatggattttcaactattcagcccgtcaatggacctctggctgttcagcctgtcaatggaccttcggctcttcaacccgtcaatggaccttcggccgtaattgtcccggtacaagctgatgaaattaaaaaaccttcaacacctcctaaaagcatttctagtaaggtgggagttatgatgaaaatgagttcacaaactattctcaagaattgcaagagaaaacagattgattggcatgtaccaccccgtaccatcattcgttggatttatatctcgttgccacttattgaataagctgaatgtgactctttagggtcttctttggtcacttctattttggtggttagttaggactcattctaatgcctagttttcttcaggaatggaacttgacgaactctggagagtagccgctggtggtaatagcaaggaggctgatgttcagagaaacagaaaccggcgagaaagagaaacaacatatcagtctcttcaaactataccgttgaaccctaaagaaccatgggatagggaaatggactatgatgacagtttgacccctgaaattccatctcaacagccaccagaagaaagtttaacggaaccacaggattcacttgatgaacgaagaattgctgctggtgctgccacaacctcttcatctctaagcagtcctgaacctgatctcgagttattagctgcgttacttaagaacccagatcttgtttatgcactaacttcgggaaaacccagtaatttagccggccaagatatggtaaaactgcttgatgtgattaagactggtgcaccaaactcaagcagtagctcaaataaacaggttgaagaaagggtcgaagtttcccttccatctcccactccatcaactaatcctggaatggtgcgttacttgaaacctattcaccccaaattcctcggacatatccaaaaccctattaatagatcatgttgccaaattgaatctcacgacatatagaaaaaaggaaagaactacaacaggctctagctaacaccaaactggattatgaattccagctgttagatctaacctgatgagtacaatgcccccattagaagatgttaatgtctgtttcttattctcttactgagttaagtgtattgttccaattttacagagtggatggggacaagaagggattcggaatccattttcaaggcaaaaccaagttggtactgcagttgctagatcgggtacacagcttcgtgttggttcaatgcaatggcatcaaacaaatgaacaatcaatcccacgacatgctccatcagcatacagtaactcgatcacattggctcacacagaaagagaacagcaacaatatatgcaaccaaaacttcatcacaatttacattttcaacaacaacaacaacaaccaatctcaacaacctcgtatgcagttagtgaaccagtaggacaaatgggaacaggtacatcgagttcatggaggagtcagcagagtcagaacagttactactcacatcaagaaaacgagattgcatcgggttcacaagttacttcataccaagggaatagccagtacatgagtagcaatccaggatatgaatcatggagtcctgataatagcccaagtaggaaccagcttaacatgaggggacaacaacaacaagcatcaaggaaacatgattcttctactcatccatattggaaccaaaacaaaagatggcgttaaaccatatataagactatggttctttggtcctcaatatttgcttgtcatggttgaattagcattatactctgttcagacacagattttcatttttaactcaaaacagattcatcagagataataaactaaaagaaagaatgaatggataaagttattactgtctcaattggcttcaaggcttttcaaaaacaagtcttgtcttcatcattattcgactaattccactctcgatttaattttgnaacagtaacactggggaaacgggtctgcttcggtaattggagatttccgtatacaatatccatttctgtgaagattgatagaatgtgtatactgttcttattcgtacacaatttttgtttacaaaaggaacagtatatactgttcctattggtactctcagtttaaaccgatatcttaaccggttgggatggataaccggtgttacttttgataactaaaagaacccagcatatagtttaaaactagattaaggccacaatctcaacttgcaaagtacagagttaacagccgtttaattatcgttcttatgatttgttctttgttaaatgataggtcaaaaattatttatgtcttttctaatttcataactgtgaatgttcattgaatccacattactcgtcaccgaactaagtaagcaatctctaaattaagacggtgatagacagtgctcttcaatatcgttcaaagtcgttaaacttgtatatccaaatcattcaaaaaca

SEQ ID NO: 36789 - DNA, 2196 bp, Arabidopsis thaliana landsberg
tggtcaaacccattgatttgggaatttgttaaaacttaaaaccttcaatataatgtgtgtttctttctttgggggtaattaaaaatttcattaggggcaaaggtcgaaaagaaagcgtcaaagtttgcttaaagaagagtaaggataatggagatagggtcgtcatccacggtggctggcggaggacagctttcggtgcctccgggattccggtttcatccaacggaggaggagcttctttactattacctcaagaagaaggtttcttatgaaccaattgatttagatgtaattagagaagttgatctcaacaagctggaaccttgggaacttaaaggtaaaatttataatccccttatagttaactcttctttaactataattaccatcacctaatccacacatttaatgaatgactattaattatttcttgatcagtatattagtatatagactatcacaatcaacgtcatatagattttaattatatatagagcgagtgctgtaagattagataaaatctggggaattatgtcgttggcctgcacaagattacaagttagatgtcaaaggacaattatatacatagattgtggtaatattgtctagggagtttgtctgtgatctctatggaaacatgcatctacttgtgtctttttaagtttgaacagttcttctcatatatgctgataaattattttccagtttttatggaaacatgaaaccttatacgtgtgtgtgcgcgttatacaccaagaaagagacaagttgtctattcacttatgtacagaagaccaaagtgtaatgtcttgtagtatatgactacgaatgtatattttgtaatattattttgtactaccctcaaaataagtcaatggtttttcacaatgaagacatataacaacccatcgccgtaagccataaatatatttatttgaaatgtgtgtttaaatatatatatatatatatacttaagactataattaacaattgtattttttcaattatatttataacaaattttgttgttgtgtgtatgtagagaaatgcagaatcgggtcgggtcctcaaaacgagtggtatttctttagccacaaggacaagaaatatcggtttgggacccgaacgatccgggcgacagcaaccgggttatggaaagttgttggtagagccaaatccatacatcgctccagctccaagaagattggaatttgtatgtctcttgtattgtactctggtcgtgctcctcatggccaaaaaaccgaatggatcatgcacgaatatcgcttggacgattgcgaaaacgaaattcaggtacaacatatcacaattaatgtttaactctcgaaatctctaatcataatgcttaaagtggatttatcattaatgtgtaatttgcaggaagatgggtgggttgtatgcagagtgttcaagaagaagaatcatttcagaggatttcaccaagaacaagagcaagatcatcatcatcatcaccaatacataagcaccaacaatgaccatgatcaccatcatcacattgactccaattcaaacaatcattctcctttgatcctacatcctctggatcatcatcaccaccatcatcacattggacgacaaatccacatgccattacatgagtttgcaaacactctgagccatggctcaatgcatctacctcagctctttagccctgactcagctgcagcggcggctgccgcagcagcatcagcccaaccatttgtgtcgccaatcaacactacggacattgaatgttcacagaatctactgaggttgacttctaacaacaactatggtggagactggtcgtttctggacaagcttctcactacaggcaacatgaatcagcaacagcagcagcaagtgcagaaccatcaagcaaaatgttttggtgacttgagtaacaacgataataacgatcaggctgatcatttgggtaacaacaatggtggttcttcttcatctccagttaatcaaaggtttccgtttcactacttgggaaacgacgctaatcttctcaagttcccaaagtagatcaatcggatttgttgaatctcatgtttttcgattttattctctctcttttttagctgtgcgaacttgacacagcaaacaactcacagttcgaggaatctgtatgtatttatgttttgtataattctgacttacatttac

SEQ ID NO: 36790 - DNA, 7135 bp, Arabidopsis thaliana landsberg
  unsure (1)..(7135): unsure at all n locations
gattttgatcaaagatttacacgagcttcgtatgtagaggaccattacactatatcactagaatctattcccaattacagatgcaatgcacaataaacacaaaatgttaaacgaaagttggaagatttacaaaatgggtttcttaaagaatcaaactttagaatctatgggtcatgattgaatcgaaaaaaccctaacctgacagagacgagcagcgagtgaagcagctttcttagcagcatcaagctctttctcgtaagccatcgatgaaacaactctgagagtaacaaatgaaggagaagaagacttgcgtccgaatacagaaacgagacggttcgatgaatttctaggtctcgaattcgttcttactgctacaaatgattgaagcggagccttcgctgttcgaaaacaatttatagacatcattcgcttttcaagaagataaatatatgtcttcacattttctgattgcagagacaattattattacttttttgaatttcccatttacaccagtgtacttatttattctctgaacttaaaccctaaactttattttagatcaagaaaggccatatttgctctgttggtttaggggtccatgtggcaccaattgaaagaacaagtacaaacggtgaaaatcataaaaataaaaaactttagtgatcttcgtagattggttgttgagttttgggctaatcgcacgtggatgttgtggttgaaacataagtgaatttataggtggtgaagatacaaaaaggcttcttgatgaatgaagaagcccaataaaaacggttctgggttaatatattttgagggaatcaaaagcccaaataattttcttcagacaagagctacagctttgccacgttgtccacatgaatcatgttgaaatttggtctatgattttgggttatggataaatcattaatgacgcagagacaagactaaaaaagatttctagattgatgatggcgtgtgagagagcaaaatacgttttgattatttgccggcgcaagcaaagggtcacgttccactaactntcaagattcaacanaacccactttctataagtttatatgttcatttttttctgctaaagtatttttatatgttcatatttctcttttgcgccatctttttataatttaatcttcctacagaagataatctccaacaaaagttttttcttacaagaaagattccgagaagtcttttgtgttttcaacaaactccaggttgatatatacttgccacttgtgtaactgtatcttttattcttgattttgattggtttcttctccaaagattggatttctgaaggttcttgtgctgcagggttttttcaatgaacatgagcaataaacgtaatcagcaaccttcgtatattgctgatcatttcagcagtttggatcaggtctcataaacttacttagttatttcttgattttagtctctttcatagtgatgaatttcttgtgaactttgctttttaggtgataacttctctgagagaagctggacttgaatcttcaaatctgattctaggaattgactttaccaagagcaatgagtggacaggtaattatttgatttgataaaaaatgctacacatgtttacgaaaagattcaatggttttggttaatgttctgaattttcattgcagggagatattcattcaatagaaaaagccttcatgccattggtaaaagacagaatccatatgagaaagcaatatcgattattggtcgtactttgtctccctttgatgaagatgatcttataccttgtttcggttttggcgatggttagtttcttatttcttgctttcaagatgaatgaataagataaaccaaagttcttaatggttttatgttttcttcttcctgcagtaacaacgcgagatcaatatgtattcagcttttatcccgagaacaaaagctgcgacggattggaaaacgcagttaaaagatatagagagatcgtcccacatttgaagatgtccggtatttttgaactttcaaaaatggagcagttttgttctctcttatcgtaaagattaatcagtgtattcttccctcacaggtcctacctcgtttgcaccggttattgatgctgccatcaacatagttgagcagaacaatatgcaataccatgttctcgtcattatcgcagatggtcaggtcacaagaaatccagatgtgccgcttggtcgacttagtccacaggaagaagctactatgaactcgataatggcagcgaggtaaaactattcaataagctcatattcatgatcagacttcatatgtatactaatgatgtttgatataaattttccagccattacccattgtcgatagtcttggttggagtaggagatggaccatgggacacaatgaaacaattcgatgacaatattcctcaccgtgaattcgataacttccaggtaatataataaaaccctgaatagctctgttttgttcctgaaacatgaatcatgaaaaactgtgttttgttccacagtttgtaaacttcacgaagataatgtcagagcacaaagatgcggctaagaaggaggctgctttcgcactcgcagctctcatggagatcccttttcaatacaaggctacattaagtctcaagtaaatgcaataaaaattttaccgttggaaactacttgtatcactcactgtttatggtcttattgcattagattctttgccaactaaaccaacctttgattgtgcttatgaacagtagaaaaccagtgcgcagttcccatcagcaccacaagccactcccgccaccaccagaggttatagagcgtgacaatgctgttagatcggtgccaaatcagatgacagaaactgcagagaaaagtgacagactcgctccttccacagtgccggtaaatactctattatttctgcctttgtttctgttcttttgtcaatgagtatactcagtttctctgatactgagatttacattccttttgtttttcaaaaaggtatgcccgatttgcttgacgaatccaaaggacatggcttttagctgcggtcacacggtatgtgaaaatttcaaaggaacaattatactcttacttgttctatgaactgtactgcttctagatcgattttgtgacatctccgatacttttttatttcaaataaagacatgcaaggaatgcggagttgttatcacaacatgcccactatgcagacaaccaataacaacaaggataaggctgtacacttgactcggaaaaattcttagagatgagacaaattatatggttaagcacttgagcttcatgtttatacttctgtagaacattgtacagtccaagcagaagaattgtaaagcataaatctcgagttgtagttcatatgtaattcttagcctgccgaaacaaggagatatgcgagaagagttctctttttgtattaatcaacagctacgtacaaataagccgaagaggtcctttttataacattccaaagagacctacaagttctaaatcaagcggaaagtgtaacagcaacgataccaatggaaaaaagagagagctaaaaacaaccttaaatacttattagaagctccaacggtcgagttgctgcctggctacagacatgtatttttgtgctttcattctccggtaaaatattggacaatctcgactgtaaaagaccaataagaaatccagaaaggaaattggatcagaacctatttacctgctgaaagatttctaaaagaaatcgatatcgataaaaatataagcaaacctggggcacaagacatcttgatgaagagaggcttgacactcctggcactgtgtccacaggctcccaaaaacctcttcatgctcagccactgaataacacaacgaaagtatcaaattttatagatatatcaaagagtctataggaaagggaaaaacggcagcataccttgagacacgtttttgcaatataactcggcttctcttcccttgcaacttgcgcatagtgttccattgctggttgaagttaaaagcgaatattgataaacagatcccatatatgaaatcagataatacataggcaagggaccacaaagtacctgatcggaactttgcagccaacacagctcagttgttttttagcaaacttcattataccgctgtttgaaggagtagtgattgatattgacctcgtgtgacttccatggagaagctccttgctagcatttttcaggactggctcaaaaatcctaagaagtggctgaaaacaacatctcctttaacctacaatcaccagaataaagagtatagaataaacttatacacaaacgccatgttgaactgaccttgctaatctgattctccaagtagtaatttgggtctatagggatattattctgtagcacgtagattggatcttctgatcgttcataagcctatcagacgtcaaaatgagataagcacggaagaagagaatgaccttaacatcttatggaaaagctaacacaagcttgacatgaaaactaccttggcacctttagcagcttttatgataacatacggtactcgatctccaacatttggcgctgtagcagcatccctctgtcacatatgtaagcaaacactgtcatattcacatgatagatcatcagacaccgtaaaacagatctaagtttcagagcaacctttgtatgatattatatattcaccaaaaagccggaaaaaaaattcatatattcagcaaaattatgcatgacttaagaaaaatccctgcacttgtgcagctataaaaagacgaccaaagaaccatattaaaatattatacaagccaaaaattaaaatttaattgtttagcactcccatttttcagtttgagagtgtccatgagatgctggaattagagtaaaggaacgaaaattcccctagacacatttgtacatgtttcttcacgaacggaaacggtcaagagttatcttaacatgtaatgaaaatgcttaatcctgcaaatgatagacgaaaatagataaagagtaccacaaaccttacgcatgcgttcagcaagttcaccatgagctgatttaacttcataatcatctcctgttttcgttagaccctatgatttgaggaaacacatcaggagcattatccatttgattcttgttttagttttaacagatggctttaatcattaaaatacactttcaggcgatacaaacatcacaggacaataaatcaagtaaaacatattaccttagtaatcaccaaaagtgacaagtcaatacggttcatgagaagatccgaaatggttttcttgacattttcagctgcccctggaacatctctatcaataagtattttgttaagactctcagtcacgaggttcttaaccagtaaacaattatcccttcgtactgtctcgattcctgccaaagtcggtgatattgaaatttagtcaggaaatgaataagagagaggctgtaaaatcacgaagatttacctttggtgtccattttgtcaaactgttgaggatttgtccatagcaaaccagcatacctcttcttgttaatgagaagatatgggaaatagaccttttcaaactccaatttgatgggctttatgacatcatacacaatcaagaaacagagaacgattcagcctgttatattttgttttcaagaaatcacgtaatcttgcacctctaccccaaggattagggagaaccggagaagtttaagacatgctcctagaaaatcacttactttgataaaagttccactaatgtgttctgcagcttccctccccaaggtcatcgcagcttctacatccgatactccaaattgcaccatgactgaatccgtgtctccataaatgacctaatacatcatagtccatcaaattcgagaaatctaagagcaaacttaatgattcactcaagtcttttcaatacaacgaataattcaatgaacatgtacctctgcattgtattgaaaccctcccagtgttgtgaatttgtcttcaacaagtttctttgtatgttcaatcatctgacgaccttcaaaaagatacaaatccatcagaacgaacctaaaaggctacgtgtctagaaaagttgcagtttcacaaaagaaataccatagctagttacactcgaggatatttctaagcatggtaactgcccaacagtggctcccgtaaacccgtagacagaatttgcactgatctgagaaaaaatagaaaacaaatgtaaaagagcaatttacagggaggatattgttcgaaattttccgaggattgtaatcatttttctgaatgaccaagttaaagaagctggcagtaaagaagttcaccttcaacgctaactgtctaccatctaaaacagccttctcaaggggatccttagcctcctagattagacaataccagtttcaatagtagtagttaaaggctgtatacagatacgcacacactgcaagagtttcttcggaatcaaatgttttacctttaaatctgctttagctctcttacggacagtaagaagctcttcgagaatttctggaagtataccctgaaataaattattcattttgttaataaactgctgtcttccctgaatttattaattggttgtatttcctgaaagaactcattcaacagaatttgcggaacttgaggataataaaaatctaactaaatgcggacaccttttgcaaagtttgcttaacaaatgtttcccctgatggagttttagtgacatgttcaggtggaagattcagtttgcgtacatcttcaggtgtcaccttcaaagacaagaacatggaaataatgctcccaaattaataaggtgtataaacaatagatgataaaataaatagaaattgaaaagaaaatatcaaaagaattaccaaggtgcagtagcacagattatatgccatcataattgacgggtacagtgaagcaaaatccaaagttgcaattggcttttcatagaaacctgttcttgcttctaaaacctgaatatcgtttgacatatccaaaacaacaaacatgtcggaacagtggaattaatgcaaccgataggccaaaaggaaatgttagatccataaattacccacttacagttgcgccttcataag

SEQ ID NO: 36791 - DNA, 1848 bp, Arabidopsis thaliana landsberg
  unsure (1)..(1848): unsure at all n locations
tgcagaaaatgttggctgatatactttctgtcctggcactgaccatgtctgctgaaggtgaaagggtatgctttcttgctactgttgtaggagtttcttgcctattgctatttgcttcacattcatttaactagattcccttttgttttcctcttatgatatgccttaccagatntgtgttttgtggttcttggtagaatttgacttaagctatttgttgctgatcctttgttatgcaatactctttcaggaaagcttaaactataggttgaatggatcagagagtgacatcggatcgtggggtcacgagtatgtcaggaatttggctggagagattgcaaaagagtatacaatacgtcaggttagtaaacaatttggtctttggcaatgttctttagctcgaggagtttcactcatattctggcaacgtcatggatattatggtttgttaatgaatattatgacaatgggctcgttactgaatatggttataatgctcattctttttgttatatcagggtgaagagtcctctattgaagacttaatggatcttgtgcagcaaattgtttcttttcacatgaaggagagatccttgtcattcttacttttcttgtaataacacggggtccattgtatattaatataagtttcattgattggcgtgaaatttgcgcctctcgtttttttcacatttttgaaggattcccttttgttctttgcagcataatgccgaaaccgattttgttgtccttttaatggatgttgaggatcttgatctcttacttgagcatgttgacaatacaaatttcaggaggacgtgcaactatctcacgagtgcagcaaagtaatttcaatatgtttagcttattcattcgactggcgtttcacccttaattatgttattttcatatgagacaagctctcatgagctttgcttggttatcttgcacattatcagtcccgttgatattgtatgtttttttccaggtatcttccaggaccagatgacatgttggttctagatattgcttacatgatctacattaagtttgcagaatatccaaacgcgctgcaaattgcattatttcttgataacatgcaggtatggttctaatcttcatataaaacttaatatcctctttctgcaacatgggagcagctgggaaaagctcttctttaacttatgtatttttcttatgatatatatttttcctttgtgcagtatgtgaagcaagtatttacctcatgtaccgatctggtaaaaaagaaacagttctgctacatgattgcacgtcatgtaagttcttaataatttaaattagcataaaggtgcagtacctgattttttattttcttatatttatttttctcttgctatttctccctgcagggtataacctttgaacttgacgatgagatggttgcagatgatgatgaccgggaagccctacaggatattgttaacaacactaagttaagtgaaggatatctgacccttgcaagggatattgaggtcatggaggccaaaacgcctgaagacatctacaaggtaaatcagttttaatgtgttaggcttgctactcatttatttagttacaaattatgtttccctcagtctttgacctgccctttttgaattttataggctcacttactcgacggcagggctagctctggtgcaagcgtggattctgctagacagaatttggctgctacctttgtcaatgcattcgtaaatgctggttctggtcaggtatcgttgcagattataataaaatagatctagtggaagacgtgtcctcttaatatatttgcttatcgcaggacaaactaatgacagtaccttc

SEQ ID NO: 36792 - DNA, 1953 bp, Arabidopsis thaliana landsberg
  unsure (1)..(1953): unsure at all n locations
aggtcgactcatcccttttcaattggtttaaaggctatcaaacctatgtctgaaaagtttatataaattgaataatttagaatgcatatacatatttttatcattcgtgttgaaattagaggttttaaaggcttacgcggacaggggaggtagcgaagacaaagaagatggtgacgtaaacgagttccatgaaaagaccannnnnnnnnnnnnnnnnnnnnnnnngactgtcgggctggacgaaaggaagtccgtaaaatgtccacatcatgcagtttaaaaccgtagctacgtatggatctggcttaaactcggagaccgatttcatcttccatatcttcaccatcgttggtctgcacaattttcacatatgtcattgcatgcaacaaaacaaaaaaagatttaatcatcatgtgtgcttacattggagcgcagaacaagccgaaagaaatcacgtttcctaaacatataacagacaaacaaagacatgagcaaatgtttttgttgttgattgaattaaactttatgtttgagtaaattgtggaggacttaccaacgattccgacgatcgtccgggcggtgtgggggtccgtcattttctttggttctaaagaagaattctttatcttctacagattttatcaaagaactaattgttattttataaaaataaaagaagaagagaaacagaatatgttgatgatttcgattcttcttttcgatgattcttgtttataatttttttctttagtactgcgtttcttttttgtttgtttctgatttgtgatgtgagttttgtttgtttgatgaaatagctttttttttttggtgtggtttctaggttctgtttttggttttttgatatttggattatttttggtttctgctttatgcacagagaaaaaagaaaaagtggattttaatagtgagtctgtgaatcagcagaatctgggtagagtaacaaacgcatgacacgtggtttcaaatttgagccatgaagccgttgactccgctcgtaccccatgcatgagaaacacccggctcttcactcacattaatacctctgtctctctctctctctctttctctttctcaaacataattacatttactattactacatcattatgtataaagagtttgttgtctcatattcatgtcatagtaaatgttgtgtagagcatcttgtatagtatatacaataatacaaagcaagtgaatatgtgctgtaaccaaaaactttgttaatagcaacttgtattgatgaataaagagaagagattttagttttactctctttttaggtttactatgtaaacactttgctatatatgaatcacttaatattcctttctcatcaagctacgaaactgcaaacgaattgaatcaagatgaagagaaacagaacacacaagcctcaggtttcagtgtgaggcgcatcaatcgaaaatactaaattaatctctcattgtttcttaatgttttccctttaaatgtaggtcggttaagacttgagatctaaaacctaatgggacatgaaactgggctgcttagcttataaactcttttgtattgccaatatatagaaaatatccaaaaaaacaaatgtcataaacccccaaaaaatgtcaaaaaccaaaaatatatatgtgtttttcttcgttcaagtttaatgaaatagaaaactgacaccatgaagagaggacgccaagagaagaagacctcacgatctccaaaacgacgacaacaacgtcagaacgaaatctccgagagagaaaattcaaacggtatacatatccctttcgatgtaataaccgatatactctcgagactccctgttaagtcacttgtgaggttccaatgtgtatcgaagctgtggtcatctcgtatcaccctcttgatcatgactcggtcattattctcgccctctacttatcctactgatgatatatc

SEQ ID NO: 36793 - DNA, 1735 bp, Arabidopsis thaliana landsberg
tgttgactcatgatagaaaaatcttttgttttgcaagtcagatcaacatttttcaccaaatataacaaatattatatgctaaagctatccaactagctctaaatttgctatttctaattgttggccctatctcacaggttttcattctattggagttcaagaacacattcggtaaaaccacacaaaacaaaatagtgtcacaactaatacaaccaaagctgcagaaacacacacaacatctttctaaaacaaaagaaaacgtcttaacattgttcatatataatggagtaatacagataagatacatcaaagaataagttaccggttaaaacatagctcagaccctccggtgtggatgtatccgaactttcagcaagacgattaaaatcttgttgtagtgtcctccccaaaccaagcaaccccacctaaaacagaaagcaaattctcaatctcatgttctgaccatacgtaactataccaatgaacaaataccattccttgaatataacaaagctacggaaaaatcataacttccatagttctataagagcacagtctcaatctcatgttcttatcatatgcttagctattccaatgaatcaatagcattcgtagtatataacaaagctaagctatggagaaactgtagctaaacctgtagcttaatgacgctagttttctgagtatctgttaaaatgctatcatcctgtgaccgatctgagaggaatccagagaccaaaacaaacgcagcgaaaccaaccaaaatcaaggagaagctcgaaaaaccaccaaacccaaaaccaaccgccgggcccacaaaacccccaccgaaaggtgacggtccatagtacggagcggtcctagcagagtacgaaaagctcggattcgatgttctcggcacagaatacgattgcgaagaagaagaagaagagctccgagacctcgacgagaaggaattaccaccaattctaccaccagacgcagctaaagccgaattaggatcatagaacaaaagcaaaccaagtaaaaccgcagctatagcaggtttcttcaacgaatctaacgcttttttgacctgaatcgcgatttgttcaaatggattgaaattggatctcaaatccccatctgacccagatgttgattgcttgtatttgaaaaagatataaagacgaatcgaatttgatctcctttgaggtttggagtagagaagaacattacgatgatggggtcgttgtgtgtatgggagaggttgattccattgaaatggagttaattccagaaaggtggaagaagacgccatgaacgattgttggttgatttctggagaaatcgatcgctagggtttatgtggtgagcgatgaagaacatttggggaagaagacgacaaagatagtgtggagaaaatatatttggagggagattttttttccggtggattttaggataaagtatggttttgcaatcggttgatgcctcaaaccggtttattataagtaccgacctccatttgaaatgagtcagaaattctttttctttttgtcggtcaaagtccattaccaagctcaatgagcaatactaagtccaatacaaatgaatatcaccatggtcttatgctgctttttatgtaaataaaaactctgaaattgaaagaggcactccaaggctagtaattaattacaaaccattagatactgctttaggccatcttcattggtaagatactttaaaagttaat

SEQ ID NO: 36794 - DNA, 2110 bp, Arabidopsis thaliana landsberg
  unsure (1)..(2110): unsure at all n locations
cccatgggcgggcgggtcaaatcaacaaaatataaggttaggcatacataccaaaccaactgagatcgaacacggtattaaccgaaaccaattcggagcggcaaccaaaccgacccaaatataaatcaatctttgtaagttatattgttccgaagccaaaaactaaactgaactgacaaatgacaatatcttggttctaggtttctaactccgtatacagtttgaaaaccggaaagcgtaaatgcctttagagaaaagaaaagaatgattaatttacctgatccatgcgaggtctacgtggagctgtggaccgaacacaagctgcggcacaagcaaccatgcgagccatctcttctttgtcatactcattattcagttttttatcaaccacaacctcaaagtttcctatttcagatacttggttaagcaaaggtcgtgcctgttccaaattattcacacataggtttttcttcattcaaaaatcacattgtaaacattatgtgaaggttagattatttgtgtgtaattatattagttacccaatcaaccaagctgttatctgcatggacattgtttacatcaatagggcgacgtccagttattagctccagaagtacaacgccaaatgagaaaacgtcagacttttccgtgagttttccgcttgaagcatattccggagccaaatacctaaaatccaaaagtttcataatatgtaaagattcacataaacttttaacaaaactgcataaatgtagatatttggtagcttcaagattatctttacccaaaagttcccatcacacgtgtagatacatgagtatttgtatcagaagcaatcttggcaagaccaacgtcagcctcctgaacgaaagaagagctttagtgactcaaattacaaaaacacttcacaaaacatatcgagtaaacataccttagcttgaaatttgaaatcaatcaatatgtctgacgccttaatatcacggtgaatgattttcggattgcctgcaaatatttatatatatacctcagtaacaaacaaagacagtatttatcaaacatctgtacataatttttaaggttttagacttacaatcttcatgaagatatgaaagtcctttagcagatccaagagcaatcttcaatctagtactccattccatcgtaggccgtcccttacctataacaaattcaattcccaaacaaatcatcactaactgaaaacaacaaagcaatgtaacaaaatcaaaagaaagagtttagttttgttctaaccatggaggtgaaactcaagattgttgtttggaacaaactcatagacaagtaatctttgaacaccggccatacaataaccaataagagaaaccaaatgcctgtgatgaactctgctaatgatctcaacctcagcctgaaactctctctctccctgaccactaccagctttcaactgtttcacagcaacttctttcccactaggcaatatacctttatgcacataaccaaaccctccttgtcctaacaaattagcctcagagaagccattagtagctctcgacaactcctcataagtgaaagtgcttttagaaaagcctaacacaagccctggagatggtggaggaagaaccggaagatccgaatagtcagaaccaccactgctactcatgaatgctggtggtggaggtggcgnaggaggttttcgtggtggagatggaggcttaggtggtggcaatgacgtcactacatgattatctgacggccgtgacgcgttttgttgttgccaatactgttgttgaccaccgtaaggtcctccagctgataaacaacatcaaatctctgtaaagtttgaaacttttctacaaaggtaatctctttaacagataacaatgcataatcaagtatcagatttgagcaattcgtatcagaattgaacaactatggttaaatattcgatttttatttcatgaagttaagatctttgaatttacctttgggaccagaaggaggaggaggaggaacatagtaagcagcttcatcgtcgtgtcttcttcttcgtttcttcttacagagaagacaaatcagagtcagtataacaagaatagcgactcctcccatg

SEQ ID NO: 36795 - DNA, 3800 bp, Arabidopsis thaliana landsberg
cagagaatcgtctttaaaactcagtttccaaacgaacttacactcgttcaatctcaaaccaataaggattagtacgaaagttagaagttttggtgggaatcggagagagccgaaggattcaagatttgtcgatgaaaatggcgtagttgatgaaatggaaggtttcttagacaatctctctctcgaatacgactccgtttgggacactaaaccctcttggtaagtctcagttaaatttccgattcattttagggaatcgtatttttggttcaatatatggataagaggttagatagagtttggataagttcacttttaagtggaccaatccttaatctttattagcaattccagtgatttatgcctaaagaagaacttttttgaatcatatgaagctgaatgtattgattgatgctacttagaacaagtcttacacaattgcagtttcatgatttatgttgggaataagaagatataagaaaaaagtttgaatcttttggttaggaagatagtgaagaaccaaaatacagattatgtaatcgtaattgggttgtttaacatttcaacctcagcatctacggctttaaatatctattgatctggtgtgtatttgcaatcaagaactttacggttcttcttagacgttttcagggcctagtgttcttccgtatggttttgaataagcaactggctatgtttctcaggtgtcagccatggacgataatgttaacaggtttttcaatagtggcatgtagctgggtaatactacattcggtcatagtttcgtcgcttgcggttggtgtaattggtgcttggtggtacattttcctttatagctacccaaaggtatgattttcccttccatcatataggaatgaatctgataacaacctctccttttcattgccttactaaagaaaagttcgtagctctaatttactaagtccaagttaaagtaaaaatcttgtttaaacatcttcagacaatgctagtttctataatcttagtgaacaagactttactttggtctttttgagccttgtctttgagattctggtggtttttttgtgtactttggttcagtcgtattcagaaatgattgctgaaagaaggaaacgagtagctgatggttttgaagatatttacggcaaaaacaagccttcataggatcttctcaatgttcaaaattacattcgtttcccccacaaatcttcccttctgttgtgtgtataatataaccatcatctatggatttatctcaatttcattcacagatgtttggatacataaatcttgatttcagagtcctatgtagtgggcattaaaatcgaattgaaccgattatacaaaccgaaattaacccaaatataccgaaacctcattactgaaaccaaccgaataaagtgccttcgaactaaataaaccaaacgaaccggaccaattttagttcaacaaaatcgacaaattcaaatcgaaccgaaccgagccgaagaaccacaaatacgagaaatgaggaatgaagggtaaaaatgtaattcctaagaggtcatggtcaacggaatgtatatatatgtaacggtgagagattcattgagatcatctccactctgctaaatccgacgagagacgacgatgccaagcggtggtaacggagcaagtaacggagtcgctaacgcgaattccaccggtaacgcaggaacaagcggaaacgttccgatatataagccataccgtcacctgaaaaccctagaaggtcacacggcggcgatctcttgcgtcaaattctccaacgacggcaatcttctcgcttccgcttccgtagacaaaaccatgatcctctggtcagcaacaaactactctctcattcatcgtaacgaaggtcactctagtggtatctccgatctagcttggtcttatgattcgcattacacttgctctgcttctgataattgtacgcttcgaatgtgggacgctagatctccttatgaatgtcttaaggttcttagaggtcatacgaatttcgtcttctgtgttaatttcaatcctccttcgaatttgattgtgtctggatcgttcgatgagacgattcgtatttgggaggttaagactgggaagtgtgttaggatgattaaagctcattcgatgccgatttcgagtgtgcattttaatagagatggatcgttgattgtttcggcaagtcatgatggttcttgtaagatttgggatgctaaagaaggaacttgcttgaagactctcattgatgataaatctccggctgtttctttcgctaagttctcgcccaatggcaagtttatactcgttgctactctcgatagtactctcgtaagttcaaacttcgtcttggcttaataatgaattgaagaatgtagaaatatttaggtttcgaatttgcatcatgtgtgatttgggatatgaacaagaaattaagagttagtctttgatgttgttgatcttggtaacattttgatacagaacatatatagtaactatgaagaagaaataaagtgttgaactttcgtatagtcttggatgggttcttgcatttgtgttatcttgtcgatcttgagatcatattgatgtagaagatgagactaaatggattgattttatctttgtgtattttaacagaagctgtcgaactatgcgacggggaagtttttgaaagtgtatacaggacatactaacaaagtgttctgtatcacatcggcgttttctgtaacgaatgggaagtacattgtgagtggatcagaggataattgtgtgtatctgtgggatcttcaagcgagaaatatactgcagagactagaaggccacacagacgcagtgatctcagtgagttgccatccggttcagaacgagatatcttcatcgggtaatcatttggataaaactatcaggatttggaaacaggatgcttgaaaaacatgaatatatgtgtatggaattaatggtaacaacaatagttgagattgtgaatctgtttgatctgaacacactattttgatgtttcggaatgggatgaaatctcttgcaagttggtgttaatatttatgacagagatatcatctatgttctctccccaatatgtggatgatacttactttaaaactaaagctttttaataagagctactaaactaattaaatcgtcaaactaaaaacagatgtggatattgttttcaagaaaagaccattatcccaaaacgtagctgttagatacagatactcagcatgaaggaaatgatttggcctctaggattagacaataatgcagaaaaaagatatttgtgtggaagagttataccgagccttaaccccgagatcagaatccatgagctaaaaaatatgttttttactcggcatggtcacttggcttaaaaatggagagaaaattcaaaaaaaaaattatgatgcatgttacaaatcagagaagatcaaccaatagatgggatttttatggcttgcaagtacttctctaaccttttctcatcttgaggatgagagtgaggaggggattttcaaaggtctagagcctagagcgaagactgagcggagtaggtttatagtggacctttgttgagaaaactatcaagaagttggggtttgcagaaagatgattcaaatggagttgtttatgctttgtctctgatgaatcaaatcctctccaaaattaccagtttgaatcaggacaaagggtgaatctctcaaaatccatcatcacatttgaacattcactttctaaggatatataaaagaataattaacgtttaagaagaattt

SEQ ID NO: 36796 - DNA, 3044 bp, Arabidopsis thaliana landsberg
tagatctgaatttagatgttgatatggaacaatcaagcccagttttgatgttattggaacaatctagtgatcccgtagggttagatggtaaccgaacctttccttttttctcttctgtcaaattaaattcgcctttgtctagagatttatggagtagcattgggttttgatttcaggaaaagttgtattagggttttcattagcatctccagatctagtaaattgtggcgcttcacctgatttacctagaggtagctatgaagattcaccagaattttctaagaaaagaagattttctactgagctttctctagagaatggaattgatggttctactactactacaagacttggccgtaaaagccaagttgtgaaattctcagcaatctgtcagacatttggctatgagttgtctcctgagtcttcttttgagttaccttctccacctggagactttcgggagagtatgactcctgttataagtatcaactctggttctataagcacggatgtgactgtggaggatgtaactttcttgaaggatgagtttttcagtggaggtgaaagtattacaactgatgctgttgttggcaatgaagatgagattttgttgtatcaaacagctcgtcttggtaatttcgcttacaagtttcagtcactggatcctggggactacttcatcgatttgcattttgctgaaatcgagttcactaagggtccaccgggagttagagtttttgatatattcattcaaggagcaaaggcaagacatcatcaccgaaattgagcttttattttcttcttattcatcacatgtcatttatgattcgagtggaaaactattgcaggtcatatccggccttgatttgttttcgcaagtaggagcaaatacacctcttgtgatagaggatctaaggatgctcgtaggtagggaaggagagttatctatacgattagaaggagtgacaggagctgcaattctatgtggcatttctattaggaaagagacaacggctacctgtatgttgctttctaacctttttgtgtcttggacaattctacctaactttttcacaactctgatcacagcttttgttttttagatgttgaagaaactggaatgctagcggtgaaaggttcaactgacactgttctgtcccagcaaactcaagtgagagttattccacaatcttagtgtttctagttgaggttggggtggttacaaaagttgcaaatagttaaactgtcatcctctttttaggaaaatgttgtctgcagggcagaagaagaggctgaagggatgagaagtgactgtgagcagcagaggaaagagatggaggatatgaagagaatggttgaggaacttaaactggagaaccaacaaaagactagagaatgcgaagaagcattgaattctctcagtgagattcaaaatgaactaatgcgcaagtcaatgcatgttggttctttgggtatgtacatctctctccttcatatttcgccttccttgttatcgttaaagttgacatatatgtacttgttcataaatagcgtttgctgtcgagggacaagtcaaagagaagagcagatggttctcttcattaagagatttgacaagaaaattgaaggtacacagaagcaaacttaaagtacgataagcaactgcaagctcttatgcctcattttaacgaacgcggatttgtagatcatgaaaatggagcaaattaagctgttggaggaggcaacaacatacaaacacctagtccaagatatcaacgagttcagttctcacatccagtctagaggtgagtctttgtcttcctatcattttgacatgcagctagcacttcaaagatatagtaatattgtgtttctgtgaattttgatgagttaaatttttttttcaacagtgaagcaggacgcagaattgcatgaaaatctcaaagtcaaatttgtagcaggagaaaaagagaggaaagaactatataacaagatactagaactaaaaggttggtgtctttatccaatataacttgtagatggacccccttgactaaacttggcagcctaacaacttacagtgatcatttcttcgtacaggtaacatcagggtcttttgcaggtgtcgaccactaaactttgaagaaactgtagcaggagtatcaatgggaatcgatgttgagtcaaccacaaatggagaggtcatagtgatgtcaaatggttttcccaaaaaaagcttcaagttcgattctgtttttggtcctaacgcttcccaaggtgatttttggcatcaatgaccatttcctacttgctttctatgaaatctcatctcaccaatcgacatgttgtttcctatacttttacagctgatgtttttgaagatactgctccctttgctacgtcagtcattgatggatacaccgttagcgataccacctatggccagactggtactgggaaaacaagggcgatggatgcagctccactatacctgaatgcagactatagaacactggataatctgcaacgaatcctgaacgcacgagaacagcgcggtcaaagggcgttcaatgcccgacagggcaaactttgcctccggcacgcctgtgttgcgcaatcttgcccattcttgcccatctttgcctattcttgcccaaatagttataacattttttctttgatggtttatcaccttttgggcacatatagtcaattgaccatgtatttgggataactttctctcgtttcggctttgtcttggatgtccttatttcgagctagactcggccaggttcattttttccttggccatgtctttggctttcgtcccttaactattcttctctctttcgggtcttccttggtcgttcctcgatatttctcgcttggccgcttacccctttagcgagggtctctaaactgctacctgccccactgtctccagcatagatatcgtcaccaggtaagcctcacagcccttctcgatcatcttctctgcctgcactactgagatgacaagactcccttaggtaggtctcactccc

SEQ ID NO: 36797 - DNA, 4763 bp, Arabidopsis thaliana landsberg
tcgacaaaggcacaaaagaaggatttaccttgacgtgggtgaagaggtgttaaacgcctcacttgctttcttactttctttcaaacactcatctgcagcctgtaaagcagcaaccgccatgccatgtgatttctctgtgtttccttcatcaagaatcagaccgtggtagtagtaagctgcagcctagtattacaaatacacagagaaaccaagtgtcttagtgttagacaaaaattagagccttgtacagaacagagtttctcactcatctatgtgaatttcttaagatccaatgatgtgagaaagacgtccaaacagtaccttagcttcaacatacttccacttaacaaagagcatatgcttttcgccccacccgtttgctaatggaagattcattaagttatcttgtgcctaatcaatgtccatcaatatactattagagagcttttatcgcaagaaaaacattacaaaattaacaaccagaaatacaaaagagagtctgtcaattcttccttgagcctcagaaaagaggaaaatagtaactagctcaaggaaggtttctactttcttgttgttttctcttttttattttttggcacgtaaacgagtactaagagtataaagttagtagacacttttaaagatgatatttcttaatttaaggttcaactaattaagcaatattagtcccattatcctcctcaacataagtgatcagcagacacgagttagtgacacttttgtgatggtgaaataaccactttcttctttttgctctttcattttggttttggttttttgtcccattattctaaagtggataatacacactactcccattaagacacctaatctttctacgtttcaattcattattataataaagtgatgaccacaaaagttacacaagataacaaaatttagtaaggtaaggatcacctgctgccagtatttcaccatttcacatgaaagtcttcgcttcacggcaagagtggcttttgcactatcaatcgccatcccaagttggatatcaacaccctaaattagaaaatttataacttaaatagaagctacaaatgtctattaaaatactctaaccatcactacttctaacctaggctgagtttctaagtagttgaacatgatgacgatattcacaaataaactaggcaacacatgtagcaaatcataattagttaatatatcccaaacattgaaagtgattctacctggcctaatgcttgcaagcaaagtgcacgtaaagctccttctgctaggtcaattggtaaacttctcctgtggaaaaggcaaagaaaaacaaccgtcgtgtcagtagagtcgatcagagctattaaaaactgcaatggttgacataagaaaactgtcatatatgaacctctgctcggttgaaaaatgaggaagaacatgcttcacagcacagtccaggtatccagctgcttttaagaagatatcgattgaagctcgcctattttctagaaaagattgaaacaagcatatcgttaagactgaaggacataaccattacatcttacagttatactaattgagacagtagaaaacatggacattacattcctcctactttctacctgcctgccttatccatccatctagataatcctagaaacatggatctttctataaactagctatcaattgccttcttaagagcatcaaaaggaacattctaatctattgttggattactaaagaggggtcaatacatctgacagttccatacatgctagtttttagagaagtggtgcttatgaaatttcaagaaattgtgaaggaaaaaaaaaaaaactagcatgtatggtacttctcttacgaaactgaagaagtgtgagcaatttggcaggtcttaccttctgatatttttggatgatagccatcactggaacctctaggaagaagcagtaaattggcttgtgacatttgtaacattgccattagatgcaaaaccgacaatatttcataccaaacatttgacatggctgtttcctggtagatgtaaataatcttgtcatatactcacaaccactaatgtaaaagtctaaatcttaaagtgaaggaaagagcaaaacagcacaataagggataaacagctttgactaccgcacctcttcttcatcttcctgatttacccaattaaactgtactttgaattgtaaatggctacctgaacatatagaacaatatatgttagggtatctactaccaagcaaatgtcgattattatagcacatacatagtatattaccatctttagttaatcctaagagaaccggtagataatcttctaaagcgtgatggagatctgcgagcgtagaacctcctgcaagaaaccattccgttaagttacaaggggggaaagcagggcaaagagaaacaagaaacagacgatattcttctataccatgctgtgtcttcctcctggttcttgttatagttggtccttcttgatttgccatcacaactattctcgttcttaaagctgtcaagcgctccaccagagtctttggcaattgatcacccagtgactgagaaaactccacgggcttaggtatccttaaaccaggtacatatactgaaacatctccgatgctcgttggctttcttctgtttccaccagtatcattcggccttgatgcaaagcatcccatttctaaagcttaacgaaactacaatcccaacagatgaaagcagaaacagagattaagctagagatgatgaaatgatacttcatggaacatggcacaaagagacgaaaattaataaatgtccaaccaaaaacaacccaacttctttctcgtccactaaattcataagataaagttaaacaagctcacgagccatctgccatactacaaacttcataattctacgtgactaaaactctctaataatttggaaactaatgtccaagcagaaacaaacaagcaaatgacatcgtttgatagatgtggttatcgaaaaccgaaaacaaggcaagagttttgattttctcacctacctcttgacgtttatcagaattattggctaaaagacatataattcaattgatggctgcaaacaaaaaaagagacttaatcagctcaagaaaaaaaaacatgtgactcacagaaaaagcatgaaactttaaatgttctctgaacaaaaatccattaaaaacgagaattttctaagtctaggaagcaacttgacatgaaaaaacgaagactttgagtgaagggtcatcaaagataacgcacggatacatggaagaatcaagaaacctcgtaactggtttaagcaaaaacttcaatccatgaacaaaagaaaacccttaagcaacattttgaaacgagtctatcaaattgagtttcctcagactcgaattgactctggagaaacctcaaaagcccaaattccagacccggagcgaaaagggtatgaatttgaaaaatcgaaactttaccataaaagaatgcttttgctctttcctaatgaagaaaggaaactagagagatagtagtgttggattgcggaatcgcaatggtataaatcctggttcaggggattggagatggtaattaaagaggatggggctgtgagaagagagcgagcagaggatggaaatgagaatgagaatgaagatgatgaagaaagacttgaaaagggcacaaatttcaactttttattataaaaaccaaaattaatgctctttcgacttttatagttacctctctcctacccgagtacggcctatcgtcaaaataatcaaaattgttgacaaaaggggttgattcaaaatatttacaacatgaaaaaaaaaaaaaaatctccaaacctacgtctaaaaattatggaactttatttataacttgacaatattatgtttgcgattggtatgtatcccatatcaaaaattattgaaagtattttcaattttgtttataacgtttcttgtttttataccattgtgatctcgtatcaaaaattgttgctaattgtttttactatctgttaaaaaaatttaccgctttgtgtgactttactcttggtagtatttattaaaaataatatcacggctaaatgttttttcttcaaattatattcacactagtgacatagtttaaaaaaaaaattattaaaaataaaattaaaatccatgaaaattttttattagaaaaaaaaattgattaccaaaagcaagccatgattttcaatttaagagtatgtacgaaccaaaaaaaacaaactacctatatattcaaggtacataagaagattatatataactataaaataaatgtgtatggagatgtcgatggtggacacaccattatcaatacttatcacacaacatgcatacgcatagatatggttggtttccacaattctaaattataaaaaatcggaagctcattgtcaccatcctctctctgaatcgtacagaagctttattttaaatttaaaatatgtaacaattcttgtatagtaaagtgcctcgtacgttaaggtttgtttgttaaacatgtgtatgtattgtttctacatgttacaaaaatatcaagttgtagtatttatactaagtacatccgccttaggccgaataaatatgtgttagatgacatcaaaacgaccgtccctttctaaaatatcattgaatctttagatctttatggttacaatcagtcaatcacacaaaattatgagtcaccaaacaaaagtcaccggcctatgcataagcatcccgc

SEQ ID NO: 36798 - DNA, 1692 bp, Arabidopsis thaliana landsberg
  unsure (1)..(1692): unsure at all n locations
gctaggcgatgccttccgctgcggtacatgcccttacaagggtctgccacccttcaaattaggggagaaggtaactgaatccttcatatctatcaccattgtaaagtcttgttaatccttttaagaatacaccttattcatgtaacttttgttcctctttaggtaaccctatctcaaaacttccttgaagctgacatataagcatgtgaaaggcatcttcatacatgggtgtttctcgccgaggccaaaaccttttgctaatcgcagagtagtttcatcatttactttgtgcgctttcgtataatttgtttgttggtacttcttttattttgtggctctaaaagcttgtagaaaattgtttgcgttgcccacaaagcacacaccttagtatcaatgaagaacggttttgcattggttaaataattatttctctgtctggcttggaccttagttttgcaaacgaatcaatgcattaacatcagagcttgtattatgtgcatcactgtttctttggtaatgtgagctctgaagattcatctgtcgtaatctgtacgaaaagcacaatacgtaaatttgatctgacagatggatctataaaaaaaacagtagtacaacaaaatgtttctcgccactttccctggaaagaaactagtcaggagaccaactaaactcaacccccaaaccgaagtataacctaaccaacagttagacaagcttcgactacaagatatacagggtagatcaatggagaagtagctgaatttctacagaatcccaagtatccgagtttaggagaagcctcaaaagcctttcttagcagtatcaaactcctctaagctgaacttccaactgctctattcgcatagccaaatcatgcttcccgccattcttcaacccatcagtaaccatatcaaagcaccgtgatatcggaaccaaacccatctctgtcatctcaaccaagtaattagccgcatgcacaaatgtcccaccacgaccacacattggaatcagcattgnnnnnnnnnnnnnnnnnnncggatgagccttcaccttcatgtcactaaaaaagctaaatgcatcatcaaacatcccattcctacacattcctttgattatcggagcatacaaactcggaaacggcttatgcccatcttccacacaattgttcaacaaccgaaacgcttcatcaatctttccaatctttgaaaccgcaggtattagtgtcttgtaagtatcaatatctacacaaagacctaacttgcaagctgtataatacatctcaatgcaaaattcaacttcccctgatttagatatagcttcaatcaaagtattaaaagtttgaatatcaggaacaaaccctcctttggtcatcttactcaccatctctttagcagattccaagtaaccagcattcaacaaaccttcaataagcaaatcacgaccacgagccggtggattaaaccctctcctactcatttcatcaagaaactcttgagcctccttcatttttccagcggaacaccatccgttaaccaagatagcgtatgtccgcttatcaggcttgagacctttcctaatcattcgccgaatcaaagcataagcaccatggaacatcttcacatcacaaagcgcatggagcaaggaattgtaaacatcaacggtttgttgacatcctagagtcttcgggacgcc

SEQ ID NO: 36799 - DNA, 1712 bp, Arabidopsis thaliana landsberg
cttaatttttttgacccggtcttcattcatctgggtcggcttttaatccgatttaagcgtgttcggagtattaaaaaagatttagtgggtcggtaatattttgttcggatcatttttaattcatatattaatcatgtatgtttatttcttcaagtaaaaaggataatcttacgttagatgtacacgacgcttaatttgctctaggcttattctagagacaccacacgtatgccacaagccttttctcctctttccacgtgtccaacaaacagacaaccacgtcattcccatccctgaaccatcgccgttcccttaaacctctcaccgttcgcttttactccgacgtttacagagactatgctcttcgttcctttctctctctagatcttaagcccaaatgttgctcaaggcttctcccgctctctctctcttgagctccggctccaccggcggtggaaatctgtttcctccgtcgagaaattcgtcgaatcgtctgttttctccgagtggatctaagttttctgttcaggcggcgaaaggaacgaacacgaagtcgttaaccggagttgtattcgaaccttttgaggaagtgaagaaagaactggacctcgttcccactaccccttttgtttctctcgctcgccacaagttctccgacgatgctgaatctgccatcaacgatcagatcaagtatgttctcttgcttagctttttggtttagtctgtctctagtttttcgaatctcttctctaagaatcatcccaatcgaaaattttgaaggaaccaaattcattgattgattaatatcttcccgaatgatcatcatttatcatcatggtgctactgatctgaatcgcaattgttcatatcttgctttcaatgattttgcttgtgggaatcgtgttagcttggttaatacgtgaccatgtgtatgaatatgactcttataatttgattttttgtgaatcatagcgtggagtacaacgtctcgtatgtctaccatgccctgtatgcctactttggcggaggcgatgtctgcttgaaaggtttcgccaagtgagtttcttctttagtctaagcaaaaccgtatttttgtgtctcttcagctggtgaatcatctttttgtttttgttgtgggtttaactctgataggttttttaacgattcgagtcttgaagaacgaggtcatgctgagatgtttatggagtatcaggtataatttcaaaatctatcaagtgatggacctttcaaagtgtttcttatgtttgatggatttgatttttagaacaagcgtggtgggagagtgaagctgcagtctattttgatgcccgtctctgagtttgatcacgaggagaagggagatgcattgcatggtaagttgattcaagctttattgtagcagcgttttggtaatctttgagactaatatagatcttagtaagcctcatatatcgtctttcatatagtagtattaagctgttgatgagtctgactctttgattaatcagcgatggagcatgcattgtctttgtacaaacttacgaatggaaagcttctgtagttacacagtgtaaggtgtttatcttttcatcattagaagtctattctaagccttatatcccatgatttcagctatctcagagcacattttgtcagtgaagaagtagtttaatctctcttccgtgtttggtctatcaggttggtgtgaagaa

SEQ ID NO: 36800 - DNA, 785 bp, Arabidopsis thaliana landsberg
  unsure (1)..(785): unsure at all n locations
tttgatcctaacaggctaattttgctttacgaagagaagagatatagttaaattgctcctgactgaacattcgaaagagaagagattagataaaatattcctaaatcatatttatataagacgaagaagaatctctcttttgaacctgtctatgtagagatacaaacggagagcataaccaaccacgtatgtgtttccattatttacaaacatacatttaaaaaaaaaaaaaactaaaatcaagattaaaattagaaaatacacactactgtgcaaaggatagggaaggttgcagagagaacttggtctctaaccttcctttgtgtgttgaagtaaaagagaagttttgcgtgttcttgtttgctgtcatcttgaagctgagagaaacttgtggaatcttgctattctattctgtgataatttagccagtgacaagttgttgctcttcttctgtttcttcttcctgtggaagaaatcctctgtgtccaaaacatacgaaatctacaacacgagatgttatgaatcacataagagcttgattttgtaaacaagaaactctgtattggttgaagacctgtatcattaccttgtaggaagagcaagacatcttgcattcaaggccattaattacttgtacaccttccatggccttgcaagctactgcaagatcatccagaccattgtatccacgcatgttcctgcacacaaanaaggacttggcaattatatgtaataagagtcaggtgtgaaaagtactgaaactcaatttacctttgtagcacaat

SEQ ID NO: 36801 - DNA, 2016 bp, Arabidopsis thaliana landsberg
  unsure (1)..(2016): unsure at all n locations
tgatctacatttacttgacgaagtaaggaaggtcaagaacgtagagaaggaagtaagcccaagtcaccccagagatccctccaaagaagaatcctccagtgaacttagcccatccatcagccgtttgaagctggtcaggctgcttcttccgcccagtcaaagtcaaactcggtgcgatcgatggctctccttccttgaaagaagagataccgtagatggtgaggcacatgctgaggatgactaccagcccagccgcggctaaagacccggctgacccggcgtaacgagtgttccttaatgggccagctttgacgaatgggcccactaagaagaaaccatgggccaggcccacttccacaccgcggaggagagggttgacggcggtacggtatccagggaggttggaaaggtaccacgcgatcaaagggctggatgtaactggggtttccaggcttccaatgaatgggtcaccgttgattggttgaatcacttggaatgttgtctgacaatttacatatattaatggttagacacactcactatacataacttcttttcttctatacataacttgcctttgcataaatcaagaacctaaatatttattctttttcgatcctataaattccacaaaagaggttctatagaaatcgttaaaaatatttatggatattttatgtaataccaaaacataaagtatcaaactaaagaatatggccaatctacacaactagtacttattatggccgttttatcctaaccaaattgatttatcaaataacatgttatttcctaagatattaaaccgcatgactgataatttgtatattcattttgtgtccgatggttaacaaagaagataccttgtcggatttaacagctcggacagtgaaggaagagacnnnnnnnnnnnnnnnnnnnnngaaaggagcaccggagatgcccttcgggacggcgagacgctgagaaagagaagcggaggagaagctgctccttagctggctcgccattggagatgcactcgctgccattgttctttttgtcttggttgttctcttatgaaaattaaaataaaatcgagtttgaagtgtgtgatgaagaaataagcaatctacgaaacttgagattgcgattgctgatgtggcaagacagaggatctgcatcttaagattgttgtggctctcagcgatatgaatttagatatgtcttattctcattggatgttatcttatccactttgcaccaatattttcttttaatatatgaacatatcctttttttggactgctggtgaaaatatgtctttacatatatatatttgtttcttgtattaatatttcatttccctttaagatgcttttaacatgagttttaaacgtttaattgattatatctatattttaaataatgtaacctatatctttaatttaaaataatttaaagattttaactagtaataggatttaagacggttagaaatttaaaggttcattaggtaatcaataggacaaaactttttagtttattttttttaactttaaacttttacttatcttgttttcgaaattgtcaatagaattttgtttttcttacttaaaattggaacattttgttatgcttgtctatccacttgatgagccgagccagagggtttggtgtttctttatctctacgtatgtttctcttgcaccaaattgtgtgtactgtggcttggaatatatatcgcgcaataaaaccttccatacgctcctgccatgggctatatatgcttgtgattagaaatgtccagttcgtcgagtagtttgctttgtagatatttgtagctagagcctcccatacttcagctgcatagctacaatagaagaataaatgatcctctgattcaatgcagatgttgtagagaaagaagtttgttcatgagagtctgttctggatcgccaaccatgtgcaaaaggaatactttggtgttgtgtgagtaaaccaaacctttttatgccaaactaccttatttgtttc

SEQ ID NO: 36802 - DNA, 2231 bp, Arabidopsis thaliana landsberg
ttggtcgatgactgctttgtattcatcgcgaagaccttcaatgatgtgttcaatctggtcatcatgttcaagagggctaccaagaagagcaagtgtatcaagacgaattgtaatgccttggatatactcatcgatggtcatggttactttgtggaagagtttgagttggtctttcagtgagcggatgtgtgtgcgggagggatttgcatacgtggaggcaagtttctcccagattctccagcggcagtggtggtacgggcaacgatcggttgtagtgatggtgagatcgagccgatgagtgcgctatagatgagcttgtcttggcggcgccatttggtgtattcagcgtttggagaagtgacagatccaactgtgacagtggcagccggagtagcaacgttgtcgtcgagatggtgaacgagttcatatccatcaatgagtgcatgaacttggagcttccacatgagatagttcgtgtttgtaagcttggtgatgtttgacatattaatgttgtgaatcgtgtttgtggtaattgcgatggcatcgttggtgtttttagtgtttgccatagtgacggcttaaaaaaaaaggagaattttaggttttaggagcgtaagctctgataccatatagaagttgaatgtattaactttattagaatgagatttacaagtatttatagagagctagagaggagattagggtacactaatgataacaatacaatttacatatatatcccttatagtttccatcttccagtaatccaccaaaaagagcgaagctatcgaagaatttagtcgcgctgctgagctatggaggagtgccaaatgatttctttttggatatattgctcaacacgttggaaaagaagaaaaccatatttttcaaagtacgtgcagcgggtaaaggtatggttaaaactctaaagctttggagctcttttgcaattagagggaaaccatggtcttttgcaattttcgagctttgaaactgactgaagtctttaatatcataggaagtatgagaagacacatgatggctttttattaagtttatttgtttctgcagctgcactttattatgggaatatggacgataagaacgctttacaaattttcatggctttatcccccttgatgagccatatttgaagcgttatctgtctaaactctaaagttagagaaagatgatctcaaagcaggaaaacttcctattgacgaatcatactatctcatggggacagtggatcccaccggagagctaaaggaagatgaagtctgtgtcatcctgtatgctaccaaaattttatttatttttttgtaatataaagtgtggatggaagaataaacaaaccgtgcaacttgcttcattggagttgtgagttagctcttcatttcctcactactttctttttcgttgttttgcagcgggtctggccaaatctcaggggatgtgctagtttacaggaatcctggactacattttggagacatacatattctaaaggctacatatgttaaatccttggaacagtatgttggaaattccaagtatggtgtgttcttccctcaaaaaggtccaagatctttgggagacgaaattgcaggtggtgactttgatggcgatatgtatttcatatccagaaatcccaaggtacactgctatatccatcacagttatagtaaaatttcattgctgagacctaacttataaaccgcaacttcctctgtttagctacttgagcactacaagccaagtgaaccgtgggtgagttcttctccacgtagtaaaatttacactggtagacaaccaagtgaactttcacccgaacagttggaagaagagcttttcaaaatcttcttaaagacaggatttagtcccaggtacattctttaattctcgggttactttcaaggtcacatagtcctttgggttaaatatgtcttgttttctgggtttacagctcagttataggacaggctgcagatagctggctagcaataatggaccggttcctcaccttaggagatgagaatgttaaggaaaaagctgaaatgaagaagaaaatgctaaagttgactgatatatactatgatgctattgatgcaccaaaaacggggactgaggtcaatctcccgttagacgtaaaggtcgatctttttccacattatatggagaggaataaaacattcaagtccacttctattcttggattaatctgtgacact

SEQ ID NO: 36803 - DNA, 1690 bp, Arabidopsis thaliana landsberg
gatttcagtggctgcatcgtcgaatttgtgattcctcgctacttgtggactattcttctcggttttgttcatctaactagagcgtatcgatgctgcttcattcgatattagtcgctctctttcgttaatcttgaaaaaaccacgaaaagggatttatcaaaggttgaaaatttagtgtgtgtgagagttagagagaaacttgaaatagattgtacctgttgatgaggaggtcttgtggcagagatgttttcaagatcatttgactttggtatcttcttaaacttcttgatcttgtgtaaaggcttggctttcacgtctctagaatcagacaagaaagtctctcgcttcctgtttcgaatatctgatgttggagaaggctttatgggacgtcttgtttcagtctctgccttcttgcacaggttgatgggttttagttgcctttgttttactctgttctggctctgtttctctccaagaatcactggtgttggctttggcttctgaatgatcggttctggtctggaagaagatgatgaattaggtttatgactggtgctttgtttgttctctttctctgaaaacctagttcttggtgaacaagaaactgttgtgtctcttctaagctcgtgtgatggtcttgcttctctgtttttcaccgagtttgttatatccataccgacgactcttcttgtgacgactctctctttgatttgtttaactatctgcctcgcgtaatctcttggactgtgactctcctcttggtcttctttcagccttgaacgcccaaactctttttctctgttcagctgaagagagagacgatgaatgtcgaaatcagatttccgagcagaggagattctagggctaaccggtaaagatcgtgtgcctttcttggaaagtctatggctcgtgatatgatgacttgacatggtatgaagatctgacagtgaatggttaaggtcagttttatcaggaagaagatcaagacccatgagtctagccacaacgttcggtgtcttggtgagaggtaagttgcaattatgtgaaggtgtatcaacgagaagacctctaagtgttgactttttcccgcccacctgcaattgaattctcacttggctccatcaatgaagcaacttcaaatgtacattgaagtcattaatgttgacttacagagatgttcaagccttctctttccagcttgtagttggttgataatggagactcctctgataagtccaagctgtttcgtggcgccaccaagcctacaagtttcagtagcataacattcctcactcactgtcttgcaaaaagctcccaagtcctttatctatagagagatagagaaagcacgtacctttacgagttctggagggagaatcaatactaggttggtggtgatgatgatgacgtgaaggaaagtaaaaatggtggaaatgaaaaaagtggtaaagtgcagtgacgcagccattagcttcattggagtttttcttgcttttagaggaacaagtggatcttccttcattgtaccactctctttccatttctgttaagagaaaagcctgtctctaacgaataaaattgacaagtggaaggcgaaaaatggccttactaaaaaagaaaagaagaggttgaataacaaaaatttatttttgcacccagcaaaaaaaagcccaaattttgaaaaattttt

SEQ ID NO: 36804 - DNA, 1855 bp, Arabidopsis thaliana landsberg
aaattttgtttatcttcgcccattctataatttttgttttgacccattatcttgattttggacttattcggtataaactaaccgaactaaaaaaaaaatcggtttagttcagagttgattttgaatcctataaccaaaccgacccgaaccaaatctttattcggtttaatttgacaaaattttaaagaaccgaaaaaaccgattaaaccaaaccgaaccgattacccgaataaaccgaatgcccaggccaaaaacaactgaaaataaaaaataaaaaatgagataggagaatatttaatccgacggtggagaaatgttgatataataaaacgtgatacagaggatcataaacccgcaacatgagaaacgtaataagttaagtcaaaaaaacgaaaaagccagaatcatatttgtggctctggtttctccatccaaacaaaaacaacacccaaaccttgtccacaccaaaatgttaaactcaaaatccaaccacacacacacaatttctcttcctctctaccattaacatcgatcagaaagaccgagagagagagggagaagctgattgattatggctgctgcttcgatttctgcaataggatgtaatcaaactttgataggaacttccttctatggaggatggggaagttccatctccggagaagattaccaaaccatgctctccaagacagttgcgccaccgcaacaagccagagtctcaaggaaagcaatcagagcagttccaatgatgaagaatgtcaatgaaggcaaaggcttatttgcacctctagttgttgtcacacgcaacctagtaggcaagaagaggtttaatcagctcagaggaaaagccattgccttacactctcaggtttgcttgtcttataatcattctcttaagaactagtcaaagaagcaaagttttgtggaactgggttcttttgttctttcaggtgatcactgagttttgcaaatcgattggagcagatgcaaaacagagacaagggcttatcaggcttgctaagaagaatggagagaggcttggtttccttgcttaggtcttaaaaagaacaaatctttctctctgcttgtgtctgatatatacactcacaactcctcttgttgttcttgtctagatgtattttgtccaaacctataatcttgatttttgttacattgcctttgagggttactcaaacacacataactgctgccattctcatctgaaaagttgttcaataaggtcttagctgaactagttttctcagtcacatagagatacaaaatatgtaatattgccactctttcaacagattaaaaagcctaatcataactctcaaacaattaagggattgaaaaagactgtaagttttgctttctattgaagcatccctaagatcggagaggtattgagagctgcagttttttaacaccgtgagcttacactgattacttcaagacccaagtaagattgcataatatgtcaataaagttgtcatcgtggaaacttgatatatatggaactttacctagacattctttaacacaaactctgtttctgctagctaagcattcgttcccaaaggtttccaggaggttgacttgttgccagttgccttaaccttgattaggttgaaaatttgggtacgagtaatgttacagaaccacacgtgggaggtcacacgtgcgaaatcaaatggaagaaggaattaataagaggctgacgcgtgtcgactgaggagtggcagactcaaacatgccgttaggcccttctatatgagcaatattcagctcatctttctcttttatcaattaatctgtaaaatctagaatctctgagaactaatctaagctagat

SEQ ID NO: 36805 - DNA, 2446 bp, Arabidopsis thaliana landsberg
ctgttttagctgctcgagaacctctgagtaacttgtgggcataagttctaagattgtaagaacatctctgattggtgtctctagagccttaagtgactcttctcttcttgcttgttttttcccctgaaaatggaatgatcaactatatcattaaccggttataaaggtttataaacgtaaaagcagacgttatatttacctttcgggtgtgaatgagatcgttgatagttttcagtggttctgacattgcagccagagttacaggtgtgagaagatcattagacatttaggcgacaaatttcagacggaatgtgttgatgcttgtcaaagtgtctgaaggaacagaaccattctcaaatgtgcgaatctttttcgcctaaagcgctttcacagtcgtgtactgtctgtcaataagcttatgagcatcgtcgaaggattgtagtgaagaagaacataatgttctcttaaatgttttttcaatagcctaattaaagcatcttaagctaaagaaacaagtgaggtactccaaaatgcaatcttcaatccgactaaaagctatataacgagggattacctgataaatataaaaaatgcgctccgaagcactctcgaggaggaaatcggagtaattgataggagaccgataatgagttcccattaggaaaagtctcagagcaagaggatgataaaggtctataacctgccatgtttgtaaacacgaaatttaggcataaatattggatgtaagaagaaaattgcaaaactgagaaatgtttacctgtctgatagtgaagaaattccccaaggattttgacatcttctcggagtcaacagtaacaaaaccattatggatccaatagctaatgttgctgctatcacatgcagcacaactctgagcaatttcattttcatggtgagggaacacaagatccattccgccaccatgtatgtcaaaactataaccgagataagccgcgctcatcgcactgcactctatgtgccaaccgggccttcctcttccccacggactctcccaaaagggttccccttcttttgcagcctgcccaaaaattcagaagtcttttaagacttaaatgagtaaacaagtattcaatgtagggctaaaacgtaactaaaaagcgtactttccacagagcaaaatctgcgggatgtttcttcctcgtgtcaactgcgactctctcacctgcacggttatcttctaattttcgcccagacaattttccatatgttggaaatttgtcgactgagaagtaaatgtctccatcaactttgtaggcatagccattatcaagaatctgaattggaaaacatagcatatgagaatatatcttagatttttagcaacatgaggagcaaagtgaagtaaatgtggtcaaacctgcttgatcaggtcgatgatttgaggtatatgatctgaaactcgtggttggacagacggatctaaacattgaagctgttccatatctcgattaaattcctcacagaaacgtctgctcaaactgattggatcttcctctaattctttcgctctggcaataatctacaaaatttgaaatttcatgagtcagttgcatatgtagctaaagaatctagccatatacaacttcaataagaaaaagtgaaagttcccctagaaaatatagtcagagagaggctgaaataaagaaaacatttgtgaaatccttgtagcacaatacggaggaaatctagtaaaggacattactaattagttctattcttctagctaattagtctgtgttaaggttaatcaaagttggtgacacaaacgtaggcagatgtaaaagagcagacacatacataaaggataaaactaagtgaacttctccctaacaaagagaaaatactgactattctccattttggcatttcatagtacaacattttcactagcctcaaccaccaatataataactttagcagtctaaacgttcaaatcttgcaactttgatggcactatgatccatccttttacatgcctctcacaagtaaatgagatgaaataacagtattggagacactagaaataagatcaatcagcttcaacttctctactgcccaatatgtagccgccaagaaaataaataacttaaacgcggtccaggaatgccataacagacactggctactcatcctattaacctaacggtaccacaaaactcaatcttaagaggttctcactaaaaaactttcctgaacgaactcgagaagctgtctctaaacttctaaacagagcttaagttgtataagacccctgaatctctgagctaaccaccaagaagcagagttagctcaccttgtcatccacatccgtgaaatttcgaacgtaagacacttcatatcctagatgcttaaggtacctgcctaattcccaatcaaattcaaaagaacaaaatcataaaaaaat

SEQ ID NO: 36806 - DNA, 3447 bp, Arabidopsis thaliana landsberg
cagatgccacatttgatacgctaatcaactcatacctgctttagtatggcgaggaatgctctgcactaatgtgtcctgcaagaggcagggaaaattgagaaagtttgtattcacctgcgttctacggtttctttatactcagcattcatccgcgcacgcagaccttgaaaactatccatcaagtccttaagctttttcccgagtccactaacaacagacgtcctggtcctatcggtggaagagccagggccacaaccagagacattacggctattagcatttgctttttcaagcgcctcaagcttttgtttgatcatcttgactctcttgaggacctgagcgacatctccatccatctttgctcggagttccttcaccttcttggcattgtgtacagttttgcactcttcgttagaatcctgaagactcttgtaaagagtctctacgcctttcatgtcatctttgacattttcgacatcctcaaagaacttatcgaggttcatcgtctctttacctgactcaatatcatccatttgggcctgttgcttcaggtccgtgtacttcttgaacgaactagagaataaatcattcattttttccttcttgcttttaaaaagattcaccaagtgtatgcaattatatacagaaacaagttctttctgaagattattttgggttcaagagaatcttgatgaagatcatcatcatcatcctctgcctgttagggggaagaagatgggaagattttttttgccttttttggaagaggttcgcaactagttttgttagaaaagtttgttttgtttttgtttggagaagagagactaccagttttgggaatcacccccacttagccgatgacaaatcttttgttaaccaaattagcaaatgtgctaagaatagttttgtgaaataaacaaaacaagccatttttacttggactatgattacaacccaaaaccctatatagtagaaacattcacctcaatcgcttcgctttatcgaggatgttggtatgccctgtgaactgaaaccaacagagacaagtcagtgtagaaatactcggatcaatccaatacaagttccaaaagttcatatatgatgcaaagttgaagtcattcttaaaagctaaaacccttgcaaaatcaagaaatctttagcttacgaaacctccaatctcttcttgtgttttagcccaagtaacatattcttaataatactcaaaatcacattctctctcagaaggtctgaaccaaagcctggtttactactcaaaagcagcaaaaatgttttttcatgtaaacaccaaaaccaatatctctccacaagattctaaagcctgtatcactcatacacagatctcatctaaacttcacaacaacactctagatgtgaaaatagagacatctacacacaaaaacaaccatcatatcttcaactttgtaataccaaatgatccagtttttcctttgaatttgaagaacattcatttgttcccgttacttacctaagcgaaattcgaacaaaggccatcacttggcaagatttgaatcgaacataagatcattgattcttgtaatatcaatgtcagagattggatctattggcctgtcttccccattcttcatcaaaggaagaaacttcacatcttctctgctgtactcatctatcataacaagcaacataaccgaacaactcaatcaaactccgaaagtctaacaaaactgaaatgagaatcagtaactcaccaaacaaagtattgagagaggttggttttgaagtagacatgaagttgagaccaatgtaaaacaccaaagctattaacagagtcaccatcgaatacaacggcatcgccatggcccagtacttgctcgggtaataataaatgcctatggactctaagaatttatctggtacatatccccaaatcaagaagatcacagtggcaacaacaatcgaaatggatcctacaaaaccataaacctcggaagtttttggtccgtgtacttcttgattcaagcttaacattcttctcggactacacttgcaaaatcgttgagaaattgcagaagacaaatgataagcgatgtgttttttcttaagaaaataccaatttgaaggacgggacttgcaaatactcgaaaactcacaataagcgaatctttcaattaatcaggaagatgcgaatatgaaaccctaaattccactaatggcctcaaaatcttcgaaattcatttcacttattttgcaaaaatcagaaattttttgggaactagggatgattgggggatgggtgtagggaggcccgcacgaggtgagttctgcaaaagtaagcagcgtcaacacatcggccagcctataacccctccataaattattgcgccacttttgtgttttacgattagcgctgcgaccggttctcaccggacgcttttgttttccttactcattagtttaaggcgagtttttcagaagatgtccatcactttcttatagtagtctcgataggtctccaacgagttataattccgatgtgggacaaaaataatacgtacgatgacgaggctcgttgaatgaaagctaacctaataactaatgaaagcccaataattaattcaaggcccattttcaattttcttgcaaacatgagtctatttaacataatgcccaaagattttgcaattgtcgtggtactaatatgctaatttcgacatgggataacacacgataaacttcatttatttatttaccatttttttatttttttattttatatccctaacaacgagtataataacaatatatttgagatctatataaagttgtgtatctcttatgaaattttattttattttaggaaaaggtaaactaatgtgggttaaattctagtaaattgaccaattaatttaactttcttaacattatctataatgtaataatacattttcaaggttactgataagtgattcacctaattgcattcgtagaattcctacatctcagtgatgatggaccccaatgagatgtagatgagatggacacaaaaaaaaaatgggctctaaagatcccagcttataaaattctgattaaacaataatcacaattatggaaattttccaatagtgacatagaatcatatacaaatagggttagtgtgtaactggtggagtcattatgaacattgtatccaatatttcagtgcgagaaaaaaaaatgacaacacacaaaattttaggccatttcaagaatacaaaatcaggaacaggtcatagaattaggcattagaaccagctaataaacttcaaaaaatataatctcacttcaatgaggtaaaagtcaacttttattccctctctatctgtctctctatctatacgtgcacacaacttttagaaagattgtctcgcaagtcacaatattcctaagttgacaatgaaaggaatacca

SEQ ID NO: 36807 - DNA, 1332 bp, Arabidopsis thaliana landsberg
ggttctggttgtatgattagttgaacgtacttacattttggtcgagacacaacataatggttcggacgtggcgttcgtctacgcaaagccacggttgctacccgatgatgatgattgaccacatccttaaggtcggagattcttcagatggtcgcgtagagagaggggacgaatcattaggtgaaaaagaggtctggattacagacccgaaactagctgaagttgttcgtagttcaatgaatatcatattaaaccaaaggggacaagatattcacatggtggaaaagacagagtatacactccccaagtttattgataatgttcatctctacatggaacacatatcatctcgaaacataaccgagaatttttactttccacctcttcctaaaggttctcaaatccaaaacatagcgatgtcctcttgtcctgacataaacaatgaagattgggttatggctgtcaagttttcaggatctaagttgaagctttatagacataacaaagactttcggtggatcgatatcgaaaccacgcatgagtgtataaaccctttatctagccttatgtactcgaagagagatcaaaggttttatttgcctgctcctggaggcaattacttgtgctcttgggatctcaacttcgataacgatcctaagttcaatgagttggtgtttcttaatctccctgagttgccacagtccgagtgggagctgttgaattcttgtttcaaggaggaccattgggtggagtcaccttccggccaaagtttcttagtcaaatggtaacgtgcgagtctaacatgtagacagaaatcttggtcaatgctaatttgggtcttatatgcgtgtgcaggtactctcacatcccttctcaacgatacaaagatccgatattgatggtgcttagagaggatgaagaaacagaagagggaacaagaaatatgtgttacaccgaggacattggagatctttgtatcttcctttcaaagagtgatcctttctgtgttgtggcaagctcttgccctggtctcaaacccaactccatctacttgatgggccgttgctttgctgtttatgatctcaccacccgaaccgcccgtcacttcaaagcccccaaaggtggaccagaaagagttcctttcctcccttattggcttcctccattttctatctagttctttggttggtgttaatgttatatgtggtgtgtttcgattttagtttctctcaagcgttttggattgctatgatcatctttatgttccctttttgaggttattaatttataaggccatggttcgtggcacttattcttttagaaatattggct

SEQ ID NO: 36808 - DNA, 1509 bp, Arabidopsis thaliana landsberg
acagtgaaagagagtgtaggcttattgttctcatttaggttggtttggtctttcatctttgtatagaaacctcagtgatatgagagaccaaaggagtttgtgatttgctgtaacctacggtctaccgacccatagacactagatttttgtttttgttttttgtttctctgcccttttagtgatagtggggtgaaatcttagattatgatttctgctaacacactatgaagtaatcatattctttgtttttgcttttactttgataacgatctgttaatagaaaagcatcttaagttgctcatcctttaacggatttcaaatagtaatatttgtttacatttttccttaagcatcttacttgtatgttttgttttcttatctttaacaaaaaaatgaaccctctgatatatgccagtaaacatcttaatctgagttctatatttgcatatctacttaccattgtgtgttcaaaagagattccttatattttgatatccataacgtcaaatcaacaaaaccaaagagttttactttggttattcgcaaattttttggtacaagtcttttaatccagtatctgctaaatcatttggtttcaaagctaaatcgagaccatagtattattactatgtgcaaaccgtaaaaggagtgactcaagaagcctttatataaacaaactgttatcaaagtaaaagcataaaactaaataagattacttgaaagtgtctgcagaagttatctaagatttaatcttactatctctaaaaggggaaatgaagatgcttaaaagttcctatagataagttacaacaaatcacaaattccttcattggccggcctcatatctctttggtttctatacaaagaccaacctaaatgagaaaaataagccctaaattctctttcactgtgttaagtcaaagtaccaatgcatttgttgtttggatattacaagccaccatagatatcactgttgttgaagaagccatcttctgagaaatcatggtccgtaaccgatatatcttctgaaaaaggaaggtagttgtttgaagatgctttaaaactattgatgcggcttggaactcggcctcctcctgagatattggaagtagaggcagttgtgtttctctcggtgttattattgctaccactttgacccgaaaaggcctgttgctgttgcacactcgctccattttcagtcatctcctgcaacagctgatgaagcatctgctgctcctgagtgttaccatgtgaatgtggtgattgtaactgatgaggatgattctgcggaagcatgttgggagtgccattcaggatgtgctgctgctgttgcatttgaggaaagctgggaaatccacttgtagcttagttctccctttgctgcggtgaagaagatggactctggtttgagttcagcgttgggttctgactcgagaacccctcttggttgcccgcatttgagttttggtttatcatatcattttgccttataagcttgctttggtagtt

SEQ ID NO: 36809 - DNA, 2205 bp, Arabidopsis thaliana landsberg
tgtgtgtgattttatggtttggtcattaaaaataactctgcaaagttttatctttgtgattttattaatcctaagactattatgggtttgtattaaagtttgcttctttcttgctcactacacaattaagattcaagcccattgtctctctggttataaagcttaaacatacaagaacagacaataatgaaattacacgagatagaactgatataatacacaagtgttgttgtttgctagagacaacaactaaggtgttgttgaagcagaaactggcttctcgaggactccttcagtggcttttttgaataggttatgtacctgtcttgaggtgaaaccgatcttttctaagtcggtaagctgttgagaatccatacatttggttagtagatgacagatagtttagcactaaacgctcaaatttggggagagatattgagtgtgttaccgattttaaagggcttgtttctctgagttcaatgatgtactcagccatcttctgcccaattccctgaaaacaaaaaaatgaaacagagctacatgcagtgaaatcaatagagactatggaagtaaggttacctttaattcccttagctcctctctgtgtgttcataaattaatatatgaatgaagttagttcttgtgtgatcctaagggtaatgaagaatcaaaggtaggcagatgaaactggaggctattattacctgttggctgtgttcaagaagtgaatgtactcttttatgagagaggtctgtgataagaaagtaaattgcatagagaatcagatttctagtgttcttgtcaaatataccatgattttgggaatgttgatacctttaaattattgctccatgcattgaacttctggcaagtgccttccatctgcataatttcagggtttgtagaaagaaaaggtgtttttggggtcattggcttcagaaaaggagagcttccgtgtgctgaatttggttttgcattggagtctattggagatagagcttctcgaagaggactcagttcagtatatttcttctcgacatccaatgtgttatctagaataaacgcacacaaaagtaaggagagaaacgaaatgtccagattcttcatcaataagtggctcaagaaagcaaacctctcaagcttgcttctgataccaatagattctcttcgccagatgtgtctctctcatcttctttggttggagaagctaactgcagattccgtataggttcctggatgttcagagaactccatcacttaaaaagattcttatgttgtatgaaagtataaatccaaatgtggagtagaatataatatacatagagaaactagctatatcgatgttattcaaaatgaatgcagaagagcatacccataaatgtgaagcagcaagagtttccacaccaaataagtttcttgcggtcacaaatgcgtccctgtgcatgagtaaagtatgagggaagtggttttaagatgtagaacacttaaaaactagaccagaccattcaaagggatacctctgtcctgtgccggcaagcttagcactttctgcaatggctgatctatgacagagtaatttcttgactgagctttgagaaattgaagtctggtttgtacccatcaatggagaccgtattgccgtcattctatgcgcgctcatcatcttgccatgtggttcaagccaagctagcagttgtgcttccatgtctatcttagccgtgggggtctctaccttgggattcagagaaacattgtttgagatgtgccttgaccatgcagccaggctaacggtgcgaagagattcttggtatacaccaggattctatgacaatcaaaagaagcaaatagattcatcacattagccccttaggatagatgctgatcaaagcactgaacccaagtaacaacaataggtaatcttcttaccagacatgcgaccatgagaggcctactggttccaccaagagaaagctgcaggattgtagtcaatgttggtttcccggaatggtactatagggaggatgttattcaagggataaaccacatgtggacaatgcaaagaatgagtgattaagcttggcgctatatagggaacggaaccgatgattgcgtgaccttctaaagaattcgataccagcgcaagccaaagagttgagggatgacggagcaaattaaaggacatgaggaggctgctgttactgtaac

SEQ ID NO: 36810 - DNA, 1741 bp, Arabidopsis thaliana landsberg
cataaccgaaggttttacctcttacttgaagaggaaaagaagagataaggtgctttgctcttatccatggctgtactttgttagtcttcggttccaacaatctcttttgaaacctctttgatacaattgtgataggtctatggaaacaacgtagagatccaagctttagcagaaatgtacaataggccaatccacatttactcatatagcacaggtgcgattaagattcacattatgaaagctctttatgttctttagtgtaacaagaaatttatgaaacaaaatgtattgctttttcatacagagcctatcaacatatttcaaggaaactacagcacggatacacctcccataaggctgagttaccaccacgggaatcattataattctttggtggatccacatcggttgacagttggtgcaggacttggatttagtagccttagtggggtatgtatagttaagctatctttactttttctcttctttgttcaactgatgcaatcaagcataattcaaatttgaaagggagcggatctttgtttttttgaaattatatttcttgttttgaatccagagacacgtggacaaggaacaggtgaaagctgctataaaggctcagcaagaacatcaaattgataatgcaagttacccgttcccatccgtgattagatatactaatctgacttgagtgtgttaccgcttacgtatatgtctctgttccaggcgctgttagcagaagggagattttactctgaccttgagcttacggaaaaggaaatagagcggtcggtaatggaagcttctcgtgctgagtatcttatggaatggtctaagccacgaattggtccaaaggaatcatccacctcgaatgctgagacatcatcttctggagctagtaagtattttttttttttttttgaatctgttcacctagaatatacttgaaacaaagcattttgaggctttttaaattttgaagcaggaccttcaggcagcgattcgaaaccagcagaggcagtaaaagaaaagacggtgctgagcagcagtatcgagatggtattgtcgatgggatttagctacgcacaggccatggaagcttatagcatttttggggatgacgttgactctatggtctgttatgtactggagacgagctgtggcggcaacaaccgacgcaaaggcaaagccacggaatagagaatgtaacctgaattgctctgtattaatagtatatgatatagcaattcgtattcctatcaatggtgggcgattacccttatcagaataatgaaaaataaacttgtgcatccatgacatgatgtatgcaaatgtttgttgtttatgtacttagttgtaaaagttgaataataagagagggaaaaagaacacttcttttgcaaaagctgacgaaaagggaaaattttcagtagaattctactaagtactaacccttgcgagactctcaagtttccaacacagaacaagtcaagcatgatattgtcgtgtggaaattagacccaactcagaacaaacccagaagtatgaaagctcgttctaggattgttaatgctataatagtggacaagaaaagtaccataaagaaaaaaaatgttatttatgatgattgtctactttgattccaattcgatgacctttcccaagtgtaaagcaagcaagttttcaattctcaagtttgtattgttatatgttgttagtgttaaaccatgttgaaatggtg

SEQ ID NO: 36811 - DNA, 3924 bp, Arabidopsis thaliana landsberg
agagcctcttctttcctgaaagcttcttctttctctgttagtacctgttcggttactctcagtttctggttcgacaagcgtagcttaacctcgatgttactgatcttctccatgagagtttcgatctcgtctcctttcatttccagctcgttacgtaaactctccatcgtctcttcatgaaccccaattgtagaatctctggatgtcacttccttacccctctcctccaacaatctttgagcttctttgtaatccacagttaccttatttagtgttgcttcagtttctttaaatagttcgtttatctgcttgtgttcctcttccagcgtattgtaagcagcttcttgctctaccaatgctttctggacatcggtgatctgattcgacaattctgatttctcttgcttctctctctcaagctctgcttcggtttcgctcttctgcacctgtagagaatcaagctcattcttcagattgttgatcagttctgttaaggccattatttcagaagacgctacgttgatcttatcgtgcatttgaacattctcttctttcttagttctcagctcctcatcaagctcacttctctgtttccctagagtctctaactcaagttcacgacccttaatcttctcagataaaccatttatttcttctagaatactctcgtgaactttaaccttgtttatgatctcctcttttagatttgtaatctgactcagatattcagatatctcctcggacttcttttcaagttggatctcgagttctgctctctggctatcaagtgaggccacttgctgtctcagaccattgacctcatcatccaaacgtttaatcttcactgaggcttcctcgcttttgcacaccatttgtttctccacctcttctttttgaacagacattgaatctaattctgctcgtaggccatcgatctcagctgtcaaagtctcaattgaagacgatgattgcttatcgttatcctcaagtttttgagttaaagctgagagttcagttcctctctcctccattgtcttctcaagttctgagattctagcaaccatttctctgttttgcgcttccaactgctcaactacggtggtcttgcttgcaatctctgtctcaagatctattatacgggcacgaactgactctagttccagctccagtgtcgctactgttgcttctagttcttttatttgcacctgtgatttgctgtccttctctgtcagaaggaatagtttgctttctttctcagcgagctgctctttcagtttgctcgaatcagctgtgagttcctgtaccatgatctgtgtccgttcaagctcatctgaagtttctgagattttcgtggacatagttctgctttcttcttctgcagccttcagactttcgctcaattccaaaaccctgtgttcagatgattccagttgcgcttctaaacctcttaactgagtggataattctctctgatgagtctcatggatatccctcaagctaaaaagctcattgtctttctcagcgtggctcccttttaatcgttcagactcagagctgagttcttgtatggtgctttccgcccgcttgatcttgatcgacatttctgaaatttgctgagataaaattttcttctcttcctctgaactgttcaggttctggtacaattctttaacctgttcctctgctgattccacccgtgcttctaattgtttcacctgactagaggaagctcacttatgggccttcggtacctccacaaaactagaaagctcattctctttttgtgcgagtgtatctttagactctgccaattcagtcacattttcctgtaccttgctttgggcctgtttgagctcatccgtaatttccaagatcattgaggacagggacttcttttcttcctctgcagcattcagactcgcactcagatctacgacccgttgttctaataatttcagttgagtttctaattcactcaaacgagtggatgattctctttgatgagtctcgtgaatgtccctcaaaccagtaagttccctctctttcacaccgtggctctctttcaactgttcagactcagacatgtgttcttgtatggttttttgtgcttcttgaatctcattagagatatctaagattctctgagataacatttttttctcttcttctgcattgtccagactctgcttcatatctgcaacctgttgatctgctgacttcaccaaactagaaagctcactctctttctctttgtgtcggtctttcaactctcccaattcatccatgagttcttttatcgtgttctgagcctgttcaagcttgtccatagtttccaaatttttcgaggagatagctttgttttcttcctctgcatccttcagatccacagtcaaatctgagatccgctgttctgaggattccagttgagcttctaattcactcacgcgagtggatgattctctttgatgagtctcgtggatgtccctcaagctgaaaagatctctatcctttacactgtggctctctttcaactgcccagactcagacacgagttcttgtatggtggtttgtgcctctttaatctcgttagacagttctgctattttctgagatagcacttttttctcttcctctgcattgtgcgagggtttggttcaactccgcaaccaatttctttgatgattccacttgctcttctaattctttcacatgaattgatgaatctctctggtgagtctcgtgtacttccaccaaactagaaagctcactctctttctctctgtggctgtctttcaactttcccaattcagccatgagttcctgtatcgtgttctgcgtttgatcgagtttgttcatagtttccacgtttttcgaggatatagctttgttttcttcctctgcagctttcagactcgcactcaaatctgagacctgctgttttgaggactccagttgagcttctaattcacttgctctggtggatgagtctctttgatgaatctcatggatgtccctcaaactgaaaagttctcgctctttcacactgtggctctctttcaactgcccagactcagacatgagttcttgcatggtgttctgcgcctcttgaatctcgttagagagttctgctattttctgagatagcagttttttctcttcctctgcattgttcaggctttgggtgaaatctgcaaccaacttctctgatgattctatgtgtgcttctaattctttcacctgacttgatgattctctctcatgggtcttatgtaactccaccaaactagaatgctcactctctttttccttgtacttttccttcatctctcccaattcggaaattagttcttgtatggtggtctgtccctgttggatcacatctgaaatctccgaaactttcaaggatagagatttgttctcttcctctgcactattcataccgctggtcagctctgaaactcgctgctctgatgcttcaagctgctgcttgagattagaagtttcatctttgagctgatcactcgttgttttccaatcttctgcaactttttcagcttcttgaaatcttttgataccattgtccctctcagtttgcagttcatctctctctttttttatatcttctaacttctggttcagatcagtttctgttttgccagcaacttccagtttctgatgcagttccctgttatcactcagtgctattgacttttcgtcctctaacttctcagtttcaagtttcaacttactgctaatctcttctgattcttttaacttcatcaaagctaattcaagctcagaatctactgcttctttttcttcaacagtcgttgtcaacttccctttcagatcagcaatttcaagatttgcagcttcgatttgttgctttagggcacctgttaccaactctacatctttctctac

SEQ ID NO: 36812 - DNA, 4121 bp, Arabidopsis thaliana landsberg
catacctcaaaaagactggccattttacctgaagaaacaaatccgtgtgtgttttcccctcgtaaaggatcacttttgctttggccccaagcctctggagggtttccgcaaaagatttactgcaaagatagtgtaatagaaattcaatcatcctcttaactttctgatatacataagacagacaaatacacacaaaagttaaaccataccttgcatctgacgggatggagtagtcatcagtaccatggaataaaataaaaggtgggagacgagcaatgatgtgtttgagattcgggttttgcactactaattcaggagagaactgccttaatgattcctctccttccatgatgctgaggaaaatcaaacgtcacacgttaaactgtaaaaatttcaggctgctctactggccaggtgagtaacgtaagctataccaagattccaaaagagaaaatgctatacctcagaaagatggaacggtacagccccctgctatggaagtggtccacaaggttcaaaaggttgtatctgtagatcacgatcacaaagtttgttaagaatagccaagcagatgatgtgaggcctcatcaaaaaatttgtggctttagttgggtagaaggcaggaatctacttgctactttgagctaatatttgaccattacttcaccgttctacgaattgcctagcatttctacaaaagaccttggtggctagataaaaactggagttaacacatatatacatactcaggcaattaaagaaacttgtttttctcaacttcttgacagaaaaatttacattccaatgtatcgtcttatccttataaatgggaagaccaaaataacaagttattaatctagtcatttgaactctgagaccaaaagaaaggattttgcttaccctccagatagaccaaaataagcatttatttgtgaactactccaagagacactgtccccctcccctgactctttaatgacctgctctacaatggtgcaagctgcgatatgtgcaccagctagactgacccatcagatagatcctacacagcaaaaagatcagaaatcagtgagtaagaaatctaaaactggtgaacttccatgtctaataattgttgacaggactagaacctatctggatcacctccatactcagcagtatgattgcaaacagatgagatgccagaggaagcatacttgaccatgtcactaatagatccttgcggaaaattcctgtgtaagaggagatattgccaatgagattgagaaactctaaatgaatactgaaggaggatgagaggaacccaccacattcaatgtgccagaacaaagaaaaaaaactcaaagcacgcataacttacctgtaatcaatgcatgccacaataatatctctttctgataattgctgtcctaagagagaaccccacgccttataactgtatcaacacaagacattctgtaagatatttgcagctctttctcctcgtcctcaaatgctttagaatgaaaatagtgtccattgggtatcatactcacccaataatccaggctccaccagtcacaaacgccacaactggttttggtccagtagagttcttaggtagatacaagtcaagcctgaagaaaccaaaaaccacttataccaacatacaaaacacaaaccaactactagtctctagagcaataatctacacatgattagaacgaataataagcagtaaacaatcatgacctgtttcttggttgatcaccgtaaactatacttctgcgaacgtaaggagagaagaaatagtagtatccgactgcaaaagtaaagtaaaacctttagcaatgaaacttttagtaactatctcaaaaaagagagagaaagatccctaattagtagatgtcaaacaaaccttgaataaagcctggcattagtagaaatgcataacacccaagtgccataaatcttgtaatccatctataacctaccctgaataatagtttttgatcagtgatcgatcaaaccaaagatcatctttttatatatgcctaagaatatcgatgagccaatttcgtcggattcagcaaatgtaacagataacggaggaaatagatagatacccaagatagcttaggagcttcaaacaaagacgggtcaacaagaatgtttctgcagcggcgtggccaacctcctgaccaatagtagtttgacggtcgccgctattattaccaccgtcggcggttccattagtatcatcggaaaacgcagagagacagttatcgctgttagatcgtcggcgtctattctgataccaaccagtaaatccaccagcagaagaagaagaagacgtcttcatggccgtgccgttgtagctggaagagcgggagaggagaggcttaacggtagaagaaatggtgtggtggtcatcaccaaatcgagagagaagggtcgtagaaggatcatcgtaaatcaaagacttgaacatcatttccgtcgatggtgaagatttaggtggaagatgatgtgagatttggagaatctgcgacggcattttttctcacttcctcctgatccgttttttcagctatttttaggttttcaattaaattggcgacgaaaccggaactgtattttgagcacaaaagtaactaggaggagatgcaattcagaacaaaaagttactgtgtcagtcttgttctcttaaccaccagggaaccaatcgaatccccttcagctgctgatttttgtattactagaatctagtttctttatatctggttagatgttaacgttaatgtttattcagctgctgatttttgttttggttactacggtttaagttatttgttgatgagaatgtgtgagggttttagttttagttgataagattgttaggattggatttagctactttgagattgatttgactctactttcacttttagaccctgaaagcaagagagagctgaaatgatggtcttgtggggattgaagatttgattatgattagttcatatcctttcccttatggtagcttttattgaataacctgttcaggaggaacttgatgagagtaagcaggcagagcaaaacctacatgatgcttcttcttctaaggagaaagctcttctgaggtcgtgtagcagcaagcttccccatcaaggaccgtctttgttgggaatctgccagtaatccaacaaattaatccagcttttatgtaagtgctaacattattgagttcacgcaaacaaaagttttcttgaactaacattttgtttatataatctatatttagtgagagtattcttcaataaagtagttggggatgttgttgaggttcgaatggcgcgtttggctaatggcagattcatgggtttttgccatgttgtctttgatactcctcaacacgctttgaatgtgagatttattttcttgtgattaaaaatatttaatagtataaattttgaattttgatattttctacttaggctcaagcctttcaaggacttaagctactcgatcgtcaagtttccatataaacataagaaatatgggattaagatctagaagcattaccatcggtccctgatcatgttgtattagtgtaatatcttactactgtcttttggggatttgccattatccttcaaatcagcatcctacaataaacacacaggaacgttataccacaaaattatttatctaagcctgagcgaacatgcagatagaagaaacaaaccagttctgcttcgacttcagccaattcttctgaaccccttgcaacaaatttgatgaagaattgttaccctcctccttctttgaaaccgtcccacaaagacatattatattcttacaggcatatttaagaatcttggacatcaaaaagaactgtagttgtttaagttcttgttccctttgatattactactatccattctcttgacaaaatttagtcatgccaccacgaaataagtctagattttttggttcatgtccgctttaaatcttttaattaagaaattgatttgcaatattgtcaaatgttgattatgtcaagaaaatcttggcatttattcgttgattttttcttcctcgtttgagaataaattcgattctagaaaacgaagtctccttcg

SEQ ID NO: 36813 - DNA, 2326 bp, Arabidopsis thaliana landsberg
  unsure (1)..(2326): unsure at all n locations
gtcaactttaaaagagattcaagagtagagacttttgttttccttagccgtttcatgggatgagtttctagctatgatctggatcaggcttgagtcagatcctgcaagtacttatccttagcggtttctctgcattcaatacaacaccaattctggaatgcaacaaaacacatgtaataatatgtttcctcgtcaaaaccaccaaatcaactacatggcaagtcactagtttgatgaaatagtaaacgataataaaagtcctaaatatataagaatcatgatgatgataccataataagacaaagtcataatcagtatccaaaaaaatcactcaagcagaaagaatagaatacttagttataacgacattaatataaaatcttcttttcttggttcacctcctcttagtcttagctttgaatccaccaccagactcatcaatgtccttctttagctttttcgacttttgcccattcttactcttcacaatgtctggtttcccactcactgcagacttactactactcatcttcttgctcttcttcttatctgcagaagcattgagatcatcagcaacctcatcttctgcaacactcctatcgaattcatcatcaccaagagtctcagatcattactatccatatatctaacctcatgaatctttccattcttcttcttggtcttcacactcttactactactatcatcaacatcacttttagctaatccttcaccattcttaacttcttcaacacctaaaggatcaatcttgagctgcaaataaggcactgtctgatataatggcaaagataaactctcagataacttcaaatgcaaagatcttatgtatttccacctactaggcaaaacatcaacaacaccattcaaagtcgccgtcacattctcaacgatatcatcgctttccatggacaatttcgcaactttgatcgcactacaagacccagtcctcatgaagaacatagcagcaccacaagctttctcaatctgctctttccaattcatatgcttcaaatcaatagccacaggagtcttcttgctctgaaagaacttcttcccaatcaattttggcaacataggaatcactctccgatctgagaaaaacatatcgtatgaatcacaaagcttccgtttcgattcgaatgatccataatccgatttcagcttcgaaagcttaacaactttcgtgattggtatgttctctgatttgatattcttcttcgcatcttcctcggtgagaccactttcaggtctgtcgtcgatgatgagacagagctccggtgagtcttcggtagtgttaattagcggatgcgggagaggaatacgataagcgttcgtaaaattcctctgtggaatcttctttagggctacgactaggtaaaagaatccgtcttcttctagaagctgtggcttctccgtccttgatttttcgtttccctctttgaccagagccttaactgcatcgtccacagtcttgggacttactcttgacataagtggtggcggcggttgcggctgagctgcggtggtcggaggaaaagaaaagttatttagggttctgtgaaggaagattcagggtttacggaggacgatgacttttaaacgagtttgttttgggtttcttaaggcccataatattggttaatgggcttaattatattgttttcataaattgtcctcaagtttttgcatcggagaaatcttttctattaaacgagtttgttttgcgtttcttaaggcccataatattagttaatgggcttaactatgttgttttataaattgtcctcaagttttgcataggagaaatgttttgaagattttttttttgtgtggtaagagaaacttttagaagatggtaattggtaagttttaagatataggaaattatgacaaactagcttattttatcaatacatgaaatcttttttatttcatgttaatgtagatatagatataaatttaaaatatgaaattaattatataaaatatgagtcatgtagtactttactttcatttaccatacttatctaaaacttacttaccaaatatatttcattctaatttttatatacaaaaaaataaattatatacacctctacaatataattattaataaaattcttttctttattttcaaatttttattcccttcncaaaatctctaattcctcttatanctcttcaaactttaaaaataaatatttctttaacaaaaaactcanaatcacattaattaaaaatctcaatatttatataaccaaaacaaaattctcaaacacttttctttatctaactactatataaa

SEQ ID NO: 36814 - DNA, 1144 bp, Arabidopsis thaliana landsberg
ttactgatacaaatgactaaaaaaaatttagtttacaattaacaattataaaattatttaacaaacttaagtgataagtgataacacattgatactaatacaaatgactaaaattttattcgtttggtagtaattagtacttgtgctgatcaatcattataacaaatttaccattagtttctagtcaagaaacttagaatcgtataagcagactgagtccatgaacattatagaacccacatgattcaacttcaaaaccaacatttgttgggaaaaagacgatgagattgttgacgatattagtaaaacaatttcattctcattaattagcaaaagagtacaattgggggtttatatacaaactgacattggcctaaaccataagcctctaaaccaaaattaagattggtttatagaataccaacctgtacagactctatatgaaatctatactaaccaaactaagcttatatacaacaatctaagctatatacattaatagtccccctcaagatgagaatacaaaaatgttttggatactcatcttggacaataaatgagcaaattgataagggaagagtggtttagtaaggatatcagcaacctgatcttcagtcttgacatgaagcagcttcaactgaccattatccagcttctcacgaacggtgtgacaatcgatttcgatgtgtttcgttcgttcgtgaaacactgggttagtggctgtatacacagcggcagtactgttagagtatagaatagacacacctgaatgaacacgcaaagccaataagcaaagtgaacagccacgccatttcacaagaagccagagccaatgctctatattctgcttcagcagatgaccgagaaacagtgggttgtttcttggagcgccaggagattagagaagagccaacaaacatggtgaaaccagttgtagatctccgactatctgggcaagtaccccaatctgcatctgtgtaacccttcaatgtaagatcagaatctgcagagtagaaaaggctttgacccactgtacccttaatgtactgcaaaactttatacacagctgtaagatgagatgttcttggagcagaagaaaactgacaaagcttgtttacagcaaaggtaatatccgggcgtgctt

SEQ ID NO: 36815 - DNA, 4231 bp, Arabidopsis thaliana landsberg
aaacttttgctattaaaattttcatcggagttatgtttttccccgattctcgtctacagtataaagttgattgttcgattctagattttttccttaattctgtttcatcatgcctactactcataaagagaatgttcatgcaggtgacttcaagcagtgaatctttgtcaagacaccttttgcgatatagggatatgaacaatcttgtatgtctacggctaaataacttatcactatctcggatagcctctgttgagaagttgctgtttgtccaaatgttagaccttagtcacaatgagcttcattccactgaaggtaagtttctcgatttcagatgttgcatctgtgtggtaaatgtgactaaatggtgtatgttggtcttgcaggattggaggcaatgcaacttctctcttgtctaaatctgagtcacaacagaatccggagtttttcagcgctggactctctaagacatgtgaagcagctgaaagtgttggatgtttcacataaccacattggcaagcactcagtggacacaactagatacctttgttcttcaccgctctctaattcagagttgggtcaggatgatttaggatttcagaatcctggattggttacgaaggactgggatgcgtattgcgtgttaagagatttgaatctgaaacagttagatatagcaggaaatgaaattgcaggggaggaattcagctcttttgtcctccaggttgtcccaaagcttgtatggctcgatggccagaagaaacttgggaattagatcataggccaagtttttgtttactttacctttcgatcatcaaattcccaaagcaatttaggttatcttgatgatctttgttgttgtgatatttcttagcaatcttattgatgacctttatttaccaaatttgggttgatatttcctaaaaatctgaatatttttcttcagactgaatctacctatataaatattggttttggttcgataacaagtaacatgtaaacaacttgatctttgttcctcttgttttaccaatcaacttttaattgaacttttgatggcatacaacaacatacaaggattacaaaatttacaacaaatgcaacagtctggaacagcaagaaaccaaatctcatattttttttatttattgtctcgcaagtaagtaacagcatataaaacctatactatacaaacaaaaaccaaaataaaaataaaaaagccttccattcttccaggtaaggcttctctcgtctcattgatttttctaatttaaaatcgaattcaggagctaatcaacgcaaagcacctacagtgtttctgttagcaccgtaaaagttaagtatttatactatagtatgggagctgatttagttggaattacccctttgtctccacccatttggatcagctgcaccggagactttagtagcttcttcaatgtgtccactatactaccaaatgctggccgctgagacggctcatctgcccagcaagcttccattagagataccaaaaccggagaggtgttgggaggaattataagccgcctgttctggaatgcaactgctccaaccacctaatcaccagaccatgcaagactcaaaagataatactaaaactaaaactctaatactaatggtgtactataactcatgtgtgaaaaccaaaggggagagattgttggttacctgagcaggactgagtccattccaaggctgttgcaaagtaatcaactcccataagactactccgaaactgtaaacatctgatttctcgtttgtcggttcccctctaagaaactctggagccatccactcaggctgttaaaacatatcaaagagaagaagttcacatgtcagaacatatttttccatcatatccccagtagttaaattttaagagagcttactgttcctgcaacagattttgatggtatgaaagtgtttgccttgaatcttgaaagtccaaaatcgcaaacctgagacaggagcaaggtcaagtttgatatgttacagaaacagacgatggaaggctttgtagcagtccattttttttattggtttaacatcgttaccttcactgtccagttcttatcaaccagtagatttggagatttcaggtcccaatgcactacaggaggattaagacagtgtaggtagttgagccccttggcctgttccaagaaaggacacatatattttttatatgttttaacttagaaatatatcaaaacattaacataatggggaatagcacaaaccacatccaatgccatacgtagcctcctcctctgatctagcaactccccagaagctggcctatggataaggcgaaaaagactgcctctgtctcaaggagtaagatggaaacataagctacttagtaatgtaagcgtttcaagaaaatctatgtgagataggtttaccttggcaaatattctgttattattgataaccggggtcgctctgtcacagcacccatgaagagaacaacatttgggtgacgaacacgtttcattatagcaaccttcaatcaaaatcacaggattgagatatttcagagaggttccaagtgaagttagttataaaaagagagaaaaccgcttgcttacatacctctctgagaaattctctgaattggtcatcatggaaatcttgaatagacaaaatcttgacagcaacatccttcataaacaaaaacataattagcatttgtgcatgcaaaactactccaagcttaaatgatgatcttttttagagttgaaacctactgatccatgccactcagcacgatgaacagttccaaatgatcctgaaaaaaataatagagaaaatttcataagagactttgttaacatggtgcttcatcagaaaatcttttgtacactcaaaagtcatagaaggacataccagcacccacacgctctttgatatgtaattcattccatgagacctccagccaatctgatgccaaagaaggttcaatagtcaagtaaggtgagatggcgtcaacaggtaaccttccttttttatcttttcgagtgtcagcctctactatctctggttcaactgataagtttggctgcttcatagctgttggatcttctaatagaacggtttcttctttgcaggtttcttaagggcaatcttttcttcactaaggtttggtatatcaagtggtagagctcgaagaacagattctgtcaaaaccattgatgatacttttgcacagcaagtttgatcaatatgagcacaacatactgtccctgcgttatcaggcaactcaaattctttgtgtacttggccttgactccctacaagaattcagttagctgattgtattacaaactatggaccgacaatttcgtataattatgacattacatattcagctaagtgcagcctacctgaacgttgaatgttttcagaaagagtgcgtgaagtctttgactctacagtctgacaaggagatgtactatgcacgcaaggcctggaaaaatctgtaagatgactcatttgaagaggtgaaggaatctgacactgtgtttcaccgttgatagaggaatccggatcatggacatttcctggttccccgatgaggtcaactacatattccctgttgagaaatgatatcaagtattactcaaaatgtggaacataagctcaaaacaactcaatggtactccagagctagcaactatttgtaaagcacagaatcaaggacatacacaagtagaccccctggagagtagatacccatctgttagtaaaacataaagaatcaataggtgttttaaatagaagcaggtatagacttcctaaataccatgccctgaaagtccacaagtggaggcatcaaatagtgatttgctaacaacctgagagtctacttatgtaaacccactgaggaatctggctgtagttaagtacatagagagggagacaaaaaaacggccaatgggaaggctttaaaggtttaacactatcaaaccttgaaagcttcctgtcatcgtcaatcttgacaaggcaagaagattggtggctctctttacagtatctgcaacctcgagctatccgacatggtaaacctatgtaatcagccaatttctgcatagtcatggtaagcaagtcaatatccaatattttggacaaatgtttcttgtttaaaacagtctagctttctcttttactatgtaagttcatggctcccctttaataggatggcacgatg

SEQ ID NO: 36816 - DNA, 1263 bp, Arabidopsis thaliana landsberg
ctgccacaaacagcttatctccttcgaatttaacgtcaaagaaagcagagtccacacctgaaataaaaggaacatccatcagcgacatgggtgtagtctgtaatataaatagtacacgattaatataaatagaatagtataaggtgtgaactctaatttcccaattaatccataaccaaattagttttgaaacaagcatcaaacgaaatcagagcttgtataatcggatcatctgcaatctccgaatataactcctgtaactgaaccgctgtggaattctagacctggtttgtacataatctccatatcatgccctaataagcgagtcaaccaacgctgatactccatgttaacccctctttgttccagcaaaaactttaaacttctctgatctgtatgaacgataaacttctttcccagtaaataatgtttccattttaacacagccatcacaattgccattaattccctctcatacgccgactttagttgttcccttgcaataagtccaagactaaaatatgcaataggtcgtttgtcctgcaacagaactgcttctactcctgtccctaaagcatatgattcaataataaaaacttttgtaaaatccggtaagctcaaaacaggtgcagagaccatcacctgtttcaactgttcaaaggcttgttgagctgcctcagaccactgaaatttatccttctttacactacaagaaaacaggttataacgactatacatggcgactgtttatgtagtcgtcaaatttagcgacaaagtaaggactatttagcgactgttttacgactaaactaaaaacaacgttatatagtcgctaaatggcgactctaacacatagtcgttactgtagtcgttatttaacacataagtaagtcgggaaacaatagtcgcatataagtcgttaaaattgtaaatataatgaattaatttttattgtgatattcagactattagttttgtagttatcaaaatacaagtaaacattctaacagattttattttcaagcaacatacgcatcagacacatcaactggctcggactcagctttcatagacctcgagttttcagaaacaaccggttctgaatcttttactgctggttcatccccaccgtttgcagacatctcaacacaaacattgggctctacctcaaccgagctcactccaacttccttagacatgacatcacaaagcacaggctttacttcaaccattgactcagacctaaccgaactcacaccaact

SEQ ID NO: 36817 - DNA, 1607 bp, Arabidopsis thaliana landsberg
tagatatatatagattatcaaagtagatatctgtaaatatcataaaatttttaaaatatttaaatatttagatatttaaaactttattaattaaaataaataagagaatcaattattcaattaaaagagtcgaataagtaaaatcattaatcttgaaaatatttgttccctgtccattcctaaacattagcgacaataatatgtatatattctcctctttaaaaacaataatagcacgattttatgatgaatcagcaatgataacagaataatattgctctccacattttgccacgtctctccctaatttactagctgtcttccaccggaccacccctttcggtgaacaatgtcggcgatgtcgtcgaatttacgttgtcttttagaataggtcccacccacatccactaactaggccatcttcatgacatttttcataactaacaagaaaaggtcacaaagggattgaaattattcaatgcacatgctttagttttaccttgtagtatagagtttctaaagttttattatagtatagatttttaacgaatcacataagataaaaacaaaaaaaaaatagaagtgtgtgaattatattcgttttttattctaatgaaaaaaattggatggacaggaacggagtacaaaacagaagaaattcttatgttgatggaatgtacggaaccacgtgtccaattccaccgagaagcaactacacatacattttgcaagtgaaagaccaaattggaagtttctattacttcccatctcttgcctttcacaaggcagctggtggattcggaggtatcagaatccttagccgtcctggaattccagttccatttgctgaccctgcaggagattacactgtcctcattggagattggtacaaatttaatcacacggtaataatatgaatatatgatcctaaacaaatatacaccttttcaatctcatgcaaacggttttttattttattttatttttaactcatgcatgcaaacgttattgataaaaatactcacaactatttgttttgtgtttttacaggatatgaaggcttttcttttttgatgatggattatgcctgacaatcggggtattgtatatcactgggccaactcactgtgctaccttaaacgtcgaacaaggtgtgttagcatttgatgtttgccaatctcctacaatttttgtccttccaaaattaaaaaaaaaacgtttttttttgtgtatgtggttgtaataggaaaaacataccgattgaggatatcaaacgttggattacaagattctctgaacttccgaatccaaaaccacagaatgaagcttgtggaagtcgaagggacgcacacacttcaaaccatgttttcctctcttgacgttcacgttggccagtcttactccgttctaattactgctgaccaatctcctcgtgactactacgtggttgtttcgtctcgattcacggataaaatcataaccaccaccggggttcttcgctacagtggctcgtctacccctgcttctggtcctattactggcgggtccactatacaggttgattggttcttgaaccaaacacgtgccatcaggtactgatctttctt

SEQ ID NO: 36818 - DNA, 662 bp, Arabidopsis thaliana landsberg
  unsure (1)..(662): unsure at all n locations
aatcttgaactgctgccccagtttccacacatgaccagactctgtgtgaactccaatgaatattatttgaagatgttgccaatgttgcttaagagctgtccaaatctcaaatccttgtttttggtgatgatttagcttaacctttaccttattgctaactcacataatcatgattaagataatcaccttacctacctacttcttgaatgatatatatgcaggagccgatggaatacaagaatgaacaaactatgctctcattacctgtnnnnnnnnnnnnnnnnnnnnnnnnnnnnnnnnnnnagatgaaaagaccgataaatcgagctggagcggagatgatactagcaaactatttcctcgagaatgaggcagtgctcaagaagtttacactgcgattgtattgtggcaaagtggaggaagagtctgtcatcttcatggagctcttgaaatttagaaaatgctctgcttcttgtgaagtagttgttcaacgtatagagacttatccaactatgatacacaggtttctgtaacacttcaaattgcattttcccttttaggatagtttggtattggagaatttacacattccccgttttacccgaaccgttttatataacataggatttcattttttatttcacaaatcctattcagtcaac

SEQ ID NO: 36819 - DNA, 1306 bp, Arabidopsis thaliana landsberg
aaatttaaattttgcataggctttaatgtggacgatacccttatacaagtgaaaaagggtcaatcgtacgtttacccttaaatttcttttttttagtaacatatcgaaaaataaaccgttttatatatattttcaaaaaacttattcttcttgttaatgctgtcacatattataaatcattacaatgttttgacaaataaaagaaaaatcattattacaaatctaatcgttttaaaatcctagggaatcctactatattattattactattgtagaccttctttcttttgtcacattaattaataacaataaaataatatatatttttaaaaatatttttgttttgttttgcattgtatattatttagctgtagatttgtaatgggccacgtaattgggccatgctaagacccggcaaacccatgtgagatatatgatctcccgcactatagtccacgttatctcactgatatctcattattttaacaataagaccgtctcttaattttattacaagttttcttttactcttgtagccttaaattttaggctgaaaattaaagttttgaaaaaagctatagggagggactatgtaaaataaaaaaatgtacgttaccataagattttaccataaagagccaaaaataaaatatgcaaaactccactaaaaataatattaattcccctagccaacaaaaaagattcagattcatatcccacgcgctcgttcaaatcctctcattcgccacctgatcaaaccaatctcaatttgaaaattgaaatagacaaaatcgtgacattgggacataaaaaagcactaggacaaaattctagtcgacgcaaaaaaaattcgaaaaacgtgagtcagcgtatgtggtttacacgcgccaaagtgggagcgtgagtggggtttgaatgcacctgaaactgtctggtcaataagttaaagtgcatgggaaaaatcttggttgctgtttcctatatatctctctttttaccatcaacatgttacatatatatatggacaaaaatctgtatatgtgaatgcatataggagtgtgatgtatttatataagttagtaagctttgttctctttctctatttttttggcaggtatataaaattttaaaatggaggaggaaaaccaaaagccgcatcgcgtttcacgtaaagaccagagtggatcccactggagtcaaggagccgatgaagagccgagagccagatgctccgggaaaaggtgccggtcttgggcggaggcggagaatcgctgactgcgtggagctctgacgttgaccctgcgcc

SEQ ID NO: 36820 - DNA, 3882 bp, Arabidopsis thaliana landsberg
gttcactacctaattggatatttcctggacttccattcaaacattcagacattatttttagaggatggaaaattaaatttcaaaacgaaggcttatcttcgttatagcaaactgataatctcttaaaagaacactcctattcactaaaacaccaaacatacaaacacataattcatcaccatactacaacttacaaagatatatcagaaagttaacaatctcaacaaacctcgataaatccaagttttagctgcctcaggatcaatcccaactaaaggactattatcgttatcattaccaccacactcagaaacaacttgatgattttctggtttaggttcggttctaccgatgaatttgtcgagagtagattgtcttttcgcaggtggtttagtgagattttccgtaattggtggatgagcgtttgtggtttttagacaagccaagtcgatttctttgactgctgcttcccaatcgaattcctgtaggagaaaactcagaagttgaataattaaaaaattgattcaaaaacgcagaaagagattgaacttacgccgtcttcttcgatggtttctattggaaccctagatcccatccaagttaacaccaaacacgtcgtatccatgatgatttgtccacactgcattctcatttcaagtataacacaataaaccaaaaccgatattatcttctattaaatgtataacattatatcctaaccaaaacctaataaatccaatcttgtgactcatatggttgattcataccaacacacaaaagttcatacatcaatgaatatcaccaatttcacgagtagcgcccatctttttgttgaccattagttcacttgtttgtagacactctaatcattatgtggattgatcattctagagtatattgtggatgctgcaaatctcaaaaaatcattagccatgagagaccaaacataacaagctcaaacttatgtcaaaacgatctagagtgcaaaatgtatcacaatcttaaggaaacctagaactttattatttcgatgcataagtttttaccgaagcgataatcaccaatttcacatacatcatccattttgctttgacaatttgctcacatgtatatggatactcttatcattgcatagcacttggccactctcttgaatttgatgacgttaaactgatcatatgattattggctttttagattttagattttgcttgtttatggaatgtttgtatcttagttctaacaatgtggatgacgataatgaaatttttctatggatggcacattatggatgatgcatcgtggattgtgcagattgttatgatgagagttgtgaatcttttggtcttacatattaagaattagaaaagctatatgtggtgcctttggtacgattgttgtccacaaagttccatccatctgattcttaaaaaacatttagtcattctaaatcatttagatattctttttaaagacataattgttcactgacgagtgtccaaacaatcaagtctaaatggtcacctagtaactcacagtttgttttatatcaatgcacaaatttatacatgaacaataatcgttgataaaatttttgttgaacttttggggttcttcctctatttaacttttagaggttcacttctcttacatctcttagttctctttaatgctttgtttcactcactaatttaactcaagcacaaaaagaaccttcactctcattctctcttactttggatagtttcttgttttgacacgaagacataaaacgattaataagagagagaaaagagaaaacattagttgtcaacatttttgtattggatccaaaaatagattcttattataagacatacacacacatattcatactagtttacttctactaagtacacacttgcattatgcttctacttagacctagaccttactttaagacatcattactctagtctctaaggtatacccaagcttacaagcaaggtttaccaacaactcctacacaacaacaactctaacaactcttcactaagctaaactttaactaacataacacacttactcatttaggcctaacaaaacaattagcccaatcacttattatttcatcttctcccatgcatattcttcttttgcttgagcttcttcttcttattcatgttctcattgaagcattttgtcttacatatttaatcaagaactcaatctcaacagaaatacactgtccatttttttttgaccaatattcacttgtgtatagagtacggacactatcataattatataatggattcatatccagcgatgacacattaatgataaacaaatgcaacattgtccattgatgtgtgtccaagatgtgcaatccatatggttgtttataccaacacataagttatacatatatagaacaagatgatgaataagtcagaatgctctctcagtcgccaccaacaactcgatcgccaccaccaaccaacagacacttcatcaccatatcaaagacaacggtcgcaagaaaccataacaaatccgttggagaaacaactaagaagagacatcgaataaagcaacgagttttagatctatacctaaatctcttgtcgcgatcactggctgtttcttccgccgttgaatgtactcgctttcatcatttacacgcctgccgtttttgtactccaccagtgccaaaacttgactaatgaaacgagtacattcaattagccgaaactgaatctcagattccaataaaaccataggaattcgagaagatcatagaggaacgaattggtgaattgacttgtgatgagaagataaagaaatagcaaaatcataggaaaggtttttttgttctacttaattttgtttatttctcgataaagtgagaaaaagagagagagaagagagagaagagagagaagaatgaagagatacaagtcaaaaatattgtcacgaaaagaagttgtagttagaagggcaaattggacaatttagcttggaaaatacagaatccttttaaagtgccttaatcggtaataagtttccaaaaagtgtctaattacgtaatattctccttgaattatatacttggaatgtgacacgtttaggcacttttagataatcttatttttttttgaggcacttatgagggagagaacactttttctattatttgacttattttaagacatttttacccctagtttaaccaacgacttttattttgaaatttaacacaaattaaacactttctctctcttcgatgatccttacacaagaaatctctctctctctctctctctctctctctccatgatttgtaatgcctttctctctccacatctccataacttctaggcttgatttctcttatcgattatggcggcggttcaccaaaaatcggtggtaccgattctgcaaataaatgggagaagtttcttaaacaattcgatctcgattatctcaggaatttggtaaaatttctatgtccataaggaaggtgaaggtctctgcaaactgtataaaaaaatctacaaacaattttttggtatccataataacgagtccatttaaatatatccattcggaaacctttttactaattcatatccaatctatataccatgtccataataacaagagattcgattaaccgtggtttgtatagaaaccaaagttccatgtccataaggtcttgaaggtggaggtcttgtaaactgaaagaaaaatcaacaaacaattttttggtatccatattaactagtccatttaaatatatccattcagaaacctttctactgatccgtatccattctatataccatgtcaataataacaggagattcgattaaccgtgttttgtaaagaaaccaaagttcc

SEQ ID NO: 36821 - DNA, 1821 bp, Arabidopsis thaliana landsberg
  unsure (1)..(1821): unsure at all n locations
aagaccgtatcatctttttcgcataattttaggtataataggtcaaaataaataaataaatgtcacaataatttatattaaccacagattctttagtgagagcgtagtagtagcttaccactctttattactataaaaccagtctcactaaaccaaagccaatatcccaagaaatcgaaacacaaagcaatgggctcttcttctccattaacaaggagaaacagagcaccaccatcctctgtttcctctgtttatctaatctttctctgtttcttcctctactttttaaatttctcaaacgctcaatcatcgccggttttcgcctgcgacgtagctgcaaacccttctctcgccgcctatggtttctgcaacaccgttttgaagatcgaataccgagtcgctgatctggtcgcgaggctcacgttgcaagaaaagatcgggtttttagtgagtaaagctaacggcgtgactcgtcttgggattccaacgtatgaatggtggtctgaagcacttcacggcgtttcttacatcggacccggcacgcatttttctagccaagttcccggagctacgagtttcccgcaggttatactcaccgccgcttctttcaacgtatctctgtttcaagccattggcaaggtaattaattttttatccacttttgatttttgttttcaaaattttattttcgtcctttgcttttattctctttttggataatgggaatatcttacttattatgaaactgggcctctcctttttttttgatctttcgtttggtacaagtaaacactttacaacacgttatactacgtcgtttttcgtacctgtaaccaataatgaatttctccccacacctgtttttcagtgccatgattaatacgatcatgattcatggttaagtttcagctcatttcttctaagaaatataataaacccaatatggttctggcaatacaattttcaaaccggattggatacacatggcttttttgaatgacattggtatcacttatttgttaaggttgtatcgacagaggcgagggcaatgtacaatgtgggatcagccggtttaacgttttggtcacccaatgtgaacatattccgggacccgagatgncgaagaggacaagagactcccggcgaggacccaacactctcaagcaaatacgcaggggcctacgctagaggtggggaggagactgacggcggatatcctaaccgactcaaagtcgatgcttgatgcaaacactacaccgcctatgatatagacaattggagaaatgtccagcgtttcactttcaacgctgtggtaagaagaaagagttttttttttggattctttgaatattttgtaacttttgttatttgtcacactaaatacatttcaatgtttcattctgttttttgtgttatgttggattaggtaaaccaacaagatctggctgatacgtttcaaccaccgttcaagagctgtgtggttgatgggcatgttgctagtgtcatgtgttcttacaaccaagttaacggtaaaccaacatgtgccgatcctgatctgctttccggtgtgatccgcggacaatggcagctaaacgggtaaggttatttggatccaatggtttaattttatggagggtttggctatctaaaatcatcgggtgttttttttgttagatacattggttccgattgtgattcggaagatgtgtcgttcaaaaaacaacactatgctaagactccagaagaagctgtggccaaatctctattggcaggtttggatttgaatcgtgatcatttcaatggtcaacacacgatgggagc

SEQ ID NO: 36822 - DNA, 3030 bp, Arabidopsis thaliana landsberg
agtactcaaagtagtatttaagttctcaactattatgcattttttatatagcagctaaaatattactttaacatgatagaaaaatgattttaaaaaatagaaggaaaaacagagtagtattctgatacaacatgctccaatttatgtaacttttgcttatatattaaactgattatgtagtatgcaactcttggctaatctgttctcaattcagaatagtgcaacaaatgatgcagtaaataatctatgtttactggaatttaactcgctctatacaaaaaaagaaagaaagttatagtgatatcttatttagaagtatgcgtaatttattattcttcagtgttctataattggttaacaaaaacctagtgatgaaaacaagaggagtccttactagatagatgcatataacttcatcactacaaaatttatttgatcacaaataacacataccaaacaacaaaccaagtaatcgatatatactagtatcaaacctcttttttctctttacatacacataacacaaggtcatccacaggacatatagcgtctgcattgaggaattagaccatctctgaagtaggtttcaacttagtattgtttttttttgtctaaaacactaaagtttgattagactaatgcatccatattcaatgaaacaaagacatagtaaaccaacctagaaaaattattcaaaaactatacaaaaaaagatagtttgagtaattggttcttccaaaacaagactaatgcatgcagcatcttaaaacttcaccaccataaacgaaaattgagtaattggttcttccaaaacaagctaagattccactataatttcttacgataaacaaatagataaagctacttatgttaatgttggattacgctaagaaaattaaggcatgaatctatcggcccatctcgaggccaacttagtccacaatctggatcattgtacttagatatatttgacttttattttgtggtcaataatgtacatattgttagacaaaaataacatgttaataaatatttttttttttcaaaaataacgtacattttgagaaaacataaatgaaatttctttccaaactaagtttcataatagcccaaaatattatttaaacatgatagaaaacaattgtaatttgacaacaaagttctagaaaaataagatacataaatcctttatctataatcatcaaaatattataaaaatctgatgaaagaaactgtctctttcgaggggttgagagataataaattcgacaacgattacggatattaccacaacttattgccaccacatgaacatgaattggtcaaaatcggcagctcttgattcaacgttttccttctattaatagcgaccaattgtgtctttcaatcaacacaactcaaccatgaactcttgttgcttccctctcttcatctttgcattcgttatctttctccggtgtttaagtcccattgaagctgccacgtgtcatcctgatgacgaggcgggtcttttagcttttaaatcgggtataactcaagatcctacgggtattctcagctcttggaagaaaggtactgactgctgttcatggaagggtgtcggttgtctcaccaaccgcgtcaccggactcactatcaacggacaatctgatgttactggaagctttctttccggcactatctcgccgtcattggccaaactccaacacctcgttggtatttacttcaccaatcttcgaaacatcactggttcttttcctcaattccttttccaattaccaaatgtaaaacaagtctacttcacgaatagccgtctctccggtcctcttccagctaacattggtgcgctaagcgagttaggagaactaagtctcgacggaaacctgttcactggcccgatcccgagttccatttccaatttaacccggttatacctgctcaatcttggagataatctcttaaccggaactatacctttaggtcttgctaatctcaagctcttgttgtcactcaactttggcaacaatcgtctctctgaaaccataccggatattttcaaatccatgcagaagctccaatctctaaccctctcccgcaacaaattctctggaaatcttcctccgtccattgcatcactcaaaccaattctcaattacctcgatgtaagccagaataatctctcggggacaatccctacctttttatcgaacttcaaggtactagactcattggatctttctagaaataggttctctggggttgttccgaagagtttagccaatatgcctaaacttttccatctcaatctctcccacaattttctaaccggtccactccctgccatgaagaacgttgatggccttgccactctagatctttcatacaaccaatttcacctcaaaacgataccgaaatgggtgacctcgtcgccgtccatgtactcgttgaagctggtaaaatgcgggattaatatgagcttagacaattggaagccagtgagacccaacatttacttttacatcaatctgtcagaaaacgagatctcagggagtcttacatggttcttcaacctagcgcataacctgtatgagtttcaagcgtcagggaacaaacttcgattcgacatggggaagctgaatttaagtgagaggctagaaagcctcgatctatcaaggaatttggtatttgggaaggtaccaatgacggtggctaaactgcaaaaactgaacttgagtcataaccatctttgtggaaagcttccagtaacaaagttcccgaccagtgcgtttgtgggtaatgactgtctgtctggctctcctctttctccttgtaaagcttaaccggcaagaaagctacacctggtagttgaatatttaccgtgaccaatagagtttagctccaaataaaatttgtattacaaagattacaacaaataaagtagttttatgttataaagaagcttcattctagcaatatgtattagtgaaagtactcaaagtagtatttaagttctcaactattatgcatttt

SEQ ID NO: 36823 - DNA, 2497 bp, Arabidopsis thaliana landsberg
agacgatggcttcgtttacaatcgaaaaaaacgaacccgtttcgccgacgctgaagaaacatcaaagccgccggatccggagttagatcgggtggtagaagagaggaatcgaaggatacggaagaagagattactggtgaagctcaaaagaaagtaccagagtgagatcgaccagtgggagattttatcgaatagtttcaatgctatgcaagagaaagcagatcgatttcaaacggcgcaaagagaagagaggttaaatgcgaacgaaacgatgtcgtttcctgggaattcttcctctacaacagaaggaggccgagaatttggcggagaagatgcttctaagtcgccgtcgtctatgctcgaccaacttatttttatggtaattagggtttgggactcaattcgatgagatttttgaaactggttcgttttttgaaatttgaattttgaaattttgcaggtggaaagacaagaagcggtaatcaacgaagtctcaaagctatgtgaagttacagagaacatatgtagagtggaagaagaagaagaaacgaagcagtccttctttgatcttcccatatggagctcaccaacggatctaatggcatcgctttgtggtgattaacacttaaattagtcctcttatgtggtttatctgagctctctacttaggtttactttgtccaatgcgtgtgtgttgtgttttgttgcaattgtagagtgattttgtgtgttaggctcgaattagggggtgttctatccggattttagtcagttatatcctcaattttcaaaaatagcttcagttttatactggtttttccggaacggtttcgggttcggggtttggatatagatatgggttcaggtaagtttgtcttagattgaatccttcctatgctcaagaattatgtatctatttttgccatacctcggattctataaatcatgaatattttgaaggcaaacactaattgaactgagtacttgtttgattgtttcaacaaaatatgaaaagcataacaacctgcagtaacttaaaaccacattgtgtttcattgttaagatgtgtatgtttcaagcaatctaagaagtttggtagataaattaaagagttataactaaaagattaagcaaagagaattgtcaaacatcaaaataaaccacccaagactgtacaagttccattacctgatgagagagcattttagaggatatagaatctctactacttgttcaatggtcagtcttcttcagattccgcttgagcttctgattcgtccccaatatcctctaaaagcttatcaacatcaactcctaattctatcagcttcgcgcttagtttttcgactttgctctcctcttgtcccaaacatactaacaagtcgtttaattcatcttcactctctttctgagcttcttttctcacttcttccttaatggcttctatatcaggaaactgcatgggactttctcctcctttcaaggatttcacttcctgctcaagatggtaattcgcctgttctagactgttgtatgcatccgataagctttttaggtcgaactcaagttttgcagccatgttcttgtaacttgatgcctcagactcgatcttggccttttcagccttcactgtctctaaacgctgagatgtttcttggagttctcgtctgatgctttccatctgaactttgtccattactgtacttgctctttgctctgatccttgaggttgctcgttcctgccagagctagctacgtcttctgccaaagcagcgtttcgagcaagaaggttctgtaaaacacagaagtgacaacaacaagaatctctgtcaggtacaactgatgttgagatcttctttgaacggttaacctcaacatataaattttatcacataaattcagagatctattgtatggatattgtctgatatcccgctgagaacataagacccacttcttcataatcccatcttagcagaaacttagtgctttctatattcccgtttcaccatgaagcaatgcttcctaatccccatattttagcagaatcccatctatttttaaaattcatgttacttatgaaggggctggagaattttcttcttttaattgcaatcaacaccaaaatggtatattttttcagatatgctaactgtattatactcagaagcatagacagttgagaagaggcacatacctgaatctccgagcactgtttctctataaaggctttcaagcggttgatgtagtctatctcattttctccgctcttctgctccaaatctgctggtactacagccacctcactttttggccgactatacacatccacgattctttctctgatgttaccttccaagctcttcactaagcctatgaaactagcatcaaacaaagataagagcattgggtgatcctcattccctttaaccatttcatctacctcatccacctcattaatctcggcttcactaggagtgggtgttcttgtcaaccg

SEQ ID NO: 36824 - DNA, 2105 bp, Arabidopsis thaliana landsberg
accagctttagagattagatacaaaagagctatctcgagaatggtgtttgagagcgttctaattacttaaatttttcatcttctaaatgattttggtttgtaccaattttttgctttgatccatatatataaaactttcataaacacgtactaatgtaaaatctgttattttataattttcaaataaaaaatgtcaaaatatgcgcaagttttcaaatttaggatgaaaaatcatgaactttcaaaatgtcatttaaatcataaagttaaagttttgtttgacttttggataaaatgattaagttttcttggcttttcgttattagagtcgttgtgttagaaaataatagtagaaaactgtattcatgggacttaaactgtatagctttaaacccagttcataaaccaattggaccactgtgtgctagtgctacctatgccatacataaaccaattcttttctttaaaaatgtcctcctcttctacaaatttcactcattaattgaccaattattactaccttttgtttttctttcttttgacatcaattgaccaatttaaataacaaattattatactatacattttcggcgttattctacataatttaataacattattatataaaatagtgtcaggatatttatatatagaaaataacaaagtcgatttacgtctctcccagtaaactctgtcgttttcctcagtcagagagacacagagagagaaagagagaaagaaagaagcacctctcatggcgaaccagctcttcaccatcttccgattccttttcctctccaccgtcacttctacctccaaaacgccgccgttttatagcttctcctcccaaaaatgctaaacccacattcctcaaatctctcaccgacgcttttttaggttagtttcgaactcaagaactaatcttttgtgttttgtaatgtctaatcgacttaaacaattaatgggtacttctcattttcgtgtatttttcaattattgcttgaaagatttgagctttaacaagaccaaaaaaaaaaaaaaaagtcaagatttttattttagtttatagatcattttttcatgatgtggatacatttcttttctcagctttactaaaaattttcatttttgtgacaaattgactttatttagtttggtgggtcggcaggcaaaaaaaaacgttgaagattcgtgtagattgctttcactttattagcttactaaatgttttcacttttttagcaactttttttcccacaaatctttatatgtccggaaaggtacggttagtgttttcttacaagaacttgagaattggatcattacttttttttgttttgtttgttttatcttcatttgttacttcagattcttgtagaggaagataatatttttaaggaggttgttttcgatggagcattactaggttcttgagcaaattgggaaaggttcttttgggtcagctcttcttgtgaggcataaacatgagaagaaactgtaagagattgtgtttatttgaaactgaaactggagagagtttttgttagttcttcaatgattgattctttgttatgttctgtttatttttttttttgtgtatttgctttctaaaggtatgttttgaagaaaatccggcttgctcggcagactggtaggacaagaagatctgctcatcaagaggttgcttctaatttcttctgtgtcctgtaacattcacattacgctttcgttaagccatttcatttgcaaatttggattagttagatcaaatagcctgttatctctttgtagatggagttgatttcaaagatacataatccattcattgtggaatataaagattcttgggttgaaaaggtatcatctatacatatcttttcgtttcctgaacataagtattgaagatataaccagctctattgtctttatggatgtgtgctatcagggatgctatgtgtgcattatcataggctattgcaaaggaggagacatgtaagtttattccttctcagcagttttcacctgtttgactagagaaaaggctctctgatacacttactgattttttctggttcttcccgttcttctgcattacagggcggaag

SEQ ID NO: 36825 - DNA, 1547 bp, Arabidopsis thaliana landsberg
  unsure (1)..(1547): unsure at all n locations
atatatatcagattttagagtactttttttttttctctagcttttgcctcgggcataagaaaggaaatcatggggaagcgtttgatgaaaagctttcccactttctactttctgattatcaatctttttctattgcaggatcaaaactaagagaccaaaagatattgtgtactattttaacagcgatcgaaaacgaccctaagcttgagaagaatctcggaggtgtttcatgatcacttgggtactaacttctcatcatcatcatcattaacatcatcagatcgtctcagcatgtgtgcactattccgctctttagcatgaagtgtgaatatccaaatatctgcaaagatcacagcgttatgtgtgttccatgttggaagcatttcaagcttttgagtatccggctccattgatgactagtgttgtttcatggacttcatgctaattcattgtttacaggagtaacacgagccatcgatggagctaggtacactcaaaagcttcaaatggcttgcaacaatgaacacaaataatcatgtggtctttaatttgcatctattatttatacattatgctacaagaacggcataatgaccataagctgcgaccatctgaggatgataatgatgatgaattagtacccaagaaataaggaaacaacacctccgaggctctcttctcagaagaataatttttatatttgccagttatgtttttccttcagtcaaaatacaaaagctcagtttgaaaataataataataacaaaatatcagtttgtagaaccgattcattttaactaggcgtttctatatttctctttctttcatgtaaacgatacattgaacattaattgtctctctttttttctctttcttagcctcgtttatatcaaatcaatagctggtgaataataaaagagaagaaagctgtaaataaggttctagtgttaaaacctttttgaaaaaaaaaaggttctagggtttcaacagaacctaaaaggaagagaatcctttatcaagacctagaaggaagcaaagacctacgagacttaggaaacaagataaagtctactaaaatgaaagtgtaagtcaaaataaaaataaaaattaagaaataaattttgtgaattgtacttggtttgttttcgttatctgaaaccctatttcttggtgagcaagaaactgtcgagtcttcttagcaggatatgtagcagttttannnnnnnnnnnnnnnnnnnnnnnnctctatttaataagtctttacatctctcagaacaaaatagaggaccaatatcttataagctccacttctcattgcaaatcacataaaaactttgacataaatgatgataagaatttcaaaatgatataacatatgatcaaactctcattccaatcatatagccctgcttcgagatacattcatatttagccctgattagtgactcctctagtgactacccagtagattatcttcataccgacgactcttctggtgacaactctttaggtttatcatagctctgaaactgactcaggctcgtgat

SEQ ID NO: 36826 - DNA, 626 bp, Arabidopsis thaliana landsberg
taatcaatctatgcgcacagccgccgattgacgatcctaatgaatctctgagctcattgtacccaccatcatgcaaatgattaaagctgacactcttcttgggtgtagatggtttcccggttctcacatcaccaaccaaaccaatcttgggctcattgtacccaacaggtggcaaatggttaagtgaagattcttgctttggttcagtatctgaaaacacagcctctgattcagtatctgaatgaatctttagctcagtgtacccaacatcaggcaaatgattgaagctgacacttttcttgggcgcagactgcttcccggttcttattttaccaagcaaaccaatcttgggtagaatttcccgttcagccacctgagtagcagcgatttgaggcgtccacaactgattacaacatgtacaatctgtaagcttagagcaatttggatatttgcttcgatcactcttggatccgaagtgagaatcttcacccagtttaccaaccaacaatctgtaagtttcagcattggacttattggttgtagcaaacgagaaaagacaagtctcacacattccactgacatcaactagctttgcgggagcatgacagtaaacccaatgagagatc

SEQ ID NO: 36827 - DNA, 2057 bp, Arabidopsis thaliana landsberg
attacattggatacattttacacgatgtgagattcataacatattaacatgttcttaacttgcaggtccttcaattatctataggtgctgcatgtagactaatatggccattggaccgcctaattgttcaagttttagatgattccactgatcaaaccatcaaggtcttgccgaccaagtttgttgatttatttgaacacatataatgtattgtaagatatttaatgtgaggaggattgagtttcaggagctggtgaacacagagtgtgcaaaatgggaaagtaaaggtgtaaatataaagtgtgagaggagagacaacagaaatggctacaaagccggagctcttaaagaaggcatgaagcacaactacgtgaagctatgcaattatgtcgtcatcttcgacgcagacttccaaccggagcctgattacctccaacactctgtccccttcctcgttcataaccccgaggtcgctctggttcaagcccgatggagatttggtatgtttccaatcattttaatttgtgtaatgtatttttttttccagtaataatgagcggtaattttctggcagttaacgcgaacaaatgcttgatgtcgaggatgcaagagatgtctctcaactatcatttcaaagtggaacaagaatcagggtcgcctagacatgctttcttcgggtttaatggtatgactaattaaatctccaagcatatcaaaataacacaagctattagaaaaaatgataagaatcatgagactacttactaattgattatatatgagttggaagtcatctaccctaaggacggttagtcaaaaaaattaaggcgatgatccttaaggattgccatcttaacctaagagagagcatagtgtgaaccttaaactaaatgggaaatatgaggaagtataaaaaaatttcatagaaagatgaacattaattacttagctccttcacttattattagactcgttcaaaacaccttgtggacgtctataagacatattttttagaccatatatatatgaaatagaagtgagatattaataaatataggaaccgcgggtgtatggagaatatcggcaatggaagcagcaggaggatggaaatcaaggaccacagtagaggacatggacttggctgttcgtgttggtcttcatggctggaattttgtcttccttaacgacctcacggtaacacacacgtttgccttaataaattaaagaatctgttactcaaaatcattagattgctacatacataacgctccttttgttatcacagacaacacaataaatggctaatgtggctgcatgcaggtgagaaacgagcttccaagcaaatataaggcctacagattccagcaacataggtggtcctgtggaccggcgaatctatttagaaaaatgacgatggagatcattttcaataaggtcatttttgtcactttgcttcattcagaccccatgtgtcagtgactgatgtcctggttattttgtctttagatgtattgggaccccccgatagttataagcagggtgtcctgtttgaactagttgaggaccagtgttgaaagacacgtttcagtgattgattggtttaagcccttctctttgtctcttgtttggaccggggtagtgtgatatgtacggtctaatatcaaccagtttggctaactaattagggtttgttcggtttcaacatggttcgattttactaatgcttgatcgaaccaaacttcaaaatgatacttccgttattaatcagtgggtagggtttaatgtggttcagtcttttgtttgatattttatttcattttccagtttaagaagttttgaggattgactttattaacaaggaatgtttgttttggaacagagagtatcaatttggaagaagttttatgtgatctacagctttttcttcgtaaggaaagtggcggtacacttcttgacattcttcttctactgtataattgtgccaacaagtgtctttttccctgaaatccacatcccatcttggtctaccattttacgttccctctttgatcagtatc

SEQ ID NO: 36828 - DNA, 1385 bp, Arabidopsis thaliana landsberg
tgggcacagatcaacctcctgcctagaagagcctgctcatagaggaatattttaattttttttgcgcatcatagaggattgcgggagctggttcccactatttagttgttcatgaacattactgactatcactgtttgatgattgccatcataaatctcgctgaaagctaccctttatttgttttaatctttaatctggtgcatgactggacactgattggattgcctcatctctgtatgtagcagtttctccatgtatactcttttcttttttaagaaaaaattataatttattaagacttgttttgttatatggtttttgttttgaagacgtttctgctgaaatttcaagcaagtgtgtttgtcagatggagcggtatgaagtcttggagcagatcgggaaagggtcctttggctctgctcttcttgttagacacaaacaagaacgcaagaagtattctattctctctcattcattcattctctgcttttgcttctctcttgttgcttctctggtgattccatttgctctattcatcttcaccacttacagatacgttttgaaaaagattcgtctcgcccgccagtctgatagggctcgacgatcagctcatcaggaggtttgttcatgtttttcttttttttttctttttggaccaaatgaaattagttggtggtcttggattaagatgatgatgatgagtttggacctccctccccttcatgtttcagatggagctcatttctactgtccgcaatccatttgttgtcgagtacaaagattcatgggttgaaaaggtctctccttctcatctccttttgctcattcttcttctgcctccttactctactcaatagtcaatactcatcatctctcttgtttcccagggttgctatgtgtgcattgttattggatattgccaaggcggggacatgtaaattggtttttgcccattttcaactacagacaagttgtgtttagtttgaagaaattggctcttattttcattttgaatattgcaggacagataccatcaaaagagcatgtggtgttcattttcctgaggaggtttgtctcactctcacccatcccttcacttcttacaatctatcactggatctaatatttgaacaaataactactaaatgatgcagaaattatgccaatggcttgtccaactattaatggccctcgattatcttcactccaaccatattcttcaccgcgatgtcaaggtaaacatgtaacctcactatcaattttcagaattttgttcctttttatgttccaagcatctaaattaacatctaaatgtcttttcaaagttctaacatattcttgacaaaagagcaagacatacggcttggtatgttttgtagattca

SEQ ID NO: 36829 - DNA, 2595 bp, Arabidopsis thaliana landsberg
  unsure (1)..(2595): unsure at all n locations
tcttttgtgtgtcttttagagtctttgatgtggtcattttgtagtttttgaagtcttgatttgtttcagtggttcttgggatgtattctagtgcttttcgtttgtttaattacgcttaagcgttattgtgataatgataggccgggatcgttnnnnnnnnnnnnnnnnnnnnnnnnnnnatcaactcctaaaactgctcggaagctcaagacttcagaatccgaccctgtctcgtctcctaacacgaaaatcaggacaccgaaaactcaaagcccaaaagtagttgctgatcgccgttctccaagaacccctgtaaatgaggtacttgtagctttgcacaatgctttgtaaatcaatgcctttatatgatttgactcacacttgtctcagttgtccactttttagcaagaactactatagtgttgttgtcttttttgagcgcccaaaactcaattatagtgctgccaactgtcaatgatactccttaatgacgagaatatttgatggattcaatgatcgaaaccattgtaaatggccacgtctagaatcttactttgtaagaccgccgctactatacaatgccatggagagagatgtcgaattatcatattctacatggtaatcagagcataaaacggtactcattcggctgctttctcgtcttctacttctttcctattcaacactaactgctgttagggtgtttgaagttcaaaccttgaaagttgttgattcaggagtctttgcaagaaccctaaacctagagggttaggcttcttgttttgttctgattgttacttttgtggcttgttacttgatatatgtgaaagtgatatgtgatgcatctgttgcgtagttgagttgttaatattcattgttgcttttttatgcaagattcagaagaaacggacaggaaaaacacccgaattggcatctcagatatctcagcttcaagaggagctaaagaaggcaaaggaacagctaagtgcttcagaagctctgaagaaggaagctcaagatcaagcagaggaaacaaagcagcagttaatggagattaacgcctctgaggattccaggatcgatgagcttcgcaagctctctcaagaacgagacaaagcgtggcagtctgaactcgaagcaatgcagagacagcatgccatggattccgctgctctatcatctaccatgaacgaggtccagaaactgaaagcacagctgtctgaatctgaaaatgttgagaacttaaggatggaacttaacgagacgttgtcacttgtcgagaagctcagaggtgagctgtttgatgcaaaggaagggaaagctcaggcgcatgaaattgtgtcggggactgaaaagcaattagagatagccaacttgacgcttgagatgttacgttcagatggtatgaagatgtctgaagcttgtaattcactaacaactgagctagagcagtctaaatctgaggtaaggtcactagagcaccttgtgagacagcttgaggaagaagatgaagcccgaggaaatgctaacggggactcatcatcagtggaagagctcaaggaagagataaatgttgcaaggcaagagattagccagttgatatctgcagtggaagtaacagagagaaggtaccatgaagagtatatccagagcgcgttgcagatcagaactgcttatgaactagtcgatgaagtcaaatccggatatgcacagagagaggctgagttgggggaagaactgaagaaaaccaaagctgaaagagattctttgcatgaacggttgatggataaggaagctaagctcaggatactcgtcgatgaaaacgagatactgaactcgaaaatcaaagaaaaagaagaagtatacttaaacttggagaacagcttgaaccagaacgagcatgaggataccggtgaactcaagaagnnnnnnnnnnnnnnnnnnnnnnnnnnnnnnnnnnnnatggacaaggagatggagctacagagcgtaatgtcgcaatacgagagtctcaggagcgaaatggagacaatgcagagtgagaagaacaaggctatcgacgaggccttagcaaagctcgggagtctgacagaggaagcagataagagcgggaagagagccgaaaatgcgacagaacagctaggggcggcacaagtcaccaacaccgaactagaagctgagctgaggagactcaaggttcagtgtgatcaatggaggaaagcagctgaagccgcagctactatgctctctggtggtaacaacaacaataacagtaacgggaagtacgtggagagaacaggatcgttagagagtccgttgaggaggagaaacgtcaacatgtcgccttatatgggtgaaactgatgatgaattgtcatcaccaaagaagaagaatggaagtatgctgaagaaaattggtgtgttactgaagaaaagtcagaaatgatccattgaagttcaggaaaaacaaacaaccattgtctgtaatattcgcttgtttttttccctaagtttcaatgtgtagacatgtttttgttgcctatcgtgaactacttttaattttctttctattgactagctgaaactctgatcaagg

SEQ ID NO: 36830 - DNA, 2262 bp, Arabidopsis thaliana landsberg
ctgcattttgttctatgttttaggtgcatggcaagccaacaccgtcccatcttctatctcgaagctcggatgcgagacacaatcaaacccttcttcttcttcctcctcttcctcttcctcttcctcatcttcggagtcagctgaactagatttcaaaagccataatcagattgagttaaaggaaacaaaccaaaccattaagtactttgaaccatgtgacttatctctcagtgagtacactccttgtgaagaccgacaaagaggaaggagattcgataggaacatgatgaaatatagagaaagacattgtcctgtaaaagatgagcttctttattgtttgattcctcctccaccaaactacaagattccatttaaatggccacaaagtagagactatgcttggtatgacaatatccctcacaaggaacttagtgttgagaaagcagttcaaaactggattcaagtagaaggtgaccggtttcgattccctggtggtggaactatgtttcctcgtggagctgatgcttatatcgatgatattgctaggcttattcctcttactgatggtggaatcagaacagctattgacactggatgtggtgtaagtgtttcattgtaagagtatacgtatacacttctttttgatcattgtttgattcaatatctgttttttatattaggttgcaagttttggtgcttacctcttgaagagagacattatggctgtgtcttttgctccaagagacactcatgaagctcaggtacagtttgctttagaacgcggagttcctgcgataatcgggattatgggatcaagaagacttccttatccagctagagcttttgatcttgctcattgttctcgttgtttgatcccttggtttaaaaatggtaatgatttgactctgtttctgttcatagctgaggaagaaacataacactgaaatcttttgtagatggtttgtaccttatggaggtcgaccgggttttaagaccgggcggttactggatcctctcgggaccaccgattaactggaaacagtactggagagggtgggagagaacagaggaggatttgaagaaagagcaagattcaatagaagatgtagcaaagagtctttgctggaagaaagtgactgaaaaaggtgacttatcaatttggcaaaagcctatcaatcacgttgagtgtaacaaactcaaacgagttcacaaaactcctcctctatgcagtaaatcagatttacccgattttgcttggtaataatctcaacccctcctaaaagtttcatatttacttacattttttttgtattataagttttacgtgaatgcgaattaaatcaccgaatttagatattaattctacatttttctttttaaaatttagagttttggtaaaaaatgttttttcttacaaagtttagagttagtatctgaatttcgagatttatgagataaaacatgaatgttgcatagaacttttatatttttttctctgttttcttgtataagatgttttacctatttgtttctctttcttttaattttaattttctatgcaacattcaaatttatttagtgtaaattgttctatgcagcattcaattttattgtagttagttagttagttctagaaattgaaaaaaaaattagaaataaatcgctaaaacatcttattctactcaacggaaaaatgatttttgataataggtacaaagatttggaatcttgtgtaacaccattaccagaagcaaacagttcagacgaattcgcaggcggtgcattggaggattggccaaaccgagcttttgcggtgccacctaggataatcgggggaaccattccggacattaatgctgagaaattcagagaagacaatgaagtgtggaaggagagaatatcatattacaaacagataatgccagagctttcaagaggaagatttaggaacataatggacatgaatgcatacttgggaggatttgctgcggcaatgatgaaatatccatcttgggttatgaatgtggttcctgtggatgctgagaagcaaacgttaggggttatctttgaacgaggatttatagggacttatcaagattggtgtgaaggattctctacgtatccgagagcttatgatttgattcatgctggtggattgttcagcatttatgagaacaggtaaacacccattactacattttaattgcgtttatgttaaacttatatagtagataaatctatacactgaaacattttaaggaa

SEQ ID NO: 36831 - DNA, 1611 bp, Arabidopsis thaliana landsberg
  unsure (1)..(1611): unsure at all n locations
caaccgctccttgtttcaaatcttcatttaacatttcgaagtttaaagttatcactggaggattgggccgcctgggcgtacccttacctgtggttagtttcttaagcaacccctggttataagcacgagcgttctccacgcttgtgtatggatcattccctctagtaggccaaccggtctccgctacgtagaccttcacgcttccgtggttgatcttctctaatgccacgttgaaagcatccaacgttgcatcgaatatatttgtgtattggtattttccgtcggtcactaccggtgaagtcgaacggaacgttgcgtattccagtgacacgtggctagggtctgatgcgtaagcgaaataagggtaaacgttcaccatgagcggtgaatttgttctttgtagaaaccttatgagtggttccaaaaccgaatcaccgatcgattgatggaaaacagcagtcgaaggagggaatcttctggaaagaatcgcgagagaatgcgttgtggagactttgatcttcttgtgtaatctgtatctcttgattgctttgtgaacgttgaccatagctgagactaggtggttggagaattgcgggagtaaggagacttcgtttccgacggagattgctgtgatgattgtgttcttgtggtaaggtaagatgaagtttctgatgattgattcagcttcggagagattggtggctagagatgggatcttgtcgttggggatacagagggagagagtgattccagtgttggcgaaagatttggtgattcttggatccaagtcaaaggttttgacatgtttgatggagagagagttgactagcgatggtattgcttccggtggtggtaggtttgagccgtaacgaccatagttgattccgatcactggacctggaaaaacaaacaaaaaaaagtcattgagagttaaaaagattcgatgttctcgtgaatcacacaatggaatcgaagattactactatcttcaagattggagctgtattctccgtagttgattccgatttgtggacctggaaaacgaacgagaaagtgaaggaaaatgagagaaaaagaatcaattttttctcgggaaaagtataacagaatcaccagattatttacctacaagcgatggaatcgtggagcaagaagccattgagatggaaaaaaccaagagaatccagaaagcgttttgcatcgtcgtcatcaggatcatcttcatcttctctcgactgtgttgagtgattttggtgggaagaggaagacttcacatcaactatataaacgatatttatcgtaattacattaacacccatctaagttggtgaatagaggttagacaaacaggggcaaatacgttacttcgaaccaattggggagagaggggtaaataagtcatttcgtttaaccaagtaaaccgactatagtgggtacaaatattaaaccaacacaaatctaatttttctttttcggttttctttttatatcgncttcttcggaaattagaaaggagaagaaaatctgaatttctgattgccggcgatggaaggaagagatgacggcggagggaaagttattgggttgatagagaaagcgacgaaatcaact

SEQ ID NO: 36832 - DNA, 3661 bp, Arabidopsis thaliana landsberg
tatatatggtgtgtgcattactcagtctacttttcttttttcttatttctaattacgattaacttaacaaagcgtgggctatagctcataatttttgcgtaataaattccttgcaaaatagtatatcctaggttggtaaaattaaatgtcaaagatacctttttggagtatttattccctatttgtaagttcttgatttgatactgtgttaaatgagaaactatttatggctcatggtgattattattaggtgtccattaatgatgatcatcaattcatcacctttacaatattaattcttctcaaaaaagtaaaccatgaaaaagtcaagaatgtcagagtcgttactatcagcgttaccaattccgttttgttgtcccttgatttagctaataaacaaaaatcaaatagatagttttccggtttaatctaacttggttcggttgatttttccggttaatctattggttcggtttaatcatccaaaaccttttggactgtatcaaagactgaatattacgagctttgatttttttagctcggagccgcttcatctttcttcatcttcttcctcctctcaataacccaagttttttcgccgatgggtggaaacaagcagagatggttctctttccaccaacgatcctcatccgccaccactactactttaccacaacacaaacacgacgagactccaccggagtttctttgtcccatcaccggattcctcatgtctgaccctgttgttgtctcttccggtcaaaccttcgaacgtgtctgtgttcaagtctgtcgcgacctcaactttatccccaaactcaacgacgacgaagaatctctacccgatttctccaacatcatccctaacctaaacatgaaatcaacaatcgatacttggtgcgacaccgtcggcgtctcacgtcctcagccacctgattactccaccgtcgagagaattttacggcaacagatgcctccaccggacgtcgagattcgtgtctccgagcaagagcttctcagagctgtagctcaccgagctccgatgataattcaccacgctgattctgaactcatgggaaggagagatttcaacaactccacgacctcttctgatgaatctgtaatcgttgctcacagtccattcactcctcttcctttaacaactagacccgcttgcttctctccatctccatcatcttcttcctccgaaatcgaaaccctaacgcaccacactttcttctctaattctacttccaccgccacagaagaggacgaagtgatttacaacaagcttaagagcagtgagatttttgatcaagagcaaggtttgattatgatgaggaagatgactcgtactaatgatgaagctagggtttcgctttgttctcctcggattctttctttgttgaagaatatgattgtttcgagatacagtttagtgcagacgaacgcgttagcgtcgcttgtgaatctgtctttggataagaagaacaaattgacgattgttcggttaggatttgttccgattttgatcgatgttctgaagtcggggtctagagaagctcaagaacacgcagctggaacaatctttagtctttctcttgaagatgataataaaatgcctattggagttttaggagcgcttcagccattgcttcacgcgttacgtgcagctgagagtgatcggacgcggcatgattcggctctcgcgctttaccatttgacgttgaatcagacgaatcgatcaaagctcgttaggcttggagcggtaccagcgcttttctcgatggttaggtccggtgaatcggcgagcagggcattgttggtgatctgtaatttagcgtgttgtagtgaaggaagatcggcgatgcttgatgcgaatgcggttgcgattcttgtagggaagttaagggaggagtggacggaggagccgacagagacccggtcatcgtcatcggctcgtgagaattgcgtagcggcgttgttcgcattgagccacgagagtcttcgattcaaaggactagcgaaggaggcgagagcagtggaagtgttgaaggaagtggaagagagaggaacagagagagctagagagaaagcaaagaagattcttcagctgatgagagaaagagtgccggaggatgatgaagaagatggcgaagaatcaattgattgggaccgagttatcgactccaacggctcaattaggtctagattccgagttggtggtagaaacagagtggtcactcaaaactcctctggcttctaaagttccattccatttgttgttgtatagtagacattcaaaatgttttgtgattgaaattttttgtaaacttgacttgaaatatgtgagaaaaaaagcatgactgatgtatatatattttgtacaatatataaaagatccatttgaaacaaacgcatactagatataaatgtaacgcagatacacaatagaagtctaactatgttacaaagaagaaaaattgactaaacagctcaaggtacaagatttgtaagacaaaagatctcgtttctactttctacaatatgcgttacatgaaataaaataaagtgggtcagaaactatctaatactagaactaattggattttttggtttgtttttactaaccttaagaatggtgtggaggtccaaaatacatcatacccggtggatgaaaactctgaccttgttgcgcttgttgctgagctgcatttggttggttgttattattcatcatatgcggcggcaacgttccaggcggcggtggcggcagtgctccaggtggcattaatggaatgttaccaaatccataaggaaactgttgtgatgcggctggatttggtattatgtgatactgctgaggatttggaggaacaacaaatgcatttgtgtctgaggtgtttgatttggttagaccagaagtttgtgtagcttcggctgcaaatgaagagaggacagaatgcataatcattgatgagtttgttgatgaggttagcatttccgccattgcagcgattgaggcaggagtgattttcgctgattgaccagatgttccgttgttattgttaaccggtgtttcgttattgagccgtttctgcatgttttgggcttcttcggtttgttcttgtgctacctgatgaataagaacaaagacagacacacaatcaattttgatgcagaaatacagttttcttgtactcaagattgcaaaatagttcccaggcgtaaagggattattaaaccaattcagatttttacctgtatctgagattgaagattctccaattcagattcctgatacacaaaactcagtaagtaattgaaatgtctgagcaaattattgaacttgcaagattgcaagacctttacctgttcccgtagcgcttccctaagatgatttacgagagatgtcctactttcttcaacagatttaagtttctcaacagattgtctcagaatgttttcttcctcttccaattcttttgccaatgattctttcctcgggtcttttgctgaagacaatcaaagattgagagccagaatgtgtttgataatccccaactaagagagaaagatattagctaaatttataccagtggagcaagcatcttcaacatctttctccatctttctgaaacgtctaacggcagacttgcat

SEQ ID NO: 36833 - DNA, 2065 bp, Arabidopsis thaliana landsberg
  unsure (1)..(2065): unsure at all n locations
catgggtttgaaaagttctgatatgtcttacacttttttctcagacttataggtctattctgtctgccttttgggcaaccgatgaaaatgtacgcagagctctaggcgtgaaaaaggtacctacgtgaattgaattgacttggttctatacaaaaatcaccaattcaaaatgtgatgcaggaagtaggaaaatggaaccgatgcaacagccaaaacataccatatacatttgagattttcaatgcagttccttatcacgtaaacaatagtcttaaaggcttccgctctctcatctacaggcaagattaatatttgttgatgtctaagtacaagaactagtttttttgtatctttataatttgacaaaactcatgtacttgaaacagtggtgatcatgattctatggtaccattttcttcaactcaagcatggatcagagctctcaactattccattgttaataactggagaccttggatgatgagtagcaatcaagtcgcagggtaacaaaagatacattgtttctaactccattctcctcaatttcattatctttaaagacgctcttttttatcggtgtttgtagctatacaaggacttacgcaaacaagatgacatttgcaaccatcaaggcaaacatttctttcttgtcttgtccaaagcttctgcaggaaaaacagaaagtgatagagtttttttttttacttgaatgttttgcagggaggaggacacacagcggagtatactccagatcaatgctctcttatgttcagaagatggattgatggagaacctctctaaagattctcactcgcttctctctctttctctctttgttgttgttacagtttaagactaatgttcagtgaattgtaattttgccacatgctattctgtgaaatcttcaatgattttgtgttgttgtagaactctaaagtctaatcagaaaggctctgtttcatagcaagtaacagaccctgtttcatattccatttaaatatttccaaagcagaaagtcattttattacttctcagtcatcaatggtgaaaaacaaaatccaaatcccaatgtttacatctcaattgaaaggaaacaacaagaatgatataggaatcttgagtctattcattattcgacctcataagtcgacattgcaaaatatgttcagtaaagtgaaaggtctccagcatcaactgatctcttcacaagtttagcccatgattcatttgtttcttggatgatcttcaaagcatagtcctgtaacagacaaaccacaagtgtatagctcttctcagtttcagtaccaaacataaaccaccaccactatagaagattaaaaagaaggacttactttgtttgctggtttgtctccaagaccaaatctgttagcaggctttccatctgggatcttgtagtctctaaaccagtctctaatggctgttagtgtaccctgatcaacagatttagagtcaacaacagaattttgtttttgcatgaacgtatggggaatggtttatactagtagtagctcgtaccgggaaatgtttctcaacatcttcaacatcattcacaagatgagcttttgggtcatccaaagaaatggcaacaatcttccagtctagctcaccttcatcaatcatagctaaagcagctaaaggctttatctttagaatatcgcctatcttcctttgtgtttcaccaatctcaacaacatcaactacatatatccaaaccaagaataagcataatctctttgttccaaagtgattaaattttccattacatgaaagagtatcacagatttacctggatcattatccccaaaacatccttcaacttcagaatttgcatgagatggatcttcccatgtttgaggaagcaacccatagttccagttaatgttatacctggatcaaatccattccataagtcattgatttcaaagtctataacaaatagtaattcagaaaatgagctaacttgtcatcaatggatggctgaagcctctagaaattagcttaaaacaaagcanaacttataaaaagggagaaatatattttactt

SEQ ID NO: 36834 - DNA, 3363 bp, Arabidopsis thaliana landsberg
  unsure (1)..(3363): unsure at all n locations
aacccttcataatcataatttaatttgctctttagtttgattttctacatgatcattatcaatggttaattgatattttcaattttgaatgcaacattaattgatgtttataatgaatcgaaaagtatttcatatttataaatttgtaattacagaacttataaataatcactaaataaatttgttgtacctaacagtctaacaaattacgttgtatagtatttaagaaaagtagatgttaacattgcaacgaaatgagtgcacttactataataagccttcaatctacagtatatggttgatgaatgacacttgaaacaactaaggttcacatggtgaaacttgtaagtaacaagagataatcatttgtnnnnnnnnnnnnnnnnnnnaaagataaacttaaaaatctactaatcaaatttgcgtgtgaattatctttttttctcaatcaatacgagtgcttaatgactaaaccggaccatgactcgtttaaactataggtagatgacctcaaaccgttgattattttctgattttggttaggaggaatacgaatccaaaattcctcaaaccggctcacaacatttatgttcatcgattgtgacaacaccaagcaaacagaaacttgtataaaagacagacaaaagagttattctttctttctcagttcacgctattgttctcttacactctttagcaaaaagttaaacactgaagtagacaaaaagtaatttgaaaatattcttctttttactaatataaagatgaaaaaaatagggatgatacaaatgtaaagccaaagagtaatatttacaccattatggaaatttagacagtaatggttctaaagtgatttcatttcagaataaacacatagcttgcaacttgctctactgtcaaaatttagttagtgttcacaaaatgctaaacttatctcttaataatgtctagataagaataaaattaagcaaaaaaaaaaggaaatttaacaattaaaacgaaatagagcaagaaatagaataactttcatcttgcaaaactcttaaaatccagctcatagtttatcaccaaaataaaaacaattaatttgattaattaaggagtaataattaaaaataaaataaagctgttagaacaacgaagtgctggaggcggtgcctcatttctttcagagcccagaaatctataagaactgtctcaaaaccaaaaaacaatattcactttcctttttcaatattaaaaaattcaatctttctctgtttctgtatctcaggtatataaaaattcaatctttgattgaagcaaaagatagagaatcaacaatgattattgtggtgatggaaatgtcgtgaaaaccagaggagaatcacaaaataaaaacagaacagacaatactttcattttgaatctcttgaaaccagtgtgtactcttaaagagaaagacttttggttttgtctccattggaacacgaatctctctctctgtctggcgtagagactaaggtaaaagcgccgcgtgtatagccttcaatggcttttcaacggcggcgcaacaattactacaaccgtctccgtcgtcttcttcctttcatttgcgctgtctctggagctcttctcatcctcttcgctcttctctccattctttcccctcctcctgatgattccgatcgccgcatctccgtacactctctttctctctctcaatagccttgttgatgagattctgatctctgtctcttaacgccattggatctgtttaattgcagaagcatattaactatggagccaatgatgagaagaagaacacaccagtggttttcacagttccggttagggttcttatatttgatatttttgttgcaaagactgtatttgtttgctaatttgggcttgcgcatgctttaaaccgaagcatagaggtggaggaagatcggatcgtgatatctggcgtgcatggaatgctgaattcttttatggatgttgtaatgcaagcagcatgttcccaagtgtgtaactttataaagttcttttggtggttagagcgtattaggttagaatgctcgaatgtatctgacattgaggttgatcaaccacactacaacattttgattattcttactgcagatgctaaagcaattactagaaatgatcgatacttggccattgctactagtggcggtttaaaccaccaacggactggagtaagttcctttagctttctctggttttatggtgatctttttgttgttacttagatcttggtctgagtttcacaatgcaattacttctttcagattgtagatgctgttgttgctgcaaggattctaaacgctacgcttgttattccgaagttggaccagaaatcctactggaaagatgccaggttcttgctagctctcgtaaaaatcaaaacattatgcatcttattaagtattaacatctcacttttgtgctttttatatatgcagtgacttctcgaacattttcgacgttgattggtttatgtcatttctctcaaaagatgtcaaaatcattgagaaacttccacagaaaggagggcaaacatggagccctcgcagaatgcgtgtaccgagaaaatgcaatgagaaatgctatatcaatcgggtgttacctgttcttcagaaaaggcatgtaagttttcctgttttttctctcaatctttacgcttcttagcatctaaaggtttcatgatttcctctttctctatgatgtttatatatgatttggtcttgtaactgtttgtttcaggcagttcagttgaataaatttgattacagactctcaaacaagttgagagatgatttgcagaagctgaggtgtagagtaaactatcatgcgcttaagtttactgatccaattcttgaaatgggtaacgaattagtcagaagaatgcggaaaaggagcaaacacttcattgctttacatcttaggtttgaacctgatatgctcgccttctctggatgttactatggtggtggtgagaaggagaagaaagagttaggaacaatcagaaggagatggaaaactttgcatgtatgtatacaaatcttacttgtgcaaagttcttcttattttcttgttggatttaacgaattttgcattgcaggtaaataaccctgaaaagcaaaggagacaaggaagatgtccacttacaccagaagaagttggattaatgcttagagctttgggatatggaagtgatgttcatatatatgttgcatcaggtgaagtttatggaggagaaaaatcattggctcctttgaaagcactttttccacatttctattcaaaagacaccatagctacaaaaatggacctaaaaccattttcttcttattcttc

SEQ ID NO: 36835 - DNA, 3690 bp, Arabidopsis thaliana landsberg
tatctcgattggcttgaaactgaagaaactctatacatactgattctgcaattcacttaagagatggaaccaagaataagatagattcaaaacatgattcgacctctgtttgaatccaaaccttgtctggaatcagctttctgaaattagttatttccagagatgaggctttgctggctctatgtaactaagaatagaagttacagaacaatcgtaattgactcgtacataacagagtaaccagagattggaccttatgattaagttgaaaagatctactcgccagtatttgactcttgagttgagtatgagccacaatattttcttgtgcatctcggtttagcttgtagcaatccgtgaatacgaaagtagaatgggtcttttcagctatcacaagaagcgtcatgggttttgaaactgtttcgagtgagataaagccatgagcatccaagtactgcagatttgatggaagcactggaagagaaatgagatttttgcaatgctttaagtaaagagatttgagatgatgaagtttcttgatgcttcctggtagattctcgatattgtttcggctcaagcataaagactgcagcgaggataagcagctaaaattgtccgggaatttgtacagattacaatctgtgagatacatgtctgataactgagagcaacctgagaaaggcagcaactccaaacctctgaaatcttggactttagatccaccaaacgaaaacagcttgagattactcatacacattgttctgggagtttgtttgatggatgtatcatccattagcagaatctcttagcttcccatgtttgtttggggattccatgttttaccagaaagacccgacaaactcgaatgcccatgttacatgcagagaggagactgcaactttgataatatgtgtaaatttcatcatctgagtgagagagaaacccatgtccttgagacttccttaagctccaaaggcctcccttcacggacggtgagccatttcttaaactagcagtagcaatctagcagacgttagttttctttgcttcaaacctcattcttttgatcactaaccaacacggcaacaccaaaagcttgttcgacttcaaactgaactctgtttttctaatctcattactatcatctgtgtttatcgcttgctcaatttttgctccaatctttcgacagggagaacccgtgtgtaccttgtattttcacactggaaactgcagctccggtcccacttgtatctttgatcatccgatgttggtatcaacacacaagaacacatcttccatggcttccgagacaccgcacttgaatccgctaggattgtcctcttcacttagggctttatcaagtgatattgtggaagcatcaactaagaaacctagaatatacaagaacacatcttccgtggtgtctgagacacctcattcgaatccgctaagattttcttctccaattggagattcatcaagtgaacttgtggaaacatcagataaagaaacccatagtccataagaacacaccttccatggcttctgagacactgcacttgaagttgctaggactttcttcttcgcttggagttttatcaagtgagcttgtggaagcatcaactgtgtctgaggtcacacaagaaaccgttagtagaggcgtcattgagtcataggacgaaaattaaacaaaatgttgtattttaagatattgttctttaatatatattttctaagattaacatatgcttgatccaaaaatttccatgaataatatatgaaaacaacatgtaattaagcataaacaaaagcataaacaaaaacaaggcattttttcaaattaactcaaagaaaaacccataggatattttccaaaaatataaacaaaaacaaggcatttttccaaattaactcatgaaaatattaaaaatttagttacagaaccatttgatttattgaattgaaaagagattgtaatatagtaatattaattttactagtaatgaaaatcagatattcataattacagcatcaaactgacatttatccttttctgtagatgacgtggatacctaatgcaccgtcgattaaatctgcgtagtgaaaccccgcactgctcacagcaccacctctctcgaaccatcgagtctcgaacccagagaggactttcctcagtgagtcctccgttccttagcttctcttccagatccaaactctcaccaaactttctcacaacacacacacaattcgattcgatccacactcttaaaatcccaaagatctctctgattttgaaattcgattcttccccagatcaacttgtgaatttttccacaattttggttcatgattttgatttcgtgaaggacttatggattcacacccttccctaatgggaaggtccattaccaattcaaaccgatcgagcttagatcttggtcgtccttcttcgtcttcttcatcttctccttcaccgttaaccaaatcgatctccgatgcaagtagtcaaagtctctcttcgatccttaacaatccacacggaggtaagtctggtgtttatggttccgatgcatcttgggttggttggtggtcttcatcgacatttgtagctccagctgagttcgcgcctgttgcttcaacgaagctccctggttcggaacttaccagatccgacttccatggctacgtttcttcgatctctgagtctcatggtagatttgaggatattaggaagcatacgagggaggagagctctgggtttgatcaggagagccatgtatcgggtttagctgcgtgtttgcgtgaggttccttcgctttactttaaggaggattttgctcttgaggacggagctacatttcgttctgcttgccctttctcgagccttaatgagaatctagcgcttcaagagaagttgtcacagtatcttgatgtggtggagctgcatcttgtgaaggagatctctgtgaggtctgattcgttttttgaggctcaaggacagttacaggatttgaatgtgaagattgttgagggttgtagtaggattcgtgagttgaaagagactattcggctcctggataggaatttggtagattcagctcgacagattcaagagctgagctcaactaggattaatatgctggagctgcaacgtaaattaagacttattttgtatgttaaccaagctctctctgcactcaaattggtaatttttcttactgatttgcttagagtagtgtcaatttagatacttttttgtttttcctatcttttattgatggaagtttgattctttattgttcagcttgttgcgtccgcagattgtgctggagctttggatataactgacgatctccagaacttgctggtaagttcatctgtgattgatgttggatacttttagacgattagggtgctctttctttagaatgtaaaatggattcctgtcttttttaggctggggatgagcttactggtctatactgcttccgccatcttcgggatcatgttactagttccatagattccataaacaggtgtgtctcttttcaggctatgataactgactataataggctgtatttagtctgcctgtaatgctcttttaggatggattgattgggaacaatgagagtaagtcggatttcaactgtgcaaagtaccttaccaagtttttagagaagtggtaag

SEQ ID NO: 36836 - DNA, 594 bp, Arabidopsis thaliana landsberg
ataacaaattcgtcaacgaaacagatgaacctcatccagttatcgatatgtcgaaccctgatgaggacagagtcgctgaagctgtttgtgatgctgctgagaaatgggggttctttcaagtgatcaatcatggagttcctttggaagttcttgatgacgtcaaggctgcgactcacaagttcttcaatctccctgttgaagagaagcgcaagttcactaaagagaattcgctgtcgacgactgttaggtttgggacgagttttagtcctcttgcagagcaagcgcttgagtggaaagattatctcagcctcttctttgtctctgaagctgaagctgaacagttctggcctgatatctgcaggtaagtttcacattcatgatttcaaaatcaaatctttcttctgttgtactcgttgactttatcaagatattttggttttgcaggaatgaaacgttagagtacattaacaagtcaaagaagagggtgaggaggcttctagagatttgggaaagaatctcaagttaaagagcttgacgagacgaaagaatcactctttatgggctcgattcgagtcaaccttaactactacccca

SEQ ID NO: 36837 - DNA, 928 bp, Arabidopsis thaliana landsberg
tatttaatctatcgaaaataattatattatctacaagacaatttttcccgatttagtcatttcttaacaggtacaaatatccaaatcatattttatatcatttaaaaaaatccacgtatatatatataattcctgattttcaattttgcatattacgtcgacacttcgtcctccgggttttccgagcacaagtcctaatcaaacaataagaagacaaaaagaaaaataaaatctgaaaaagaacctttgctctttgttaatataaaaagccctactctcgcatccaacgtttcttcacctctaattcttctcactaaaaaaatatcaaaagctttcacattacaatatctccctctctctacacaaagctctctatgccacaagtcgatctagaagcgtttgtttcttcagtatgcatcggtggctccgaccaccgcaagatcgtatgcgaaaccctcgccgacgactcaacgatcccaccttattacaacaactccgccgttagtccgagtgatttcccaccggaatcttatttcttgtcaaacgatgctcagctagagtggctcagcgacaacgccttctttgatcgtaaagactcacaaaaaggaaactctgggattctcaattctaatcccaactcgaatccaagctcgcaacggttcttactaaaatccaaagcgtcgatcatcggtttgcctaaaccgcagaaaacgtgtttcaacgaggcaaagcaacggagacacgcgggcaagaaccgggtcatcttgaaacgggtcgggtcaaggataaagacggatatttcgcttctggaaccttcttctcctaaagtctcttgcatcggtagagtgagatccagaagagaacgcagccgccgtatgcaccgtcaaaaatcaagtcgggtcgaacccgtaaaccgggttaagaaacc

SEQ ID NO: 36838 - DNA, 2504 bp, Arabidopsis thaliana landsberg
gttatggccctggaggtagcttgtaccgtttggttttcggtttttggtagaggaagaaaagaagaccccggcgagagccaccacgccgatgatgatatcttccattcttagttgttactacttttgagtgttacattgaacagcaaagctccttaatatataagaattatatatggactacgtttcttatttttttcttaaccaaactaaaccaaatactaaaaccgaacttaaccgacatcaaatttttaatcaaatggttactcccttatacctacttacgaaacctcacgtgttagaattaataaacaccttcacctacccaacatccctctaacgtcgtatatgttttagtggttcatgcagtcacactcattcttgtttttatctatttgttatttacacaaatctttgtttaactttgttcgacgaaccgaagacttatatcaatcacaatccatttctatatcgaaaatataacatattggattattggtacgtacccaaaattctaaacagtcgtcagtcgcaaattgtagagtaagagtttttcaaaaatcaacttgctggttgaccaaaaaaaaaaatcaactcgttgatatagtaatgatatggaatcgcaaaacatcaacacagatttgaatccgaagggttggtgtagttggtaacttggaaacgctcagtgaactcaagccaataaaatgccaaaatctcttaaaggtcaataaaaatagaatgcttaaaatgttttcaataaccaaagatttaaatttatgattgaattacatgatcacttcaaacgttcgattgtatacaaccctatacagtattacaagggaacacaattacgaaccgccagaaaaaaagaatgatgcgactatttttaaacacgagacctagaatattaaaaaattaagaaaaacatcaacatccacaaaacctcaactagtaccataaaagatttgaaatcgtaagttgtgtggttgctttgcgtctgggcccaatttaaaaaagctgaatgtttctcacaacatcaatcaataaccacaattgtaccaagctttaagtttacaagaacatgtttgtaattagaatcaaattttcaaatgaaaatctccgaatttcgtttctcttacagagaaagatagaaatggagaatattagtttgcttatggctcaagtaagcttttaccggatcgtgccattcctgatggatgaaactttgcatacacctgcagatgtagtgaagggcacatctttgtagcaagcaactagattctcttttgtgtttagatcaaccaaaagcgtctcccatactttcttctttgggtataagacatcgtctggctcgccttcaaacccgggaaatgtaactcgctctccaatattagcagttttagggggctcaactaactccacctgaaatgtttccagcaaaaacaatttgttatatacaatcgaaatgaatttagcagaactacaaacaggtcaaagactcgtatgaactctaccttgcttccatcactactggaagctgcaagaaccattgcttgtgacacaatatccctcattttcgccggtttcaagttgcaaagaacacaaaccatacgattctgtccagaaacaatattagatcaattggaatgtatattacatactgatatcgggaaggaaacaaatgactaggttgattgaacaaacctgcatttcctcaagaggtatatatttgaccagtccactgacaacagtgcgaatttcaccacccccaacatcaatttcttctacatacaatgcatctgccttgggatgtttctcagccttcacaattttaccaactcggatatcaagtcttgccatagttatttcacgatcagcagctggttgaggtttgggttttcctccgccttttgatgatgccttttgtttcttggcatctgggagaataaacagcagttcagtacataatcaagttactaaaagcctaaagaatgtaaaacagtattttgagaatgataatagagaacctgaaagttttgttttattaagttgatccgccaaatttgctgcttcatccctagcacgtctatcagactgacttccagcaaacttttctctgtaccgtgccacttcgtcgttttcctgtgatcatattgtttcaatataaataaaatgctacatggcattataacatacaacaagtctggctttctatcgataaaatcagagagctacgtaccaactccttgaacaaaggttgaggggtgcctatcctgtggctaggaggcagaatatcccatgggctacttgctagtaatacctctcccctctcgtcggagagagaaaattggggaggcaaatttagctggttaaagacctacagaatgcaataacagcaataatcacgcttggcatgctactacgactaaatagaaacaaaatttaccaaacaaacaatcaaactgaccttacaagaaaaggatggcatgaaaggttctaacaattga

SEQ ID NO: 36839 - DNA, 1578 bp, Arabidopsis thaliana landsberg
  unsure (1)..(1578): unsure at all n locations
gtttgagtatttaaccaaattttcactgcacacttacacagaattaagacgtaagaagctcttaaaaattaattttatgaacataaactacctaaagatcaggggggagtaggctagatccaatgggggttaaaatccctaataatatgtttgactccttagaatagagttttcgtagatgaatgagatttttaatatggttaatagacataattagtgggtgctcgaactgattttaaagatgatatatattttggataatacattatatcaaattttataaaaaaaaatacaaacctttagaattgaccattaattattggccactgaacaaatggcgaaatgaaagtatatatgagacacatgaccaggtgtgtttcgaaaatgaaattgtcaaaacaacattggattgatggaaacaaagggttcgaaaaataaagtggtcttcaagagaagaattcgtagtttttggctgagataataatggttctgaggccaccaatgggagctaggatcgtcaatataacaccaactactatgcaaaactgcaattacagaaccaaacaacttgttattgtcaaatatatagggtagaaataaaaacacatatttagtagaagaagatgatgagtaaaagaaaatatacccaattaatacaccaagacaatccatacttctttggtttcttgatacaaagccacatgatgcatggtagctaaacatagtacaatacaaaaggtagatcaagttgagttactagaattttcaaacaaatgaataggcttaattagtgtattaaattacttacatagtaagttgttggggcaaaggcgaatcctccgaaaaacccgagcaatccaccaaaaaatgggatgcatatggcaacgaacatcgtgaaagctgttccattgatccaatgttataaattcatatgttactatctaggagaattgatttaatatgaataagaacttaccaacatatagagtacgagtgatgaagcggagtttgaaggaaggagcgaacatcatnnnnnnnnnnnnnnnnnnnnnnnnnnnnnnnaagaccggcattgcgtatatttggtagcttccaatgacatggacaaccacgaatgcgttagcaatggcgataagccagatgggtttctccaacgtcatgagaatattgtcgtccacactgtttccaaagatatagtagcaaacaaatgcaacgggaaagtagcatatggcaacaacgatgtatgcaactactactcctttccacattgcaatctttgatggtttctcaggtgttgaaggaatagtagcttgtatctgcaacacaacgttgtgacctgcatacgcaaatgccacatcttctagtgcattcaagaagtcgaatacatttcctgaggttgtagatgctctagacgagtagtctacatttggatgaactcctttcttcaccgaggttgcccaagcgattgtcgagtagctgcatatattacaatcacattaataaatctcaaatagaccattttttaaaaaaagaacaacaggctatatcgattttgagttgtacttaccttaaagacat

SEQ ID NO: 36840 - DNA, 1327 bp, Arabidopsis thaliana landsberg
aagaagcacttagtctatattattttctgaaacatgaaatcatcatgttaattttacagtcaagaaaacaatgcgtctataaatttatttcaaatcaaaatcttatatagtatatgttgacaaaagaaaatcttatattacatatgatcaggattttttcttttcatcaagtatctgttaaatagataaatatagagaaagatgtgatgggcggccaaaggtcgtcgtccgggagaagcggtcgtttgatagctgcaaaaggattctctttgctcccaaaaagcttcgctggcaaaacgtcattgtttgcttctcccttaatctatctttcctttattctcaacttcaatacaataatatagttatatacatacaaacgttttgacccaatgagatatacaagtaccaacattggtatatatgtttaactcggagatgcatattatcgggttaagcttttttcaacatcgttcgtctaatgtttgtgatggataaagtcgaaaaattatatatgcttataattaacttatgatattaaaatgactggaattattgaaacttttaacccaattttaattagcacttaaatttgtacattcattgtcaattaattttggattaaaatcatatagtgttcctataaacaaacatattttatcactgatcatgatgaaagttttttcgcattttaaacaaaaattaaataaaaagagcgttaaaaggccttaattacgtacttgtccaacggcccatttaaagcaaacgccaatgatccattatgacctttatttgggctgagatttatcgttgtgctgtaatttgactattttccaaggaaaattaagtccctttttatgtttttatttatttgaaaaacatgacaaaacaaatgcaatccacatggtccaacgaaagagcgatctacttgaaatctaactaagttcccaacgaaaccactgttaatgtaactttacatggcaaatatctttcggatatcaaggcccatcactttcagctcttctgtttttcatttttttcccaaaatttgtattgtttaatattcctagatttcaaattgtaataaaattttcatttggcataagaaaaaaaaataatatctttttctacatagaaaataatatatataatatgagttcatacaccatacatgtgtgtctatatacatatatatagctttgtaatgtatgtatatctcgaattgtagccatatgtaggatgattatctaaaatatatggtcataatgtcacagtgtaaagctactctagtcatttgtcagattctaacaagagaatcttataatgatca

SEQ ID NO: 36841 - DNA, 2379 bp, Arabidopsis thaliana landsberg
aggattggatggggcagcagtttgtgttgtgtgtctgttgacaaatgagcccgctcacaataagttatccttccaaacttgcatattcattcccctccatcaatcagtgatcactgaattagtaagaagaatgataaacatgacgattataatttctacaagttgttgtacggtacactattgtagcctaatagttgaggttcaaatctagggggaaaccctttttttttttaaattgaaggagtagatattctcaattgaaaggaggttgtatagtgggtatgccgagtagagttagaaagatttaagatttaaaaggagaaagattaagggagtagaactagagagagaaacaatagaatttggaggtttcgaagagctaataccattcaactaaaagtattacacatgtttaacattaaagccaaaatatctgacttcattacagaaagttactaggcaggaattctagagtcaaacagaaatctgactttactctagttagttactggttgacttaataatttggatatttgagttaaatacttttgttgggaatttggacactggtttaaactgtgtttatctttcattgctcaaagttaaattaggtgttggaggattcagcatgggtgcggcgacatctctatattctgcaacttgttttgctctcggtaaatatggaaatggcaatccataccctatcaatttaagcgcaatcataggcttaagcggctggcttccttgtgcaaagtatgttttcaacttctcctaacgttctcctagtttaatgggataatggtgtcaccttggtgcgtttattattattctcataggacattggctggcaaactagaagaggaacagatcaagaaccgagctgcatcgttgcccattgttgtctgtcatggaaaaggtaattgtgcatattataatacccttactttctgaactgtttcacttctcagtatgtttaatatggtcatctttttggttttgaaccctgctgtaaatgcatttcatattctctaagaaaaatattctcgcgagcaaccggttattcaaattgttccataacaccaattcaagtaaaaagggttacattttaaagattttctcgtctttcatgttctcatattattgattcatgtaactttggtttgcagctgatgatgtggtaccgttcaagtttggggagaaatcttcacaggctttgctttcaaatgggtttaagaaggtgaccttcaaaccttacagtgcacttggtcaccacacaatcccacaggagttggatgagttgtgcgcatggttgacatccacgctcagcctcgaaggttgatacttcctatgatgtagctttctgatgaaaacccttcaactcttgagagtttgattgaattggatgtttcaggatttcacaatgttttcattggaatatttgtgtaagacacattcgtctagtagcaaatcttctcctttggcacgtccaaaaacatactcatcactaatcaaccgttctatggattccaaaattattgccttgatagagacttgttatccatcagagggttacaaaaacttaaattccctttgaataaattgatttaatttaaaataactcagagtaggcgccgacagttgcgcatcactaaagtaaccaattgcaaagtctacacgtgtgtggattatagtctgacacgtgtgaggacgagactcttctgaatcatcgttgctcatttctcactctgtgtgggagcctaaacaatggggagacgaaaccagagatgcttgctctcttcctctcttcttcttcgtatccaactctctctttcctctccagatcagtaactctaaacttagccagaagaacaacactctcagctctcacaatgtcgatgaacctaaagactcatgccttcgcaggcaatcccttgaagtccaaaactccgaaatctaccgatccattctcacccacctccgctttcgaatctctgaaaaccctaattccagtaatccctaatcactcaacaccttcccctgattttaaagtccttccctttagcaagggtcgtccactggtgttctcaagcggtggagatgctaatacgacgccgatttggcatctgggttgggtcagcttggctgattgtaaggttttgttagcaagttgtggggttgatctgaatgaggactcactcgtgtatttaggacccaagttggaagaagatttggtgtattgggctgttgatttggcagaggatggtttcgtttctgaattgggaggtaggaagttgtgttttgttgagcttcgaaccctaatggtagctgctgattgggcggatcaacgtgctatggatgagttggctattgccggcaatg

SEQ ID NO: 36842 - DNA, 1503 bp, Arabidopsis thaliana landsberg
  unsure (1)..(1503): unsure at all n locations
gtcacgagagttcttaatatgcatccacattgttaatattccaatgcaattattttagttataagcaatattcaaattgatttaaatttggatggcatgatactatacgaatgcatgataaaaaagcatcgagctctttattaacaactacaccaaaggtcatccaccaaacttgtagattataattatatatgttcttccaatactaaactaaaatgaaaacaaaaatcgaaaaacgaaacaaataagaggccgcactataagcaagtgcaccaatagattaatactggtttataattttttttttaatccatatagtatttcttaataattttcttcttagaaaatactaatatagtagaaaaaattaagaaaaagcatttcactttcccactttataaataggaggagatgtcaaaaaccacaacacaccaaaaacacatttctataaactcagaaacaaacaaaagatcaagaagaaacatggtgatgatcaagaccacaatggtttccctttttgctctagcggcggttctcctaatgattctagccccggcggcagaagccgtgacgtgctcgccaatgcagctaagcccatgtgcaacggcgataacgtcgtcttctccaccatcggctttgtgctgtgcaaagctgaaggagcagaggccatgcttatgtggttacatgagaaaccctagcctccgtcgcttcgtcagcactcccaacgctcgtaaagtctctaaaagttgcaaactccccatcccaaggtgttaaaaagtcagaaaagtgtttgctgtttatgatcatcctatatatgtttgaatcctacttttggtgtgtgtttaaggatgtttatttatgaccactataagtagtagagttaaataagtaagtggtactcttggtgatgctttgtatgcatcttatttaaatttttgctatcttattctggttgttgttgatatatatatatatatacatgatggtgtaataactgagatgatataatatatgaaaattatatttcaaaaacacaaaagaatcaatggatacatgaaaatcactgtacagtaacacaccaactagtattcataagagaaaatctaggatttcgacttgctttgatacaacttgttcatctcctcgtcggcgtgatctatgcttactacttttctccccattcctcttcttcttctccttcgtcttctctcttatcgagctctgtttttttatccctgaatgattatctttttctctttgcttctcctttccttgacccattagagcagtctggatcgtacgagacagaagttcatcattattaatagagtctggcaggtccatgcccaagttcttattacttcttgggttgtaattgctatcttattaggttccgcagttctagcgattcgcaatccacaaacaattccaactgacggccaaaatttctttgaatttgtcctccaattcattcgaaacgtgagtaaaacccagattgnagaa

SEQ ID NO: 36843 - DNA, 6245 bp, Arabidopsis thaliana landsberg
ataatcatacaaggaaccaacctcttcgtgggcatgataacttgatacacaacttaagcttgctagttccttcttctgaacacttcccttaaaccctggatcaattcctgaagtgaaaactgtacactcatcttcagaaaccactaaagatcttagagctccatgatgggcccgcgcagaagacaaaacagatgctctaattttccatcgattctcatctttggggtttccaaaacgcccaatgtcaagcccatcccaacaagttactggactaggaaaccatgaccagggttcatgcaccaaagggtttagaactgcttcttgtccttcaactgggacatgtatatgaagttttaagtgattggaatttcttaacccctgcgactggggaaccgaccgtccagatccattaagcaacaccttaggagtgtgcttagatgcagggccctgttttaatacaggccttgcttccatattgtatcgagaagatcgtccggtgtattcccactgaattacaatagattcagtgataaatgtccatagctcaatggaattttatatattagatattgtggcaacagtatcccagaattctatatataaagacaggataccttccagttatgatgctttagcagatactgctcaaggagtagccaggttggacaaccctggcgtaatttctccataccaagaagtgaggcgaaagaaggatagaggagcaacctgtgattcctacaacgttaggatatagaacggaattatactttttgtattcactgatgattcagatgaaacacgcacacaagatccatacggcttttgattggagattctggatgaaatttttgttcggcagtcctaatcttccagcttaaagagtcagatgcatctgtacttttctcagagaaagcaaactcatcaaaaagctccttcaactgcggaagaacatgcaatgcagtcatttcttgtccaatccgctggcaaattgacatcagggaagttgcagcaaactgaaaaattggagaaagcaacattttaaaagaaaaccaagtgttaaaaaggctttccatatgcttgaatgagcattacagaggtgcactaatggatcctcctataaataaggcactgatgcatgcctaacaatggaaataccaatagaacaaatttcacaacagagcccttaaaattaagctaaatctctttttttggagtcaatcttctttcaccacttaagagtgggacgctcagtgacaacttaaacaaggtcatcttgattatacatcattatccttccctcaaagttactgataaagaaaaagaaaaagaaaaggaaaatcaagaatacctgaaggacccgcaactctagatttttctgcataagaactcttacatgtaggcacaaccgaccctatgtgatgataagacaaaccacaacaatagaacgaaaaattaggtgtttaacgtaaagctagtaaagatagatagataaaattttaaacatactttggtcagctcatgtatgagcaactcgtctgatataagagcaactagaccatcgagtgtgattaggcaatcagacagcgctaaagaacaccaactatgaacaggctctggttttttcatcgaagagagatcgatacagaagcaaacaacatgttccagtaatggcagcatctgtttgacaatgaagttcacgcccaatagtctccctgaaaagttaacaatacaacaatcacttagcaaaatatgaaatttccaggtagagctaaggtgcatgaatcaacagatagggtgtaccaattctaaccagcacatcaatcccatcagtacatattccttttccgaagtaacttatcaatggcagtatagtctgtattaagggacaagtcagcatccaaataagaaattcagaaacacgtgacgtgcccgatgaaaggcatatatataatatatgggtgcaagacaagaacaggaaatcttatctgacctgatgtactgtaacaggggcaccaagctcttcgctcgaaccaatcaacagcacagaggctgccgaagctgagatcttgtccggagaattatacaagtttgatatgactaaaggatgaatcatttcaagatatactctctttccaatttgattccataattctctcacaaacgaatcttgaagaagagaaactttcaaatgcgagtaacctgtggtctaacatattatactctgtcagaagatattaattgaacttaacaagatgttgattttataaccacacagaaatttagaattacaaattccatcgggaaccaacaatatatgcgtaccagtaagatcttctggatagaaggcaagacaagtctctgcacagccattggtgtcaaagattttgtaaattccttgagaagtacataagccaattcacactcgtcctcagataaaggtgtggtgaccagtggcaaacagtacacagcacacatctctgccacaaatgttcccattactttcaagactccctgtttggcaaaacttgctgcataacacaagcgtgtttgacctttggccaaaaggtgaagtggagcagcaaacaagtgagctgacctcactgtagctgagaaatacggagagtccaaaagactctttgctgagggcctcctgcatgtttcaaaagtaagagagagtaattagacattcacacatttaaaatacacaaaacgtgttactacacaatttttatcatcacaccccacacagtcataaacacagtgaagtatcaaagaagaccagagttaacccgaaaagagagagagaaaaataccttctccaatcttgttcaatacatgcttcgacaattacctgagtaggaggaggaagttctttgatcagttcaggtaagtcaccaccttctaaataagtagccaaagacactgagttgaatagcggcttcatcaaataaagttctgccaggacacagccaatagaaaaaatatccccagcaatgtccttggaaatgtttcctgtgcagaaatcttgccgccattgtaacaactcctgaagttcagtcgatgcttcatctctcacctccatatgctctaaaagataattcaaacttatccttgatgataaacctttgttttttgaagttccagggagactagtatttactttcttagtgttttcactgtaagatacatgcaaaggagactcaaccaggttttcacgaaggtgatactttggacataaatgtgttgcatgatcagaaaatgcagatgcctcttcagtttcttccagatactcatcagctaggagaatgacggacctcttgttgtccacaccaaagccatggaatgtatgcatttctagttcatttctactttgttccttctctcgggagaaaccaaggcgcaccggatgaggccgaaaaaagagttggcgacgtccaactgacctcggtactgtgggttcagatgaagacaacataacattcttcgcagtaatagcagcatgtcctgacattttgtaaccaaaagtaatatcaatccagtgatgtattagagatgaaacatgggggctttccagagcatctcgatgcaatctaatgaactcatcggggctgcttgcccatggaggtacagccaaatcagacatactaggatgaagggagcaaaagatgcggggatcacagtaaaactcagggatgcactcgtcaggggtccaatcataaagcctttgcatgtcagagggatattcattaggctcatacaccgaccgaactgcctttcgcaggacactcagtggcagtcttcttgctttgtagctgcaaacagccagctcagaaagacattcatctgatacatgatgcggaaattcaaatgttgagtaggtaaaatctaattgttcatctccttttgccaatctccatttgctttttcttaaatcacgccatcctgaatcactatcattttcaggttttttgctgaaatctatgacccatggcattaccggatgaaatgtgtggtccccccaccttcgacctgctagtttgtttaagacgagtaaatattcaaaattgcttagctctcccttccaccatttatcaaagtgagtctgccagtccaaatgtgaagaaattttaagatcagcataaaggccataagaataacaaccctcaacacaccaccttcttcttgaagcagatgaattggcatctacagaacctaaatcaggtttgctatagatcgttaaccaactccataatgaatcagacaacaatatgtttgacggacgaatgtccccatgtgaaaaccttcaacccatgcaagtgagctaacgcagacaatagctgatatattataaaatttctatgccattctgactttatagcactggggctgtagtagagaatattttccaatgtataaggggctttggggagcactgagaccaaacaatcagatgatgtcagaagtcctaggaccggtgatagatttggatgcctgagacatcgaagcttgcttttttcctctaacaacggtaacccaagaagaagacaaaggaaactatgggttgcttgtccagatgactttccatcaatcaggcgatgtaaagaggctaaaatttgatcttctggacactcataatggaaactagaagcaagcttttgaagttcagatgcagaacattttctaatctgagcgattggtaaaagtgcagctacagttctccaacatgaaaaactacctgaatgctcgcaagtaacacttccacaagtaatattctctgtgtcatcatcttcagtagcttgagagccactggttgaacaatccaaacactcatcagattcaacagcatcgtttgaattaccctctcgatccttaacaacaaatttgtcgctgcagaaaaagaataatttgctcaaccacaatgattgatagaatcaaatcgttagcctaaggagaacataaacaagaacgtacacgtatttagctaagcacccatgttcgtccttccggagatactccaaaatgaactgagaagaagtggattcacaagaagaacaagaagcagaaaattcctcgctagaatcagaaacctacacaaacgccatttaaagcagcttaaattccaatacttccaccattgaaatctacaattcaaataatgacaattgaaaaatccaccttaacgacggcggaggatccaaaaggtagcggcgaatcggagacaccgtaagagaagacgatctgatcggagaagtcagagttgatacgttgatcgagacaatcgaagcaaaggtcactatcttcacctctcatcccttctttcttggaggaagagagacgacgtctaatgatccggatccgatcaatctcgacgacctgaaaaacaaaaagcacggccaagaaacgccgtgttttctcctcaacgacgccgttttagcctataactattaaagttgctttattttgtttgtatcttaaaattgcaaactgttcataaatatctcttatttcaaaaaaaatatcaagacggccgtcaaagtttcggtgacggagaatattgttgccgacggaaattggaatgggaggaggagcgattgacgaggagctgacagaagatgagaagagagctctcagaggaagcaaattcgctcctcttacttctcttccttcgtcttctcgctctaagcctcccaggttttgtttttgatcactccttagggtttttgttttccttcttctcgattttgaaattctgactttcattggatgttatgttttatagattggctcatccaggtggaccattgaagacgaataaagcggcggctttagccaagtttctagagaggaagctgcaagatcctaatgggttagcttccattgatccagctcttgtcgaattggccgtcaaaaacgccaaagacactgttatttcgagtgagtacttataaacacgattctttgataatgtttggcctaaaggtttgtaatttggaattggagcgaaaagggatttgtttgtttgagaggcttaggcatttgaaagatggcaatggcattgattttaaggctttcttggtagtgtattagaggaccatgtaattagcctaaaatagtttttagttgattataagtcacggttgatagctcagcattagctgagagctgggtcctgaggtgctacacaaaaattcgttgaggtataaggtgttcttgttaagtctagtgcaggactttgtatttgcaac

SEQ ID NO: 36844 - DNA, 1422 bp, Arabidopsis thaliana landsberg
ataattattcactttggctttttgtggtaatagctatgcgacttttttcaatggctaaacagacttttttgaacacttacaaaagaaaagagaataagatgggagatactttaggatctcatagatcaaccgagagaaataattgaagttgtcattttcattatttcatatctttctcaaaagtcgacacctatcgatgagtaaacttttttgctagcatcgtttgctatgtggctacgaaagtaaaaaaaatggatgtgttcatgaagctacgattagtccaatcttttagtgggaagcgaaagtaaggtgcaattaatgtaagaaattcatgatattgctacagcgaaattgtcttgttccaaacttccaagcttagcacatcgtctgatctctcaattttttcttttgtcttattttgctttaaaagtgcagtattttaaaaattgtcatttgctagttcctagtattgtcataatctttgttaaaaaattgttcaattattagccaacactagaatattattatatgttttgtaagtaaactttcaagattgggatatcatctgtggaccgaaagcaacaacacagttgcgctagcagtgtcactaaggaaggccgacatcaatcatatatcgcaagagacggaccttactggcttcgttatgtattctcttcggaatttatcctcgttgttcttggccatgaatattttcttccaagttttttttggtctctccaaagtccaaaccatctctcccgcatatattaaggttaagatgatttttaaaaaggagataacaaattttataattggaattattatcttagtcgggtcaacgaaaaactagtgagcagccaggaatgttgaaatataagatatgggaagaaaagtaaaatgactatgaaataataaagtgtgacttgtataacgattatcaaaacataatacacagtaactttttgaatctcaggccatcttgtgcatattccttaaaattcttacgatattgagattgatttttttggtggtatggtatccatagagtgacttgtatatctatttcttttcttgccaaaaaattgttcaataaatctattttatgtagtcactaatcagtaatcactgctgtcaaaaataaaataaaataaaatgtaatcactaatcactaatcatttagtacgttatctttctatgaaagtaacattgtttcattcgtgtactttctagattggtctcaccacacaaaaataatcctgttttggaaagaaaagaatcataaaatctcatcgccttaacatcccttacattataattcgtattcactaaactaattaaacaattaaattaatatctgaaataaaaattaaactaaagaaaattgattaattttccaaattaaatatcagttttttagtaaaa

SEQ ID NO: 36845 - DNA, 4919 bp, Arabidopsis thaliana landsberg
gcttcaaatgtccaattttttagatatatgaaaaccatattaatttttattccaattaaacatgcgttctcgctttccattgtttttctctaagtagatggcatcatctttggcaatccataagcgtatctgattaaatcgtcgtgaataaatcttaaggcatcatagtgtgtataacatatggagagcatacagaggagccgctaataaaagatgtggtcaagtacgtaaatgggtttccagaggtgatggtatttacttggtgagaaatgctgaacccaaggggcttcgatttgtatggcttaaatcatgagtgtttatttcatcttttctagctaaaactaattatttattttgtctttcttgtttactaaatcatcattctaatattgcgggtttagaatatacaacaataaatttacaaaattaagatcttttaggatatttatatacattattgtatctgtcctttttaatactttttatagggtttttttttctttgttcaaaatactttttctaggttaacattgttaatatgagaacaaaatgggccttgcgataaacaaaattgtggcttacgataagaactaattgggctttacgataagaaaacattgggccttatgattagaaaaatgggccttaagagttaccgagattctttaatacttttttcgtcccgagaagaaacggcggttgtcttggtcgtcgacggcggatggagtgtgccgcgcgtggttttgcgacgcggtgtgttggtccaccgacgcggaggtgtggtcagtgtggtgctgtagcttattgctccgtctctcatcaggttttaacttctgctttaactctctcttaagccttcttcttcttcacagtgatgatttgatcggtcgcttgtagttaggtggataagcaaattaggatgttccttgttgaatttgttgatctttattttgtttgtagatttcgcattggagctatcacaaggaagaatgtgagagattagaagagcaaatgcgtcgtgttgatcttttaaatgattttccatttacatttacagaagaagctacaattcaggttaatcatcactttgaatgatagtgaggaatcaaatgccttttggttagtaaaaattcagctcaaagtttaagtttttggtttattcgttctttaggttagtcaaaaacatgagactaggtgctcattcttcatcaagaggggattacatcgtgttggaatgtggatgtatgagtgtaactgtggagctttggcttttgataggtttcattgcttatttttgctctttacttaatgagaatcacgttttggtttgaagctattgttggttgagctgactactatctttttctgacagttttaatattgaagggtggcatttgccgagctcttcttgtccatgtcgtggtatacttcattttcacttctctgtttatggttttactgaaagagtttgtttctatagagttctgattttggattacacagaggcctttatctccaataactaaacagctatgcacttgcaaggattatttctagaggagaaagttacctgtagattcacctgtagctctacttctccactgggtaataacagtttttctgatgactaatgtgatttcaagtatgatcagaatgcttgaggtgctcttttttttgactcataaagcttgcttttatttcagccacttacgatatatcatgcaatgcaagccattgcgatgggaaattcgactccccaaataagtgaagaacttcgtatacattatcttggtatgtatcactctggaactctcctgctttcagaagaactgtatcctctctgaagctgctatcatgatctcggagttctgcaaggcagtttttgttaattgcctccacttcctttatattagtttagtcccttaatattggcaaaagaatcatcagaaccactatggtgtaaaattctgatatatgatttgctgatagtttgagcttctgaagggcctcagaaggaacttgggcaacttggtgtttttgctgagctgcaagcgctcttccctggtctgcgcatttatgtagatttgattggacctgacgttccacaacatatgtgagccctgcattccacaatctatttgattactttgtataacactagttctattttagttaggaagagtaaagatatgtttttccttttaatcactcttctttagagttctttaagctattcagtgacaacattatagctggattttctttgtatgtgttgaactattgacataatttgatggatcgttctctatttgctttctcgatgaacagggatggagaaatgatctccctttgcagatattccccttgcatgggaaaagaatgtgaatgtaaaaattcaagcaaaattctcaattccgggagcaaacctgctttggtttcggctgtgtcattacagctccgtagagggttttaccatgatcgttacaatgacataacaaaggtacccctttctactagtctaggggcaaaacaatgatttactatactgttcttatatgtaatgtccattttcgtggaccttgaattgtttgtttcctaaaagatgtaataatttctgattgaccatctcggcaggattcatttcctccacacatagtgattgctccaaacgcaggcatcgctgcatatccaagctggttgccaactattgtacgtttttccagtagctaatgtcacatccaatagttcccaggatacacagagagagcatatgtttgttattcattcatgtgttggtgtgaataatttcaggaactgataaaggagatacaagtcccagcagtattctctgattattgtgaagaagcttgtcatctggctgcttgttgcattaaaaccatcacaggacaacctctatcatcacctgtaagtctaaattataggttcattgtcctatttaactatttcaagtctatgtttattgatatgtgggttcctcctgcatatagtcaggcttatgtctcatcaaaactgtatacgtagaatagagagtcgacacatatactatataatgaagttgaaggagacaaaaacatctcttttttcttcatctttggggccacacaaaacagacacactattgtccacttctccaatcaacctttgttggaaaatgatgttttgcagataaattcttatatatttcttcagaatcatattgatatgaatgtaacgatgtatctttgaaatgcagattgagttgaatccatttagacagccaatggcagtagaggagagtactctgtttatcccttgctactcaaactgtttcatcttcgcaatgtaaaaattctccaacattattgatcaactcaatggttcactgttatggtctggatcgacgatagagatactgttccggtgtatggaccaacattatctatacaatgaatgtagaaaatgtcacatcattttgttattggttgttgtagttatttatgtggataggaccatcaagtgcatacatacaatcattgtagtcttaggtgaatattatgctatatatcatatagcattagtcatttcaagtgaaactttgcaattatctttgtcagatgtcatgagcaattgaacaatgaaccaaactgaaccagatggtaaaatccggttcttggagatattcattcacaaaccaagtttgtgtctacgtggaagatgaaaccaaagcaaagaatcttcaaacttcttgtttctaagaaaagtctaaaaccagtttggtctatttcttccacatccaaaactaactcaatattttatctcccccaaagtccaattttccaaaaaatccaaaacacacagagagaaaaaaaactgaaacatcccaaatggatcatcatcttcaaccataacaacacgaaacccttcttctccaaaatccccaaaaccttgaaacaaagtctcaaaatttcacttcgtggatccgaatgtctcagaacccatcactcttcttcctcttatgtctagggttaggtttttgcgttgacctgggtcaatccctgaaagttcctttcagcgttaacgatgttcttccgatgctacctcgtcaagtctcatggcctgttttgaacagtttccacaacgctgtggatttgttgccggtttttattgggtcagttactcctaataatgtatctattgagtggaaaggtgcttgctttaatggtaatgaagctcgtcttgatatcaccggtagcgatcgtgacgtccctggacttggtggtggtgttcttcatctcaaagttggttaatttcactttcttcttcatcaatttgttcttaatttgtcttcttaatgttaaagtgttatactttcaacgctcatatgctcagatttcgtaaagtttttccttttatggtaacaaattcaaaattaggagactgttgtgtagttgctgctaattcgaaattgtatgttattctggatgaaattgagttgtttgataacatttgggaactaattttgcagacatccaaggcacatagcttgacatgtatggatctttatgtgtttgcaacgccatacaggatcacttgggactactatttctctgctagagatcatactttgaactttgattcttgggaagagaaagctgaattggaatatgtaggtttttgatttagttaatcttctttatagtcttaagagggtttgtggtgtttgttttcatggtgatttcttcgatgagtaggtgaaggagcatggcgtttcagtgtttctaatgccatcaggaatgcttgggacgttgctatctttgattgatgtgttacctcttttctccaatactgcttgggggcagaatgcgaatttggcgttcttgacgaaacatatgggtgctacctttgagaaacggtctcga

SEQ ID NO: 36846 - DNA, 1367 bp, Arabidopsis thaliana landsberg
  unsure (1)..(1367): unsure at all n locations
agttttgcaaccaatgagacttcgtttatgaactcattgtctccttgtcctgatttcattgacaatcttttcacagctatctcttccccataatcaagaacaccctggtgagtatttaattaaacacatgtcaaagagatcaagtctttggagtgcttggtttcaaaattaaggtgatgtctctttttgatgatgatgaatcattgatggcgattactttgcttggttacaaaccttcatctcatgtcataagaataaaccgcaacatgaactactcatctcatgtgagattagttttctctatttgctcgaataaactggattagattagtttttgtctcgctcacattgttgcctctgatgaaatatatgaagttttgtgagtgtcatgttctgttgaaaataccatcaatcatattttggtggcacggagacattcattatggcaataaaaagactacggagactcccaaaggaacgtagaggatttctaccggaagcatcgagtatattggtttcaaggaggagataagatccagaatcatctccaacaacattgaatctatacctactagttaaagtaatgtcaagagcattttggtttctcagcactagcagcaagctgatgcctgatagccaataaaaagaatgtggaggggaatatcgtttgttagcataagtgtaaaaatagcttggttactctcttttcattcatagacattgtttcaatttcttttatttgcattcatggtagattgtattggaatatttatgtattttgtaaactctttatgacataaaatatttgatttgtcgggaaagatcataaacatgagaaaagattaataaccttataaactgcaccgaagccaccttctccaagttgattgtcacgagagaagtcattagttgctaatcttatggtatcaaagtcaagttgcaataattgtgcatctttaatcataagctcttcaagatctttgcctgatccaaaagcaataaaaccaaaagggtcttttaaagttaaaactctcgacaagattgtttttcaaactttgaagatttgactttctgactaataagcccaccttcatgtctctgttttgccgttcttctgttccttgtcataaagatgtaaagaaagactgcgattatagcaaaaccaataacagagcaaacggtggcaataatgatttttactttgccatttcctgctaagattaaatttgtcaagacatacactgttagaacaaagaaaataattgtagaatacaagtgtgtgaggcagagtaaactaaacaccccgtttgggatcaggctcatactcggagaagagaaggnagnatctcaagtccctctccatctac

SEQ ID NO: 36847 - DNA, 3758 bp, Arabidopsis thaliana landsberg
  unsure (1)..(3758): unsure at all n locations
ttagttacacagagcttaatattctcttcatgtggatcttgattatacccgagcaacttctggatgcatgcttgcatgactttctcagtcaacatccttttcttgtataactcaccaataagtctgatgctaccaagcattctccttcgcacctgaagtcttttctcttccctttcctcctcggtttgttctacttgaccttcttcggcaactctactggcttcctcctcttctttctcccccctctcgaattcttcctgacatttattgagaagcaatcttttgaaggtaatcttttcaccattctcattaaaatcaggtaacgccccagagagatgaaaacagaaatctgcatacatctcacagaatgttggctccatcaaggctttgtcaaatatctgtgaaatgacaccagaaagtgtaacagcgttgtcaatgttgacacttttaacttgctcaaacagtttctcaaagttttgtggggtcaacttgttcaggatgctctttaactgcctttgttttgcttgttcttcatctgcaattgtccccacttggtattttctctcggctttgtgcatcacttgcataggagtgtgcggagaaggaaaaagtcctttttgttggaaatttgaaccacgttgccacctttctaagtcgggggtatttctacccattcctcccataggacccacaggttgcatcggtctagatataattggtccctgcatacgagggtttcttaaaactcccgagtttcctccttgaccaggtcggaaacctacgttacccccatatcctgctggaagagaaccctgattcttcgtccatctatcatcaccagccacgttgctgggacggcgatctaaacgagcaccacttgcttggcgatccataacctttccaggagtaggatatgaatcatgttcatgatgtgatgcacccatatatgcaacaatcaaggcattagcaatatcaggcgaaacgtcaaatccctcaggaagagcagtacacaggtctgcaaactttaggaggaaatcccgggagtacttcttttctgtattgatgcagttgtcgctgacctcatctgaggaacctctctttgcattcacagaattatctgcagtttccagctttggtgtagaaacatcggctgcatcttcccagtcttctggttcatttttcactggttcagtatccacaatggcttcaacagcctgaggtatggcaggtaacaggttctggttcgaaacatcatgaacaacatttgagctctctttcttttcctcaggccctttgtaagccatatagagatcagaagttgtccctgcagcatctgctttttgaaggatttcttttatcttcttctttccttttgtagaagtatttcttctcgtgtttgtttcaacagcagatttatgtgtttccgaatgtccaagaggaacagtagaagacagaacatgagtagaatgtggaaggtcagagctcgtatcatctgtaacagctagtttttcagagacaggacagacatctgtggcaccatctacctcattctgtgccttctcaagcacacctgacagtgtttcgtgttttgcatcagaaattacagacctttcatcgagcttgtcagaagcagtccggttatcacattttaggtctttctcttgcggtgaagaaccagaaatctccgatgaggcatggcttgaaccttccgtagatttgtcaatacttgtatctactgagtcagaagttggagcatcagatgtagtagacaccttcaggagttgcttcctaaacccgttggtagctgggagtgataaattttccttggcagcaacggttgctgtttcaggatcagagaccagagagtctggcatagtctgtccacgattctgagtgaaccagccaaaaaaagaaaataatttaatcaaataagaaaaagaattaatgaataatacccaaaaacaaaacacagtatcatacctcagtcagattatgagggggttccaccttacatgtctgatcttcaactgagatcgactcactcaccatttccgctcttctgatttcagtcgttgtaactggagcagtctccacagacgactttactggcggaacagtctccacagacgactttgctagcggaacagtctccacaggcgactttgctggcggagcagacgaatttggtactccagagacaaagctaggtttcggctgctgggaagagctcaacgaacatgcctccacgttcttnnnnnnnnnnnnnnnnnnnnnnnnnnnnngtgacctgtcttttggtgatccaagcttttcagaaaccccagctggcttcactgataccttcgcatttacaggtagagcagatgacattacattttgggcattgcgtgctttcacagaggaagtcgaatcagaggaaagatgtgcaggagcagcgggtctgataagctgtggagcagtatgagcaggttggttgataagttgtactctctgagacccatcaataactgggtaatgatatctcggtgcctgagcggatgacattggaccattatttaacggtaccgaaaccgggggatatatcatggtattggagttatatgagggttgcaccaaattgactggtcttggagcaaatgatgagactggctgtgatctgggaggtgggttagaatgtggttttaaagccgttgaatcgccttctgaatacgggtcaccacgtcgatcaagcctcagctcttcgtgtgtgtcaggatgtgtaatctttacaggggtggtcttgcgtgccccaccatattttccaccttgctgctggggatactgagggctcaaacccacacccacatggcctaactgaggatgaatctgagcacccattggagttgcaaaaccatgtccctgagcctgatgcatcataccctgatgatgcatcggatgtggtggatgtccctgataaaacacctgcggcgggatttgaggagtatttcccatagataatgccattggcattggcatctgaaacgaggttgcagtcacgggaggctgcatatgcatattcggcccaccaaaatgtacagggtgagggacctgagtatgctgatatggtgtctgcacagaaggcatgcgaatatttgtaattggagacttctgcgtttgacttggaggggctatatgtgggacttggatatcagctttttcactcgatggattgtgcccctctttcctcaacaatgattatctgcacccttatttgatgaatcttttttgggtacagaagctggcacatttgacgccgttcttaannnnnnnnnnnnnnnnnnnnnnncaatgtttgctcgtgtcataaacgaaaggtcaagttcagaacaaagtgaataaaagacatcttaagtttcagtatatattctttaaaccaatttgagttaaagatcaagcaatcaggccagcaaatcgcaatacaagacaaatgatagagcatttaaaagtcagaagcaaagttcgagacacagactattcatcatcctataagaaagaattatttatgtaggcaacaatcacagtaacggcagatgcataatactaaaaggtgttccacctgggcacgtttctggtcatccatattcggaggtgctgaggtagttcgagcaggaacctagaaaaccaacagggaagattattcaagtgttgatggaaaaatcaaacaaacaaaggaaggaacaacagcattaccatcaaatcaggaccaagtgacccaaact

SEQ ID NO: 36848 - DNA, 3474 bp, Arabidopsis thaliana landsberg
tgggctcggcattcttccaagtgagattttattttttcatgtatctatatatcaaactttttttttgtgttttcaaaaacttctgtttgttttcccagagggaagatttggagatgtgaacatgggtggtatcgatcattacaacagaatgatcaatgatattctcaaaagaggtaataattaaattttcttgagaatatttctcaagaccaagataagaaaaaaaacaatacttagcacaatcattctcaggaatcgagccatttgtcacgttgacacattacgacattcctcaagaactcgaatatagatacggaagttggctaaacccccaaatccggtacgtagatacacacacacaacacatatgtacaagtagacacatacagtacaatgatacactgaaattaagataattgttggtctcagggaagattttgaacattacgcaaatatttgcttccgacactttggggacagagttaaattctggtctacgttcaacgaaccaaacgttcaagtgattttgggttaccggacaggaacttacccgccttcacgttgttccaagacttttggaaactgctcctgtggcgattcttacatagagccactcgtagccgctcacaacattatccgttcacatgtagccgccgtcaacttataccgtacaaaatttcaggtatatcaatattgttaccgtgtgtgacaaaaaaaaaaaaaaaaaaaatcaatattgttaccgtgtactagatatttcaaaactcttttaatttaagattggtttcgtttaggaacaacaaagaggacagatcggtattgttatgaacacaatctggtttgaaccgattagtgattctttagcagatagattagctgctgacagagctcaagctttctatttgacttggtaagctggattggttttcaaaatattgttcccaccttagcgccattaccggggttttgatatcgaaagagtgcgaaaaatgcaggttcttggatccggttgtgtttggaagatatccaagagaaatgcgagaaattcttggcgatgatcttcctgaattcacgaaggatgatcttaaaagctccaagaatgcattagacttcattgggattaatcagtacacaagcagatacgcgaaagattgtctgcattccgtatgtgaaccgggcaaaggaggttcgagagctgaaggttttgtctatgcaaacgccctcaaagacggtttacatttaggagaaccagtaggtagaccaaccaatcgaaagtaaaactgtttagaaacatttctgaggtgtttgattatggtaatgatgcagactggagtaaattggctttctgtttatccacaaggaatggaggagatgttgatgtatgcaacagagcgatacaaaaacattccattgtatgtaacagaaaacggtaagcacgtcggcactcgtctttgtctctgcaatttctgcgacagtttttgatctcatcaattttgcaggttttggtgagaacaataccggagtattgttaaacgattaccagagagtgaagttcatgagcaactacttagatgcactcaaaagagcaatgaggtaattatgcttcaacttcagaaaaaactcatatatgtctcgattctaaaccctaaagctacttgtgcaaataggaaaggagcagatgtaagaggatacttcgcctggtctttactagacaacttcgagtggatatccggttataccataaggttcggtatgtaccatgtcgatttcagtactcaagagagaacccgagactgtcagcttcttggtacaaaaacttcatcttccagcacagagctctatcaaaagatgattggtgcctgaaacaaaaggaagacacaaatttctttcttatttgattcttccattaagtaggagagtaatgtaatagtaagctgttttgtagaaatcagttccaataaacaagacatattccttgtgtataacaaaaagttctttacctctcatttactgcggcaagtttagataagatcctcgacatcagaacatgtgtttcatctccaccacggagtcccagcttcatagaagtgctcgccatcatcatcgtcccatgagatttgacaagcttgaagaccgattcctaccctcggttccttgccatgtctatcaatccattcggcaacagcggtttccttttggttctcctccattgtgtaatgtttctttgctttcccatacgggttggtatcaggattccccatttctgcaatcgctgctggcatgtacatagagtcaccaaccaacggtgccccacaagctgcaagctgggcccggatctgaaaagccattcaacatagcaactggatgatcccaacatattcatatgattatcatgtctattaggatatgggtcgatgaacatacctggtgagtcttgcctgttaaaaggtttattgtacactcataagcaaactcttttgaagtccatgcacagtcttcaatatcgtgtttcttctcagtagctgcatcgggccaaggaatcttcttacattctaaaacctcaagttgacacaagtgccagccctgaactgaatctgcatttcaagaaatattcacatcactaagaagatccatagcatcgaatatacaaaatctgcactgatgatgatacttgacattactgtagtgtttaccttcggctacgagtcttggagccatatttttggggcgcatataatgtgagataattccaatgggaagaggtgccgcagcaagagcacgatatagtttcttcacttctttattcttgaaaataagaataaagaacaaaacgtattgaaaaaattaactaatcagcacagcttgttcctgtttccagtcaaacagcattgtaaagcaaactcactcttatttttgtgtggaagaccgagcagtactcttttgttctagcaaagacgacactgtagagaaagaaagcaatttaacctggtcacttaaaagatgttaacttaacaaacttcaaagcatgaaaaagcttttacaggacagtaccagccttctgtacagttatcaatctgatgcgttgttttcagtggttctggtaaatccaatgcacgtgaggcaaatgtagcacagctctcttcgatgttatccgtcgtgcccccaacctgataacattccaatgtaggtcaacacattcaatcgctaagttcagtacttaaaccacaatcagaagtttctaagaaattgatgaaaggaaatatctctgcatacccaagaaatggaacacaataaaacattttgatagtaagttacagtcacataatgtataaaactagtccaacaatatttacaaggtgaagtactttttttgcaagatatctaatgcaactacaatggtcaagaatattgaaaagaaagcctaatggatatattacacaccgtagtcccggcaggtttatccaaaatacatag

SEQ ID NO: 36849 - DNA, 3294 bp, Arabidopsis thaliana landsberg
aggtcttctttaaatattatcattcctgcgaaatcttcatttttagtgtctctagattttcccattaagtactttcttaaccttgtgagaaacctttgttgattcatataagaacatcagtatattgtcagacctcatcatttttttttcttttggtcggtataatcagagttctctgaatcattgggggaaatgggctcatgcttggagcaaatcgcgcctcataatgatcaagaaagtggtaagattttgggtatttagctatcatggacgtttgtttgtcctgtttccatgctgtaacattgtttcttctgcaggtggaattcttctaatgttaggtaaagttcagtttgagcttaagaaactcgtcgacacttatgtaagttgtatgttgcaactttgtacttttcatgaagcaatatgtataattatgaacaaaactgaggtagttcttgtttcattctttttttttctccttcagcgttctcaaatattcaagaccattacacgaccttcagagtcacttctcagtgaccttagaactgttgaggtatgccctagctttggtcttttacagtcagagattatttaaaagccggaaaagtttcacggtttgagcaagatttaaagctaaagtgaacaaaaaagcacaaccttaataaagaccgctgattttgtcgtatttccttttcttttcctctcaggatatgaagcaacaatgtgaagaaaagaggtcagtgactttctgcaatgtagttttttattctctcggttttgatttgataaaatcttgccttaacctctgactcttacttacagagacgttgttaagcacatgctaatggagcatgtgaaagacaaggtacaagttaaaggcactaaaggggagagacttattcgccgtcagctagagactgctcgcgatgagctacaagatgaggcgactctgtgcattttccgattgaaatctctcaaggaagggcaagctcgaagtctcctcacacaagcagcccgccaccacactgctcaggtaccttctgaataaaattactattctatgtaagaaaccttcctgcaatttctcaatcaatgtcgcttatactttcttatttttgcatagatgcatatgttctttgctggtctgaaatcgcttgaggcagtagagcaacacgtcagaattgctgcagatagacaacacatcgactgtgtgctctctgatcccgggaacgaaatggattgtagtgaggataatgatgatgatgaccgacttgttaatagagatggagaactcagttttgactacataacaagtgagcagagagtagaagttatatctacacctcatggatcgatgaaggtaatttggattttaaatttaacctgaattgggaaagaacaaatttattcgttaaaaagtaagctcatgtactgccatttctgtatagatggatgacacagatctctcgtttcaacgcccttcacctgcaggatcagcaacagtatgttcttttcttgatttttatgtcagatttaacatttcatgtcttgagaactctcagttagtcaactgtatgagaactgcattggcgattctgtgttgaagtctattctctgatgcaggtaaatgcagaccctagagaagagcactcagtttcaaaccgtgatcgcagaacgagcagccattcagcacctctgtttccggataagaaagctgatttagcagatagatcgatgaggcagatgactccatctgcaaatgcttacatattaccaactcccgtcgactcaaagtcctcaccaatcttcacaaaacctgtcacccagacaaaccacagtgcaaacttatggcattcatctccactagaaccaataaaaaccgctcataaagatgcggaaagcaacctctattcccgtctcccccgtccttcagaacacgcattttctggaccactcaagccatcctcaacccgtcttccagtaccagttgcagttcaggctcagtcatcttctcccagaatatctcctaccgcttcaccgcctcttgcttcttccccacgaatcaacgaactccatgagcttccaagaccaccaggtcaatttgcaccgccacgacgctcgaaatctcctggtttggttggtcattcggctccattaacggcttggaatcaagaaagaagcaatgtagtagtgtcaaccaacattgtagcatcaccacttccggttccaccgcttgttgtaccgagaagctactcgataccttctagaaaccagagagcaatggcccaacaacccttgcccgagaggaaccaaaacagagtagcctctccaccgcctcttccgctgactccagcgtctctgatgaatctcagatcgctgtctcggtctcatgtcggggaagttgcccagagcggactaattagaggtaacggaaacaaaactaacttactgtatttgtaacatatctttaatcatcaatgattttaagacatggtttgtttatattaacgcaggagtaaaactgactgaacactgaccttgtaacggttgcgtttgatcgaaacgttagttgtagaaactagaaagagacccataagtaaatatagaagtcgatatttttgtatttctttagttgttgaatctcctaatttgttcttaagcctccgatattttggatcttttttatccttgctttgaaagcaacgtcaacggaaaaattactttcttacttaactctgagaaatacgattaaaaatgagaatttaaaggacatgatacacttttaaattcaagaaatcgataaaccttactataattataactttttgatcaagaaaatagatggatattttctttctaattatggattttgctttacacaaagggaagtgaaaatgacagtaacatgaccagaatttgggtagagagataggaagacaaatacgtttaccttgtcacgtgagcgacccaaactggaaatcacgtgatgattctcactagcaaatgggccaaggttagtaggcccatgtagaggataagtacctaacttctatcttctctcctctaatcttcttctttagtttgattgatttgatttgaatttttgtattcaagagcattattctctttgattgtgtataatttgcatcaaatatcctaatttaaagttttgagatcgtgatttgttgtgaatggcgtgaaactgttgacgaattgacaattttttttttttaattttttgatatttgtaacaatcttttaatttattttgccgttgggggaaaaacgattattatg

SEQ ID NO: 36850 - DNA, 824 bp, Arabidopsis thaliana landsberg
ggaaaatcctcggtattaataatcagggactcccaagcgcacaaattctctaagtagatttttgttagcttgttatgaaacagtataacatgacttatatagccatgtcaaccaatgtaaaatggataagatccttttagtttagattcataaaaaattttttgtaatcgatgaaataaattagaagcgaatccacatacatagaaatagaattgctctaggaatattttttccaaatcatatgaatacgattgaatacgatccgtagtgggttgcccgggactcgaacccggaactagtcggatggagtagataatctccttgttaaaatgaaaaaaaaaggtaaaaaacccctccccaaaccgtgcttgcatttttcattgcacacagctttctctatgtatacatagaaaactcaatttctttggttccttataaataggactccaaattcaatactcagtaaatttaatcgtagtcttactgtatgaacatttaataatagaaataaagcacttttgataataaaaaataattgattttttttgttatctctgcataaattttaataaatttcgatttcatttatggggtctcagaacccaattattcatgattgaccaaatcattaagataaagaatatccaaataccaaattcgcactcgatataatcttttagaagcataataacttcttgggaagattaaagaaagaacttggtcttcccccgtaaggaattcttccaataaaccagagcccaacctttttaaaaaagtgcgtacagtacttttgtgtttacgagccaaagttttaacacaacaat

SEQ ID NO: 36851 - DNA, 2743 bp, Arabidopsis thaliana landsberg
aacaccatttgaatttctgtcatgaagggcaaaataagattgaaccaatctaagctttggagtctcctccacttgtgcctttggtatcacgtgatctttcaaatatgcccaatcgggtaatttccaaagactatcaagcagtatttcataattctcaatgcttttgccaaaatctaccagggcatcccattgactaagctgactggcacagtgaagccactgctcctcccacagacacatttcagctttagggactgtgttgttatacgtgccttgggttgccttaaccattgcctggtaaaagaggctctgagcacgctgccaaaaaccatgctgaactaatgaaagtccagctcttgtttcagcggtgatggacctcttcttccacaacccaaatctcatatcttcttcatttaacaaacgataaagctcagcaagagactcagcacattttgagtcattcatgaacaacatcacatggctctctagcaatgccaatgcgagatgccatgcattgtacgtttttccaatatatttgataagctcactaggcatcctaggttgagggtggctcaattgaagcccttccagaagtgcttggacaacatttggccggtgtccttgctgcttcttatggtagtccttcgatagtagagaaatcataggtttagccaatgctacttgttcttccttgagcagggttacccatacaattggaaataccaaaacccacagatgatatgcaacattggcatccgtgtgagccagctcccttaaaaggaatgaccacatcagcccacctatagtggaaatttcaaaaagttataaacttcagtaatcagtatatgaataacgtattattcagataacccatatggatcaggtggatatagcgcttaaggacttacggtaatctagtcaacattttcgatcaggaataacaaagagaaagacccatgacaacactaaagaaagttttaaatgatttgtaatcacctgaagtttgctggtcgcgctcagaaattgtgcatgcttcataacaatgctgtcaaacattgaagtaacttcttcgggaccctctaagttagcaggagcttggtgttgtattccaggattatctgaaggcaaaagtggtagtacccttgcagaatttggcgccaggctaattggcttgtcctcgactaagatagctagaaggagatcaagaccttgtttaagccaaaaaacatcacttaaagcttcccagtcctgaatttgaataatatactgcaaccgcgcgaacaaagtttttccaagagactcgtgatataacaagaagaacttccttctcatcccaggatcacttgcccgtaaaccaagcataaaatgtctttcaactttcagagagacttcttgccgtaggcctagaggatacctgttcattaaatagatgaagatatattatccatctcctaaaagaaagatgtgacaaaagggaggaaaaatgaaaaagcaacgaacgtactttgttgaatcagcacatagtccatataacagctgaagatacttctgatcccactcttccaaagcctcagatgagaagtgttgcttatcaatataagaaagcttattgagaaaagtaactacgtccttttgggtaaggaaagaaccagacaaaccagatgcgcctgttttgctgaaatcatcctcaacccacctttttatcatgtctagtatgcagagaagcacactagcatcagtacccttttcggaaagcaaggtgttcaaaatttgagtaacagatcttttgcaatctgctataagcatgaccgtttcatcaataagttccaagaccgactttatattacatatgactgctccaacatcagcagtttgacgagaagaagttactgcagaatctgaatctgttcgctggccctggaaatggagagaaaaagatccagagtaagccgtgattgggtaacgactaggttatctagtctccatccactagtcagatggaaaaagggtaaattacaggaaaacagggatataaatgatatcttgatgtatgaaaagaccagaaagatgtcagctaataacataaagcatgagtctgagtagaaaggtgatgtaagagaggaaccagtctaactcctaagatctttacaagacattaatgaaagtcactggtgcaaagctgaaaagatgcataggagattccaatactcactaacgtggaaaatgccaagtaaatttttaaatctcatttaaacttcccatacaaacgaaagcaagcagtattgacctcttagcagaaaaaaatttaagtaagaatgacgtacttgtctaggatgagaacccactgctgatcccaggtctcgtgcaaggcgctgaaggatacgcaccaacacatatgaatcgacaaagtttttatgtacattggccaaggttttgatgacaagaagtacaaagctaatcgaaccaaaagagttatcatctcctgaagtttgtggagcagtaacagtattcacatgtttgtttatcagctcattgactttctggtacaatagctttatgtcagaagggtgtattagccgcatccaatgggaatgcggtgaacaccatcttcagcaaggagcacaacgatttaccagcatcgagcatcatgtgtttgaaacacggtacaagaatctagtgaagaaacaaacagtaaatcaagtgacagcaggcaaacaacactattgtatttcaaatcttagaa

SEQ ID NO: 36852 - DNA, 1304 bp, Arabidopsis thaliana landsberg
ttaataagaaaaattacttaaaattgcaaagtggcgatataacatgttttatagatttagtacaaatatgttcctagtttaaatagggataaatgtagcaaaaaccaaattatattatattcttaataggcagtaacttaatttataagattgtgatttgtgcagtctttgttacaaaggtgaaaaagggtaataaataagattcttttggagaaagagaagtgaacacgtggcaaaacataagtggatataataacaaaaaccagtttttatatgaaataagagaagcatgagagagagataattaaaccatctctcaaaatggctttgactgttcacaagaaagctccccaaaaggagcgttgctttactctcctataaaaagaagctcttctacttcttctcgttaccacaaaactctttcaccgatcttctcgttccattcttcttcctaattacaccatgcccaacatcaccatgggttcgaaacccgacccggttgctccaacgaacccgactcatcatgagagtaatgctgccaaagagattcgttacagaggcgttaggaaacgtccatggggaagatacgccgctgagatccgagatccggttaagaaaactcgagtctggctcggtacgttcgacaccgctcagcaggcggcgcgtgcttacgacgcagccgcgcgtgactttcgtggtgttaaggctaagaccaattttggtgttatcgttggtagtagtcctactcagagtagcaccgtcgtcgactctcccacggcggcacggtttataacacctccgcacctcgagctcagcttaggcggcggcggcgcgtgtcgtcgtaagatcccgcttgtgcgtccggtttactactataacatggcgacgtatccaaagatgacgacgtgtggtgtccagagcgagtctgaaacgtcgtcggtcgttgatttcgaaggtggagctgggaagatatctccgccgttagatctggatcttaacttagctcctccggcggaataggccgtgagttttttttttcttatgtcgtttctttagaccaaaaaaaataacgtttcctttttttttctgcctaagaaaaaaatattatccgttttttagaagaaagtgtagaaaagctccaatataatttttagctgccgtgaaaaaaaagtcgttatgtatatattattatgaaaccctattataaatcgacgtaacataagaggatcttaagctttttttttttctttagtatttgccaaggaaatgcatcatcgtaaattcgtaattgaaaagataaagta

SEQ ID NO: 36853 - DNA, 3000 bp, Arabidopsis thaliana landsberg
agacagcgaagaagcctgcagctaaaccagctagtagatgagttaaaacactgtctctgaagaacggaattttcataattgtctgcatatgtatggaagtataagaacaaacaaagactaaacaaccaccagtagaagccaagaaaactcctacacaacaaaatacttgagaaagaaatatcacctcctttatttgatcataactagctaactctgcagcatttacaatagcattccgagcaatattgggaccaagtccagtccatagcgcactaactccttcctattttataaatcaaaaggctataacactctgctaacaaagttttttaatatttttgatattgttatttgaagattagtttactaaccagcttcacaatggtaaaataagcgtctacagctcctgcataacgcctaggaaccccagccggtaactttccttctgattgaagccgaactttaacaagatcagttggattagctacaataatagctatagctcctgttgtgtcacacacaataaaataattccctttataatctcaatcattcactcaagttacttccaagagactatcaaaattaagaactgagctcaccagttaacaaagctgcaagaatcttttgatataaaggaatatcgccaataaagtcacttccaaccaaaagtgtcttgacctaatcagatatagcaaaataaacaatccatcagatataactttataagagagtataaaacacacaaaaaaaaaaaaagcaccagagaaggaaaataatgtgagactcacaggctcatataacccaatccttaagccaccatagatacattggcgatgaagtcctgcaataacacctttccaaagacctgaaataccttcttctctagctatggtagctagagtaccaattgatcctctatacttaggcaaattctcaccatctccagtgggaatctttctttgaagctgaagtctaactttggctgtgtccaacggtatagtacataactacaacatcactcataaaccatgaattagaatttgactaaagactaatacaacaaacacataacacacgaaaagtcaaatttcgaaaacactaaatctatagcgtctatgtaagctcatttcattaagtatcacaaaaattcccaagtaatggaccttaaagtcgtagactagaccatcatagattagcttctaaagctcaatttcgaagattcagtagaataacggtaaatctaagatagcatttctctggattgttcaccagtgacagtgattgatcgaatttaagaatattgacagactcaaatgaaaaatgacaaaaatccaaaagaggaataataatctaatctcgcagcacttatgagagatacctcagcaaaacaagcagcgaaagcgctgcaaatgaaggtttcaaggaacgaaatctcgatccttggtttgaaatccgccattgttatgctataggaacaagataagcgaaatctggagaagcaccgattaggcaaaatgcaaaaacaaaaaaaaggctaaaatttgagaagttgctccagtttctctctaagagcgatgatgattgatgtaatcttaaaatgggtttctcaatgattatagtttttaggagtagtaatgaagaaaagtgagatcgagatttaataatggcgtaacgaattcagaacaagtacagagtctctctcaatcttttgtgtgttactattttcactataaaagtttctctctgtttttgttgtaactaaacacgtcattagatagaccctcttcctctactggagggttatgtacaaactgtttttcgcacacacaaggttatttactggatggtgttgctagggatacgtataaagactattcacgtgtacatttcaatatacaacaaaggcactagatgaaccagagaaatggtgaatggagcttataggtgttttagctgaaccaaagtgagtgatcctataaacgccaggtgatgcggtttcagggattctccattcgatagttgctgagctctgcgtgctgagtttgaacggtcttgaccacttaaaccggaggcaaaagtcatcatcatcgtaaacaggtacccatgtctctcttccttcgagccacctctcaacaagcgcgaaagttccttccgtcatcagatcgtttctcgggttagctgaccggaattgaaccgtcactatgtcagttcccttcctgaatttggataaccgaggaacatccgatgtaacatctccgaatgcagttccaattggtgtcatatccgcaaccacaggtgttagtaagcttatttgcttgtgaagtaagtcaggtggttggggacccgggtcagtggtttgaccagatagaagatcatttgttagtttcttgaattcttgaatgtatccgcttagcgtgtgaggtccatacaaagtcgatgcaccctgacggaaagaataaacagagttggtttaagagcaggaaatcaagaaagatcctacaagctcttccttcttatctaagcctctgacctcatatctctgaacttggtattcctcaaatgtggcaatatactgcgaatacgaattggttagcccggctattaccacgctgaattctcttccattgctgccttctttaagtactgttttcacagcatcacgtagtcgtctccctgccattgttgtgaattcttgcaagcagaaccaaagagaacggagattagtaatgttctacatcagtccagaaacgaattttgttttctgggggagatcgatatacctccagggacgcagagaatcactagctggccaatgcggaggatctgaactggtaatattgacggctgaaaatggattaagaaacagtttttccatcacaaatagctaagtgggattcaatttttatccatcacagtacaagattatgctctcaccgcccagtcgtatggttgtttcatttcaccggtatcaagcaatatgggtttaggtcgctggca

SEQ ID NO: 36854 - DNA, 3075 bp, Arabidopsis thaliana landsberg
tgtgccatgaacattttttgcctgaaaaaatagttaaaaaatttcatgtaaatattctattttttaataagaacgaaatatctataatatgatcaaggtgaaaagacaaaaaatttaccacataagcgttagcgagacagtcaatggtgccttggcagaccatatcgaatagggtcttgattacataaaatgcgtaaaagaaattggtatcctttctgtaccctaatattgctgcaaaatgtacaacattttagtacaaaaatttttcccttcacatcaaaattttattttaaaaaacgttaattacacatatccaaaacgaaaagctgctaaaaccaacaagattggctgacgttgttcaaacatgtatgtatatgaatcatcatcttgcttactttgataatttaatcatgcattccatgagtttaattttatagtaatttgcattaattaataatactaggataatatatagcaacaacaatgtaaatatagcaaaaaagaattacgccaaacgaaagagacatgcaaacagaagttaccagcttgttgcaaaacgagatatacgtgggaaagatattgggttttccaaacttatcccatctacattttagtacgatattattcgtttcgggtttaagtagtaaagcttgcacatatttgttattgagctcttttcctaaaagtctcatattagttaaagttggacttaacttatatattataaactactttttaaaattttcgatgtgagacgttggtttatacccaacaatctcttcttcaaaccaaagactacgaacattggacctctcctcgagcaacattttgacaccatgactccaccttattcgcgagattcttaagacaccttcttatttgtggcacatagagggttctctcacaccgattatataacccagaattctaagtctatttttctcaatctagactctgatatcatttattgggttttccaaaccgtttaaacttcattttagtatgatattattcactttcgatccaaatgataaaatctacactaatttgttataggactcctttccaaacaaaacttatactagttggaggttaatttgcctatatattaaaaatttattttctaaatttctgatggcgccgaacggttgtttgtacccaataaaagaatacttactcttttacgttggcactacgctcatggaatcatgaggtgtccacgatcataagaactgataaatataatgaaggtatctttccttctattggtacacaatacacatacgcatggctactttttcaaacgttagctctacaattattgactggtataatagctaatgattggctttgcatggattatttaattgtatcagaattatattacttataataagttctctgccaaataaaatggtaaaaagataagaacaaatattgttgatggtataataacttcactgggaaaatggaaccttaaaaagaaaagaaaagaacctggaggaagaacagagaggcacatgggaagagtgagcattgctttgattccatatctgtccgatagattgccgatcactggcatcattaccattgtccccagtcctaccgtcttttttttatatcattttcaccatcagataaaaagataaaaaagttaaagagtaatcaacccccaacgaatagagattagttaaaagcgtaaaacaataacagatttaatattatatgcatgtatgtgtatatatataagtagatatggttaccacttgttgtactccggtgagatagacggccaaagaacatgaatcgtctaggccggagcaaaccgcggctacggtgacgtcagtcatcactggccttatcaagtattcggcgagccccgacaagaaaaccgtcaccagtaggtgtctcagctctccaagtctaaatacctccatctctcttcctctcctaaacttcacttcaaattctgaactatacattgcctcggagattaatgcatatcttatacaaatatccacgtgcgaatattcatatattaaaatctttaattagaatgaaagcattcagataagaaaaagaaaaaaaattcagataagaattttttgttaaaccatatagtaataaattttgatatgacatttataattaggcagtcagtatcaccttggtggatgcatggtccttttcatttaaaatgtaatttatattatttaatcgtttaaagacgataaatgttaattattgccaaatcgaatcagaatcagttcatggctcgatatgataattggatctctgtaaacaaagagagagtatgagagatccccaccggctcctctctgcctcaccttgagttttctcaatcatacgtggaaagtatactattacaatacctactcaacttttttcaaaaaggctgtaataacgattaacatttcaagagaaaagtagcacaaattaatactctctccgtccacgaagatggattttttagaattttacattttttaaaagataatatataataacaattttaacttcttaatacactttgaaaataataataaatatatacataattatttaataagggtaaaacaagtaaaaagttttaaaatttacattggagatataaaacttctatctttgtgagaaaaatgttttttctaaaaatttatctttgtaagactaaaggagtatattttttttattttagctaagggttcgttgcaaatgatacattgaagaaaatcagtaaaagatttaaaatagatttccttcatgaatcaagcttcttctcttgaaatgttgttgattgctttgttcatcgacggagaaggaacatctcttataagaagactcagaaaaaatccgatcatctgtgcatgttaacaaatgttagtcatgcataattacacatacaacaatgaacatagtgagatggttgcaagtgtgaagaataccaaagagaatgtcacacatagaaggctgaatccaggaaaataaaacggggctttttcggagagaaacaacgctaaatcaaacaaaatttagttatttgttaaaagggtatac

SEQ ID NO: 36855 - DNA, 1712 bp, Arabidopsis thaliana landsberg
tttagtatggtgatctgtgataaaagccaagatcttgaaatggaagatggatttgatggcgaactctttataacaagaataagaagtaagctttctttgttctatataggtgtgtttttatgtaggtatcagggtttatctctcttttatcatgttctttttggtgtatattctgttaggaatatctaggaataaaacaaaagagttaagagaatgtaggaacgttgcaaaatcatgttaggagatttcagtgactgctgaggaatgtgaggaaaccgttgcctgcaaagatcatgaggagagtctttcaaataagccttctcagaaagtgaaaaaaggtaaaaaaaaagactcctttatttgtttccgattcataaattcgtgtcgtttgactttgagctcttgagtttctttaccatacaacccgagccctactgatatcatccttctggaaagcagctcatacatcaaagctaaagagaaagaatgtgtcagatgctagagacgaaggtacaaagtcttgcaatggagcagtcaaaagttttactgagatttctggaaaggagggtgatacagaaagccttggattagcaatcagtgacaaggtttcccatcaaaatctcagcaagagacggaaaagtaagatcgctttgtttttattcccaggttttgagaatacctcccgcaagtgctttactaaattactatctccagaagatgcagcgaagaatggtcaggatatgtcaaaccctactggtaatcctccaagactcgttgaaggaaaaaagtttgtggaaaagtctgcgtgcagtatatcacagaagggccgtaagtgtaagtgtagtgtcatatttctttggtgtttccattacgaaaatatcaggctacttgaatgcatgggccccagattttaacagtcgtgcttttttcatgaagcgtcccaatcctcaattctaaaaagaaagcaccagttggatgaaaaaatctccaatgtaccttcacgtcggaggttatctctctcttccacggattctgaggatgctgttattaaggaagactatgatgttcgaaatgaagagaagcttccctgtcatacatcagataagctgcaaaaaggcaatttcctgcaatttttcagtttgtaccgtccatgggtttatattgttttgctataaatcatttacctcaaatgacatgtatttggttggtttctgtagtaggtccaaataaattgatacgtagaaggaagccattagcaaaacatagaacagaacgttctccaattaaggatttgtcagtggatgatggcaggcctaagccgattgcattaaaaccattggaaaaactgagttcgaaaccaagcaagaaaaagctgttttggtcaatcccaaggtctgaggaatgtgcacgcccatctattaatggtggccatggccaggcatggtcattaaggcccagtcctgaagaaaaagcccgtgtaagggaaggttctggggtccccatccaccatttgggttccaaaggtagtttgacccagaccgttctttctgcaagacctaatagggcaaacctgcgtattcttttagctgctccagatggggctgatgtcgtgaaaatctctcagttgaaggtctcattaaaacaaaaactagtattctcttttaaacaaaatacacgtatgtgtactgatcttttgtttgtatttttgttac

SEQ ID NO: 36856 - DNA, 2267 bp, Arabidopsis thaliana landsberg
aagaagatacaggatggaagcttgtccatggtgatgttttcagacttcctaccaattctgatctgctctgcgtctatgttggaacaggggtccagtgtctaggcatggtatttgtcacaatgatcttcgccatgctcggatttctctccccttccaatcggggtggtctgatgactgcaatgctcttgctctgggtcttcatgggactctttgctggttacgcctcttcacgtctctacaaaatgttcaaaggaacagagtggaagagaatcgctttcagaacagccttcttgtttcctgcagttgtgtcagcaatcttctttgtcctaaacgctctcatctggggacaggaagtcatctggggctgtcccctttggaacaatgttcgccttgatcttcctctggtttggcatctcagttcctctcgtctttgttgggggttacattgggttcaagaagccagcggctgatgacccagtgaaaaccaacaaaatcccgaggcaaatcccagagcaagcttggtacatgaacccggttttctcaatcctcattggaggaatcttaccgtttggtgcagtcttcatcgagctcttcttcatcctcacatccatctggctcaaccagttctactacatctttgggttcctcttcctcgtctttgtaatcctcattgtgacttgcgccgagataaccgtagtactctgctacttccagctttgcagtgaggactacctttggtggtggagatcatacctcacatcaggctcatcagctctctacctcttcctctatgccacgttctacttcttcacaaagcttcagatcaccaaactggtctctgcgatgctttactttgggtacatgctcatcgcctcctacgcattttttgtgctcacaggaacaataggggtctatgcttgtctctggttcacaaggctcatctattcctctgttaagatcgattagaggatatgatgatcatcatggcgattaaggaaacaaagaagaaaaggtgatcatagtttatcttatttttctttttaaaatcggttttgttgcattttaggttctattttgttgcataccaaaagagattttaatatatgtaatagagtgtattttgtttgatttgtcaaataacaacactttctgagaatttttgcaatataaccaatttttataaataaactcaaatgagaacaacaatcaatcatggtttggtgatatcaaactctaacttttcctgcaatcataaaagctttgtaaacgacggaacgaaccagatcagaacctccccaagcggtttcaagctctctcaccaaactctccggtaacaactcgacgcctttctctctcgccgtgacgatggccgaccatgatttaaacatccttatgatcccttcaaacgacgtcgttttaggcatctccagctttaatggctcccctctgatcccatcccaacattttcgaaaggaaacggcaatgcttcgtacgaatcgaagatgtgctgaatgtacggatacttccaaaacgacagcgttgtggcgtggagccgatactggacggcgtcgaactctggactcactatgacgtcgttgtatccccagacagcgatgattccgcctggtttacggaggagtcgtgtggccactgagtagaacctagggagatcgaaccagtgtacgccttgggcgaccgtgattagatccactgagttttctcctccgattaattccactagctcgtcgtcggtcattgacgtcggcgtatggcgataattgattttcggatgtggcgttgctagcttcagctgcgattcactcacgtccgttgctacgacactctcgtaatgctctgcaacctgcaaaatggaggcgaaatttgtcaaatccaagatctgatgcatgttgttgtgatcatttacgagcaagaagctaaatctgttaaatctaagtttgaagctctataaaaatttatgagcatcaaatactgacggcgagagctgcttggccatttccggtggcagcatcccaggctaaaccgtggtgatcggtgagatcagcgagcttcgagaaccactcagaggggtaattaggtctggcgtcaaggtatagatcggcttgtttatcaaacaatcctgccattttctctctgttttgcttcttcttttctttctctcctttttctgattagtgtctagccatgactctctagtcatatatagtagtctttttagcttgtgggaatctcaaagataatgacctcca

SEQ ID NO: 36857 - DNA, 1475 bp, Arabidopsis thaliana landsberg
  unsure (1)..(1475): unsure at all n locations
caaagtaataaactttcggattaaaacttatcatataaacgatacccatcaaagcaataccatcaatgattctcaattcgtggtaacaccatcaaagtaatgaattttcggattgaaaatcagagactgagagaagaagaagaagagcttacggagactgagtgagtgaaggagtgatgaaagtagatcggaaaagaaggcgacgaagatgacgatgagaagagctcaagtcaaatcccaaattggtggagcaagttattgggtagtgactaaagattctcgccatctaatattaaacaaaacaaaaaaaagttgaaaactttcgatagtgatatccattacattgcccatttcttaatccaaaattttatatctttcactatgtcccaaacttatgttagtatcaaatactaaactttattggttatgttagtatcaaatatcttgagcatacatataaactttgtataatcaaaactcatcttttacagaattaaccaaagctagtttacatctatataacgtatttgtaaccctattgctttttctttctttacaccaaacttttttttatctaaacaaagtagaatttgtttttgcctcgaccaaaaggtgttttgagacaatggatcataaggcagtaggagcttcggatcctttcatgattctgagtttttgacaagatgaagagaacatgtcccatggaacatcaccgaccaacatccaatctccatctttgtcttcataagtaggtacaaatccagatcctttgtagccttctctctcggaatattcacctactgtgaacttgaacatgttctctagtgctttgagaagctctggatagtttttgtacatcttgagatctatcttacggagatatggagctccgtccatactcactttcacataactcacgtttttgttgttgttgttcttacggttagatctcactggaggccatccaacgatttgtgttctgaagtttacaaatcaagattcattattagtacaccgattgatatcaagaagtttggatattaaaactattacttttagatctcaacttactttgcaggaggaggagcagattcttctgttgagtcgttgttcttgcgcttgttgttgcttctgacgcaagaaacttctagttgttgttcnnnnnnnnnnnnnnnnnnnnnnnnnnnnnnnnntgtgtccttaaggttaagcccattggtgacttccatattctctcactatactttaacggagaagctctcttccttaattcttgaactacttcttcttctcttgttattgctcttcttgggattgtgatttgatatccttgaaaatgcttgtgtgtgttgcgaatggtgagggagagagagagatttatataaggaaagatgctctgatattagggttaacgagagagagagagagantatgattatgacgttgtcggcgagcatgatgaggcaagttagagg

SEQ ID NO: 36858 - DNA, 3416 bp, Arabidopsis thaliana landsberg
tatcttcaaatagaaaaccgtccgttttcaatttgaaaacagtctctaaaagaaagacttacatttatctaatgcggatttgtatcgtgtgtgtgtgcttttttcttacatgtatttattggtaatgtacatttaattatatgtcaaggtggttgctggtgtgtgtaaggtttcataatctgctagaatagttaagaggtcaccttcatttaccaaatggattttgtcttctgattgatttaaatccattttattcttttactctttcaatactttttcataattatttcgtatcctccacactaactcatttctactttgctacatttacaagtttcatctaatctacttaaattaacacacaaaaaaaattgttttctattttaaaaattagatttatcgtaaaatggactttgattttaattattgtctattcaaagatttcatttttactttaaaaagtgtggactttgatatttcattaccttaagaagaagaatcaccgacagctccaacttaggaaatctcaaccgttgattaaatcaaacgagatactaaaatatccaacggccataaatcgtccaattgccatgtttcttcccactctcttctccttcatttaagaaatttcactctccgaagaagaagacgaaatcgagcaaatccatggcgaaagttcggattttgatcttcacccttgtcgtattcttctccctcaatgtccatatccatggattttaccttcccggcgtcgctccacaagatttccaaatggtcagccacaaaatcacctctgtatctgtatttcacaaatgcagcttctttttagagctttgattcacgctgggtttagatttgtttctgatttagatccaacgcaatcgatcaagtaatcttgttaaaattggatcgatggctctgttttatgagatttgggtaattttgatcttcagttaccactgagtgttgtgtttaaagagaatgtttcattagtctatatgtattagccattgtttagacttgtttctgtgtgaatctagcttttggagtagaagaatgtataatggtcattatctataaaggttcaaactttggagttatggttttgtttttcagggagatgcattgatggtgaaagttaataaattgacatctacaaagactcagcttccatattcctattattctcttccttattgtcgtccagaacatattgttgatagtgctgagaatctcggtgaagttcttcgtggtgatcgaattgagaactctccttttgtggtatgttcttgtttcttcttggttctttctctatctgtcttggttaagtggtagttgttgagttgtttttaatgtctgtttgtttctttgttgcagtttaaaatgagggaatcgcagatgtgtgctgcggtttgtcgtgtgaagcttgataagaaaaccgcaaaggcgtttaaggagaagattgctgatgaatatcgagttaacatgtgaggagattgattttgtcgccttcgactgaatgtgttttgtttttcttctgtttttatgaggaagattgatttcttatgcaggattttggacaaccttccactagttgttccggtgcaaaggccagatcaggacaatgttgtagtgtatcagcatggttttcatgttggtctcaagggaatctttgctggcgtaagagctcatcatcaccttttctgaatatgtttcaatggaaagagttcttatttatttgattttcttgtagaaaaaggaggagaagtattttatccacaaccacttgaccttcactgttaggtatcacagagatatacagaccgattcttcaagaatcgttggctttgaagtcaagccgttcaggtagctttttgtgatttaaggactttgactctgtattgtgtaagcgactaacatctactgattttatctcgatgcagtgtcaaacatgaatatgaaggtcaatggaatgaaaaggctcggttaacgacttgtgatccgcatacaaagcgtgcagtcactaactctgagtctcctcaggaggttgaagaagggaacgagattatcttcacatatgatgttgacttccaggaaagtgagatgaaatgggcgtctaggtgggacacttaccttctaatggctgatgatcagattgattggttctcaatcggtgattctgtgatgtttgttctttacctatctggtatggtcgctgtgatcatgctaagaacactctaccgagatattggcaactactatcagttagagagtcatgaagaggccctcgaagagacgggttggagattggtacacggagatgttttcagaccgccaacaaacccggagttgctttgtgtttatgcaggcactggagttcaatgctttggaatgattcttgtcaccatgatctttgcttgtcttggctttttatctccttcaaaccgtggtggtcttatgacggctatgcttttgctttgggttttcatgggactattggcaggatacgcgtcttcacgcctctacaagacgttaagaggaaccgaatggaaaagaaacgctctgaaaaccgcattcatgtttcccgctaccgtctttgtcgccttctttgtccttaatgcgataatctggggacaaaaatcatccggtgcagtcccatttggtacaatgtttgctttggttgtcctctggtttggtatctctgttccacttgttttcatcggtggctacattggtttcagaaaacctgcaccggaagatccagtgaaaaccaacaagatcccgcggcagatcccaacacaggcctggtacatgaacccaatcttctccattttgattggaggcattctcccatttggcgcagtcttcatcgagctcttcttcatactcacctcaatatggctacatcagttctactacatattcggcttcctcttcatcgtcttcatcattttgatcatcacttgcgcagagatcacggtcgtcctctgttattttcagctgtgtagtgaagactatcaatggtggtggagatcttacttaacatcaggctcttccgcggtttacctctttctttacgcagtcttttacttctacaccaaacttgagatcacaaagctcgtctctgcagtgctctactttgggtacatgctcatagtttcatacgtattcttcgtctttactggtgcaattggtttctacgcatgcttttggttcaccaggcttatctactcttcggttaaaatcgattgatctttaatcaccttcttagtaagctggatcttaaatcttgttctttttcgctcttttgtttcctccttttaaaatttgtgatgattttgagatatgtagacataaccttttattttattgtaaacatacatagagctcaagagtacaacaattgtctcataata

SEQ ID NO: 36859 - DNA, 2353 bp, Arabidopsis thaliana landsberg
tatttaaaaccaaacacaatctacgttttgccaattaatcaataattaagaaataaaaattcgctaaatataggcctatctcgtgaaaaggtatgtataatcaatctatagtaacgtggcgaatattaaagttaagtaaactgcatgtggcaacaacttaaagagatatatattgaaatccttcgtaacgtcttttgttttctctgcaaaatgtcgtatcacaacaacacaaccaaatgactgcaaatggcaacaaacttgaggaggtacgttcggtgaatgtggaagaatcccactgagacagaaggtttcagtaaacaaaagtaattaggacttagctacttagctctttttcacgtgaggagcacgtgttaaatcggtttgttcgttataacagcccaggggtatatctgtaatctcggtatctcggtatcgtattatttcttaaaatgttttatacaaaacagaggagtgagactgagatttaggcatttagctaatgtttacggatttagcccaaagaaataaaaagctaatgttacggtttctcttctaaatgcgttaatatagtcagaaaaattctatatctaagtattatccaaaattggttagatttttgaacaaaatatttatttgttacaatgtatatatgttatattctacctgtaacaaaacaattgatggagatcttttgaaagattgggcccagcaaatatttccttgcaaagggcttaaacctgaatttaggaactggatttagaataatactccagttgtctatacacaataaaaagacccgtttaagataatgaagatcggaatacttaaaaaacgcaaaagacataatgtttcatgcagatttgaagtatatgcttaagttaagtggatcaagaaaacttagaaactatttttcaaatagcattgcaacaacaaaagacctgatacttctacgtatgacgtatctatatatctatcatatgcacatgtacattgacaagacggaataatgtaaccatgtttgtaacgaaaaatacagaaagaagttgaggggaaatgaggtaaagtagaacaaaaaataagaaacgaacaaaatgatgaattgatggcacgcgaagagaagggagttagaaagatgcaaacacttatgttatgtcactttcctttgatattcacactccaacctctctatctctccaatgactagaccagacacatttttagttcttgcccccttttctcagaccattttctcactcactttccaatttttcccttttttaaaaaaatcctaaaattcatagtgtgtaatatagaattttgaaatgaaaccatcatttttcgcacttgaatttgatttgattttctaacctaccaataatctcacttctattcatattttttcccctttcctcgatcccatgcgcttcctcttagtcttcattctcatcatcataccttctttttaccatctttttcctcagttttttgttcttttttagataaatatttccaaaatattagtgaagacctcgttaataatgtttaaaccatagtgttttcatatgtatatgcgtgtgtatacttttggtggtaacgtaaagagacgaggtgacataacattacgatatagaatgataaagacagcttcgctagtcgtcgagaaacaaacaaacttgcttatcctgaatttttttagtcagattcatgtgtgtactaatatatacagacaatataggttacatgaggctttgatgccattacccatcggggaaaataatcataactataagtgattatatatattatcctacataactcttgtctgcacagtttggttagaaagtagggttacttaatatttatcttaggttagatatataggacggaatcaataatcccaaacttttttgtagcctttcgttgacaaagtaaattatttattttatattaataaggttacgtatgacttagttcttgcaattgccaaaaggctaaaggctaaaggcttttaagcttgagagtaaaaggctaacactgtaagtctccacccatttcgccgatatcattgatcttagattctaggaggatctcctttcactttctttatgtatatatgtacaatttctgtatatctatgtgaataaattaagaacaaggtaatcatgtctctgtggaccctttgcttaattgtgacatatgtattgttagtacaagaagctcattacattccttttatatggtcagaagttccaaacattttctagtttcagatatgttagctttccatattttaagaaaattagtaaacctgactctacttcattattgattgttttaatttgttttttgaata

SEQ ID NO: 36860 - DNA, 2621 bp, Arabidopsis thaliana landsberg
cttagttcattagcacaatctgggaagctataaaagaattgaattgagataggagaagaaagaacgaaccagtgcagatccaatcgccgatacgaggaagccacttagagtttggagaagtattattatccatgataagacgaggctgcttgcatctgttacagaatgatctaaacgcataattcctgtttctgcatcctaaacattcccagtctccttctcttccgtctcccatttcttctgcccggaaaaactccagtctccggcgacgacgactcactctttttcgttcagagaggagaaagaaagagaaagttgaagaaagctaaagctgggccacatttgttgtgaagtgactaggcccattaggcccattaatttcttcagagaaaatctctttcgtccttctcttcgcaggtggcaatcgttacttactgacatacatcttcatcagtgatttttgggtttgaaatttctctagatcgattttggatttagatctctttgtttctactgcttttcatcgttggatctgcgttttgcaaagggagatacagaaaggaatagctttgaattgacaaggtttctctctaatccaaccgaatctcaagcttccatggctctcaatctccgtcagaaacagactggtaattatttataatctcaagtttctgcgatgattcttctattgcttcatagattgtgttcgatctattaatttgtttttaggaatctggaaatttagagaattctggtttcttatgagttaatattgatattggatctttgatctctctctctctcggtttcagaatgtgtaatccggatgttgaatctgaaccaacctttgaatccaagtggaactgcgaacgaagaagtttacaagatcttgatttacgataggttttgtcagaacattctatctccattgacccatgtcaaggatctgcgtaagcatggagttacactcttctttctcatagacaaagatcgacaacctgttcatgatgttcccgctgtctactttgttcaaccaactgaatccaacctccagaggatcatagccgatgcttctagatctctctacgatacctttcatctgaatttctcgtcttcgatccctcgtaagtttcttgaagagctagcttctgggactcttaaatctggttctgttgagaaagtctcgaaagtgcatgatcagtatctggagtttgtgactttggaagataacttgttctcgctggctcagcaatctacctatgttcaaatgaatgacccatcagcaggggagaaagagattaatgagattatcgaaagggtcgctagtggtttgttttgtgtgttggtaacgcttggtgtggttcctgttatccgatgccctagtggtggacctgcagagatggtggcgtctttgttggatcagaaactgagggatcatcttttgtccaagaacaatctgtttactgaaggtggcggtttcatgagctcgtttcagcgtcccctcttgtgcatatttgataggaactttgagctctcggttgggattcagcatgatttcagataccggcctctcgttcatgatgttctcgggttaaagctcaaccaattgaaagtgcagggagagaaaggaccaccgaaatcgtttgagctggacagttcggacccattctggtcagcaaacagtactctggagtttccagatgtcgctgtggagatcgaaacacagttgaacaagtacaagagagacgttgaagaggttaacaagaaaaccggaggtgggagcggcgctgagtttgatgggacagatctgattggaaacatccacaccgagcatctcatgaacactgtgaagtcgctcccggagttaactgagcgaaagaaagtgattgacaaacacaccaatatcgcaacagcgctcttaggacagatcaaggagagatctattgacgctttcactaagaaagaaagcgacatgatgatgaggggcggaatcgacagaaccgaacttatggctgctctgaaaggcaaagggacaaagatggacaagctccggtttgcaatcatgtacctgatctccacagaaaccataaaccaatcggaagttgaagcagtggaggcagcattgaatgaagctgaggctgatacaagtgcgtttcagtatgtaaagaaaatcaaatcgttaaacgcatcttttgcagctacatcagcgaattcagctagcagaagcaacattgtagactgggccgagaagctttacggacagtctataagcgcagtgactgcaggagtcaagaatctgttatctagtgatcaacaattggcagtgactcgaacagtcgaagctttaacagaaggaaaaccaaacccggagatcgattcttaccgcttcctggacccaagagctccaaagtcgtctagctccggtggtagccatgtaaaaggaccgttcagagaagctatagtgttcatgatcggtggaggtaactatgttgagtatggaagtttgcaggagttgactcagagacagttaaccgttaaaaacgttatttatggagccactgagattcttaacggaagtgagttggtggagcagcttggacttttgggaaagaagatgggat

SEQ ID NO: 36861 - DNA, 1325 bp, Arabidopsis thaliana landsberg
tctaaatattgtttggcaactcaaatttaaaccaaatttgaaacataaaaccctaattgcctttttctttctaatccccaaatgtctcgagctcgaggactctgttatctcgcaatcaggagcacacgactgtgcggaataaatagatcgaaaggggttgggatcggagtcaaagaatactactacgagctcttctacttcaaaagatccattcttttgcttgaaatggccatgggattcaaacaaacaacccaaatcctcttcaagcgtctgcgactttcaaggaccgtggctcttcagatctatgcaaactattggttccattgctctcagctctttgacttcatttggccaaaaccccaatttcagaccaaagaagaagcctttaagcagtagtgagcaaggagaagcagagcagagggcttttgcagctgctttagctagccagaaagaagctacggtgcttgaattttactcacccaaatgcagactctgcaattctttgctcaactttgtattagaggtagagaaaaggaattcaaattggctcagcattacaatggcagacgcagagaatgagaaatggtttcctgaggtatcataaatattagttatctctctcttcacgcaaataacagagctttttcttgattggtaagactcaaaaattcatctctctgtttgtctaaaatgcagcttctccactatgacgtaaatgatgtcccttgcttcgatccattggacaaaaatggacaagctttggccaagacaggagttccaagtagtcgtgctcatgtcatcgccggtatctctcatcttctcaagatgaagcgaccaccatctaagtagtgaaactctgcttgattccactgttgatgcaaacaagtgatctacaaaaggttgtggattgtttgtttctggtgcatcaaacaactttaattgtatgtgcatagatgattaccagttctaggttgtggattgtttaccaaagaatcaattatccttatcattaagagaaaggaagtcaacaatatatagttttggtcttttaataatgtaaaccaataagatacatttatcaataaaaaaattaaaagaatgtattagttggataatcatgaatatataaatcttatcgtctacaccaaatggttaccaactagtctatttccaagaaggaaaccactaagtttcaacgtccaatactttattttgctaatattgactaacccaagcaccttgtgatcattgactgaactttcatggatcctgaagctgaacccatcaacgaaaaggcgattattttgggatccttatcattctat

SEQ ID NO: 36862 - DNA, 2061 bp, Arabidopsis thaliana landsberg
gttccatttatctccgcggtcaccgacagtacttacttgggacctcagattgagaatagcacaagacgcttctcgaggtttaacataccttcatgaagaaatggactttcaggtaaaaatgaacatgaaatcctctgtttcttcactgcatcagttaactaaaatgtgttttctttttgtagataatattccgtgatttcaagtcatccaacattctactagacgagaattggacagcgaagctttcggatttcggtttggctcgcttaggtccttcaccaggatccagccatgtttctactgatgtaagttttgtacattttcacttgactggttataagaaatcgttacaagatcaagaaagttgtaatttttggggcttaacaggtagtaggaacaatgggatacgcagctccagagtatatccaaacgggtcgcctcacgtcgaaaagcgatgtgtggggatacggagttttcatctatgagctcattacaggaaggagaccactagaccggaacaagcctaaaggagagcagaagcttttagaatgggtgagaccttacttatccgacacaaggaggttccggctaatagtagacccgaggctcgagggaaagtacatgatcaagtcagtgcagaaactcgcggttgtagccaacctttgccttactagaaacgcaaaggcgcgtccaaagatgagcgaggtgttagagatggtgacaaagattgtggaagcttcttcaggaaatggcagcccacagctagttccgctgaacagtgtaaaagcttcgagagacgcgagaggaaagaacaatggtggtggcggtgaaggaggttggtttggcaagttatggaatccaaagacaataagagcttgttgactgcttatagaattcaacctcttcttacagcaaaaaaatgagtcaagaaaggtttcatggagattccgaaggttgaagattctagcgagatcaagatcaagctcatatacatacataaagataaattatatatgaaaatttgtgaaatattctaaaatgatgaaatatgatttttgtatgaatttatgaatagtaaccacaacttaattagtaagatatatgtatataaagcaagaatggcttatcagagagttttgttccaaagctgatcaatctactcatgcttaagtgtatagttgtggtaatgtgttaaaagttcctattaattaccataagtaaatcacaaacataaataaaaagaaaacaactatgggttttaaggtctggaagactactgaaatttgggagaagtagttggaaaaagaatattagtcgataggtaggaaattgatattgcttgtggaatgaaggaaaaaattgaacgaaaaagaagtttctagaattctagtcacataacataaatagggtgaatatttgggaaaagtaaaacaataggggtcgttttgatattactagaagataagaaacaaaaaggaaaataagaataaaggaaaaaaaaaagagctctcttttccacaagaaacgtagagagatataattagagaaaatctgtgctctttcagatcccattatcacaaatccatctctctctctctcagagaagaaaccaaagaagaagaaaaagctctcaactttcttcgatttctcagggaactctttcgttaatctcaaactcaatcatgtctaccccagctgaatcttcagactcgtaagtacccagatctctgattttggttttccgatcgggatttttttcggatcttcttaaagtctgggtttttcgattttggggattagggttttggttgatcttgtgtttctatagttgaatcttaatcttctttgttgttgttacaggaaatcgaagaaagatttcagtactgctattctcgagaggaagaagtctccgaaccgtctcgtcgtcgatgaggctatcaacgatgataactccgtcgtctctcttcaccctgcaaccatggagaagcttcagctcttccgtggtgataccattctcatcaaggcttgggtttgcttctggttgcttggattctcttttga

SEQ ID NO: 36863 - DNA, 4983 bp, Arabidopsis thaliana landsberg
catctttagttgatgccattatccagtcatggattattatatttcactcgaaaacgacatcgcattactcaaacccaaactacttgccgtttctcaataaactattataaagagcattttgtgttaaaagtattgtttgttccgttgttcttctatagtctaagctcgtttaaaagatacgtggttgcaggaactatgccttcaccatgaacactaatgatctctttccctgctagatcggtaagtagctcagctggatctttggctcctccatgtttgaagaacttctctctcagcaatgttcctgtgttcaacgaaagcggatcttcttcacatattgattgccatatcgtcgatgcaaagcatttagcgtataagtagctatagtaccctgcacatacacaacagagttcaagatacatctgcagagaaacgcttgtatgcatttatatatgtagactgatatatacctgctccatagttaagtaggtgactgaatcggatataccaatgtgttccttcaacatggttccagctagtgtgctgccgtttcagttcagccacgaggtgactcacatctcttgctgtctctggttgttccccgacaacatttggtcgatcagcgcataaaagacctaccaaaaaccaaatagaaaccgaagttcaagttgatctctctaacacagttgtttttactgcattgaatctatttgagaggtgaatcaattaatcagacctggcgttgcatttccgttgctgcaaacatgttcctcgcaccttgtaacgaattaaccaacttctcgggtattgtctcaccggtcgagtaatgacgggcaaatctcttcaggaggcgatagtcccatgcatagtacctgagggacgcatggtcacattcattatgtaccactcgaagattttgcaactcaaaattgaaagcgtattgaaacaagagttacaacgttgggaattatactcactcaaatagatttgaaggcatttctgccaagtcaagagccacccgggtaccagaaaaatgttggtaatcctgcaaaatccagaaaacatagcaatcagcaaagtaagagagaaatttgagagggggactgtacttagcttcttcacttcttgaattgataaatttgtacaataccgttcgtgagagcagagagtgaagagcatgtccgaattcgtggaacaaaacttcaacttcagagtgattaagcttcacaattgacgaatcacaagctcgcgaaaaattgcaaacaagagctatttatgccataagattagatcaacaggcggagtgtaagaaaatgatattttttaatccacgtaggcagttttcatatatgaaggaaaataaatgaaatgtgaaccagcatacaggaagttggtattctgtctcagaaatcttgcgtcctcctctgattgcaaagctagcacacacagggtacttgccttttcttgagtataagtcaaggtaaagatacccgagatcaccctgcaagagacagtcgcatgatttgtgagaacaagggaacaaagatgctacgaaaaaattggccatctaggaatgaactattattgtgtttatatctacaagacttatgcaaggattatcttagttttgtgaacaacatacctcgtccgggtgatgaagagacagtttaaccacatttgggtgccaagattcacctggcgcgagaggaatagtatgaaatgttgcaccaaataatgattcaacaagcacttttaggccttcaatacactgtggcagaggaaaatatgatgctacaacctgtacaagaatattccaacagagcatgacaagagaagtcttagcaacagaagtaaaaagaaccaaaaagctcccataagtatacaaaatgaagatagagaagccgaagtgcttttgcagcacaacaatagaaaaataaataacaaaagcaacttacagcagtgtccacatcattgatggaggatttcatcattgaagtgtagtaagtttcatcccatggctctaactctgcagatggattaccacatttctctcttttaaagtctctaatggctatgaattcctacagagatggaaactggttattagagccttaattttcaaacacagccacaaagagaacatcatagaaagttcagcttttatgaaaatagtgtgaaggtcagcttacttcgtccgccttcggtttgactgtcttgctcagttcttgtaggaaggatgtcacaacctttggggattttgctaggtttggctcgaccataatgtcagcataagaattacaccccatcatctgagagcaacaatagaaagctattacaataagtaagagaaatcttttaagacaggcaatatactacagagtatcataaatgaatatgtacaaacctgggaaagctcatggcgtgcagcaataagcttctcaagaactccgtgatttgcatgaggaacagagttcccttggatgtataccatttttctaacctgaaaatagagatattcaattacattagtcagcagaaaatggatttaggtgtacaatctatgcaacttcaaagcacatttccctgtttttgaaacaccaccactctagggtacttgtttataaaacgcttgtaagttaccaatgaaaaactgtttattctcccacctctatccctgaggttcgggtgtcagaaaaaggaaatagaaaaataggtcaagtaggcacctcttcgtctgatgtccattgcaaaatggaagaaacggttcgtggatcagtatttattcgaaaccctttctgtttcgacttatgcgctgatcttgtagaccctcttgagccccctgaagtggatcggtaggtagggttgagaagatgatgcagatgtcgagggatgcgtgatcctggaaatatatcaacatgtcctggatcatcagcaatattttcgctgaacctgaatatagatcataaggaagttagcactcacaacacaaagccccgttataatatcagacttttaatagaatcaatcgtgtgtattcatgggtactcactccctgcataactgaaatatgttggttgttaagttattcactttatctagcttctctgcaaagaataaaagaaactaataaaaaaatcattcaacttaagatacatcagcctcgtcaaaagggtacagaaataacaatggtaaataacaaaccagggtctagatgaatgccaccccgttcaaagtccattcgaaggtgatgtgcggtcctacttgcttctttggtaagcaagttagaatcttgctctgcttttttcaccgcagcatacaaagtatggttcgtgttaagatgctgaacataaacaacccagaaaaagttaagaaattgccaagaataaacatagactcaactctgtctacgatactgatacgaatgagagtctagataggtattttataagatgctatgtttacagatcttttcgtacagctgcatattcatgtctaaacaataaaaaaaaaaattcaaagatgaaggaattcccatacaagtcgtcattatagacattccatgataagagagaaaaatcaaagctgagcaaattgttggtcacctcacatgtagataatcattcatttcaattgctgctttattcgcttcctcaacaaattccctatcatatttatagagcaaagtacacaaatttaaataaaattacaacagaacataataaaccaagtattgaaagctcagaactagaaaaagaaaagagacctgtcaggatgagtttgtctacagagttcagcagagtcaacaacacaacaaacctacaaaaattcgcattcagaaaaacatcactacaagcacgaataagagctagtataacaagaacactaatagagttatagtaacataaatgcagcaagaacttacagtgtctgaaatctcatccatggctttaataatctctggagacgaaggcattcctgatatgtagctcaccaactcaccagacctaagaaaatggttccaaaatcatttcttcaattaaccaaattacatcacaacactacacaacacagtagcactaagtctaaaaaccacatcataattcatgaaaatgactaagctaataacagttctaccaacccatcaacttcaatggctactttgacaaagcacacatagactaattctataaaaatcatacctttcaatggcatcagcaacgaatctctgaaaccctttagctgtttttagatgatcgaagccatagagaccggtggcgtctccagctcctccattccggaaatttcggactaaccatcgggtcgaattgatatgcggctgcagtcgccgcgtcagcttccacattgctctgcttcttcttgcggcttgtgacagaggacctctgagtttaacttaaaaatgctcagggtttagtaggggatagagcgatgcgctgccgtttttaaatataacaaacggcatggcgtttgaaacgagaacttaataacagtagaatagctaatgtgtcttctttaacagtaaaactcaaaacacttattagagatccgacgaagaagattgagattgttgattttcaagtccaaacatttccacgaattttgtgtaacaccaacatgaagatcgttctacatttgggtcttaacccaaaatcgaagattcacacaatttttgggatttgttttggtttgctactccgtgaaaatcccaaacggatattgcttacaaggggttcgacagaattcctcagtgctcataattgtttttttttttgtatcaacccttttcacgtggctctcacgtgagaaaagccagctcactgttgctgttgttttctacattctgacaaatttctctccgaagcaaaggaaaccttggagagcaagaaaacgcaagaatcttgagagtcgttactatgatgaagccatctttcctggaagatgttgaggtcataaaactcatcacga

SEQ ID NO: 36864 - DNA, 3667 bp, Arabidopsis thaliana landsberg
gaaggcgctgcagcagctctctcgcggatttgttgaagttcttaagcccctagtaattgaaaattgacacatcgttttaaacatttggtcatatttatacattttcgaaagaagaattgaggtagaaaaatgtgacaaaccactccttggacatcaaaaatggttgtgctttggtcaatgtgcttcttggctgcggcagagcaagaagggaacttgatcttaaacatcttctcgaactctttcacatggtatttctcataccggtccattgtagtcgcttgtaacagcttgtttgcatcgatttgacctaatctctcaatgtaaaccggcctgccttctttgtccactccatggtaaccttgcggataatgtttgagtacttgatcgatctcttcaaactcgaaatccttcattattaaaaaaattataaaccaaacaaatcactcgtcaaagattgtgtatatataaatgatcagtctaagatgttccaagattcttggacaaaaagttaacctcaatgattgtatcgactccgaaatccatcctccattgaagcatgtcactccacatttgctttgctttctctttgtcaaattttctcgcccttaagaatctatgtagagattaaacataataaatcataatattacaatcgcaataatcatctacaacaagtaacatttagctgtaaactcatcatgaattatggatttatatgaaagtgtaaaacatttattgattcgcttgtaagagatgaacaatttttttttttaagatatgaagatttaatgaaatgttataatgttaagacaaccaaatttttggtcatctattaaaccagctcctcatcaaataaaatattcgtttggattggtataatttttccattagttgacttcatgatattttatttcataccacaacacattatttgacctagtagggatcttaaagaaaaatataaaaacctgagcatcatgtgaagatcatcgtgtttggggggcaaaaggtcgtcaaggacgaggacttgacggaacgcttccacggacagataatcgtccccgttgatgtcgtctgtattggctacggacacaattttgctgctggtcctccgagtcttcttcttgaaagagttcttgaatctatttgatgcgcttatcgctttctgtttaagcgagctcatcttcactagcttccttccatcctctgaattctccatatctaaaccacacatgattggtttacattaacattttaggcaagaggaaaaattgtatcaatggctagttaaggtaaatgcattgacttataaccttgtttggtgtcagccatggtttagacttttgatgaaacacctaaaagatgattaagattgtttaagaaataagattgaggaaaagagaagcaaaaccagtgtttttttttccttaccttattggagatgagttcttgagaggaaggaagggtgaaagatggtaatggtgaggatcatctgaaactaattaagacatgtagaaaagtacttgaatgtcattttaacaagctattgataaggtccaaaggtggttttgttctttttttttttttacaattggtttgttcttaatatatggaaatggacatgtgtgtgatataatattgaaatatatcaaaatcgattcgtatctgtaccaataaatgctataattaatagaaaagagtatgacgccaatttggactaagtgcagcccaccactttacagatgaaaacatagtttacatgaccaaattattatcttaatcactttacagatgaaaacatattttacatgaccaaattatcatcataagaaaacatattacacaatggttttacatgacgaaattatcatcagttcggtttggatcggtttcttttgattctggataattagttcaaaagattgaggatcaatggttttacatgaccaaattatcatcagttcggtttggatcggtttcttttgattctggataattagttcaaaagattgaagatctatttaggtattttagaattttggtttatattatgttcggtgccttttcggttcgtgtcaatttagatttgaactagacttttcaatttaactaaattttaatataataaccaaatatttcgattttaaaattaataaccgaattaaccaaaaactacaccgataatttaatcggttattttttgtaaaaatttcagtttctgaaatacttgaaaaaccaaacttacctgtcccgaaaaagcggaataccccataatcacatgcctagtctgtaatttctctccgaaaacttgtcatttacttaaatcattcaaaaatctactattattttgaaaagagggaatagtaacatataaatatgagaaagttcatattaattagtaagttcaacatacataattaaagaaatctatgttcaaaacaaaaaagattgaaataactattggtctatctaaaaccatggttcgcacttcgcagtagtggatagtgtccggatagtggtcttacctttaaaacccgacccttactttcgatcttctattttagtttgatagagacacgtccgtctactttaagcgttttacgaatcggcgtttccctcttttctcccccgcttatcttctcttcctgtccttttcaactccgtgactaaaaaaaaaaaaaaagtaacctttacctacttttcttctgggttttcgataatctcttttgggtatttgcaaaacccctcaaagattcttcctttctcctttaaatcggtcagtactgatctcttctccatacccttttgctatttgtttcaaatttcgattctttgattgttttggatagtttaattcatatgaatctgactcgtgtgtttgattgtcacagtctctgctttggctttgtagtagccatcgcaattcatcatcatctattgcaactatctccaaggttttgatttccacaatggcaacaacaactctcaatgacagtgtcaccactacacttgcttcagagcctcaaaggacttaccaagttgttgttgctgcaactaaagaaatgggtattggtaaagatgggaaattgccatggaatttgccaacagatctcaagttctttaaagacattactttgaccacttcagattcctctaagaaaaatgctgttgtgatgggtagaaagacttgggagtctattcccattaagtataggccgctttcgggtcggcttaacgttgttctaactcgttctggtgggtttgatatagccaacactgagaatgttgtcacttgtagtagtgtagattctgctcttgatttgttagctgcgccgccgtattgtttatctattgagagggtttttgttataggaggtggtgacatattgaggtaatggttgttgattttcatttattatcccttttggtgattcggaatcttgttgttggttgcaactaagtgttggttggttgtatttgtgtaggcaagcattgaataggcctagttgtgatgctatccatttaactgagattgatacaagtgttgactgtgatacgtttatacctgcgattgatacttctgtttatcagcctccgtcttccccgtttccagtaactgaaaatggacaaaggttaaacttcacgacttttgtccgtgtaaagagtt

SEQ ID NO: 36865 - DNA, 1577 bp, Arabidopsis thaliana landsberg
gggctcagatgcttcgactggatactactgctatgcgtcctaatccacttttcaatggagttcagtataacatggcttcatatccatcacctcctgtttctccttcaccattccagcaaagggattcaaatggtgcatactcacagttccatggcaacaactccagctcggagagcaataattccttcactccagctcaacaagacacgtctatcttcgaggtgattgattccaaatatcatcaacagcgaccactaccttcagttaactatcagtctaacaagcaggaggcagagaacctatatgggattcagttccagaatggctttaatgacaaacctgtgactcccaatcttggtcatgttgataatctttgctttaaccctgagaggtctgcgaataacggaagggtcttctatgataaagtgagcatgcccgaggaatctaaggtttccttctctgggtctacaaactcaaatgattcttgcttgggaatcccacactcgtactcagactctacactggagattactggtggacactctagctacttttcacaagagagacaacaaagcccatcttcaacattgaactttacaaagaaacaaacacaagaaaagcaagtacaggtgcataggaataacgatctagctgaccgtcgtacacaaagcgatatactcgacatgaagtccactgagggaggagagactatgtttaaattttccccaagtccacgaggacctagactatccggtgaaaacaagacgttgcatatagacatttctgctgcaggcaatcattatgatgaaatttatctaaatcaggaaaccaagaatcaaggagggaatagtgataccatttttcatctaggagggaaagtactgggaacaagagcaatgcctactgacatggaaggcaagaagttgcctatatatggaaaccaaacctcagttgttgttgatccatggaagcaaataaagcaagataatgagcgtttgatggctggagctggaacttcatctgctaatctaatttccttagaggaaggtatagcagctaatacccctaatgaggaacctgaatctcgtgctgcccgagaaaggaacttggaagtttcagggatctttataagtaagagagtagtctctgatgagaatttcttgttcagcatcgcctctgaatcaccaaacagcaagattgttcatgagacacaaaagaatgtgagtattacaagatgcactttaaacaggattatcctctattaacttctaacagtaataattattcaactaacctgcagagaacagaaagagaaggtggtttaggccatgtgagaatcccaagcatggatttgaatcagccagcgccagcaacagcgagtgaaacttacagtttgaagacaccaagagaagactcaccacaaagcattccacatgcaaagattaccagcggtgatacaatattcctttctgaggtagtgatttacttgtttgcaagcttataatctatgttaatataggatctttcttctacataaatatcacttgtcgacaggaagctgaagccaataccggcga

SEQ ID NO: 36866 - DNA, 748 bp, Arabidopsis thaliana landsberg
ttttaatgatcatgattcatgataaagagattttattcattacttgtaaaaaaaatgttccttcctttgtataaagattaataatcatacagcttattccaattctataaactaattctggaatggattattcttaatctacttaaaacgaatctaaatttatatgttgatctatattcttggtttcaagattctatgaagaagtagtctgactctcacttcttgttgttccttcgagctgacgttttcttccaccattaacaaaccttttcccaaaacctaaaagaaacgcaggaggaacaaaagcacctccgcttaaactgcagacaaccgcaacagctccaccgataatcaacagtttcttcagatttgcagctcggtttccttggtttaatgtaacgggagtttcagtgacaggcgatgcaccgttgctgagggagatgagatggtcttgtgtgatcttggtgttgatttgagccatgaaagcagaccgagaaagcttggttcctccatctgagagtctatgcgtttggtaagcacgtaaaccgggttccatcttcttcactgctccccacattcctcgtttcactccaagctttgcgatttctctaggtattcccatgtcttcgtggtggaatagaagtacttcgcaggcacttgttaccccatcgtctcctcttattccactgcataaattaccatattgagaaaaatgtttcactttgtttaaagttattcggttcttaaa

SEQ ID NO: 36867 - DNA, 981 bp, Arabidopsis thaliana landsberg
tgagcctgatgatgaacctcctcatgctactgaaagtttcgaggattatcgatctgatgggagtttctcggaggatactagtcaatcgaatagtgtttgtaactatagccatgaacaagagaaatgtggtcaaggaaagagtcaatgtgagtttgatgaggaaagtgatcattgtgttagctatgatgagattctagtgaattctgatgaagttattgagcttgatgaagaagaaggcggtggtgaccacgggagggttgctgatcttgttgagtgtgagaatcttggacctcctgagatgccacaagagattgtgattcaagattctgctttagttgaagaggcgggatcgaaactcgatgaacatgcttcaaaaaaggtgagagtataccttgttggcttttgcattgtgacaaattcaaaaatctaaacttaaatgtgtttcttggtctattcatagccatctaattctatggaaacaccctcctcctctgtaaacgtgaaacctattattcctaatgatgtgcgtgtgactaaagcttctacaaagggacatgatgtaacgccaaaagctgcttcaaggaggacaaagggttcttctttaagttctaattctaaaaccaatgtagatgccaagaggtattttactgttctttctatagagaattgttgcaactctgtttcatctttctctttgcttaagagttaagacctattggttttgtgaattgtgatagccaaaaggaactaagaccgaagaaaaccattgagtctcaacctaaatcatcgaacaaaaccgagactcgacctcctattgctacgaacaggttcgatactaagactactctagttttttttagataatcgacttcaacaatcaaatggtttcaccatgcaggtgcaagactagtaccacttcttctaagctggagatgagtacaggttctactagtttccgtttcaaatgtagcaaacgagctg

SEQ ID NO: 36868 - DNA, 2789 bp, Arabidopsis thaliana landsberg
taacagaacaaccaaaaacgcctacgagtcttttgggtggtggtgagatggttcaatgcttcaatctctctctttttaagactttcgagcacaaccaactgtttcacacaaaatgggtgataatcccttcaatgtaggcaaaacttatagaatgcttaagaaaactgaataagtaaaaaacctcacctcttcaatagcacgctcccgcaaaatcgtaaagtgcatagccctgtgtttggatataatcttcgtatccatatatgataaagcaactacatggaaactggcagagttatatcaaacatataaatggtcatggatatgagtgtacaaaaagtaaaacagatttggtcatacacaatttgaatttcttcccgtaataaacatattcttaggctctatatataatattgtatcaatgttattgagatcaataacacataataaagagttttcccccaaacccttctctagttagtagtttctataattttggcaaatagtattcaagtgctcttgcattctcaagtgattaattcaattcctaggtttcggtttcggtttcggtttcggtttggttcgtctcggttattttaggaaaagaaaacaaaattagagagcaaacacgattggtcaaagtcaactcttctctaccttcctcacttcccagcttcactgatcatcgccaatcacaaaaccaactacacacattcatcatcatttcgattatattttacccgaccatgaccggagctagccgtcggagcgcgcgtggtcgaatcaaatcatcatcattatctcccggctccgatgaaggaagcgcttatcctccgagtatccgccgcggcaaaggcaaggaacttgtatcgatcggtgctttcaagacgaatctcaagatattggttgggttaatcatattagggattatagtaatctacttcgtaatcaatcggctagttcgtcacgggttgttgtttgatgagtcccagaagcctagggttatcactccttttcctgctccgaaagtcatggatttgtcaatggtacactaatattatattcactactcgtttttttaaatcatcaaagtcatgaattggaaagattcgttttttgtatatgtgtaccagtttcagggcgagcacaaagagagcttatactggggaacttatcgtcctcatgtttattttggagttcgagctaggtatgcaaattccactgtgaatgaatctctactctgggatattctttgtacaagtaaagaagttgtatatggcaatgcagaactccattgtccttggtagctggcttgatgtggcttggtgtcaaagatgagatgtatgttatgcggcatttctgtgaaaactctgatgatttaagtacatttggctggagagaacataatggacgggattatggtcggcaagagctggttgaaaacgatatggtaatagagacgagttttgtgaagtccaagggagacggccttggttatggtggggattgggcagttcggattgatgtaaaaaataaagggtaattgctaatatgcattcgtactgtaatatacttttcttcacagtgtcggctttttgttattttggcttggtgatagaaattcattttacactgtggcatgacaatggtttttttatttgaccatggtggaactaaactaggttgaatgatgatgtgaagagaagtgcacatctcttcttttatttagctgatgaaggtggcaatgttttaaatttaggccaagatggtttagatttccaagggagctctctcctggtttcggggtcacgtgaagatgtaggagactggcagatacacttaaaatcacaggtaatttgtgattgaaattgctctgtagaattcttaggacttttgtagctgtctctgctggaagtggatctgcgggtggtttgacattttctgtcatgtttcggatgtcatccgctgatgctcatctggatataaccattttgattgttcttcatttgcagaatcagctcgagacacattattccggtttcaagacgcctcacatatataatttgtctgatctagttcagcaaaatcttgctctgcaggtctgctagttttcgagctcataactcattttgaaagggtccaaagtatatttttttaaagaccgcaatgcttacagttctctttgcttgtatgttttcaggcaaggaagtttggacgacttcagctctctgacacatcagaggattcttctaacatttacatctttcaggtaatcagtcttaataaagatgtatgcatgtgtatttttgtaaaaatatatagaattttcttaactcctatggaatctgtgatcaatatgtttcaccatgtccaatggcaacatacagatttctgggaggctaccatttacgattgatattcccttcatctccgggatcaaaggagaaagttcaaatgtggaaaagcgtttaacaagtctcacaggtatatttaacctcctgttattatcaagcatcattagtgatgtgttttgattttcttaaccttagtttgtggatgtgacttccatttgagtttgagtatggaagaacttctcctccgtttatgagttttttacggcaacattatccttttgagtttcataactcagataaagaatgctagtctgaaatttatgtttgggttctgtgtgtatttttgtgtttcttaagtgtccctcccacctgaggaaaagcagtagcttattattatgtagcttcgctaagaatactaattatgtgtatctgttatga

SEQ ID NO: 36869 - DNA, 3533 bp, Arabidopsis thaliana landsberg
tataaactatatatggaattaaaccaaatattgttgaaattacgaaccaatacaaggtgattaaacgaatttgtccacctgatcttattttctatttgttcccaattgtgtgtaagtaaaaaagaaaaccttttatgtacaaataaaagagagcaatgtagtggaagtagaagtagacacaaacactttggtaaatgtctctgcaatcccatcatcatgaaaatggctgtggctgagattctgcagaggttttacagataggacaccaattcttcatccgtagccattgttgcgcgcagctcacgtggtatttatgttggcaaggcaaagtccctacttcgtctccatcaacatactcttcctacatatataaccaaacactcttctggttgatttactaatgtaaccattgaaagtagactgagggatcagagataaatcatacctggcaaatgctgcacttgacatcatcatctttgttcaggcaaatgtcgtcggattcatcatttggacggtaaatacttgacttgaggcttttcagaagcgcttcttcgcttagagcagtgctcactgtacccattttctcctctaatgctaacagttcctgcatgattttgagaatcttagctttcacatccgaattttagcctttgacggtcaatcaccaaaatacacaaaaggtaagactaacctcatacgacatgttgtcaatgtcaagcctcatatctctatgctgatcgtggaagctgctcataccatttaagaacagattggtctctaaaacagccaattgctgcaagaggaaataaagaagcagaacaagtgtgtcaaaataaaactctaagtcagacaaaacctctgcatttcaaagatgataaaatcacctcgtatgtaagctcttcgtcttgctcaatcctttccagggccaacaatacctgaaacattgtgaaaaaagtatttgagttgttgttatcaagaagctggaacaccatcacacacaagaaaggatatgatgactacctctgcaactccattcatgttataccgtctgaaagtatcacggttcatcaaagagcgagaaaggccggcttctgaggggctaccaggcatcatcaggctacgtaacctgccattactactgattggcctactgtaactatttaaaggactacgcgaaacttctgccgatctagaaggattgagatcagctcttgttggaggccgaggtgcttgtagtgttgcaaccgctccagcacgtcctgttctaccataataaccagttgatctcctagtactacttgaaacaacactgttgtccctaacacttggtatatttctgttcctcctagaatcagacatggtgatgccattcccctgaggggaacttatattctttcccccaaccattgatccttccgtcttattccctctactcgaagagctgctctcaccatcagaggttttctttctaaagatgttactttttcttggcggagttgaattagatggaagaacatcagaaccagatttgctcctcaagtctctcaacccattcttgttcacacaagctcttgcattttgctcactattactcacacgagcatctcgggagaccaaatcaggtctctgatgaatgcttctatcagtttctctacttgagcttcctgcctctgtcacaacttctccagagacactattttcagaaagaacactaatagtgccttcttttttctttccacgctcacccttgggtgactcttcattaacactgctactctctgaagaatccatgtccaaaagagaagagagttgtctcctaccgataaccttggaagcctttttcgtaccgccaaatccactcatactccgagatgaactaccaacggtttcctttccatttaaagaagaccgaaacgacgacacggtagcttttgctttgtgatcaatcaaatctcctttagtggaactaaccctggaactgcaaccaattctactgcagataggaacaacactcttatcatctttcttcttcatattctcatgtaacacaagaccacttgctttccgtggcataatcggtctagatgttcttttacccttaaatccatccatacataaaacacaccctcaaacactgcaacatagaaacaaagttcaattttcagaaaattgcatcaaagcctaaggatacacacacacacacacgatcttttaccattcaaaattcagtctttagaaatgagaagaacagagaggatataagttaatgaaccataaacaaacagaggcttcaaaagctataagtcagagattgttaaagaaaccaaaaagagagaaaagaggaaagctaaagagaagaagaaccatccaaaagaaggagctcattcgatttacacggagtttccattaatacgactagtcttctccgtgattcaagcttctccatggattttaaaacgtagacacaaaaaaaaaaactcgtaacaaaagatataaactttctcaatcaaattcaagaatcagaagaaccaaccacacgaaactagttctcaagccatagaaacagaaaaattcaatctaaagaaagaaactttttatcgaatttacgtaattaaacaacggaaccaacacaactttacaaatttgaatacggaaggcaaaatcttcaaatagaaaaaaaacgatttttggattttgttctctcgtgattaccgtagcgaaagagcgaaatttccggcgatgataactttttccgggggctatctattccccgaagaaaacgtggagtgagagagatgcgatgatgaagaagaagaagaaataatattccgaataattttgtgagaggttttaatttaaaaccggagaagaagaagaagaagtggcgtagcaaaggcgaaacagaagtcggaatgatctgagccgttgattttgggtttcgttgagttacgaaaggacatgagagaggttattaaacggcaccgttgctgcttagggtgttgttatcgcggaatcatatgttttaatttatactaatacatatctatttctttttgtaactacgtgaaaaagttaaaaagggagtttaaggaaacataagattaattgataaatagcactcatattatcaaaattagtaatagtaatttcaagaactcgttaaacgagcacgattcttgtaagaaaattcttctaaacactaactaatacgcctaagatgatatagaaacgtaccattttttaccatacataatcaaacaatacacatattaaaactatttttaggaaaattatataaatttgagtataaattatttttcattttagaaatatatatgtaataaaataaaataaaactgtatggaaaatccgaagaataaagatgataagaagagtgtaatatatatgaacatttttttttttgtctttttgttataaaaacgtcgttctcaaccaaaaaaattgacaaaattatttgttgaggtaataataatcaaataatttctacttggtcgccatgttcaaagaccaag

SEQ ID NO: 36870 - DNA, 2937 bp, Arabidopsis thaliana landsberg
tcaaatggcacaaaaatattatgttatttctaaactaaactctattcaaattcaacgtgaaataagatacgtacaaaaaaacatagttgacaaaaataaaattaaaaaaactttgaagacaagccaagacatggccggacaataactaagaaaacgaatgtcaaaactgaggaagtcatagagttgccgtgtgcttaagtgtgtcctacctatatcattctttttctcgcaaaaattttcagtatctagtttttttttctttacatagtaaaatctccttcatctataatcgttctacaaattgtacaattttattagcttataagatttaccagtaatttagtttcttaaccagaaaaacatgagtgatcgggcacaaccgtcagcgtcagagccagtgagaaacatagttcttgtggggcctaccggaaacgggaaaagctccaccgggaactctctcatcggaaaagaagtgttcatcttggaaaccgtggaatgtaagacatgtaaagctaagacactagatggccagataatcaatgtgattgacactcctggtatgtttctcctttaacatttgaatgaagtgaggctatgtctcttttcatgagcacacaatgttcattatgatttttgggtcataatatctgattttaaggtggttagattgtgttgcggaatcttgcctttataaagttcgtaaaagtctggctgtggaatggtttcgtgatttaggtctcttcgatttgtccgtgtctacggattatatgaacaaggagatcatcaattgccttaccctcacggatggagggttacatgctgtggtgttagtactatctgtggggactgacattttaaaagaggaagaggccgcacttaacaagttacagctcctttttggcagtaaaattgttgactatttggtcgttctcttcactggtggtgatgttttggaaaaggaaaacaagacacttgacgactatttgtccagaggctgccctgaatttttgaaggtcaagttagtttgattatgaaaattatttttgcaacataggtctctgcctatcttatatgcgtacttcaaatggactttttcattttcagacagttcttagattgtgtggcggaagaagggttttgtttaataacaagactacggatgaagtcaagaagatcgagcaagttaaacagctccttgcccatgtcgaagccattgaaaatctcaacggtgggaaagcgttgtttactgaagaaaatgatctaaatgaaaaggtgaaactgtgattactttacttctactcttcataattctaatgtttacttatcctatataacatttgttgatatgtttgaatccttacgatttctcagagacaaggtgagatgcttatggaacaggaaatggaggtacaatctaagaagcctgagaacacagaggtagaagagatgaagaagcagttagaaatatcgtatggccaacaaatgaacatgatggcacagatggtaatttcctttccattaactctaggcaacactactgattcttgatgtatcaggtaataactagatctggatctctttcaggtggaggacacgctaaaggagtcatcggcgtcacatgagagaatgttactagcactgaaagataaagttgagagatcatacttagaaaatgaagacatgcataatgagaccaaaagatgtaacatcctgtgatcggtttcctaaggcctagacggtgcaaaataaagatcggtaaacacacagtcaaggtttagatgtgcacatgtctttatactctatgaattttatgtgtgatttgtggtttcttttttacttttgcattttttatccccaactcaagtgaaactatacaagtaccaaacttgtaatcgataagctcgtatgtatcccttattcttacctaaagaaaagataggtagttgctaaaacgtgtatacatcctttataatcaatctttataaatctatctcattaagattaatgagtttacatcttttccatagatttatgaagttcttttcattgatgaggtgctttaatgtttgttcaattatatgtttgagtatttcatagttaggttttagggttgcaatgtgaaattatgttttcttagattatgagcgaaagaaacaaattctttataagacctaagggcatccaaattcacataaattatgtttgagtatttcatagttaggtttgagtattcttcctaaagacttgtgggtttgatttaggccaattcctaccagtgcgggctgacctgccgtaacttacctaagatatgaaagcgggttggagacgagtacatgggagaggattttataaagacccaattgggatgagtcccaataggatatgccttaaaagaaaggaaaccgcataagtaatagccgcaagttccgtgaaggttgctgtctaaaggggagctaataatatagatgtgggtaaaatatctcaaaatcaatgccttataagacttaaggcatcaaacccttaagctaggttttgggaatattcaaaccaaaaggtggtgttgtccttattaaggttcatttctatcaaatcattaatgtctttagtcattacattcatcagcgggtttaacaatcttaatctgattttgggtattagtatagtcgtttttctgaaaagatcataaagggttttctcacttccactaccacttcttctctttcaaaataggtcatgaagtacttactgttcacataaaatctcaataatggtattctcatcatcatactatagattcttctctataaccagttctttctccatctccaatttattttgtttggtaataaaatattcttattttgtatcatcagtatcgtatatgcttgtctttttaaggaatcaacattggattataatttctctttcagcataatt

SEQ ID NO: 36871 - DNA, 3764 bp, Arabidopsis thaliana landsberg
gcatgcatgtaccatccaccatcggaagagatgtaactcttggtgataataagattcatgtccgtttagatttgcaccacttctagaagaagcccttgtttgttctcactattcaccttcattattaaacgtttgacatttttggacacgctaaatcacaaaaacacaagacctattcgcgcatagaataccattggaaccaatttttgtgtaccttcacaacggtgcaatcttgaatgctgtcattgtcaatatagaccctgcatctgtaaattacacacaccaaaaaagaagatgatcgtgatgaaaaatgtatatggattcacattgttgttcaacgaatttatcacataggaagagagaagagcttacggtggaccgtatatgcgttcaccaagattgtcgaaatcaggatcaaagtaaggccagcaaactttctgcatcgtctctacggaaaaatctgtaattagaattagggcaagagatatacaagaagaaaagagtaaacgattctccacaaatttgagtttttttttttgtgtgtatataagaaaacgttttggcaaaaagtgtgaagggaagagaaagattagattggtgttttagacagaggagggcgacgaatgaagaagagatttccacctataatacagaggatttaacaaggtaggcatttactaagtttagcttggggaataagtgtgtcataacgtgtggaagaagttagttttagagaagataaaagttatataaaagaaaaaatctaatcgaaattctattatagatatattttagagtaatgaaaaatccattctagagaggattcaaatatagtgtagagtggtagtattggtcaagaacttgtcaaagtcaaatactaagaaatggtaaagagacttagtgaaaataaggtgtcccttgttttcttgcttgtttttttcttcttattttgttaacctccacatgttttcctaagttgttggagaaattaaagttgtgaaatctctgtttgtaaagtttagtaggattaagatcattaactccatgtgaataatttagaaaccacatacagaaaaaacgtgtgatatctttgaaacggtcaccaaacttcaccaaaaaaatgataatttgacccatgagatctcgtaaaatactaaataccacaaaatttcattaccattttactatggtgagaaaacgtgtaatccgtatttgaacaatattaatctccaaaatgtcgcggtggttgaggatacttacttgctttaattatgtatggataaacgaagtttcctcgtcattacggatttcatagagatgtatttccattgataaaaccctagaatccatcagcatgaaatctaaaaactgcttccttgctttacaaaaagttttagttttggataaatcgttccaaattttgcaagtggatcgcactgatgcgctcaatgatgtcaatctaagaaacttaaacttcaagcaaggaatcagtttctagatttcatgctgaaagattggtcatgctcgtcattcttcttagtttagctttttttttttatttctctttctctttcaatgataaatagtgaaaattagtgcttaaatagtgagagttagggtttatgtgtcattgaggtcgcacttgttccggtaatgaagtgttatgaaaatccacaaatcaatttcttgttgatcattcgatgtttcttgggcttagaaacaatttaaacctcacatggtcggcccattggtggtccaatgatcccatcaaaatcgagtatactttgatcttatacgaatccaaagaggctttagtggtctagcttagtcgtagtgtaggtacgttgtctaccgacgcagattcttccaagcaaaaaaaaaaaaaaatcaaacaaagttaaaactttcaccacaaatagatctcgaactacagtagggtttcagagttgcatgcatattaacaaaaatcgaactatatttatggtttcaacttacaatattacaattttcttatagactgtttaaatctgacaaacttgaatttgaagacacacaacaaatcagatacttaactttagattctctctttttaatacattatctttttcgatctttgatggttatacacgtttgtgattgtaggttcgaatgattcatattcgaagaaaaaacaatcaaatttataaaaggatggagaagataaaatgtgaataaagcatcgtaaggagtatcaagtatgtaacaagaaccaaggatcacgttttggtaaccaaatgggccataaaaagaccacaaaacaaataatgcttcttatcatacaaacaatgtgaaacccataccatctacgtttccctttttcttgtcagaaaccgaaaatgttatcaaaataaaatagcttataaatcctaactcttaatattcatagctaaactagatgatacattgtgagatggtaaaaaaaagtcatttaacgtaaaaatgttggccttatatttcattctactcgtctgcgtgcccttaggtgtcatcatgaccgtgacgagtcctcgactagccatcactgtggccgtcactcagccggcggtcttaataatacaaaatcccaataataacctcacatctcctcaagtaattacatctcagccactggatcacgatgagttactccttcgtcaagcttctaaagccaacccaaacccttcacctaaatttcccaaaaaactagctttcatgttcttaacaacgaactctcttccacttgcaccactttgggagctttttttcaaccaaagctctcatcacaagtctctttacaatgtctacgtccatgtagacccgactcaaaaacacaaaccgggttctcccggcacatttcaaaaccggatcataccatcctcaaaaccggcttacaggcacaccccaaccctcatctcagccgcacgtcgtttactagcccatgcgcttctcgaggacccgtctaattacatgtttatccttctctccccttcttgcattcctttgcactcctttaacttcacttacaagacactagtctcctccacaaagagcttcatcgaaattctcaaagacgaaccagggtggtacgaaaggtgggcagcgcgtggaccctacgcgatgttccccgaggtaccagccgaggagttccgaataggatcacagttctggacgttgacacgagcccatgcgctgatggtggtgagtgacgtggagatatggtccaagtttaacaagtcatgcgtaagagaagacatatgttaccccgaagaacattacttccctactctccttaacatgcgagacccacaagggtgtgtatccgctacggtcacgcacgttgattggagcgtcaacgaccatggtcatcctcggacatataaaccgttggaggttagggctgagcttatacaaaagctgagaagtgcacggcctaggtatggggacggcaaccgaacgaggaaagatccatttcttttcgcccggaaattttctccggccgggatcaatcagttgatgaacataactcgaagtgtcatctttaacgattcggctcttgtgtaaattatagtatttggtatttcagttgagactttaggggacttgatttggcttcatttgagatttttcgtatgtttaaacatgtatgcgtggatgtaaattaatgttatatgaaagtttccaataatgttatagcaagattttagggttttgctataaatctaaagctattctattaaagagaaaag

SEQ ID NO: 36872 - DNA, 2089 bp, Arabidopsis thaliana landsberg
ctacacttctaaagaaatcgaaagtttcagaaggtctaaagctgggaaaagaacaaacaaagaaagacaaaagtgacgatgcgaagataaaagagataaagaaattgaatttgaagaatccggtgaacaatgttaacaatgaagacaagggacagaaaaaggaagtgaatcaaggagaagctcgacgttcttcaaacccgttcctcaaatcaactgtttaatgatcttattttggaggttttgttttatttaacaagattatgatgaatacatctgtttcactttattaaatattatgatgctatagctgaatgattacacaaacttgtgatacaggattagtttatattacaatacaacaagctgttaaagaatcatcatcaaaggcatggtgaaacagaaacttgaactggaaaaattcagcaatcagccacctgttgaagctttctcgttcttcatgatcatatggaaggatttgactttgtcttcctccacgatttctctaagaacatcgtcctcaatcttctcagcttgccattgagatgggtcctccacaaattcttcactgaaaatcatactggagacccattctttccaggtcgtcctcctgtatttgtcttcttcaagtgttcctctcgacaagagctggtaaacgtacaccactttctgctgtcccggtctgaatgcacgtgcgattgcttgctttgtcttagaaggattccactctgaatcaagcatgatcacccgtgaagcagcggttagactgatgccttctgcacaggctgtaatcgaagccagcagaacacgggactggcctcctggctcttcaaatttgtctattactctgcctctttcaaacagctcgagatcccctgtcaaggtcaggagctctcggcctctcttccacctgaatacattctcgaacagctcaagaaacaggcggatcggcgcaatgttgtgacaaaatatgaggattttctccctcttgaccacccggaacacaagattaagcacaaacatgacttttgatcctttctttgcatcgtgcttgagcttctcaatctctaaaagctcctgagggttgaagaatttggcgcaacaggttgtggttttgaccaaccaaggatggatagcagctaacgttatgagtaactcgagctcgagtggatatccatggtaagttgacattatgttctgaagtttggtaagactcttgtgctgtacatcagtggaattcatcaacaatgtgtaaatctgcaaacctgggagaacatcaccacttccgcttccactcccttcatagttatcgatgaaaccactcgtcatattcctcaacatgttgagaccctgcaagcgctcatcgcccacttttgtgtcaatcttcttggctataatgtcaaggaagaacttccgagctctattttcaagcaagtgaggcgccttttgctcggcttggttggtctggaacttcttgtccaactccactagaacctcatgaacaaacttgggtctagccaagcacaaagtgttgaagtactcacagaagttgttctgaaacaatgtaccagaaagcagaatcctcaagtcagtatcaactttcatcaaggcctttcgtaatctcgacttggtactcctcgggttatgtccctcgtctagtttctgtaaaccaggagatcctttcaggactggagccatgtactttctatgagcaatctttgaatcttccctcatcaaagttagaaacgatgtgtaacccattacaagaacactcgggggggcatgccatttctggattttgtctaaacagtcaagaacatgcataacatcttggcttggttttggaattccctcgaactgaatggtcttctctttggacatacaggaggttctacgaccatggagcaagtgaacagggaccggaatctcccatttgatgaactccttgtaccaagtgtacaaagttgtttttggagcaagaaccaaaggtcttttacccggaaatatcttcaagtagctcgcgagaaaagctatgattagaaatgtttttcctgcttcgggagtatgagaaactacacacccacctatctta

SEQ ID NO: 36873 - DNA, 938 bp, Arabidopsis thaliana landsberg
gcacccgcagcgagataacggtttttagtagtatatactggacaacatcaagggaacgcttgtgggatccttgataaggtctcttcacagctccttcgctttcattccactcaactatgaacgattccccatctttactcgtcccacaagaaaatagcctatccatgtgaatataataaaaaatagattttaaatttattatcacttcatgacgatacagaacagaaccacaacataaagatgatgagaatcatgttataacctagttccatcagcactgtaggccatcgttgtacaccagcgaccaggagcttcgtagtcaacccgagaacccatattatcatataaccatgcttttatttttccgtcaagagcagttgaaaagataaacttaagcagaagaagaaataaacaagtcaaaaccaaatagaaacgaatttcaacttgtacttagcaaaaatgaaaccgtataaatattgctactttacctgaatgttttccttgtagtgagggcagatagagtaaacaggagcttcatggccttcaaaagtataccgttttacacccgttgcagcatcccagaccttaattcacagaattgattagtctgtttttagagttccagcgaagtaaaaagatagcaagagttaaggtattgatagaagaaaagtaatcctgaaccttggtggttttgtcatcaccgcaagtagtaacacatagttgcttgttcggtagtggtagaatagcaattgtccgttagtcagcccgccgtacatgaggcatctagtctgataatgataaaagagatggttgttcatttacaggtaggtgaaagaaatgctcccaaaatgtagcagtacactatatcacacctcaaggtgaagcctcatgtcttcaccaccgtgataagagtatagctgtgcaatatgtctcgaata

SEQ ID NO: 36874 - DNA, 1513 bp, Arabidopsis thaliana landsberg
tctcttcttgttccatatttgatgatggttgttggtcaattaataatggaaaggtcttaggttgtctaggaaattaagttttgtaattcctttgagttgtggcccatgaatgatatccttaattattgcatttagcatcttgcctttttgaagtacaatttgctttaccaagacacaaaaatgggtttgaactttggttcaatattagatatctgaaactactgtgttggttaatgctacagggcaggaaatggtcgtttaagtgcatctggaggtgatgggtatgctggtggaggtggtggacgggtatccgtcgatatatacagccgccattctgatccaaaaatctttttcaatggttagctccagtttgttctttcaatcattccctaaatttgtgctttcaattgattagatattgtgatgataacaactcatcttgatagttcccttttttgtttaagtatttgtggttgtgacagttcaattcgaatttactctttgtaggaggtcctagttttggttgtccagaaaatgctggagctgctgggactctgtatgatgttatttcagagagcttaaccattgacaaccacaataagacaacatatacagacactcttctcctggagttccctaaccaccgccttttcactaatttgtatatccggaatatggcaaaggttgctgttcccttgcgttggagtcgtgttcaggtttgtgaaagtaaatataggttcttgatactgtaagcatcatcttttggccactgaagccaagtgtaatcagtgtgaacaagttattcattttcccggttgtgtaggttcaaggattgataagtttgtcaaatggtggagagttgaactttggtcttccacgttatgcttcctctgaatttgaattatttgctgaggaactcttgatgagtaattctgctatcaaggtattcgattaatttgaaaaggtatattttttcttccttctgcatactatgttaacctctgtgctatgtatcaggtttacggggctttacgtatgacagtcaaggtgttcttgatgttaaagtcaagaatgtttatagatggcggtggtgtgacaatattgggaacttcaatgcttgaaattagtaatctgatggagctcaaggtatccaatccaatatactgtaacttgttcctcgtcgggctgagaaattatagtcaactttgaagttcgctcatatgctcgttactttaatgtaggagtcatctgccatacaatcctatggcaacctgggagtacatgggcagggcctgttgaatctaacaggcacaggagattcaattgaagcacagcgtctgattttgtctctattttatagcatccaggtaaggaaaagaaactatatcatgcttttgggacttttttttaccttctgtgggctgagatgtgtaggttctgaaagttgtggttctactttgtgtgcatcggttcagggctaaaattatcatttatgtccgattaactattttga

SEQ ID NO: 36875 - DNA, 2228 bp, Arabidopsis thaliana landsberg
tgacataacaagctaaaacgtatgggaaacgtcaaattttttggtaaagcgacagaaaatacctaacctcatacgttaggaagaattaaatctgaacttatagaagtgtctcaaacctcaaaattttatatgatatgctggagttttagaagtacaagtcatcgtttcttataatttagacttactaatttgcaaagttacatagatggtaacagtttaccctatctgatattgttccatttgtttagaaaatttgattacctggtcatgtacgaaatttaaactatattaaagctgaattaagttgtctcattagtcaaatcgatttaattaatacgatggtttattctccttcattttctttgacatgtatacttcaatagcgaactgatcagccccggcccaactgtaaaaagagccttagggaaaaaaaaaagattttagtcttgttatttaaataaaattctatatttgcaaatataaatatgtattattgtgacaaaaaaaatgtatttatattttcgagagtattttataccactaacaatttttttataattttttaatattaaatatgaggtccatacaccgctgccctatcccttatgtcggggttagaactgctacggaagaatatgcatacaagccatgtatgtaacttgaagaaaattctgcataaatttgaataattgataatatcaaactaaatctgattgtggccatacaaatattcactgtacaacaaacaacttttcttttgaacaacaaaatatgaagaagccggcgatgatattcaaaacaatttgatttttgtctaaatgcatcggacatatcaagccaattcggagttcggacataggttccctgaataaagagcacctaatgaaaaatgtagtgggcttctcatgagacaatatttgggtttgaaatgaaggctcaaataaaacaaaagaagcctcccacaaacgttttgttaatgttgctagattgatttgagtacgaaacatatctctaataatggtccagaatcaaccttggtcacatttttctttcaccttaaaaagagaataggcttgaccttcaagaaggattttagtatatgttatatttagaaacattatattctaaaatggtaaaacttgattaaaacacaacaaaaagagaaacataaatggattgatacaaaatattgttaattttgaaaagtaagaaaactaacaaaaacaaaaaaaaaaaacccaaaccgggtcactatataactaacctgagagactctcaacatccctctgttacatctcatcctttttctctgctatcaatctttaacaacgcctaactgagaagctttacacagctctctgagcttgatatacaaaaacaaaacatcgagagaagttcaagagcccgagtctcttgagttctggtcttgtttatcccggtcctcagaacccgttttctcacacacacctatatccaaagccgctggattctccagagagactggtttgtcattgtctatagtcataggagtagtagctgtcatggctggaggatcagagccaatttgatccagtgaagatgggactccaccacagttcatggtaggtgtcgagcccttgggggcaggatctgctgtttctacgtcttcatattcagataagagatctataaactcattgagtagacgctgcacttttctgtttgacgccattgcaggtagaatatcgtttctcaaaagtttatgcttcttcaccccctgcaaattaaagcgagttttagagcgttccgattgggaaaaggttaggctctgatcaagagaaagtattcaccagaacataaggatcccaagacaagtttgtgtctgaagatgctgcttcagccataccagtgggaggtccaagaaagctctcacagacttctcttaatctggactcgtctgcctctctgcagacaaaggcacagaccttaagcaggttgactatgatagagttgaaaaatcacaaaaataaaagtaatcccatagcacttcattgtcaagtggaaaaacgaaacagaatctgaaactgagaatatattttaacaaatgcgagacttaatcctcatttatactaaaatgtattcacattcgaactgaaaaaagagtttctatgagaaaagggcacagaccttgctagaaacctcacataggcaaggaggcactggcggtattcattaggagactcaagtgc

SEQ ID NO: 36876 - DNA, 1029 bp, Arabidopsis thaliana landsberg
agagagactccagtatgatatagtggtcccgaattatagataaaggaccactaagtagctaaaaacccaagaaagcaagaagataccataatgcagcaatcattaacatcttcattatctatttggaagatgcataggacaaatcaatgatgatagaaatacagagatcaagtagcgacaatttaatgattattacctctatgaatgaagcttgacaagagaaacacttcaaagatgttttagatggaactgaggaaacagagtgttttgttttttgacgaatgatgaacttttttgtgaaaagaacaagaaatcacgaaaaatttcaaaatcaaataaaagaaaaagagaaaacttaaaaacttaggcagtgaaatctggtggaagagaaaacttaagagaaggaagaagaaatggagttatcaagtggtaggtgatgaaatcttaatttttttttctttctattaattgttctttaatataggtggtgtgacagagagagcttgcattgcaaattacatttcattacaaaacataaaaacatcctctacatttccgtgaagagtatgatgttttaactacccaaagtaactgtccgatcttttatattacacggctatgaagaaacctttaaataagaaagtattgttgatggcattgcgttaaaacattaaaaggactagtaattatcaaattaataatatttatgatagagaaatgttcaaatgaatcatggagtagtgggggctggctgacctcaaaatttgaaaattgtttttcttacatttcaaattacaattaaggtaatttaattcctttttcatttgttgttttggaatgttgacgtaacatttttttggctttagctaaatccgcacaatcacatgatcacatcgacgttctaaatttttgttcggtatgtataaatatataattagtataatatacatatacatacataattagtatgttgtgttgtgataacttgaatacagcacactaataatgtgttaatcttatacaatcgca

SEQ ID NO: 36877 - DNA, 830 bp, Arabidopsis thaliana landsberg
tggtccaacctttaaaagaccagttatgttatccctgaaaaaaatacccatttggctaaccaaagctaaacccttaaacccagcaactagctaaatccatcaaaaggagaaacaaacgaaactcacttgttgaagcaattgtggtaagcgtttcgcaaatcggcgcagggagaagtagaggagcgagctgaagttgaatcttttttcttcaataagcccattgtcgttgcaatcaccactaatactctgtcccaccttagcaactctgaaaatccatctatctataattcagaagaaaaaaaaacctatatcatcactcttaagaaaaggataaaaatgtaaacagtgagacaatatgaatctaacacaacaacaagcttcagaattcatcacaaacagagaaatataatccaagatgaccaaaagacaactaaaagattcatttttgatactctaaaaatataaatgaacataaccaaagttgcagaaagaatcaaatagagagattgtatcaaaaatgaaactcagacaatgcaaagttttaagaagtatgaagcttttcaaggataatagaatttcaatacccaaaaaaaaaagaaaaaaaatcagatctcagaaggaaaaagaattgaaatttaccctgaatttgattaaaacgggatatcccgtaaaacctcagattctccgagattgagagtctctcgtctaactcagaaaccgtaaatttaaacacccgacctagacgacgacgacgacgaagcttgggaagaactcgattggaaagatcctaacgacgtcgtttcagaagacgaaaaccctaggcaggaaag

SEQ ID NO: 36878 - DNA, 4381 bp, Arabidopsis thaliana landsberg
cgtcaatcctcggaagcagaatctccgtgcattgcttaatgcgttgcctcgcctttggggagtaggtgatgaagtttctggtcgaatcctggaaaatatgaaaatccaattcttatttcgatcagaggaatcgatgggctctgttctccggagaggactgtggtctttcaatgaatggatgtgtgtaacacaacgttggaatccaaatcatacagaccaagaccttaagcggattccgttctggattcaaatcaggggaatacccctccacttcctcacgcttagaatgatcacatccataggaggaagaatgggccatttccttgagactgattttggtggtgatggggccgttctggttgattacgttcgtgttcgcattttatggaacatcgatgaccctttgagatttcaacgcttgttccaatttggtgatgaggcgtgcgtattaaagtttcgttatgagaaactcaggaatttctgttcagtatgtgggatgataagtcacgaagcatcgaagtgcccaacaactaacaatattccaccgccgccaccagcagatgatgatgatgatgatgagggtccggactataatccagaggcacctgctgcgagttcaccagaggaatcaagacccgctgataaacatgtcatggatagtgggaaaaatgatgaatcccctgcgtctaagaagaggaaggtcgagcctgaggcatcttcttcttctgcggggaattttcaagtttttccacttgtgtgttgtgacatgaaacatgggtatgctacagaggagacagaacatcaagtcatcaaacgcgaatgtcgtcaatctgaagcagtcaaagtccgcaactggtttttggtaccagagaacgctttcacacaagaaaacaacagtgggagatacgctccaactaccccaacaaaaaacggtgatggtacagtgggcaataagccaccggagccgcaatgaatacatccttttggaactgccggatattaaagggtctctggtagttcgacgcctcaagggaattaaggcaacttattccccggacttactctttttagtcgagacaaagaactccgatgatgtcgtccgtgatgttgcagctcaagtgggatatgactatgtgaagtgtgtgtcaccgttgggaattggtggtggtctagctttgttatggaaaaaatctgtttctgtatgttttaatgatgttgatccaagactcatagattgtaagataagtaataaagatatatctttctacttttcttgtgtttatgggcatccaattcggcaacttagacatgtcttatgggaacgacttcaatgcatagcaattaaaagagatgggccatggttaatgtgtggagattttaatgaagtgctcaatgctaatgagaaaagaggtggtagaacgagagaaccttggagtctagtcgatttcagaaacatgactcaagtttgcagagtgtctgatttaccttatcaagggaacaatatgacttgggttgggaaacgaagaacacatacagttgaaagttggttagataaagcgatggcaaatgaccaatggtgagcacaatttccggcctctcaggttgaatatttggagatgattgaatctgatcatcgaccagccatcatcaagattaagagaacaacggaaaaaggttttaaaatgtttcagttcgatacgagactctgtaaaataccggaatttgaagatgtgataaaacagagttggaatcgatttggggaaattgaagacatgacagtgcaggaacggattatttgttgcaggagagagatctcagcctggaaacgcaacaataacataaattctgcactgcgaattaaggagctttccacagccattgatgcagcccactccgatcaaacttcaactcttcaacaaattcatggtctcagacgagagttaattcaagcttatcgagataaagaaagtatttgcaaatctaagagcaggaatatgtggttaaatgaaggagatgggaacacaggatttttccatgctataataaaaaacagaatagcacgatatcgattaacctcaatattgcatgcttcaaggatgaaagtttttgtaaatcaggctattgcaacgaaggctacacactactttttgggtctgtttacaagcaatatgcaatcggccccagtgcctacactacgaaacattcaaaaagtggttacgggagagatgaatgctcttttgacaccgggtgttacgatagaggaaatcagagaggctgtattttccatagggggcactcgagcaccagggccagatggtttcaatgcagctttctatcaacggtactgggagattgtggggtcatgcctatccgctggaatcatacaaatctctgcttgatcccaaagatcacacaaccaaaactgatgcaggatttcagaccgatcagcctctacaatgtgacttataagatcatttccaagatcctcattaaaagattaaaagaggtactctcttcagttgtttccgagaatcaagcggctttcattccaggaagaatcatcacagataatgtgctcattgcacatgaggtgctacattctctgcgggttcggaaaagatgcgcaaattcctatatgttagttaaaacggacattagtaaagcatatgaccgcattgaatggcgtttcttagaagaagtgttgcagaagaaaggatttgctcatcaatggataacttgggtaatggaatgcatcagatcagtctccttctcggttctaattaatggcagcccatatgaaaatttccaaccaagtcgcggtttacgacaaggagaccctttgtccccatatctttttattttgtgttcagatgtgttgagttccttaatgagacaagcaaatgaggagaaaaagattcaaggcatacaggtgagcaatggaggacccatgatctcgcacctcctctttgctgatgactctttgtttttcctcaaagcagatcagaaaaatagcttaaatctcctaagtatctttaaggagtatgaagccgcttccggtcagaagattaacttagagaaatcttctataacttttgaaaaaaaagttttccagcatactagaaatagtataatgagtactttataaataccaaatattggagggggaggtaaatacctgggtctaccggagcaatttgggagaaagaaaaaagaaatgcttgactacataaaggaaagaatacaacagaagatcgagggctagcaaacaaagttcctatcaacggcaggcaaagaaacactcatcaaagttgttgcctacgcaatgccggtttactctatgaactgttttcaactaccgattgaactgtgttcagaaatagacaggatgttggcgagattctagtggggctcaactaacgagaagcgcaaaatatcgtgggtagcttggcgcaaattagttacatccaagacaagcggcgggctaggtttaagagatctacatttgtttaaccaagcattgcttgcgaatcaagcttggaaactacttcaacgatcgcaaaatttactattcagagtactaaaaggtagatgctttcgtgacggaacttttttctctactaaccgtgggacacaaccttcttatggctggaattctttccgatttgggagagaactattggccagcaacgtccaaattagcattggtgatgggcaaactgctagtttatctgataaatggctcccaaccatacctccgcgggctccactactgcgcgatgaaacttatgcagaggcggaggtcaagaccctcatcgatacaaccacctatcaatgggatgagcagcaagttactaagatgatacaaccagaggaccaccacctaatttataagatctatcttccccagagacctactcctgattcatatatctggagtcaatccaaaaacggccaatactcagtgaaatcgggatattggacagcaatcaaccttcaagaggatgaagagacaccgagacctcctttggcagattttccagatatcgccaagaacgtatggaagctagacatcgttccgaagttaaaacactttctttggaggattggttcaagagcgattggggttgcagaaaatttacgtttttgacatataaatgtaaacccatattgctcacgatgttgtacggaagcagagacaagtgatcatacctttttctcctgcaaggaaatacaagcagtttggaaagcaagtggtattccaacgaactatctgggggatcccaacaagtcactagaagataacctacaacacctcatgcaactacataacgatacatcggtagatcgtctcacccggcattttggttgatgtggagaatat

SEQ ID NO: 36879 - DNA, 2195 bp, Arabidopsis thaliana landsberg
aaccttgttttagtgtgaatgatgagaagctcaaggagatgttctctgagtatgggaatgtgacttttttttggtttgtttctgattctaaacatctctaaactttatacataagtttataccacacaatataatgaattaaaatgttttgtttgtggtcataattaggttatgatgaattcacaaggtttaagcagaggttttggttttgttgcttactccaatcctgaagaagctttattagctgtaagtttcaactgaattgacaatctttttacatatacataaatgttttataaaattggtactaaaatgttcattggggttgatgattacgcagatgaaagaaatgaatgggaagatgataggaaggaaacctttttacgttgctttggcacaacgtaaggaagaaagacaggctcaccttcaggtcttttttagccctctcactctttgaacatcaaactctgtactgtgttgtgttgtgacactgagttcttaaactgtcttgatgttttcacgtgtttcagagtctatttactcaaatcagatcacctggaacaatgtcaccagttccatcaccgatgtctgggttccatcatcacccaccaggtgggccaatgtcaggaccacaccatccaatgttcataggccataacggtcaaggtttggtaccttcacagcctatggggtatgggtaccaagttcagttcatgcctgggatgcgtccaggtgcaggcccgcctaacttcatgatgcctttccctcttcaaaggcaaactcagcctggccctcgtgttgggttcaggcgtggtgctaataacatgcagcagcagtttcagcaacaacaagtaaagtttttatcattagttcttatgtcttttagcaagtttattatctttaacacaatcatacgaatatgaatttgttggggcttgttattatcttggaactgtcagatgctgcagcaaaatgcaagcagattcatgggaggcgcaggcaacaggaggaatggaatggaagcatctgctccacaaggcatcatccctttgccattgaatgcatctgcaaactctcacaatgtttcgcaacgttttcacaagccaactcccctcaccatttctaagctcgcatctgatttggctttggctagccccgacaaacacccacgggttagtgatctcctgtgttttcttctcttatctcatttagtacttgcattataacctatatttgttaacaatatcattgcattgtgaattgatgacagatgcttggggatcatctttacccacttgtggagcagcaggagccagcaaatgctgctaaagttaccgggatgttgctggagatggatcaagctgagattttgcaccttcttgagtcacctgaagctcttaaggctaaagtgtccgaggctctggatgttctcagacgctctgctgatccagcagctgtgtcatctgttgatgaccagtttgctctatcctcatccgagtgaacatactgtttactcaagactatgtttctctcgctttcttagacagttgctttaataccttttaggacctttaaaactagctttttcttttctacatctctttgatagattgttttgagtttttcccttagcattgagacttttactctttagcactttctctagtttcgttaggagtctatttaatgtgtcaactcttttgcaactccaaattcgtttcagaaactttacatttagcattttatctaataatcggcattctggttaaacattctgatcacatgaaatctggatgtacctcgtcgtctactatctgatattccgtatttatctccattactgctctgtcccatcctcctacttcgtcatccttcaaggcctttttaacaccaaatcgcggtggtgcttggtgttctccttcgtcatcgattaagtaggcgtcccatttcgaagctggcttagtaactctttctgactctagattcctctcttccatatccttcttcctcgtcactacttcatctgcaacacatttgaaggataggagaatattgttttagtaaaaccattcaggcctttaataaacaacattcgcaacggctttacttgaactaaacgctgatatatggccaacatatgtagcagaactcctcttaccggatcgagaatccggctttttgatacctgcgtctga

SEQ ID NO: 36880 - DNA, 4640 bp, Arabidopsis thaliana landsberg
gtttgagtttgatgaactggtgcttcagaggcgttctatctcctagggatcacatggtaatcacgaatgagcaatttacatttctgtgtgcttataatatttcttgcaggtcttatcgcaatggtagctataaaattcttcccttttcaatttaacttgagtctccatgaatggaagtttcagtgcttcccatacctgaaagagatttttctttttactaggttaacacatggggttactcgacagttaacttttttgctccgatgagccgatatgctagtggtgagggagaccctattaaagcttcgaaagagtttaaagaaatggtcaaagccttgcattctgctggtatagaggtagcaattcccttgtattgctccgttttcttggggtcgatgcagtttgttccttgttgaactttttattgtaattgattattcttcagaagtattcttacaagttttctctgcaggtcattttggacgtagtttataatcacaccaacgaagcagatgacaaatacccttataccacttcatttcgtggcatagacaacaaggtgagtcataagaggattaacattcatgtcggtttatttattttcttatcttaaaactctaagcagtgagatctattatgcaggtttattacatgcttgatccaaacaaccaactgcttaacttttctggctgtggtaatttattttaaagtttatattgcagactttacttttcaaaaattccgtacttgaaatgaaagtttggtttacagtttgctgtagtatgtgtgctcaacgtttcttttgctttctgtctccagggaatacactgaactgtaaccatccagttgttatggaactcatacttgatagcttaaggcactggtatggacaaaatctatgttagcagccactgtaactaattggaccaaatatcttgcagtttatcctggacatgacactgatatgaaagaattgcttgttgatttttctatcttcttgacagtcattgtggttacttcacatagttaatcattctggttctgctttcttctctttacttaaccgcagggtcactgaatatcacgtggatggtttccggtttgatcttgctagtgtgctttgccgagcaacagatggatctccactcagtgctcccccactgataagggtaggttttaatgcattgagcttgcatattcagaaaataaaatagaaaatcttgtgccataatgttcattttgtaatttcttattgatcaaggcaattgccaaggattctgttctgtcaagatgtaaaataattgcagagccttgggattgtggaggattatatctagtcgggaagtttccaaattgggataggtaaccgttttagcttcataactagcttaagttgatgactcccaatagtactatacattgtagttccttccaaagttctgtggttattaactttgtgtaactggtatggctactggtggatttttcccaagtcaggtgggctgagtggaatgggatgtaccgggatgatgttagaagatttatcaaggtattcaacattggagtctttttcacctgatctttggaaaggcatgacttattgcagatgcactctaatcttccacattgttagggtgacagtggcatgaaaggaagctttgctactcgggtttctggatcttccgatctttaccaggttattatattttgtattcattctgaactttattcagtgaacacttagatgcattaactgcagtagaatccaagtaggtttaatgatatcatcgcactttccctcttctcttatataggttaaccagaggaagccttaccatggtgtaaattttgtgatcgcacatgatggattcacattgcgagatcttgtatcgtacaactttaaggtactttttgatttccaatgtattgattttaaaacatgaatgagtcagcgctttatgtatctcttctgtatgatagcacaatgaggccaatggagaaggaggaaatgatggatgtaatgacaatcatagctggaactgtggttttgaaggtacaattaaaagagtctcgcttcacaatattcaagcattgatcgtttctctgtataatattcttattacagcattcaagtttaataatctgtttattgacaggggaaactggtgatgctcacatcaaatctttacgtactcggcaaatgaagaactttcatttagctttgatgatttctcaggtgcgtatttgccaacatacactcgtttaaatactgtctaaaattctaaatgcatatgaaaccgatggtgatcaatgatcagggaacaccaatgatgctaatgggagacgaatatggacatacacggtatggtaacaacaatagctacggacatgatacctcccttaacaatttccagtggaaagaggcaagtcttacgcctcgcgttttgtcttccctgtttactacggattcctccatgaactgaaatcatttttttttattaaatccagctcgacgcaaagaagccagaaccagttcatgtttttctcggaggtgatcaagttccgacattcacaccatgtactcaagcatgaaaatttcctcacccaagtaactaacttcctcttggtttcatctattccttggatttttgagtgctactctaattttcaatgattgtctaaagggtgagattacatggcatgaagataattgggacaacagtgagagcaagttcctagctttcacgtaagacacaaaagtcccaaagtttcttacctaactgtgttatagtactctacagagttatcagatttcagattaataagtgactcttcttgcagtctccatgacggtataggtggccgtgacatctatgtggcattcaacgcccacgactactttgtcaaggctctgattccacagccaccaccgggaaaacaatggttccgtgtggtcagtctttctttcttttgtcttctttggttctctaattctatgactgattcaatgtcatgtttccgcaggctgacacaaacctcgagtcgccggatgattttgtgagggaaggtgtggccggtgtggctgatacctacaatgtggccccattctcttcaatccttctccagtccaagtaagataagcactcacacgataacgcacggtagaggaaaaataaggtttatgagttatgagtaaaaaagatccatgactccatcagtctcttgtaaaagttgattacatgtagaataataaaatgtccgacatttccaatcacaaataaagatatatttagagcaatggtacatttttttctaatcatggaaataccaaatatatgtagtgatattattaacttaattttagttaaatgtattatctatataatgtaaaagtggataatctgacgcgaagagttcgtacccatccacatcctatcaactatgtcaacaatgtccttcaacattggcttatttgagtcaatttagtattttagtataaatgtctgacaaaaataaaaaaaatcatgtaaaatttgataatctaaataaatatcataaatcttaatgattttgggttttacaacccttacttcataatcgagtttaaatagtccatagtatttgatctgcaagatttagtacatttgacattatcgaaaaacacatttcaacagaattttgaatttattcaagcttcaaaccatatcctccacaaaatgtgataaatttgtcaaaaatttttatataggatttgtttttataacaaattgtgaataataataaaagaagtcaccccatttctgtctttcaacttaaggtgactcaccacctacttaccacattgatattgtcatcttcgaagaatccaaactattttttcttctaatccaaaccttttcttattgttagaaaacaattcaagatcgttctaaactcaagagaatccgaggttccaattattgaaacgttacgttaaaacgtaaaataatactccaaaaaaatccatttttaaaacgaataatgaaaagagatgcttcgatcgtagagtcaaaaagttaaataaatataagaatttacaagacgaatggaaaacacaaccgcgtgttagtcactaatcataatgataagtgaaagtttaggtcacattaattaattttaaaatttgattaatctttgaaaccttttaattcacgtggttagggcaggctttggcaacaacgcgtagttggtgttgggtcggtggtcgacgacctagccaaatccatggctcatatttttatctccatttgtttccatagttgttttaatgatacgtgtacgtatcacttatcagatgaaaataattaattacctcgactttcctaatcatatctacgtttccacaataacaatcttcaaacaaatccattagagtatgcaatttaggagtgtcaaaataagtcaacattcatggattactcgaactcgtcaataattttaattggtttaaataaaaatattttacccatatatataaaggagttttaatagattaaaactaataggattataagtttaatgggcaaaacttattagagtcatgggttatccatacgttttactgtggcaaaattatataccagtatagattctcgtgttct

SEQ ID NO: 36881 - DNA, 1212 bp, Arabidopsis thaliana landsberg
  unsure (1)..(1212): unsure at all n locations
cacgtcctgtaagttgtattagatgatgaatgatctacatcagttatgtaaaattggttgtagccggattgtgttctaggtgggttattgtgtgtagttggggtgtaataaaagtaagaatctttgtgtagaagaatcaaagaaaatgatgtaatatgaacgtttcttaagaaactcaaatttataacattattgtatggattgttgagcttcattagtttttgatcattgtgagatatctcccaaatctttggaatcttcaactttaagcgtaacaataattagctggataaattttgcatatcaatttgttgttgtgtatcttttttgcaaacgttgaattttaacatattaccctattttaaaaataaaataagagaaaaataaaaaaataaaaacacatagtgggccgatgcttctaaatgaaaaagaaggttttgccatattggttcccgtcaaatctcattggaccggagtagtatagatttcttcaaggnnnnnnnnnnnnnnnnnnnnnnnnnnnnnnnnnnnnnnggaacaagatgatgtccggcgggaactacacgactatagacagccagaaagtctctggatctgtacctgtaagttttttatgtctcgatctcgaatgtttacatgagtgctcgtccctacactgattcttccgatctgatctagttttgtttgtgtcaatcgtagtctgttccagatccaggccataccaccgtcaaaatcgcaggtaacattcttcgttttatgatttttggttgctgaggtgaaattgatattagagcgtttagggaaagaacgatcctatttggaattataggcctttttttgtctgtgggacgtaagactatgttgaatcttagctaagattactgcaacttgttaggcaatggctatggactttgaattaaactgtaatttgaacagatgagggtttagccaatagtagaagtgtggtttgatttgacatggttatgttcatgttaagttgtgattgagggatgcattgttttgcagagtcaaatctacaaactattcctccatctgctactcagggcaagatctctgggggtagtaattcccctcgtgatgctgacgggaagatactctcgacttcagaattatccaatgcctgagcaagtatacagaagaaattagatgtggaaacgggttcatacactggctcatgtcgattgcgtggtc

SEQ ID NO: 36882 - DNA, 1768 bp, Arabidopsis thaliana landsberg
tttttatttccgttccactcctaataaaaaatatagtatagctaatatatatttaggaaaaacaagtcctcaagactgtgaaaagacgcgggtggtgggtgacgttcgcaaatggggacatggataaagccacgcgcaattgagcggtccacactctctataccttttatatgtcatcgaatcatcaatttctcactctctctctctctttctcttcacattcaccgaaacttataaccaagatcaatatcagttctctctctcgatgaacatcatcttctacacagccatctttctttgacttcttcttcttcttcttaatataacggctcgtttcttttgtttccaaacgagtaaatagtgtcctatacacatatctataattccacaggttgaagaaaaggtaaaacctaatttacacgggctttcaagctcagaagagtccatttgcatcgtctcatcaacttacatgtgcatttttattttgcaccaaattaaagcatcgatctctcgtcgtccttttttctatattttccttggttctttagcttgtcgtgttgaccgatctgcataatgttttgtatatccattataatatctctcaggtatttttatttatcatgattcaaggctcgttaatttgtataaacctaatacctatatttttcttttttttcggataccctagtaatttgtatctgcatataattcgaatttgtacgtatatatttatatgtgtgtatagtatatttagtacagtcttgagctttctttaaaatgaagataaaacagacatagactttgaaaccattataactgtttgctaagacttgatgatttcttttgcttttgttatgtagaaaaagctgtttttgtttgtattctataaggctgtatatatataatgtagctaggtttgggtcgctataaagtatagtaatatatgtctacaaaaaaataattccgtttctcgatatgatcattgccaccattcataaaccacgttacaacaggaacgcatgatacaacaaaactctcttttccgttttcttttagcgtcaatgcgtcatatatgaacagaagccctcatgcatgtcctctttgatttcttcaacttttaaacctaacttgcatgatcttgttccattttcttaattctttgtaagaaatcaaaaacaatacctgagtacatgtgtttaataagtgcatcaacatgaaaagtaagtagtggaaactaaccaccaaatgagctgatgattaaactcaattacaaataagttcttctttttttttctccctgtttccatgaaaccaattatctaacttttctctacctctctctaatatataaccccatctctttgtgatgtagcatgcatacacatgtacatatcattatatatacgtatatataacatatagtgatctcattgtggtattggtgttatgcagaaataatggaatcggtggatcaatcatgtagtgttcctccgggattcagattccatccaacagatgaagagctcgttggttactatttaaggaaaaaagttgcatcgcaaaagatcgatcttgatgtcataagagatattgatctctacagaatcgaaccatgggatttacaaggttttcacaaaatacatgatgcatacttaatttaggatttttttcttcttcttaatctgacaatgtgaatacatagatctgatgagcattaattatgtatattatagagagctgccgaatccgatatgaggaaagaaatgaa

SEQ ID NO: 36883 - DNA, 1773 bp, Arabidopsis thaliana landsberg
agtcatatcttgttattttcatttgcttaatcaaaaatagaaacttgacttggggtttacattcttgcgtctttctaatgttatcatgatgtatcacactgttatttgtattttccaggtgagaaaataacaaagctagctagaaatggaacagtatgagtttcttgagcaaattggaaaaggatcttttgggtcagctcttttagtgagacataagcatgagaagaaaaagtgagacatgctatcttcttttgctgcctcttattgttttacttcaagaaagttttaaatttttgatgtcatgtattggttttcattagatatgtattgaaaaagatccgtcttgcccggcaaactcaaaggaccagacgatctgcacatcaagaggttggtgttcttctatatactctctgtatgataagcttttttctatggtttgatcttagtttcatttctttgagtagatggagcttatctcgaaaatgcgtcatccatttatcgtggaatacaaagactcttgggtggaaaaggtaaggcataccttatgacttgaacaaaagtatatatcattccacaccttttgagctaataaggattttgtattctttctcttaggcttgctatgtgtgcattgtcataggttattgtgaaggaggagacatgttagttttctgtggttcagcttttttttttacgtagattctgtcattttggcttcactatatagatggtgacgcagcctcatattcttcttatgttacagggcacaagctatcaagaaatccaatggtgtgcattttcaggaagaggtgtgcatttcttttctcagtgcttttttcatgaactttgatttggtatagttatcatcctattttgtgcctttttctttcagaaactgtgcaagtggcttgttcagctcctgatgggccttgagtacttacattctaaccatattcttcatcgtgatgtcaaggtatcaatcatgttgctgactagacaatccaaagcttaaagatgatacttcctatatgctaatgttttgtatttttgtccagtgttctaacatattcttgaccaaagagcaagatatacgccttggtgagcttatctttctgttttcttgtcgactcttcttctgaaagaatagaatatcaacctgattatttgccgttacaggtgattttgggttagccaagattctaacatccgacgatctcacatcctctgtgagttttatagttactctatcatatgagtgcatatctaccatgcaccgtgtttcctttaagtcttttctaagattatttgtcctatgaatgtcaggttgtcgggactcccagctatatgtgccctgagcttttagctgatataccttatggttccaaatctgacatttggtctttaggtacgtttttattgcatgtagtagtggattgttaagttcccttatttgctacataaggaagcagtaatctatctcttgaattactaaagtttcaagcataagcctgaaaagattactgcaatttagttttcatgaggtttctaagaagtcttcataaaccataaggaagactgaagagagttctcaagtcttgtgttctttttgttactagatcattctaagttgtctagtgtgaattggatcgtagcgtgagggccagctgtgttatctgattaaatttgtcaattagcttgatggtctttttataaatacgagatgcagagagattgtgaggggtggttaagtgatctgggctggtttgggggtat

SEQ ID NO: 36884 - DNA, 1229 bp, Arabidopsis thaliana landsberg
  unsure (1)..(1229): unsure at all n locations
atgcccaaaaaatgaggatgtggtactaataaattaattattgcactgacaaatttattgaactatagcattaaatcattgtattaaatctctcctggcaccactaataaagatatctaaagaaaaagaaggggaatatattatatttaataattggaaattaacaacacatcaaattcataaggtatctcttgattaatttttattttattttacaatgaattaatttttattttattttacaacgaattcgttaattttcagtatgaaatcataatacatcacaataatttgttaatgcatatgctgatatgcatatgaaaaggttctaaacaacaggagaaagtgttatatttgatttattgtttgtttatatttgtaacaactttcattgtttttcagtgtatgatttttgtcgacaaaaaaaaaagtgtatgatcttatacaatgtacattctcaaatttcactatgatagaatgaaatggaaaaaaaatatctataggtgaagtttacataacatattttatcgtcaactttaaaactttattttttatataataagaataataaactagaaaccatacccatcgaaatgcagaattatatggataaaataatttatgatgagaataaaaataaaatgtaggaataatttatgagatgatgcaatacaatggtccttgggacttgatatctctcactcactctctctctcatctctgaacaaaacagcactctatagtctatagggaatccaaaacattcattcagacctgtctgaatctttgagacacaagtttttgtttcccacagggttgccacttttttccaaattaccatattactctctttcctttttttatcacccatttttttctatttattagtaagattttttccttcaaataataataagtctctacaattcaacagtgaattcttctctccatattatcttattaacttacaaaaacatttcaaaaattattttgaattaattctctgtcgctccagctatatggtcccaacatcttttgtctcagattgggtgtaattaaatgtttagctgtgagcaaaaaaaaaatcatgtgattatttctttgcattcatgtgagtttattcaagcatttagcatatgtagcagtttataaataaaaaactcatagatactccatataaacggccaatcataagggcatcggnaaaaatatggagattaaaaaaaaga

SEQ ID NO: 36885 - DNA, 1410 bp, Arabidopsis thaliana landsberg
aaaaggaaaaactttttttgcactttttaatcgtttcattattattggaggtgcttttcatctgaaaacaggggtattttcgttaccattacatttttttattggttattcatatttaaatacattaagaaaatatagatttatttcttatatatattaactaaaaaaatatatagggtttcaatcttgttgtttggtcagggtaggcatggcattcgattaaccagtcggttttggttcgtttgcgtttagtatcggttagttcggatatgttaatataataaccattcagatattttaggaatttcgatttggttctgttcgcttacttttcgatttggttaggttttatcaaaataaccaaaattaaccgaaactaaaagaaattaaccaaaaaaatacggaaagaaaatacaaaaaaggaaaaatttataaagaatattaaattttggttcagttttgtaatagagtatttgactttgataaatattaacaagatttgaatatgttgattaattaaagtacttgattgttttgattctaaaaataattagtattttgagtttaaaattatagtttggatattatttttgggtattttctagggttttggatatgtcaattaatagtttaagcatcggttcagtttggttcagttttggctagtttggataagggagtttactaaccattcgattattttaaaaattttggttcgaatacgttcggttgttattgtttaataatgcgaccgtacacatatctatggctaaaaatgtttagagaatattttgttgacaaaaataaaaggaaaatttataggttaaagaggcaaaaaaaaaagaaaattttgcggataaaacagaaccaaaaggagttcataatgggtttccttctagctataacatggacaaaaatataacaataaattttagaaaagctgactctataatttacatgtttaggggcctatttaataattcctttgggcctataaagtgtttaaaccatcccggatcaagcatcaattgtttttgtttttttaatctaatattaaattatatttaaaataataataattatatttaaaataataataaacatcaattgttatttttcttcttgagaaaacagagatatcaaagacttgaagttctcgttttattaatcaaaaaccaaggaacaagaaacacctttcgaccctacataagcgtaagtcgataacaacaaatccaaaacgaaacaagagatagacatcggttctcttgagcgtgagtcaaaagaaccaaatgttttgtcattattagtaaccaaataaccaatcaaaaccttaaaattcaatataataatagtgatgtggtagattatcatctttgaaaatgttgcgggttattgagaacaaatatttat

SEQ ID NO: 36886 - DNA, 1581 bp, Arabidopsis thaliana landsberg
attgtcaaattttcatggtcatgtcatcgttactttccccatccgcttctttgttaaactcctcttcttcctctttctcgtcatcttcatcattttcttcctcatcttctccatcttttcttcataaaaaatatgttattatgtgttgaaaacaagaatgaatttaaacatactaaccttaacccaacatagttctataagcttctaaataaattaaacaaactagaccagtgttgtttatttaacattttgaactcaaaatttgatgtctttatatcaaaacttagttccacgtctcctaccaaatttcagattagtccaattatgtttggatgtttgtttgatgcctgtcatatttaaaactttaaaagatttttcttttccaaacagattgaagaagcttagataaaatacacatacaaaaaatgtttgaatgtatatccaccattcaacttaaagatattaataccagaaactcctaaatatatgaacccaatgttgctttaaggagttcatgtcataactgttttctcaccttttctcataactaattatttaagcttatcttatagtgtcacaatatgacctcttcttcatcaagaaaatggttttctctttatatctctatttcttgtcgcaaatctatccacatttatctttttctccttcatttttacatggaaaacatttctctttgttacctagattatgacgttaattgttcataatgcaagagaactctcatcagttaaaatttatcacctttttttacgtcttaccgattctcgttcttgattgaaattggtactccaagaagaacaacgtcttccacaatttcaacacaagtctccatacattttttcctgttagatatcatctaactaaagtatattcaaccaaagttttttaaaagaaccatgtaataacttacgtcactaaccatagctccatccacttacaatttcacgtaaacaatttttactatattgatctaaacatattcccaagacaacttccttccacggtcctacatgtatgttcctcaattcttaccaccacctatacttccttagatttttaagccatcgacaatttctgaatataagcatttgatgttgcattcttcaaaattactgaataactattcaaaataatttgttttagaataccacacaacttgtcccaaccaacctcctgcaacctcttttctcgtaagatttgtgcaattgaagaccaacaacgccaccacttgcacttagttattaatacgttcacatgtatacgatttaaaatccacaagtattggaaaacttaattagtgagatatctaaaaatgttaatcactaaattaaaactttaaaatttgattatttttatattatgtttataataacaaaagattatattttgaaatattttcatatattcaaatatttttcttattggcgtttttccttttactaaaattttaaatagaaaattatcataatccaagtatgttaattcatgacatggctaactacgattggtcgtttaaaatcctatgtggatgtctttagaagtttataaattttaaaattt

SEQ ID NO: 36887 - DNA, 1170 bp, Arabidopsis thaliana landsberg
aagcgaggatcgtggagtatcttgttttcatggtttgcgatccgagaggttggttgttgttttctcctatgaaaaagaaatggagggtgggacctaaaatgccctgtgacgagtgcttcaaccacgcggataaagagtctttggctgtagatgacgagcttttggtcttcgggagagagttgtttcagtttgcgatttggaaatacagtttgaggtctcggtgttgggtcaaatgcgaaggaatgcatcgtcctcgctgcttgtttgcatcgggaagcctcggtgggattgctatagttgcgggaggaactgatatgaatgggaatatactagcatcagctgagctttatgattcttcgtcagggagatgggagatgcttcccaatatgcattcacctcgaagactatgctcgggttttttcatggatggtaagttttatgtgattggaggcatgtcgagccctaatgtatcagtcactcttggagaggagtttgatcttgagacaaggaaatggaggaagatagaaggaatgtatccgaaggttgacccgagcagctcaatctccaccactagctgtatcgggtaacaacgtagcgattcacggcttgagtactcaaccaatatggttaagaagtatgataaggtgaagaacaaatgggaagtgatgggaaggttaccgccgatggtggactcgtcaaacggttggggactggcgtttaaaccgtgcggggatcaattgttggtgttttgtgggcaacgaggtcctcatggcgagggcattgtggtgaattcttggtgtccgaaatcgggagctaaagatggaaacttggattggaaagtgcttggagttaaagagaatgttggtgtgtttgtgtataactgcgcagtgatgggttgctaaaatggaaaccttctttgttgttggtcttcttcttctctattgactggtcttttgtttttgctattgggattataatgcttgttgtgtttgttctgcgtttaatttttgtggtatattggaaaaaaatgaagagaaaattcatttactatgcaagatgtttgcacaatttttactttaaagttcctcatttacttgaatgaaaagagaagaattgtattgttgtgaatagtgaaaatactaaatgtgcgttttggtagtggtgaaagtg

SEQ ID NO: 36888 - DNA, 4055 bp, Arabidopsis thaliana landsberg
  unsure (1)..(4055): unsure at all n locations
caaagtacaagcaggtctccaatctggtgctaaatctcaatagaagaagatggtagaggttatattaatatcattttctagatctttcattttaagatactttcattggaactgggaatacatgtatactattttaggcccatgtatactggagcttaattgtttgtatgtttttttttcggataggtaaatatttgatttagttagattcagaatgtttaagtttttactttgtaggttaaatttgttctataaagcttatttccaactgtaaagacacatttcattttactaaatgtttctgatgaaaatcacataaccaaattttgatatcgaacgggatcaccagtttcggtggttttgatcggatcaacaatggtgaagagaatgagcgtcatgggtcatttgtgtttacacgcttacactcacgcttacgctgcacagatttctttaatctccccatttggggggnaanttngaacatgtgagttgttgttgctcaacatttcgttaaaacggttacgtttgccataagtaactattgatacatttgtgtttatacgcttacgctgctgcacatgtttacgtgattacgtctacgaccatttcaacttcgatttgccttagaagcactatagcttatacattcttccatcatgtccaatcatatatataatattaagagtttaccgccgctgagtcatacagttaataaaaatacacacaatagttacctcaatcaaaatcacaaaaccaatgactctttttctggtgaatgcttgtgattccaatggggtagggtttcatacagattagaatcaggagcaaatggattctgcatgccttcacggttcacctgttccggcaagaaatttgccgtctccactctctgattttgagctaaaccagcactggtgtaggtacttgaatttgctggtttcaaaatgtggttagagtttggcggcactctagaagaagcactcgcagggttgctaaacggtttgcccatgtttggtcttgaccaatgcaaagggttcactcctgtcactcttttcacagtttcctctgccatcttaacctgcacaggttttttatcaatgcaattaacttagttattaaatcataatcttgggtgttttaaattcttaacactcgtgagtcacaagagtacctttgttctcaaagtttcgatatcagctcttagaattctgttgtcaacagcagctgcatcatacttatgattcatgtcactaagacgattaattaaagttgaatgctcggctcttaattggcctacctacaattggtaaaaactttacctataaacccctgaagactgttgaaaagtaagaaagactcgagaaatgtataaatgtatgagcaactaataaaagaccgaacctgtgtatcaaattcattcatttgttcttgctttcttctcctagagcgcctagcggattctcggtttgagagcatcctgggtaattacaaaaaaaaaaaaatgaatcaggatgaccttcgaaaaagttaaatatatagagcctgactgtttcctaagaacaacagtcacaacataaaattgactgaaacattcctctactagatttcagttctttctttctctttagagagagtagaaagtagaaactattaggtacaagccttttcccaaaagcatgtctatatctatcagcctcgagattcagaacgattaccagaaacattctaaggtacaaaaatcaagatttgtacctcctagcacgcttcacatcagtaggatctccattatctgcgtctccatcaagatcatcgtcatcagaatcatctcgtgatgaaatactagtagtttgtctggctggaacatcaggtttcttttgcgtgcttgttgtgggagaaaatctaacagatgaagcaccaggtgaagtttgtgccacaatggagcctagataatttcaaaataatcccattatccactaactgaaaaacatttcatccaggtacatatcacaagaagcgggaaataagaaagctatctagtataatgcactaacttacactaataagaatggagagtcaaaaggctaagaattctcatctaaacgcataatactacgtatgccttgtttctttcttctcagagaaaaaattgactcgactagaacagaatcaaatatgagtgaacacagagaaagctgtcatctccaaaacaaagcctacttatcttcaaattcccttaaagtcttgagtttactgagagagattagcagttaattaattgtctaatcaaattgacaaacaaatctcgatgaaatgtttgctctctatgtaatctaaacattgacattgacgagagacaaagctagagagagtcaaaaaaccaaaaccaaaacaaagcaacgatacgtgaccttgagcttgtttttgattgctagctgaagcactcgaatcttccggtttcacagttcccacctgaagaaaatcatatcaaatcaacacacaaccaaacattccttattgttgaaatcatcaattcctttaatctgaatacacataagaaatggatctaagagacgtacacgacgagcaacagcagcgcaagcaagctcgagcttgctcttaagaatcgcatgacactgattaggatcaacaacaacaggagctgaagaatcaaccggatcagacgacggagcacgattccgattcttcctttgatcatcaacagggagccgtcgatgattctgcggtttctgaatctcaacaacatcttcggtttcgtcaacggtttcttctaatctcgaaagagactgaaccggtggaggtgatctctcgattgtgttagtcgtagggctcgaatcggaaccagacaactcattgataagcctgtggaacgcccactccgattgacttcgagtcatcccatccgccacgttctgcgtcggtgacggagtcgatgacgatcccggcgacggcgccggagcgggaacaggccagaaggattcggtcaaatcatcgacagagaagacgatgtgcatcgcttacccaatcgcctcaaattcttcttcttcttttttctctctctctctctctctctcgctctttccttaatttgtttttgtcttacgtggagccgccattattgattaggatacttgacacgtttctgtattgtattggattagtactaaccaacatatcttttttctgttaataatttaataaaaatgcaaattaaggcattcaaaggcattttaaatttctactttagttgatgtgtgtcatttactttgtgggcaaaagggtaagaataatgtgttggctttatagataagcagcttaggtttcctttgtcttttttaactccttcctctcattttcttgatttgatagctactctctcttattcatatcatcagtaagatattctcaccacatatgatgcatgagtaagcaagctttaaacaagtaaaggaggaactcagtgagactgaagaaagtggtaacccaaagaggttacaaccgaggagctgcaaacatagcctgacttcaagagacccgaggggataaaccgaataagaatcaaagtcacctaagtcagcttatggtaaaaagaaggtaagagtgtattcattggaaatcctatgtaacttgatcataacagcgttctttgagttaaacattgtgaatattagattatgtgcctatcatctaagtttcaatgaaaaaagaaacacagatatttatatactactagcatagctgagcaatttcaattatccatcctgaaaactcatacataccacacatagatgctaatacgactatgtgaacaaaagcaataggaattactcacgcttttaacaatctcttggctcagttgattccaaccactagataccaaggttcttcttgaagttggctttgtatatctctgaaacagcactggcagtatcagcaacaccggttttgatctccgatatcttcgaatccatgtactctttctgtttcgatatcgaatcgataagtgcaaagagttgtgcagcacatgcttggacttt

SEQ ID NO: 36889 - DNA, 2646 bp, Arabidopsis thaliana landsberg
aacgagaaatgaagcagagtattgtcttcatttcaagtttcaaccttcgttttgattcttactataatatctatgacaagaaatctgtctcttagtaagctcaaggaaatactcattatgaagagacaggagtataggatcaatcctgataatggtgaagctcatcaacgatttgttacctctttaataactatgtgaaactaagttctactacatgatttcgtttattattttgaaatcaaagactaacgcaaaatgttgaattgtataaagtcaatatctggtgtaaattggaagaagggtagagagggtttggtgggatcaagaatgatctgattctgatgtgaacaagataagattcgaatgtttttaaaacccacctaattaattagcattcatttatttcatgtgaatcagctgtgtcattctctatggagtatacattttgactttaacaccactctttcacattctattatcgtctaattatacaacgtatacggaacaatgaaaatctaccaaaatgacgaatcgtttctgcaattttttgtagtatccaatgattgaattttttttataagatgacgatgaatgtgaaatcttgaagtgaaaaatttgcaagcactattaatttgggtgcatacaccaaacaaatcagtcatgtctatttatatatttttgtcactactctttaaataccactatgtccctctatataatcatctataataaaaccgtaattgacgctagaaaaatctcttttattttaatcctttttccatggctttaagaaagcaacgttaaagaaaagtagggttgtataatacaaagtagaaagtagtagtcatgtgcattgtgataaaacaatcaaatcgtggatccacttttattaattagattcgagcctgagtgaccaatagttactatctcttgccccaccaaagttagtaataacaaaaatataaacctaatttgtcattagaaagctctaggtggttgttcgttacatcatacaaaccagcgcaaaaaccgttaacattatcatatctatgtattttttagaacgaaatgattgatgcgttgtgcacacgagattggtcactaagatttcgtttgcgtaacatatccactcctctctattcatagactatactctatacatactgataacatacaaacagttatattgaaatgcatttaaagtatttgttctcttatctataagaaaacaaactaacttgatatcaataaatgaaaaaacatatatcgtgaagaaatctgtatcggaaaaaaaaaacagaaattaaaggattgagtcaggtatctcttaacggattcctcttctctaccacagaatctgcgggaaatttcaacggtcgaatctcataaattactaaagtacccttttaggtccctctgacaatgacacgctggatcgtgcgaaatcgacgccttaactgtcggtgggtcctaatttctagtggcatttcaccgtaaataagaccaatggcaaagggactaaaccggcaaatagaactttagaaaacaaaaagagaaaccacagaaagcagtttgcttctaccttttatttttgtctatataacaacaacaacattgacatatcaattcacacataaactcactctcactctctcactgtcggcaaactaacttattcacttttccggcactgattctgctcgggaaaaacaactccggcacaaaatgcagctttttccagtcatgttagccacactctgcattgtcctgcagcttctcattggctcgtcagctttggctaccacaaatcgccacgtgtcaaactctcattggcttcccgcagtagctacatggtacggaagccccaacggtgacggcagcgacggtaattataagtctataacacataattaaccacacttcacagtctagtgattcctagttaaacactaacattaacttatataccgcaattgtgtaggaggagcgtgtggttacggtacgttggtggatgtgaagccgttacatgcgagggttggagcggtgaatccaattctcttcaaaaatggtgaaggttgcggagcttgttacaaggttcgatgcttggacaagagcatttgttcccggagagccgttaccgtcataattaccgatgagtgtcccggctgctctacaaccagcactcactttgacctcagtggtgccgtctttggccggttagctattgccggagagtcagggcctctccgtaaccgtggactaatcccagtcatttatcgccggtacgtatattaatattattctcattattcttgtcatttattaatgtttatgctctttcaataactaactcgtgacagtgcacgagcatatagaaaaataggaattatttaggtaagaggctaaaacagagttaatataattattagatttattggaatgggtgtgaatgtattaaacaaaagaggtaactttaacggcgatctcgttttgtatggtcccaaccatttcttgaccattgaccatttgatctcttttttctcactgatataattttaccttctttctttcttttgcataataaaaaaaggactgcatgcaaatatagagggaaaaacatagcattccatgtgaacgaaggatcaa

SEQ ID NO: 36890 - DNA, 2786 bp, Arabidopsis thaliana landsberg
  unsure (1)..(2786): unsure at all n locations
caaatatatatttacgtttctacgaaacttgtaatatacttttcttttccgtttttggtctctaagtttggctcaattaaattactgaaagaataatgcgtatatcaatgtattatcatacattgtagaatgtagattatattttcttagttctaagaaacaattaaaaaaaaaaaaaggttatatgttactgatggaaaatcttgtttaggtaccagtgaacaaactcgtgatgttcaaattagagattcattggcgaaacaaactcgtataccaattttgggactattttagtttgaaatgtgatttatacattttattcgtatggtttgggtatataaaatagaaaactggttaaccataactaagtaacctgaacaatgtgtatcattaaagagtttgaacatgatcaataatactccactcttaccaaatgtaaacccaagattggtttttctcttctttaaaccccaatttatttacattccangactgtttaagctgaaaactttttaagagagtgggttggcaaatcagtcgagagttagtactgagtaaaaatttccataggctcatttctttctctcatctccgagatggagatagatcggtcaagacaggaggaacnccgccgttctctgcagtctccagagcggtatctgtgtggactgggtgaattaaggattgaactctcaagaagtagctctcgctctgaggttggcttcttatgtaccgagcttctgatgtttctgtgtttacttgtgaatgttgttcggttcctgagctctggaggttggataatgcactgagatcgaggtctgggaaaaccgagcaccggcaacggggacatttcacgtttaaacgcagccactggtctatgcactccacatggaaattatgggcgcaaggtaaacctctaacctgtaagattcagacaaaatccgctcaatcaaaggacagcattgggacgagaaaagcacacaagcacagcatggataagaagttggatccctagcaatggagatcatttataaaagtgatgtcttagtacctcatggccgatgtggaactgctgtaaacacattcagcatgtaccgcagtcatctggcacagctgttaacctgaacttaggaagttcttgaatgagcgcctcaacagcttctgnnnnnnnnnnnnnnnnnnaaccatcaaatattagatgttttggaatcatgagacagagatatgataaatgtaaatttggacataatcacatcctgccaatgatctcttcgtcgacatcattaacaaagaagatttctgcctctctacagactctgtgcaacaggtactggaaacataaatgctgcgaatttgtttccctggatgggagagattgaaaccacaggcttctaggcacatatttatttaagaaaagttactcgctgcttagcttgctgagaataaatgaccagacttgcctgggctggagtcaagtaaagtccaggatgatatgtagcagcatcttgacttatgcctctcatctcttggcctgcggcttcgaatgcccagtcaggtaccctaatcatgtcaactaaaatctggggacaagacacagacattgaaaaattactcagaagtgtcagagactaattgcaactaagcagttagagacaaaaatcataatgacaaactccgaaactatctcatcgtgtaaaggacttgaagttgaataatcggatcctggaacttaccccgaactctgaaatcggaattccctgctgagcacgtaataagtgtacctgtcttcgtgtcaaccactatcaagtaaagtccattaagtggggtgccctcttcaaaccaaaaaaaaaaacagcttgatataaatctacctttccgacacagatgaaagcaatgcagaggaggccacagtagctaaacatcaaccaaataagaaaaccccatttctggccttcttcaggtaactatggcaagataatacatactaactcagcaacagatttccaacaagaataatcatatgccatgatcggaaaaactacttacacaagttttcgactttgtaaaccattgtgtaccaattacagtccaagcccacagaaatggatacagcagcagagataggacagacaggacaaccactctcccacaaaacatggcgttccgctgttgacttccaaaatccctaacagatgttcataccagaaatcaatgtgacataagaaaccatatattcataaaatttgctacctagagagatagagaaacgttgcaactagctacttctaagataaagcttgcaactagaagaggctattcgactggagctacaaagaaattctatgcttcccaaatagcttatatttatcataatctaatacttctcaatgaattaaacgcctatctaaggaataaggatagcaaagacaattttacgcaaaaaaaaaacttgttcagataactctgggaaaccggggaagattccaaaaagtaaaaacctttaaaactcattgtaactctagaactagggagatttagatggaacttacaagccaagtccagaagcaagaccattgtcaacaaacatgaagacacggaagataaagacggtggtgtaatcgacctgaagtcataggagacaaacacaaatgaaactgaaactgataataagaaagagcaacaaaaagaatagaactgaggcagctaccacaatccatatatgcaacgggtattcacaagctcgatatctgttccagttgacagctacaatgattctacgacgcaaa

SEQ ID NO: 36891 - DNA, 2820 bp, Arabidopsis thaliana landsberg
atgaatttaccagtaacggcttgttttcaatcagctgatatcggccacaacttgctagtttcatggccaagactaaccgtttgacctgccatctgattgatgcagtattgctgagctcgaagaagtatgttgcaaagccatattcaggccgttccattactatactgtgtcacacaaaaagatccatgaaaatttcagtttagccgcaatgacaaggaaaagagagttaatttaccggttatgtctctcgaaaacgaatatgaaagactggagatcgcggcaccagccccactcaacaggccatttgcggaactgcaaataccgcgccttgaaaacaagaggaagcaagttaagaataaagagaaatatataacaattcgagaagacggggatgaggattttaacctgttcgatgagggagaatagacaggtcaagcaatagctagttcttgaagcttttgagaaacttgaattaagtagtttcgtgcccgtctcgcgtttgtagaaaagctgataagacgattcaatcttttgacacagtggggaaaaaactacctttgaaacaaaaaaggattattttacctgcgagatcacatcttcgaactccgagaaaccctcattgagaagtgaatcatctgagggaacatcgccaccttcattcccataaagcctaagttcatcaactgttaccccttgttgaatcagtacctgaaaacacatgtgctttaagaaatctaatttgcagaagttccattagattctatttcttttagaagaaaaccatgatacctgcaaaagaccaggagcatcttcctccaaagctgtctcaattgagtccctgaaatggttatttcatattataagatcacaaaagaaacagagataatcaaaagagagagacacatgaggcgatggatacagcagagagactcacgtggcggttttcttccgcttccaaggacgaaataccctcgaaggtttaacgtactcatcagatgtacagaagctaaaccctgaggacggtgaattaagatcttcatgatgacctgagccatgaaaagatcgaagctttaatcgatcaattaatttcatgtggtctataatatcttcatccatttcactagcggtctccgcttcgtttttcatacacctaaaaggtgtaggagcagatgtacaacgattcaagcgaaagctcagtttcacagaatctagctcattttcatcaagagcttcaccatgggtttctacctctcttttgaccggtatctgctttgaggtaacaggatttttctcgtcattgtcctccatgacgcaatcagccaaaggatcaacctttacttgagtagactgtatttcattctcattcaaaggtagaggattcctttggactcttttcactctttttcttggatttttgttgctgctggatacctcaggtagactggcttcaggtgacaaatcaaaggaccgttcaggagatattggaatatcactctcttgaattccaccaagctgacttccagattctgaacatatactaaaatttctacagaggacagaatcaattttctctagaaagccgctgaattggactccagaagacgaagctatcccattttcgcatgaaatctccgcttttattttataaagttcagtttcatcgcaatctttagtattatcctgtacttgtaagcaaacacctagttagcccaaatagattccaaacaaaaaaaattcaaaacccaagggaacttgtcactttgattacctctacgttagattcaggcaaccttatagcaaccctgcaacaacaacaagaatggtgtataagagccgtgaaacactaaatgaacgcaggcgacaaaaaaaagtggaaaaccatccaccgagcttgtgacattataagttaaaaaataaaacacctttcaagaagcattttgcgccgctccttcagtgtgagatgttcaagatcatcactcctttcagtttctccgactctattaaaattctctacagcattactacaacatcctagaatgttgttctgtggtcttatgtttccagaatctttaagaccttgactacaaccaatgttcatagattccaatatttccgtgcttacagattcagtagcatcacaatttgacactacaccctggacactagatactcagttctctaaacttacataagtgaaattgaatttaacaaaaacaaagacttcgttaccagctcattgaagcaatcttcttcttctcttttcaagacactatcaacattcgatctaagaaacaaatgaaaacatatgtgaaaacaaaaacgaaaagtgaaattgaagaaaacgtaaaccaatgacagtactcacgcaggaacataagcagcgatacgttgagagactctttcactcgatagcaataaactccgccgtgacgtcaaggggagatggtcttcctcaaggaatgtaaaatcagactccgatgaagagatgttggtaggttcatggcacatcttatacatttgaattagagtaatacagaggaaaagtacatggagactgaagaaaattgctataatcgagatttctccaaatttgctaattgcgtatagagctacaaaagcgaattagataataagagagaagggtttgttaagaaggtaaggagaatgaagaaaggaatctcctttggacatgaacacaaggagaagaatctcagattgtcgaaaccctggtaataaacatgaagaagcttttgtgtcactcacttttatgaacaataaaaaagttgtttttagccaaattgaaacataaccagtgaaacg

SEQ ID NO: 36892 - DNA, 1403 bp, Arabidopsis thaliana landsberg
  unsure (1)..(1403): unsure at all n locations
tcataaacccgagtgaattacgggacgacaaagccggcaggatataatcctccggtacacaagccggctaggaatgaaaccccggacactaagccccgacatggggaaacgacgtagaaagacaaaataaaacatgattgatgattttacacataaacatagttctctctttaaccaaataaaccaagatcgaaaattaactggcatcggagatttcgtcggagattgagacacccactttaagaaaatttgatcttcttgcctcacttgataattaaaaatcttcagaagaaaaaccttgggatactttggatggcagacggtggaaactcagctaaacatgcagagaccgtcgagaacgccgtggccggagatatcgactatgcgacttgaaccggtagaaagaacccaaaatctgggcggatttcgccctagatccgtattgttgaagctgtgtgaggaaacccaaaattaggtcacccaacccgaatcaccacaacaccgacagtgagtggcatagagcgatcgtgattaggccagggagtatttagtcagagaagaaaaccacgctaatttgcaaaatcaccaatcgaaactatagatctaataagagaaattgaggaggaaacgaaatcgaaaccaacccagaaatctccttaaccacaacttaaagagacataactgaacataaaccaaaaagccaaaccgacgtcatgaccgtggtggctcacaacgccggcggaattgaagcggtgcttttgtttttaagagagaaggaagaggattattcttagagaaagaaggcaaccctgtaacaaggcgcataaagacatagcttacgcagtatacacaaatattacaacccttttttttttttcaattattcatatattaacaataacatgggattacagagtaggaaacgagggcaatcaatctacagaaaatcattacaacaacgtattgcatttatcaatttcaaacacatactctagccaaaaaattaaatttgtgctacataaaattgcgaaaatcattacaacaatgtatttgcacttacaaataggaaatgagggcaatcaatctacataaaatcattacaataatgtattgtatttatcaatttcaaaacacatactctagccaaaaaattaaatttgtgcaacataaaattgcgatcggtccgcaattgtgacacttttagctatgaggaaaactcattggtttgcacatcgatcttctagtgtcacctttcaacagggatgaggaaaacatgatggaatataaatgccagcgaaaatttaacccccaaaaactaagttggcggtattctaatccccagaaactaaatctcaacataggggagataaagcaaagacatanaactaaaacgatctaaactt

SEQ ID NO: 36893 - DNA, 1779 bp, Arabidopsis thaliana landsberg
cggtaacattgtctacggagttaccgtcggagacaacgccgttaagtatacgtttaccactagttgtagtgtttgtgtgtgaaacggcgacgaagaaaaataaggtaactaaacgtcttcgttaagtaatctgtcttagtgatgtgaattgtacattttgcttatacgaatagcaaatattacagattcctgatgttgtaacgaattttaagaatttcaatatgtatactttttttttttattatagttgaattctaaattctattataagttgtgatgattttttcgaagtattttttttgctgattttgatgcatcttctgatcctgtcaaatcgacttttgatgactttttcttatgtatatggtaaagtttgatggcgatggagattaatttttagttgaatagattaggctcgttaatgttttgtggacgttgtgtgatggtgtcattgtccatttgtctccatctttttattaaattaaatagagagatgcattttatatagagactattctacaacaaataagacatttcaaaaagataaattttgtggattggattatttttagtcacatctatggatttatagataagttctatttgttggtgtctggcttaaaaaaatgtttttcgtgcactttaaaagcccattctcctagagttttgctacattgaaataaagttaatacataacgttacttacaagaatttagaatccgtggatattatcgtggatattcttggattaccgtgaatattcttggatcttgaattgtgaaaatcagaatccggtctagagacttatttctcgtttatctgcatttccattcatttaacttataatgttttccattaaatttaacaaataaattaaattttaatatttttctttaaaacttattatctaagttgggaatgaaaataatataagaaacgttagacgaaaaaagtcagtcaccaataagactttggatatcagtcacatgatatatagtagtatataagcaacgttccatacttctatctcaaataaagttgagaaacctaactttggatttcctttgattttcaataaaaataaagtggttatgaacgtgctgtgtgtgctgttcacacaaaggcactagaacgtccgagtaatgctcagccaaactcacataattttctgaaaaatggcctttgctacctaacttaaaaataatttacaacaacggaaactttagatagttgatcattgatcaatagtgcgtgcatcagtgcatgcatatttggaatgaatcaatattgattacatatgcagtggatctatctcaaaataatactgatcaactatttataatataattcttcattcaaacaaattaagtgttttaaaaatgttaataattatgatctctatcttagacattttgagtttatgtgttcatgactatatttagtgtagttccatgaaactagggttttagtagcgtctttatgttcgtctactaacgggctacactattttatgttgggccgaatttgggataagccttctacaatttgggatatcactcatcacattttacatattcctactttcttccttagcattgagaaacaaacttgaaaataacgcctacttaaacctagttttatggagctgcacactaaataaattgtttctttttagtaacaatagtggctagacgtttaattattaaacctttacatttgaaatgcttctcgattgcgtgaaaagctctgaccacattcaaaacgtaacggcacttcttt

SEQ ID NO: 36894 - DNA, 1858 bp, Arabidopsis thaliana landsberg
gcccatggcttccaccatttctttgcagagtttcataggtggagggaatggtttaggatctctaccgagaataaaagcgaaatcgacgtggaaaagacgaccatcatctgttaggaggaggttgtccaggtgtctacatatcaaaatcaggccatcatcacaatttacagcaaattggaaattggaaaaaattctcaaaaaccataacgggatcaagttttgcaccatacctgtctccaatgccaagtatatatgtgatcacagaatagcccgcacagctttttataaatgtatcaagacaagtggctgttatcccgaaaggtgcatgctcatcaggatgaaacttctgcagataacttgttatgcttcggtgctctgagagaatctaaacatgcaaaggcacatatcacaggataacgagattagctactctaaaaattataagagagggtcaaaattacttaggcatgggggcaatgggtttaggcactgatactgtacctgagccaaagaacgggacggtatgaattccaacatcccttcgtcatgtccagttgctaacaccttataaggcgttaggcacagatcaagattttccagcttaagtagtctatccatgagccaaaccatttgaacaacctatcgagtaattaaaaaaaatcacaacataaacaaaaattacagataatatgatgtaatgaaccgaatataccagttggtcttgccggagatcatctcccttcttaaatataagtttgcaacttcttccttcttctggtgttcggaaagtaaggcgcagaggatgcaatgcacttttaaagagtgatgattctcctgccacaatcccctttatgagaacattaggggtaagcggtgatcgaataggctgaaagaaaaacaaaatccaaaagttaatacacaagggttagagaaacttgactcagacattcttggataacatcacatttaaaggcattagttaccagttaaaaccatagtgaaagtacctcttcgaagtaggtaagttcgctaaggagtccacctaaaagctgcctgagcttctcaatttttttctgggtgtttccacgtacattcctcacttctcgtgtaatggaacataactgagcagtcaattctgtttggcgcaccaaactttgccacaattgatatccatcttcgccgttaacaccaggcggcagctgccatcaaagcaaatatcagtctagatcagctaaacagatctcacttgacgtagaaagcagctcaattccttcagcagtttgcttatcattcttggacaaacactaactaaaagtaaggactatcgtattatattcactgcatcatacattagcttttcaagagacaaaaacccgaacaatctgacactgttaacaatgtatatcccaggttcaaaaggtttgcaatctgactattacaaagaaaacagaggcaggaggaagattgatctatgaatttaactcagtgaaaagaaaacagggaaagaaaagggagtatatagtaattaggtccacaccttgattatattctcctcgagtaactcatatgtactgtaaaatctcttggcatagacatggtcatgaagttccacagcaacataccaccgaagaaaactggccaactcaatattctgtaatgctaaaaaatttgaaagaaatgtaacggaagtcaagcaatgtaacaagtatataaaccagttctacatagaaaactcaacatgatttcatgtctagatgttcagcacatacccctctggacaaggaattgagaaaggcaagatctatcagagcgttcaaaacgaagagcctgaaccagttgaagcaagtaacacaaaagc

SEQ ID NO: 36895 - DNA, 4309 bp, Arabidopsis thaliana landsberg
  unsure (1)..(4309): unsure at all n locations
tggtattactaggtactagcccatgaagataaaagaattcattttactttatttcattctagtatatttcttgaacaattctaatgcaatttcagtgtcttgactatactcttgatcctccaatcgaatccacaagattttctaccaaaaccgctttacgacttacacctcaatcgtaaccatccatgaacttaattcggccaaaatcgattattctatttggcacgttatgttatggactgttcatatacgtaccacgttccaaactcgtttgtatctaaaaagggaaaattatctcacattagtgaattttttttacttgcatcaactctattactatatactaatatatattaccattaccattttgaacgcgttacatagacattatttagtcattagtcaaatccttttactatataatcccatttgaaatgtaagaattttgaatgctgacagatgcaaataaggattagcatacaaaattactttgtaacccttatttacgtgaaaaaaagtttagcctatcngttcactattaaaaacatgaacatgtaaaaattgatttaaattgaattttctatctttcttgtatcaactatcaagtaatttgcaagtacctaagtaaaagaaaacaaataaacacaacgatctttattactatatttaaaacaaataaaagatagacaagtattaatttgtttatatgcatatcagtcctttgcaacgtagataaaagcggtattatgcaaataaacttttcttttgtcaattgtcgtcatcatgcaaataaattttcaaatatcactgtcattattcaaatttcaaaccctaataaaaaagcaaattaaaaaaatggtttcgtacgacaaagggcttaacgaaagatgataagaacaaacattaataccgtagcttttgtatttctaacatcagtaaaaataaaaaaatcagacctcgtaaccaatgaagctgccataaaacctgagatggtgtagttaaagagggaattatgatttgtgtcagctatcaatatcatcataattagctgaaattatatttatctttaatcatactactagtataatattctgtggagtttttatttatttatatttgaacatttattatacaaacaaattatatacaaatagtcgtaactcattttatttttctcttcttcttttgttattatttgtcaaaataaatagtcctttatattcgtaattcgtaaatcagtataaattaaagcagaagtgaaaacataagccaatagtggtaaaaactgttattctatctctattctggttctgcaaaaagcatatatcaatttataaaaaagtgaacagactaatactagtagagttaaaatagactgtagttaagttaagaaaatgtacgatcaacagcccacaccgccacagatgaaattacgtggaacgtggtaaaaaagccacgacggtaaaatagtaatttaattaactcttcgattttccttttaactctgaagagggcaaaatggtcaatgataatttcgtttatttagtcataaaaaaaccgggaatgcaaagagatgagggcaaaatagtcaaattaaaaaaccgacgatcttttagattccttttaaaacctagacgtcccactctcacacaatacacacaagtaaccagttttctctctcattttctcagtttttctctctctccgtttttgaaaagatttttgtttctactttgggaagctttccgctacaatgtcaaatcgtggtggtggtggtcacggcggcgctagtcgtggtcgaggaggtggacgaaggtctgaccagagacaagatcagtcttctggtcaagttgcttggccgggtttacaacaaagctacggtggtcgtggtggttctgtttccgccggtagaggtcgtggaaacgtcggaagaggtgaaaatactggagatctgacggcgacgcaagttccggttgcttctgctgtttctggcgggagaggtcgtggtaacatcggagatccgacgttttctgttgcgtcttcgtctaagacggtgtctgttgcttcttcatctaaagaggaaagtaagaatacggaggtttctgagaccatgtcgaaccttcagattacttcgacggagacgaaacctgaaatgacgtcacttcctccggcgtcatctaaagcggttacgtttccggtacggccaggacgtggtactttggggaagaaagtcatggttcgtgcgaatcatttccttgttcaagttgctgatcgtgatctctaccattacgatgtaagtttccggccattttttctcgacgaatctgtacttgtttgtcgtttttatgtgtcgatttcaaatattgtcgtttctatttcatcaagttatagtgttttttgctttttgttgttgttcagtttttgtaaaccttgtacgtcaaaagatgaacttttttttgtcgtttgtgttcatctgaagttgttctttcagtgagatttctgactgaaaatttgttagtttctgcatcattggttttttttttttttttgctttcattcgacgaatatactgttgtttgttcctttttattgctgatctgatgtatttcacaaagttcctagagagagttttgacatgatgaatctgcggttgtgacttgttttagtcatatagagattttttggctaaaagttattgttattgtgttataggtttcgatcaatcctgaggttatatcaaagacagtgaacagaaacgtgatgaaacttctggttaagaattataaagactctcacttgggagggaagtcaccagcgtatgatggaaggaaaagcctctatactgctggtccattaccttttgattcgaaagagtttgttgtgaatctggcggagaaaagagctgacggttcctctgggtaatgtcttgttttaactctttgtgaatgtgtttgtatcgccttgtttttcatagttttttttggcattgtgactccttttggcaggaaggacagaccgtttaaagttgctgtaaagaatgtgacaagcactgatctttatcagttgcaacagttccatgatcgtaagcaaagagaggctccatatgatactatccaagtgcttgatgttgttcttagggataagccctctaatgagtaagaaatctgaaatttgcataaacttcagtattgtcaaaagctatgcataaacttaacatttccctgttttgctttctgttcagttatgtctctgttgggaggtcttttttccacactagtttgggaaaggacgcaagagatggtaggggtgagcttggagatggtattgagtactggagaggttatttccaaagtctaaggctgactcagatgggtttgtctctgaacattggtaagaatatgcttaatgttatctggattggtgatgttgattaattcttataaatttatttgatttagatttgaataattctactttatggttttaactgcagatgattttgattcattatagccgtgttgttttcttatgatgcagacgtttcagcaagatcattttatgaaccgattgttgtcactgactttattagcaagtttctgaatataagggacttaaacaggccacttagagactcagatcgacttaaggtatatatctgacttatattccaccattttaattattaatattattcaagatgatgtcttatatatgattcttatcttgaaaatcatatgttggtatttaggtgaagaaagttttgaggacactgaaagttaagttgcttcactggaacggcacaaaaagtgccaaaattagtgggatttctagtctacccatcagggagctaaggtgaagatgcttactttagcagggtgcataatcgttgaactttgttttcttgcttttcttggaagaggtttctgatctttggttataaagttccggatgttgcctatgttctaatcattctacgtaccgtatggaggtcacttcatagatagactgatgaccaacggaaaggggtgttttaaaagcttcaattgttacctcatcaacggatggttaatccgacaggggatggggatgtaacaattaaacagccagcgggcgtatataggcaccttcgattactgaaaaaccaagcctgccgtagaaggtgtaaactaaattgttacagcttggctttgcaattatcttaccctactggaaaggttaaccgggataaaatcctggtcctttttattgctttgccggatccgctaaattgaaagccccgcaccagaagtttttttaaaaggattcaaaa

SEQ ID NO: 36896 - DNA, 1942 bp, Arabidopsis thaliana landsberg
gggtcagaaactgttacatacatgctacagggaggtatcattcacaaagatcctaattgtcataaaggtacaattcaagccggagatgttgaggtgaaaacaaaaacagaacacaaacaaagaacactcgaatactctctgagttttcttgtttcactcaattttgactttgattgacagtggatgacagcaggaagaggaatcattcattccgaatttccggaagaagaagtaaacaatggtttacagctttggatcaatctcccttccactgaaaaaatgtataagatcaatctttagtatcatctcttctcagaaagagttccagtcttgaatctctctgttccttgattttgacaggactgaaccaaaatataaggaactatcgagtttagacattcctcgagcagaagaaaacggagttgaggtcaaagtcatagccggagattcaatgggaatcaaatctccagtctacacaagaacaccaacaatgttccttgactttaccctcaagccaggatctcaaacccaccaaaccgttccagaatcatggaccgctttcgcttacattatagaaggcgatgaaggtgttttcggttccttgaactcttccgcaatatcggcccaccatgttgttgtgtttgggccaggggatttagttagcgtgtggaacaagtcaacttcgaggtcattgaggtttttgttgattgcaggggaacctatcggcgagcctgtggttcagcatggtccctttgtgatgaactcacaggatgagattgaaatgacaattgatgactatcgtaatggcatgaatggctttgaaatggccaagcattggaggtcagagtgaagagtttgaagcaataaccagagagacagttatatttagggtttcttatttatttcacatggttttttaatcttacattctatatcatatcattgtcacgtaataaaaaaaaatgctacgttttagaaaattgattaactatagttcaagcttatcactttcagatttaaagggtaaatatttttcacaaaagaaaaatcacactcatggcttaaagatagtaaaaagaggcatgagtgaatcctaaacaacttgaggaaccagaaaagttctttcgaaatacaataaaatccattacgtcgatgacttggaaacatggttaattaagtagaggacaagctgaggttatcagagattacttgaatcttgcacttggttttaaaccttctcaagaaaccatctgagaccggctaaatacagagaagatgagcttgagttagaaattcaacaaaaaggctttaaaaaaaagaagacactagatgagaagaagatagtagagaaacttacttgtgggataaaagcagattgtatgtccaaaccatacaactttttaatatcaaggaacaaccggagtcagagatttatagcaaaaggaaatgaaagttgaaaaatagggtttctgccaattctagccctaaaaatttggcgggttcgttgagttccaaaagccggatttttcttttcaagtgtggtcaagttctcagattttgttgatgatgatattctctgtgataaaggatgagttgtttcaagagtcgaatcaagttgtggcagtttcgtctgcgtgaagctaactttgacaacgatagatgtgactgacatcattataaatggaaagctttttttgatatgttaagaatccaaaaacattattaatgaacaagcttgataccaaaagatgtattccgattgaagcttctctttttcgtcgtaggaaaccaaaaagacaaatcaaagcttatacagaaacagaagaactgaaaatactaaacgttacgttaacattgttgagctaaccaacacatgcataaatataaaacataaagcctcagatactattacatacttaagaggcagccgagacacactcat

SEQ ID NO: 36897 - DNA, 2451 bp, Arabidopsis thaliana landsberg
aaaaaaattgacatccattttattccatcattggacattagataaatctcacagtagatttgagcagaaagccacatgagttgtttttggtttcttgttatgtgtgtgttctttgtgagatggggtcccatgattcactctcttacccttgctcctcagaaactccatctctatttttttaggtatgatttgtttttctttagataagttcccccccccccccctcaaatatacattaataccattggtgatacaaaaccatacaagtttgttataggtaaaagaaggtataagcaatatcggaatagttaaaggcggtgaaaattaactttgaaaataaagactaagaatgatgcttttggtaaaacttttgtgattggtaattacttttaagactctgattggtgatgacagaaagaacaataggaatatgaatgaaaaagaacaaaaaggaacaaaaaaaaaaggaaaatagtcataagtaggaaccaagaggaacataagaattgaacaaaatgattatggtaaatggtaaccaaaaaggtgaactaatatttaacataagaattactaaaaaaatcatttattgaattttgtttattaatttcatttaaaattaaagttctgtatgaatttaaaataaattaaattataaatttctcttcaaaacatttatttattttatagtaaaaatttaaattatattacaaatttaaaataaattctcactttaaaacatttatttatactaatttaaaataaattcataacattcattaaattgaaagtttgataaaaaaagtatatatatatatcaatatatactaaagatatagaaaatattatatataaaaatataaatattatcataaagctattctaaatttatttaataaatcaaaacgaattttattcttttgctcctctcggttcctgtacaatgttggcgtggaacaatcttgtactatcattccctttttctgaaaaatgatgaggaaaaatgtaggatccacatgtctgaaaatggatcaaaaattccttgcgaatggtaaaatataccgaggaacaaaaaggaacacgactttgctattcattgctttcctcaaaagtggttaccaatcggagccattattttcttgcaattgctcgattcacaatgaattttggattcaactaaaaaaaactctttaaaataacaaccaaaacaatgaataataaattaataacagatggatgtttcacgcgtctgaatgggctagagataagcccaataataacagcaggtaccaaactatccactaaagcccaataaaatatttgcctcctctccacgcatattgcgtgaaatcttcgtgatccggcgaagaaacagtacctgaatattgactacgcattataagaggttttgttttggggtttttccttcttcacatatcatttttctgattctcccacgaagatgaaccacctcgttcgtaaaagctccgtcggttactccgccttgaggtccgtttcgtacctccgtcaatctgccgttacctctccacctccgattttctccgccgccgcttcaaccgttcgccagttcacttccgccggctatccttccaacaggtttttcaccttacgatttcgtttttgaagcatttggttttagattagagtagagaaccttaggattgatttatggatgttcgttgtagttttcaattgacgatttggttttagattagagtagagtagagaaccttaggattgatttttgaatcatttatgtttctcaccttacgatttcgtttttgaagcatttggttttagattagagtagagaaccttaggattgatttatggatgttcgttgtagttttcaattgacgccgccgacgaattggggaatccggatagttccggagaggaaggcgtttgtgattgagcgattcggtaaatacgctacgacgttgccgtcggggattcatttcctcattccgttcgtggatcgtattgcttatgttcattctctcaaggaagaagctatcccgattccgaatcagactgcgattactaaagacaacgttagtatccacatcgatggtgttctctacgttaaggtcatcttcttttctttcaccaatccattttcctcttgtttttttttttttgttttgagttcttacttttgtgattctttactgatttcttcttgttgatctgggaatttttttttgcagattgtggatcctaagttagcttcttatggcgttgagagtcctatctatgctgttgtacagctggctcacaccacaatgcgtagtgagcttggtaagatcactcttgataagacctttgaggaacgagacactctcaacgagaagatagtggatggttctccagccttctttatctgtgatttgaagagaaacgactccccctacttatttctgctgtgcattc

SEQ ID NO: 36898 - DNA, 1068 bp, Arabidopsis thaliana landsberg
  unsure (1)..(1068): unsure at all n locations
gtttcatccgacaatgatgatcagtgttcctccttgttccactcatattgtgctgattatgaaagaacaagtgctatgtgaacatccaaatctggaatgatgaatcagcactaggtcttctctttgaatatgtctagtttaatgtaacatttttgctgtatgtttgataaaaacaccatatatacttctctttttacaccattcacatgtttttttcttccacaagtttattttggatacatcatgacactaaagatggcaaaactttaatggattaccaattaaacttagaataaaccaacctccataactgcgcaagttcatttgtctttatggttattattagtgcttttaattttggattctataattatgatagatgaatatgattacctaaagagtgtaaagagacttatccattcaaattgcggctatgaatgtttgctgctaaaaaggaaaaagttgggacaaatgcattttggaactgtcgtgcttgtctttttgttgttgttggcatgttacctttacataagcatcaccgtgtacactagggcattgattaatgcttgttacaacaataaaacaaaataaattaagctataatgttcggttcggtacaagtactttttcttatacaaactaaatttaattcacccctgtaatttgaaaaatcaaatataactccatgaaatcatttttaatagatgtctaaatattgatgacttttatatatgttacagtgtactgctatgaaaataattgagagaataaagtgttttctctgtcgacataacaaacacaaaagatgaacaaaaaggcaagcaaatttggattcatgagaatgatgacggtcaaagggccatcacttccactcgaagagcttgtttagacacggaacacaccttttctaattatttggattcttaagtttgagaaaagacaacaacaaaaagaaaaaaacaccaacaacaagttcatgacagtttgtgagaaactgacanactaataatttcccccctaattttgatttcttaaagaaaaatactttgttatgtaagattttctata

SEQ ID NO: 36899 - DNA, 1239 bp, Arabidopsis thaliana landsberg
gaatactcataaccatgaaggagaaaaacaaggagaagctcggcaaatgtgacaaatgattgtaactataagcgaaccacacaaacaaaaaggaacaacaagattcactattaactcacatcctgataagccttggcctcggcagtgtcatccatcagtttttgaacatcatcaaggttgacctcgctctgaatcgccttaattgcattgttaccttgctttaagctctcaaagactgctttttgcttgcttgtaagttcgatatctgccaactgagtcataaagacaggttcaaaatatattcgtttatgtttctttcaaaacataaaatcagctataaaagaaaagaaaagtactgtttatatagcactaaggttatgtgatggaaacaaggagatgataagaagaaggtcaagccaatttacttgttgttcgacattgatgagccactgatctacttgcttcaacaactcttcttgtgtccgttttttcttcaatgctaacaaagccctgtcctttcgcttttcacggattaagtctcttgcagcttgcttttccgcttcaattactttctcaagctaaattagcaaaaaaaatgagaagatcggttaacaaagagatgagccaaagaactcaaaagcttgagtctttcttttccatcacactactaacaatcataagacacatattgtgaaacgaatcaaatccaatctccaattaggattttggatgaatcaaaactatatgatctgggttccaaaagaaattgtaacaaaagaaaattaagatataagaagagagaataaaaaaccttctgctgatattgaccaagcttgcgtctttgggttttgagagagagaatcgctcgatcaacctccgtgatctgtggtttcttcacgaacaaattccccatcttttcttcacttatcgaaaccaacgattcggaaaatcaaacgagcagaagaaaatttagcaagatttgatcttttgacgaaattgattattagtctctagatttcccaaaaatgtcgccaatttcaaaccaaagtccaatttttgtgtttcttctctctttctgcttttcagtacaaatatctcaaaatagaggaaaagcatgaaccggaccgaaaaaatgtaaaaatcgatatcgaaccgattttagtcggtttgatttcatccacactgaaaaataaaaaaatcgaaaccaaacaaaaattccttggatagtaccgtaaacaa

SEQ ID NO: 36900 - DNA, 2264 bp, Arabidopsis thaliana landsberg
  unsure (1)..(2264): unsure at all n locations
gtgggtttcaggaacgccaggggacgcctgttgctgctgctgctgagagagttgttgctgctgctgttgagagagctgttgctgctgctgttgagagagctgttgctgctgctgttgggagagctgttgctgctgctgctgctgctgagagagttgttgctgctgctgagagagttgctgctgcagcatctgcggctgcactaaggacggagattgcattgagaaccccggcgaattttggaactgaagaagtgaagcagcagcttttgcaggatcaatgcctctcatgtnnnnnnnnnnnnnnnnnnnnnnnnnttggtacacatcattttgcataccaagcaagcccgacgtatcaagtctcggctgcatccacgggtttactcccataccttgaaagtttagagattggagtcctcgatcccacataagcggtgaactcatactcatacccatatcatcttctttaaggcctgcaaaaaagggatgcaaccaaaattagaagatataaaagactagaaatagaaacctttcagagatttgttaaagttttgaaatttacaataccatggaaagatgggagaccaggaggccacggccgtttaagcctgagaggaaaaggagatggatacatagggaatgttgttaaaggctcaatctcccacaatgaaacccttggctgtctctctcgtgcagtagattcgtcctcccaacctgcatcttgatcagatgatgaatgatatatgtatacgagaatgcaaagaccattgaatattttctactaaaggtttggttttgagctaaaccttgacagatcgccaatgcgaattagcccaacgagtaggatctagatcacaaatgccagttattgtacccatgtacctgacaacaaacgaagattcttaaggacattcagcagcaaaaagcagagtaaattataggaactctgataattcacctaccgacgaacactagattcttcagtttcaaacagcatcctaaaccgcataccaacagagacgcgagtgtgataaaccgctttcacatacttagccaggggtataacaaactctgatggactcgccctgcagaaaaaccgaatccgtttgatgcaaaacgaagagaatcaacacataagtgcattcataaggtacttaagacgatacctcgggttatagaagatggtgaatcggctgtttgtagcggcagcatgagctgctgcagcaagaaggcctaaatgcatactgtcacttgacaaaacagatgaaggcatgacagtttgtggtcggttggctcgtcttataccaagaagtaattgattcttatcgttcctagcattacaaatacttgagtcagtttcatgatttgaatgtaacacttaaacaaaaaccccaatttgaaagatgtttctaaccagatgaaaagaacagagtcaccagcaacaagccttttagcactcacaaatacgctccaacccgtggtaaggagatgtctctttggttggcctataacgcagaaacaaatgcagattaaataaatctctttgttcttcagctattaataagaacttggatttttcacgaagaaagctaacctcggaaaatatgcctgaacttccattcattatcatgcagatccctcgccattaactcttgagcttgtggctgctgcgagtaatcctgaagaacacataaaattttattgttaaggaggcaatagctaatcttgaaagtagaattcatatgaacaataagatgaataaccaagggagggaaaactttctcagcagctcggcgaggtacagaaaaacctccgtgagtgcttgtatcactagcagtcagagttttacagaaatagtttgtaggctgtctacttgggacacctaattccgcgggaaggtaaggatctttttgctcttgctgcattcaaaccaagcaaagaaggttcaaaacaccgacaaattccacaaaattaattatgaattacatagtaaagtctcataccgcattcaacggttgcaaagtcatctgtgcatagacttcatcagtctccacatcagcctgaaatggtaaggaatcaagttcttaactaacacacaaacagaaaagacacttagaaaagtttgtcataaaaactgatagtgagttccttacatgcattgtaacattatgaagctgacagataagctgcggatgcaagctcggataatttggtatatgagcatctacttctttgttggtcgaagcagcaacctcacagaacca

SEQ ID NO: 36901 - DNA, 2077 bp, Arabidopsis thaliana landsberg
acttcttcttgcgtcccgtaagcatttatattaatcaaacattatgtgaaatttgttgcttcctacaatgggaagggggaacctttgccatcttcataaatgttttaaatctttttttttctttctaatgtgtgtttcataaacaccagcgactttattgaaaagaggaacacgtaaattgtattctcaaagaacaatttttttaggaagagtaacatttgttttccttatcttaatataagcaacgaaatcaatcgtgcatataaaagtgaaatgctattttgaattttctaaacttgactagcaaattttcactaaaaaataaaattaaaaagtaacgataaagtagttgtcgtatagtctactccacatgaataaaataataaagtaaatcaatagaatgtaaatctcttaattaatcatacttattatataatcacagtggcaaagtggaataaaaaaaaagaggagaattggatcccgtcggattctatatttaaagatcgctaaacatctcaaatctgccacacgtggtcatacttaatagcagccattaacgaagtaataaattagtcgataataatgtttaaccaacatcgtatttctagatccatgaattagttggagtaattaacatcattgtttcttaattacgtttaacaagcatagagaaaacaatattgtcacatatgttagtataagttatcataatcatttataaaagcttgttattaattttttatattgaaattactactttgtgtctaatcggaaaatgatggagtactaaaatttgaaggactaaaatacgtcattattgttagagaaaacaattacgcataagtgtgattttttggaagtggaaaagttagtatgtccctctatatgatatgatggaagttgttgttctttttgtgtggataaacatcatttttccgtgacgtaatttttaatttcagtattcattttattattctcacttcttattatcccttctatattcgcataattgtttctaaggatttctattccctttttgttattttataggtacacactatcttatttatggtgtcaacaagcatgtacactatcttgccactaccacatattgtcacagaatgtttggtacgcgtgcttctatatacttttaatagtacataacaacaacaaatgaattatgtaagacaatttgttaaactgatgtcaaaaacggaaatactacaaaagacagtataattgaattacgggtttaatgtgttgacaaaatataataaatgtagctcataaaacttcaataattcacttaaataaattgtaatgaacctcataacgaattaaatattttaactaatcttatcatggttttacgaattaattataattttctattttattctttgaacaattgaactaaacaatattaaaccggactttaatttaaaactactaaaaacattattagtttatcaatacaaatgatcatagcaattgtatacattataatgtgtaattttaaaatcctaaagcatatatagtatatatccctttgattttcatagaaaaaaagtagaaaaaaataactattggaccgatctataactattgggccggtgggtccaacaactaagaacagtagatattgtgtcgattgaagttttgagatgcaaaacgtgtgctgttttgagaacacaaaaacagcataaacaaacgagacccgcaactataacattccgtaaataccctcattctcccatcatattttaaaaaactacccttccccctatttccatggcccttctctcagttttcccgcgagaaatcctctccttcttccataatcatcaaaaacaaaatgcaaaaacccaaaaaaacaaagaaatcgcacgacgcaacccacctagcctctctgtccatcaatctcaatctctctctgtgttaatgcggaatccgatttaacaccggaatccgccatggaagatgaataaaatccggtctctccgctgcctcctcccggagaccataacctccgcctccaccgccgcctcaaatcgaggatctgacggtagccaattca

SEQ ID NO: 36902 - DNA, 1166 bp, Arabidopsis thaliana landsberg
ggactagtctcagataccggctgtggtgctaaggggttggcaggaccccctgtagcacacacaatccttggtgggttctgcagatgtaacgccaccgggaccgctagcttcgaggtgctagtctcacacccttcgtccggctcggtaggctgggtggtaggtctcagcagccgtctttcgaagacgccctcgggcacgggtgcccaagttgatgccctcgtggagagttcatctgccactaaattgttagcccaaggaacatgttgcagttccagggccatgaagtccttttccggcttccttacatggagaaggtaagctgtgagcctgggctcgttgcagctacattccccgcggacctgattgataatcagctaggagtcccccttcacgaggagctggcggatccctagggatagggccgcagacgagccgaaaatcagtgcttcatactctgccatgttgttggtggccttgaactcaaggtgcaccatatacttcacttgatctccgcttgggtcgatgaggaccactccggcaccgccaccctgctggcgggcggacccgtcgaagaatagggtccagtggggctcagtgaagactggagccctgggctccgcaggtgtgggatttgaatcgggatccggacccccaggagcgctcggggaaggggtccactccatgatgaagtcagccaggacctggctcttgatagcgtggcaaggctggaagtccagttggaacccagcaagctccgctgcccacttggcgatgttgcccgtggtgttagagttgtggaggatggcctttaacgggtaggaggtcaccaccacgaccctgtgtacctggaaatagtggcacagcttcctggacgcaacaaacacagcatagagaagcttatgcgtctcaaggtacccggtctttgcctcgtggaggacctcgctgacgtagtagaccggcttctgattggtccgaacccctgtagccggtcccgagccctcaggtttctggtcttcttgtgccgtcctctcgacgactagcaccatgctcactgcttctacagccgccgcgatgtataaatacagcagctccctaggctctggggctaccagtattggtagggacaccaggtgctgcttcaactattcgaaggcttgttccgcctc

SEQ ID NO: 36903 - DNA, 2003 bp, Arabidopsis thaliana landsberg
cccagatgaatttgaggagattagatcaaaatccaaatcgatttaattcttcaattgctttcattgttaagtaaatctgtcagaaatctgaatcaaaaagatgaaaagactaggtagtgaaacgataaatatggtgattgagtgagaagagtaactaatgaaactgagaagaagaatcgaggaagaagatgaaagagaaaacagcaaaaaaaacgtttaaaaaggaataagggggtttcgaacccaggctcatgagagaaataagcaaatgtttaaccatctgactaagacaatatattcgtataatcaagaaaagcgattgtatatatttacataattaacatgagttaaattttaaccattttttttatattccgttagggtagttaacggaagttaactcgaaggtaagattataccaactttttaaaaaacgaaagttttaataagtaaccaaaattaaccaaggtgtttttcttccaaattaaatagtagaggtattaaacgggaaaattaaaagtaaatgatggttttttaggtttctccctttacagatatattatattttgattcattaaacttgtcttaaaggtttattttgtggtagctcttcttgttctgtacattcagttgaataaaaatcatccccttactattttatttcatctctcattcaatcaaatatatgttatggcctcttcaactgcaactgttgtgagaaaaaaagttgctgaaaattggaaattcggatgcaaactgctaaaacatgtgccttcaaaaattaaacagagaagatctgattccacatatttttggttgcacaaagttgtataggccgagtatatgactacaggagaaaaaatcaaacttgttttgtgatacattacatgaaaaaaatagtaaaaagaaacaatgctaattacaagggaaacaaatgggttgtggacttgtgggttagttactcccaggaaacaaacaatgttagtgttaaaatctttttctcttcttttccacatttttcttttgtcaaaattgattgagtgtaccaaactttagttgagaagaacattttgtggttttaggagctgtgggattgacgtgacattagaatcatccgttgtttcccactttctgatcttacaatttctcctttctgaccaaaacaaaagatttctttatttagttatgttctataaacgaagaaagaatcaaccaaaaatcaaaccaacttacctctatagtactgtctggagaaaaccatttaagcaatatcctaagatgtacaactggtggaatcattttgaaaaccagcggtgtcgtaacctgcccaaaccaaaaccagggtacatgcttacctgaccttgaacacagaacataaaacgaggaggttacagagagttatctgatcataccaggcttagagcggttgtcccaagaagaagcagatagagtttcccttacaattttcataactttaagcttctttcttcaaaataccttatatattcttaattcctacttatgtgtatggtccattaaggaccaagttgtgttacttacttcgatgaggtaaagattggaggcccggctaagtagtacaaaggcaaactcccctatctgagccagagatattccaacctgcatcaatttgactaaggatggtgaagcaagaaagcaaacatgatagatcatataagtaatttgagtcagaatatgttaccagaagagccgtcttattgttgtatccaaatcccttaacaacggttgtaactattgttgtctttataataataactaatatcacagaggctaacagtatatccacatgtgtccacagaaaatggacattaactaacatcccaatgctggctaggaaaagagcagcaaataaattacggatgggttcgatctgcacaaaaaaatatgaaagcatctatgtcagactatggactcttttaagggtttaagatcaattaacataacgggagaaacagtaaagcctt

SEQ ID NO: 36904 - DNA, 1280 bp, Arabidopsis thaliana landsberg
gagaccgtctgattgatccagaggctacagattctgtatctgttgcgacgagcaaataattagccatgtgaaactcgatgaaaaagctccaaacagctgagtgaaaatcgtgaacgaaatcacaggaagaacgatccattccgttgacgtcactcggacggtattgacccttgacggaaccatttgctaagaccaatgtgagagatttcgtatgaagacattgtacattcgagagagaaagagtgaacaagagactgttgtatatgagagataccatgacttatgatacaaggaaacgtgaactcttggatcaagagatttaaaaaagcaaatgaaaattaaggatttttaaaaaaacatctgaagtactaatgtttttgttctgtctgtggaccaaagcgatgaaacattattaacatacaactttaatttatatttgtttatagagaagaagcaaaaaaaaagaaagaaaacattagtacaggctttaagctgataaatactcgattgttcactaatccgcacgctaagtatcatcgtgttatttgtgtttttaaaagaacatgtgtttcgtgttattagctactgttatctatttctgatcgttgatttaggtcttcgtagtaacaaatgtcaacttgttggacggtggagattataacatgcgcgtgggaggcacgtgatggaactaagtgtcgtagtgcggccaccacctttggctctcgctttctctctctctctcttctcatacttctctttcacgccaccattcacttctttcatgcttcttttttttttaattcactaggaaatttttagtaaagtatttgatcaattaattattctaagaattgacagaagaaaaaaaaactgaaaatattatgaaaacgaaaatcaaacaaataaaaacatactgtcttgagacttaagaatcctttttttttcctcgagacttgagaatctttgacagatgttattacgcagtcgtggtggttaccgttaccgtgagtgttggtttgggtggcgtgagtatcacacgctttctcaattagcttttgaggcccattaataacaaaacttggtcttatctgaggtccaattatttatattttatgggccattctaacccatcatcatctttgcaaatcaatgagactttggattttatgccacctaattcatacattaccacaattttttagatatcaatatgcaaatgtttagatttaactatttgaaactttgatttggaatgtattttggtatgcatatgtacagag

SEQ ID NO: 36905 - DNA, 2432 bp, Arabidopsis thaliana landsberg
taaagtaatactcataagaattggggaaaatgtcaaaaatggtatcgatctgtttttagactcaacaaggtaagcataaagagcaaggactcaagaaatgattccaacacctccaaataaaactttatttgtattgttttctacaattttgtttacatatttgaaaatgaaactatgactttggtgtgaaaatgttttacataaatacatgtcacaactctcctcaatttatgaccttaacaaaatgcaaaaataccttaagaagatagtggacaaaattgaaagcaaagtgaaaagccaattgatttgatataactttatagaattaaatatagacagtttgagttggttcgatgacatttatttctctgcctctttcccaacgtcccccttctttataaggcagagtagagtaataagaccggtccatgaccctcacgtgacctctctcactctcacgtgcctctcttctcctccgtcattaatataaaacagttggggaatttataactttcttcttcttcttctctctctgtttctctctgtgcgagctctctcctctcatcaatggaatctctcatcaatcccagccatggcggaggaaactacgattctcactcttcttctctcgatagtctcaaaccaagcgtactagtcatcattctcattctcctcatgactcttctcatctccgtttccatgggcttcctcctccgctgtctcaatcgctgtagccaccgctccgttctccctctttcatcttcctcttccgtcgcaaccgtaacttccgattcccgacgattctctggacatcgagtctctcccgaaacagaacggtcctccgtgcttgattcgcttccgattttcaaattctcctccgtcactcgccgatctagctccatgaattccggagattgcgccgtttgtttgtcgaaattcgaaccggaggatcagctccgtcttcttcctctctgttgtcacgcttttcacgccgattgtatcgatatctggctagtctctaaccagacttgtcctctctgtcgctctcctctcttcgcttcagaatctgatctcatgaagtctctcgccgtcgtcggctcaaacaacggcggaggagaaaacagcttccgtctcgaaatcggatccatcagccgtcgtcgtcaaacaccgattccagaatccgttgagcagcatcgaacttactcaatcggttcgttcgattacatagtagacgacgtagattcagaaatctcagagtcaaatttcaaccgtggaaaacaggaagacgcgactacaacaactgccacagcaacggcggttacgactaatccgacgtcgtttgaagctagtttagcggcggatataggtaacgatggttctagaagctggctcaaggattacgttgacagactctcacgaggtatatcgtcgcgtgcaatgtcgtttagaagctctggtagattttttactgggagtagtcgtcggagtgaggaattgacggtgatggatttagaagcgaatcatgccggagaagagataagtgagcttttccggtggctctcaggggtgtgagtgacaggtgagttggtgacatttgttcattcacttggaaaaaaaacagagcattacttttggtttgtacatataaacactatttgaagttctttgcttcaattaccgattttttttttctttttctgacgatataacagatgaattctctagttatatattattacttttaaatggtctattttctcttttattatgtccagtgtgattcaacattgatagcgaattttcatttggataactttcttattgaatatcaggaagaaaagaaaactattaggtttataacacacacaaaaacaaaaaaaaaccaaaccgtatttaagagaactggttttcaaagatgagaagcaaaagtttttgggccaacatagttagcccaaactaaatcgaacaaagcacatgaactttttaaagaagcaacaagagaagtctgtagaagaagtgtttggtccaataacaacacacacaaacacagcaagaacgagcgaatctcctcaacttcccaacctaataatagcttgccgtgtcgtgactcacagagtaggaagctaacgttatccaatgcttcgactttcattacagtacctaaacccttcttgtccttccccatcaaaaccaatgctcctactctacctcagcagacccttctcggtacaaatcttaatccatgtttctttgttttctggattagcttctcttttgtctgtgtcttccccatcattgattcctttcttgtttacggatttctataggaattcgaatccaattccctttagaattgaacgccgtttccaccaaatgggaaccggcaaaggtacgaccttttagttttttttttctgcgtttcgttttaattt

SEQ ID NO: 36906 - DNA, 4810 bp, Arabidopsis thaliana landsberg
ttagcggttatttgtatactaatttggagttttgcatacattacacattacaccaatgtgaacgtcctaatgatcaccgtttaagtttgtacttttttttttgccgttcacaattatgaatttaaagatgtcaactaaaatttaatttcaaagcttataaaaggacgtaagtttattacacaaacaatcacaaactctaattcctaataactattatacacatcgtgaatttgaaacatttttaagcgcaaattctcagcgagataaaaacgacgttgttttaatagttattggctttacaacttcgtcgtacacgccggttaccaaatatcgctaaggctcagaattatctctgttcaaagcttttgttttgttcccaattctgaagttttgaatcaacaaatcttcaataaagttttctcctttcactatctttccatattcttcttcttagtaaaactttgcattaatggcttacccaaatttgtaagctctttgtttcctcccttcttcttattctcttcttcattctccaaatttgtttctaggtttcttcagtttgagcaatgaagaagtctaaaatcgataattcttcttcacagactcgattcgggcttgttcagttcttattagttgttctgcttttttacttcctctgcatgagcttcgagatcccatttatcttcagaaccgggtctgggtccgggtctgatgatgtttcatcttcttctgttgcggacgcactaccgagaccaatggatgctggtggaggcagcagggaagctaactgggctgccggagaagaagaagaagcagacccacatggacatgggaaggatccggggcgggtacagcttcggctaccgcagcggaaaacgagggaattaaaggccgcctctgagagtagccgcaaccagagctagctcgacaatggcggagctcagcgatgaatgctgaagccctcacaaaacacggaaccctgcgatttcaatgggtcgaaaaatgtgggacggactcgattcgggtttaatcaaacccgataaagctccggttaagacccggattgagaaatgtccggatatggtttcggtttctgagtcggagtttgtgaaccggagtcggatcttggttttgccgtgtgggttaacgttaggatctcacattaccgtcgttctacgccgcattgggctcacgttgagaaagatggtgataagacggcaatggtgagtcagttcatgatggagttacaaggattaaaagcggtggatggtgaagatccgcctcggatcctccattttaacccgaggattaaaggtgattggagtggaagaccagtgattgagcagaacacttgttatcgaatgcaatggggctcaggtttacgttgtgatggtcgtgaatctagtgatgatgaagaatatggtattgacttttgttagactagagttgactttaaactattgtttaatttgacctaatcttgatgaaaaaggtaaagactttaatttgtttttgtgatagttgatggagaggtgaaatgtgagaggtggaagagagatgatgatgatggtggtaataatggtgatgattttgatgaatcaaagaagacatggtggttgaataggttgatgggtcggaggaagaagatgataacacatgattgggattatccttttgctgaagggaagctttttgttcttacacttcgagctgggatggaaggttatcatattagtgttaatggaagacatatcacatcttttccttatagaacggtgagtgactgacaaaaacgcttaatagttcatctctagacttcaatgattgaatggttttatatttcaggggtttgttttggaggatgccactggattagcagtcaaaggaaacattgatgtgcattctgtatatgctgccttattaccttctacgaatcctagttttgcaccgcaaaagcatctcgagatgcaaagcatatggaaagctccttcgttacctcagaagcctgtagagttgttcattggaattctctctgctggtaatcattttgcagagagaatggcggtgaggaagtcatggatgcagcaaaagctggtcagatcatcgaaagttgttgcccggttctttgtggcattggtaagcacaactcttgaaagacaaaaatcacctaaatatagtcattggttaaacgtcatttgtttatgttaattcatcttgcagcatgcaagaaaggaagtcaatgtggatttaaagaaagaagctgagtactttggtgacattgtcatagtaccgtacatggatcattatgaccgtgttgtgctcaagacagttgccatctgcgaatatggggtaacttcttcgtccctcttttgttctccttaccttttattacttttctgattattcatccggaaaacttgtaggtgaacacagtggcggcaaagtacgttatgaaatgtgacgatgatacatttgtgcgtgtggatgctgtgatccaggaagcagaaaaggttaagggaagagagagcctttatattggaaacattaattttaaccataagccattgcgtaccgggaaatgggctgtgacattcgaggtatagattttgtggcagatctgaaactctattgagaaagaaacatgtgatgtttagactttatgttgattttttctgacttgtgaaaccaggaatggccagaagagtattatcctccatatgcgaatggtccggttacatcttgtcatatgatgtagctaagttcattgtcgatgattttgaacaaaagagattaagagtaagttattctttacgcagatatgagattttgaggattcatgtttctttttatgatatggtgttggttcttcttggtcattgcagttatttaagatggaagatgtgagcatgggaatgtgggtggagaagtttaacgaaactagaccagtggcagtggttcacagcctcaagttctgtcagtttggttgcatagaagactacttcaccgctcattatcagtcgcctcgccagatgatttgcatgtgggataagctgcagagacaggggaagccccaatgctgcaacatgagatgacataacattgttttttgacggattctgggatttttcgttagaaaggaaaatgaagaagcagatgggtgataatggagctaactgttttagatctctgtatattatagaaacaatatataatgtatctatatatatatatatatatatatataatataatgaagggttcttgagaagttgactgagaagtcaatagtttttgcagtgtttacaaactatataatccaggggtactgcaagtaatgagggaagaacataacttctcctgtaccttgagtagtctgcgtaaagcccatgagacaaaccgcaacggtctggtatctcttcaacatctttaccaagatgaggatttttaaatccttacaggtacgtgtttcatctgcattcttacattggaaattcttttatcaagatgctaaacaagtgtctggctaattctaacttggctagttgagagtataagttccttgattagcctggttctgagggaaataaagtgggaagctataaatagattcatacagttgctattagtagactgtttgcttaataatttttggaaacttgtgcttatgaacattaccgaagctgttagttagtgactggaataagcatctgacaggacgcacaaaacagagttgcagcacttgcttttcattttgtgattttcctgttcacttggcattggttcccacgtactccctatgctagactctcttcttatgtggtggattcgtttttcacaacagtaacctgatgtcaagacctttcctgattattcgccaaaataactcactgaaccggacaccaaattaccaatgggataaagctgcttcaggctgagcctccctggcggtgtttataaagccttatgaatgcaagttcaggcctaatcactttatctgaattctgatgaagattaagagtgtgattacatgttggttctagattaagagtagttacaggttggttctggatttcgttctcaccacgacacaaaacctttcaagccttttacattgtgttttcagttggctatgagcctcaaaatatctaaaaccggcacattctctcataactagtttttgtaatgcagtcactttacaaaaagtaatagatgccaagtgtaaagagctaaggtccaaaaaaaaaaaagagctaaggtgcaagagatttgagggaggtgggtaaaagccattggtgtcttgtcacatgcaatcattttgcatagaatattggaagataaactggatgttggcaaaaaaaaaagtatagcaagttaggaagcagctaatgcaaccaaaactctctcatgcaacaacaaaacattgcaacctgaaggcggcggcgatactacaatttttggatttggtaaacattggttagccccaataaatatttgctgctgcggtccaaatatattcaactcctaggtaactagaatataatagaaaattccaaacattaaagccatcactatatttgataggtacgtggtcgataaaatagataactcagagtacaccacctttgactcatcagccacctgccaacgagaaacacgactcctaattccactttcctccctcactcactctattatatataaacaaatcacacactgacctaaaacaaacaactctttaactatcatcagatcaataaaaaaccagaagaagacatggctcagaaagatacagtgaagctgatagggtcttg

SEQ ID NO: 36907 - DNA, 1376 bp, Arabidopsis thaliana landsberg
tcctgcattttatggaacctacattacttgagatcaatggatataatcagtctggctctgaaatggctcctttattgggtgatttttgttgtgttattaagtcagcaaatagtttgctgttcaactttgctcatgagcgaatgtatgtgaagacagaagatgcatctgaaggagcttgctcttgttttttgaggacgatcttcaaaacaatagtttcagttgcttctgaattaaagaaacattatccatatgataatgggtcagagatgcatgttttgttagccaaggagctagtaaccgcaataggctatctgttacatattgaatacgaaatcattgagagtgatttagttactttgtggctaatcattctctctttcctggagtttagtagtttgtcaccagagaattcagaaggggactgcccgttgacttcattgttagttggccttggatgccagctgataactttatatagtgaccttcgccaggtttgtcaaaaatttattccttttcagtggttgcgttttctgccttgctagtatctgttatgttcttattttccttctgaagaatgctaatttcttccccggatgatgtaggtaagtgttgctgtattttctctgttcaaagctgtaaggcttgtgatgcctgttgtgacacctgctgatggtgatgatgatgagatgattgccactgaagagcttccactatcaactgtgttccctttccgtttagagagaagtgaaaaatcagtggaaaagctcttgtcatctcaagctttaagacttgctatacataaagctattaaagtgataccagaaggccaagcaagtggttgtatcaagagcttgactgcagatgtatcaaaaaccatgaaatggataaaacaagtttgttgctcaacaggtgctacagaacaagatggacaggtggcagcattcttggctggatctttgtctgatatttattcactaattctcgactcaataactattacaacagggaatagtaaccttgttggccagtccatgaaagatctgttggatctcatcagtccttgcttaacccacctggtttcttcagactccgattgcatcgaaaatttcctttctgctctcaccggaaaagatttggagattgtgatggctgaaaagaagatagagacctacagaaagtctgtgcgcttgtttgttatattcgtcttgcgtatttacatgtcttccagaagcttatataggcaggtgattagtcttatgcctccgaaaaaaacaaaggatatggctggtattaagggcgactctgttgcagttcgttgcggaagcgattggataaaagagaaaagttggaattatgaaggatatttttcatggatc

SEQ ID NO: 36908 - DNA, 1232 bp, Arabidopsis thaliana landsberg
agtatcgttgatgtcatcttcctcctcatcacaacacataatcactttattctcctcgtcaactaaaagacggacttcattcccaaaccgatgaccgtaagtgtacaaatcaatcttaagaaaagggctccaagacatagttgtggttttggtctcagtgatattatttgtcatccatatctccatctttaatgtaccgtcgtcctgaaaaaacagtgaaagccgctcttctcgtacacaagataaggagataagtatcccaagaagattcacacttaaacggaagagacacacgtggaccaaatctttctgtagtaaagtcaaaacttattaagaaatcgttgatgaagtactcattttcttcttcttcttcttcctctatttcttctcttttatgtgaagcgatccagtaagaattcccccttaaagacacaccttcggcatctagtggtattgtgaagtctggagtgacggtaccaagaaccctccatgaattagagttaacctcgtagatttccaaatcaaaagattcaagatccaagaacttcatgattttgtaattatagcatgatttgtagtttccgtatccgagagcgtacttatcgtttctattgtgaggaacttcggttttgatccacctggtttgatccgtacacggattccaaaccacaagtccggtcatggttgtgcataacaataagccgttgcagtgaaagactttacttacgaaagttttccttgaactacaatgtggatcaattaggctaagttcacctttaacctctatagatggatcaatattatcgtgaagtccacgcagatcaaggctcattgaacaaaccgtatacaaccgcaatatgagaaccagaaactgcttttctgctttatcaaagtgcatcttggtgaatatctgatcattgaataaaaagttccattgtttgcaagtagatcgtaatcgttttagagacgtagccggaaccctagcgagtatatcctctactaaatcccagggaagactggagaaggacgaagtttttaacgtcgtcattgtgatctcccaaggaagaagatatcgatataaaagaggtgcaattagaaattagggttcgaactttcagatttgacatgcctcgtcatatatatatatatataggcaaacaagaatcaagtttcaagttttatcaccttttcctacgtggattatatttgctacatttacttctttttttttc

SEQ ID NO: 36909 - DNA, 3941 bp, Arabidopsis thaliana landsberg
  unsure (1)..(3941): unsure at all n locations
gttatgttttataagcatattacaagtattggaaacaaaattgtatgcttttgagcacattttgattggaaatgattttgagtttgaaagcaatgtcttagacgagtcgaaatttaaaaaaaaaagtcaacagtcaaacttggtagtccagctgaaacgatgccgtttagtagaaaaatctcaatagcttatctccgttggttacgtggagcttaagggaaactttccatcaatcggaaatttccaaaaaccctagaaataaagaaatcagctttacccgtcgaattatgacgtcatctttagtttcccagaaagtttccatctttggtcttccccggttagagaattaggttttcgaatgtcaagagaagatttctctaccgaattagattcaatgttttatttactcaagttgattgtatttggatttgaaagtagtaaaattggtttggtatacaagaaccaagagggcaattcaagatttgggtctgcaatggtgtaggaaattaaacaaaatcagaaccaaatcagtttcttctagacagagtatctttcacatttgattgtttgtaaaccagatcctctgttccgagagcggttggcaaccgttaccgttaacagaagtcataacttcagcagccgtgaagcgagcttataggaaagctacactttgtgttcatccagacaagttacagcaattagccctctctctctctctctgtatttcttgtttctgtaggtttttgtttgtgatgatcgatcgaagatacttaaacgatgaggctattttataaacattaatgatgtgttagggatttccttttttctgttgtttcctttttccacatgtgattagggttcaacgtaacggtcctttttaaaaaaactcttatgcgttgtttcctttttttccattcatgggtttatttgataattattaaaccaccgcttctgattatatacttgtgagttaaactagtaggaaactacaaaagaaaattgcaatttgatgtacatggtattttgataatatacacaagagaaagaacaaaactttctttcttttcaccattctttaataataagaaacacaagaaattggttttacaataagcttggctttgatgattttggtcagagatattttggatacaatcaaacaaataaagccaccactaagccttcccttcatggttcttctctcaccagtagttgaactgttccaagaacaagcagaacaaaagatcagtcatagaggttatgtgaaaaaagcacaagacttgatggcttgtgtctcaagttccaagagtctaatgaaagaaagacttaccagcttcttcttcttcttctttttctcgatgtacgccacaagctcctcctgacgaccaagagaatcatccaaagcctgcattgtaacgagagttagtattaaaaagaactttaatggaggaggtttatcttaatgattcagaatgtatgtaccttcttggtggcagcaagctcttgctccaatacattggaccggctaatggcagcgttaagcatctcttccttatccggaggcatacctgttgactgcgcgcttaagacggtcactttctgttccaactcagccattcgtttcataatggccatgagatctgcccctgagattgcaggtacagtcattttctctgattgcatggcactcttgttcattgatgcatcatcgcagtacgcggggcacgagtacaaggatgactcggttagtttccttggcacgcttttagtcacttcaatcatagtggcggcacccatcacaagagccatgacccctgtgaaaataggtgacctccctccttctgttgtagcgttgttgcacgcctcttgaatggcgtaaacttcttctgcttagaagagaaagtacaagaagcgttaaagctccatatgtcttagctttaacatacaacaaccatattgcaagaaaaagagatgcacaagagtcatcatcttactctttgagagggaaaatttgtgagcttctggcatgttccaagctgggtgagcggccgggacctgagtctcgagaaacgaataacgattaagtattaaaagcgaacttgatatcaagagtttagaggttggccattcttacaatttcgacctcttttgaagccttttcctcttcagaagccggctctgttgtagagtcatcttcctggaagatcattgaatataattagcattggaaggagtgatcaagattcaggtaaaggaaactattcaagagatatagataagctcaaagtaagcaaagacctcagggatggtcttctctccagagttttcagcttgggatccttttgagcatttgtgatcaccattgtgaactctctgtaagaaaaaatgaaaaatcaagttcactcttgtcatttatgttgctgtcactatagttgtcttaagaatcattcaccttcatgatctctggatttttccatgggcctttgtcagagcgcatgcagccaccattgtcagcacaagtacatgaacctccaagaaactcaggaagttcactggtcacaaattaataagaatcagtttcatgttatataatatataacatagattaatttgtatgctaatcgtcttgcatagctcacctttcatcaattatctcaagcaacttgctttggtacttgttgccaagaacctggtattcaaacaaagtataattacttaaattgtgaaaactaattatcattcagaagaagattcaatagtaaaaggttttgaatacttgcatggatttttgctgtagtcttcgggtcaaggaaggacttaaccgtgttccacaacattctgaatcctgagccagcattgatgataaacatcctgttcaaggtctgatccaaagtcgttacaaagttaaactactggttcatagaccagtggaaaagaattgagcatgcagagatataaatcacacctcaggatagttgtcaccatcgaccttttgaagacgagtaatcaagtctctagcagccttgttgaagtttttcagtccctgttataacaaaaacaaggaaaggcatgtttagtcacatactggaaaagcattgaaggtcttctcacataggttttttacataccactccttggacatcaagaatagttgtgctctgatcaatgtgcttcttcgcggcgatagagcacgctgggaacttaacattgaaggtcctctcaaactccataacatggtagttgacatacctatccatggttgtgacttgcatcaacttggtagaatctactaaaccaagcctctcaatgtacacaggtcgtccttccttgtcaactccatggtgtccttgagggtagtatttcaacacttcatcaatttccttgaaatcaaactccttaaaaatatacaaaaccaaagaagagaatgttagtactactcaaagagaccattttcaaatctgcaaaacgttcctctagaataataatcatacctccatgacagtatcagcaccaaattctttcctccatctaagcatttcagtccacatctgtttggttcttctcaagatcaaattttctagccttcaaaaatctaagcatcatatggtagtcatcgtgtttctccgggagtagctcatcgagaataagcgattggcgaaaagcatcaacggctttcaactcctcggcgtcatgcacatcttcgatgatctccacagacatcactttgctacttcttcttctctttgtcattgaatacctcaaattcttagaagagctcctcttcttaaaagaacccatccttggtttcaactcggcatctaaacacaatacaacatcaagaacaagaagataacaaaacagagaactaaaaaatctcttcatttttgtttattataccttggatcanagtcatgattntgccagatagttggaattaagca

SEQ ID NO: 36910 - DNA, 1988 bp, Arabidopsis thaliana landsberg
ggctggagccggaaccgggttaggtttggggacggccactcactcgaccactggacaagtcggacacggcactgggacacatcagatgtcggctctgcctggtcacggaacgggacaactgaccgaccgcgttgtggagggcacggctgtgaccgacccgattggaaggaacactggaactggtcggacaaccgctcataacacacacgttggtggtggtggtgccaccgggtacggaaccggcgggggatatactggataaacggtgttgttcacttgttctgttatttgctctatttttgttgaatcgaaatttcgtggttttctgtcttactttcgtgttctgtttttttttttctttttcttgtgcttctgaataattgtaggacttcgatctcatttaggtttttgttgttggatgatagtcttactttatgagtagaatgttcatgcaatgtaacagtaataaaattatccgttaacaataatgtgcccatgcaacttaacaataacaatacattgctaactttttgaactttgaagagaaacattgctaagtttttgaagagaagcattcgcatcatatttgaattaatcaaactatgtggtcaaagaaaaattgtttctctgcgcaatgggtttgtatataacaacatgtaccatgcgtgaatattcttataatagacacttcgttttgaaccatgaagatttttaacgattagatgatcattgatcctgaagtacaaaaccaaagtcaaagtcatgatgtagaacctatcagtttcccattacttcctcatcaagggatcacccgcaaggagcgtgatattatcaaagctcaaagcccagtttgtggctgtttttggaatgccttttgggcaggatttggtgaagagtgtgtttatgaaacctgagcttgagcggttgatcctctgtttaggtttgtcaaatgcttttatttttttttaagaagaaacgcgtttttagactttgatttctaaataaatcgacaaaaacaaaaatatgatgtaagatccttggtaatacgtaccaaaaatcacgtcatcaattgaatataattttagtttatagagacaactttaatttacacaaatcatatttttcacactttgcttcaactactctctcagtcttgaagaccaacgaaagtcttttcctttttctccaaaaatctcacattttttttcttcagtttcatctaaaaagattcaattcatatcgaaaataaaaaaggaacaaactttgctttttgttttcgcaatctccgattcgttaactcgttttctctcttcacctgtttcaagcttttcgatccaacaaatcacgagattcctctttccggtgtggtctccggcgacctaaaataaagatttaattctcgtggtcgtggagagcaaatgagggatgttctcctggttagcgagaatggctcttttttgtttacgacctatgcggcgatacggtcgtatgaacagagatgatgacgatgatgatgatcacgacggtgactcttcttcctccggtgactcccttctttggtctagagaactcgagagacattctttcggagatttctctattgctgttgtgcaagctaacgaggttattgaagatcatagtcaagtcgagactggaaacggtgccgttttcgtcggagtttacgatggtcatggtggtcctgaagcttctagatacatctctgatcatctcttttctcatttgatgagttagttttttttaatctctttttgtcttcttcaagtcaaacaaaatctctttttgtgttcttcaagtcaaacactaagtccactttgatattctgtgtctgtgtgtgtttcttcttcttgatttggttttgatgatcggataattttggtagaaagttgaaatctttatgcatctgatgaacggtgaagtgactcctgactctttctttatcattttttggtgagcaaaaaactaaatgg

SEQ ID NO: 36911 - DNA, 3555 bp, Arabidopsis thaliana landsberg
  unsure (1)..(3555): unsure at all n locations
gaggatattgtcgagctcggtagctccttcgcctggtatgccattccgttttctctttcctctcgatttgtgactgtttgtttgaattgggttcattgttgtgcgaacattagtagctgtgttactttatttgaaagtagaatcagagtgcgcaagagttgattgaaactgtgctagaaaactgggattgtatctaaactgatgcgtcttctgatgatatttgatttatttgactgcacataatactttgtttggaaactttgtatcagttctaaggctatcaatcacttcgcaagctccgatcatcttaagaatatcaagcaatttctgtcgaaaaatggcccggcaatggattgcatagacgagttccgaatttcagaagctgatgtagctaaggtatgcactatttacttgaatattatgctcttctgtttttacagatctcaattgcaacctttgcggtttaagagtgtagccatgttattcgttgaaatctctaatgaaattctattcatgctggatgcagtgggagaaaaaatgtcagtcatttggaaatgaagatgcatcttttgaagggtcctgtggacagctgtctgggacatctaatgatatccacactaaacttgcgtttgaaactatggatagaattaaaaaagttcctgcacaccatataaattcatataaatcaaatgatgttatgcctttacagtataatacgaatgagtatcagatatcactttcagagattcctggagttatacataatggttcatatctgaacatggatgattcccaattccctctatgtgatgtatcaggtatttttggttgattccgacctccacaatttgtcagtttccaagtgttttacaagttgtgtataatagtctctaactctctataattatattttctagggaacgggtttggtgaacattccattccttatagaagcaaggactactcgggcaacggtaattattgcacccaagaggtgggtttcagtcatagtaacattgatattctgataatctggttatggtgcatctatatgacgcttcttgttagtttcatcatgaggattctttggctcagaattttgggtataggctagtttttctaaagtttatggtcataagtattccttggttcaggaatttcttatgtgttatatgcgtaatttgcacatcaaaaaatcttctatatatgagaggtattttaggaagaatgaattttattaaagtttggggtaagaagtacctttgtctgttgtttttatcatcaaagttccttcactgtttggctatctttttccatgtgttcaactacatcatacctccagagctatctcattggctaactccaaacttttatatgagcctgtgactgacattgtcttcatctagaattatcaggtgaaccaagataagaaacaaattgaggggcagtacaatcctccaggtaggcctctgctttcaaatttgatctgcgttgtgttaatttcatggttagggctttatcgtctaggtctatgaatttcattaccgtagccaatcttatatgcactagttttaatgcatgggttttattcttgtcaggtgtggtgggaatgactagcatttcgtcctcacattccactgatgctggcgggaacgttcactctggagctcctccaccttggcttgatgcaaatgatgggaatttttctagtgttcaactaaaccaatcagatgtggcccgctttcaagcaaaggtacctggaaagaatcgtaagctaaatcctaatagggttggcgctgcatgggctgacaggagaaagatagagatagaaatggagaagagtggacatgcaatgaagagtaacattgatgcagactggcttcccaactttggtcgggtttggcaatcaggcactagaaaagaatctaggaaagaatttgagaaggaaaaacggaagttagtaaaaattgaaagcatatctacagaatcataaccagtctaaatacaaccgtacattagcaaacggncggtaagtttttacctactactggtctcatgtcggttaatattttttctacttctcaaacgtatttgtttggattgatatttctgttagcgacatatcatgtggtttccttttatactcaacataaatggatacatattgctttgttgctactgttttaaatttagttcgagaaatactgttcagtggccttatgtatatacattaattgtgattgcagagaagagagagtggtgagtaatggcggtggctgacatccagaatggcaactagtaaggattatctcatgtaggaattttataatcctcgtttcctggagatcctactcaaatgtatcttgttttcatgttgagctatgatagaatttagaagtatgtgatcctgggactcctttcaagtagtgtaaaaaatggataaaattttgtttttggtacgagagattttaaagggttagagttttacgtagcatatgcagtagtaaaatatagcatggagaaggcctttctccactatctgatcttcctttgggttcttcatcttaagaaagatgtatatcttttcatctgatgtttctttttctgcgggagataaagtgaaataactttgttgtgtggttcatagattgtggccatctcaacaaactgtatctattttctagttggatacacatatttagaatgacatttgtacactaaatgactttaattcgaatatttccctacggtggtatgagattaagacacagtagtgtgtagaactaagggagtaacattgttgctcttgattaaatgtacaaaatttagctattatctgatgatgactgtttctggtgagcaaaacctggatgcatttgattgacgcttgatcctaaacttccagaaggttcctttagctgaaaccagattctcctggcacaagaactcccaggagagccacttttcagctgtcctgtgcacatcatgcacgaaaacatctgttgttgagttgctacttccttttcttgctaacacagctgcagtatatatactccccatcctacctggtgtctctaagtcatctccacgggggccatcaacaactatcacatcccatttggtattgtgtacctgctgtggcaaatccctcagttccagtttgcagtctgatgagccttgatgttgattattcatatttggtgcacatgcgggattagctcgagcatgttgaagcagattgtaagcatttcttacttccatctgatggtactttaagctgtagattcttgtgttgtttggatttacttcagcttttggtatcattatctttgcaggnnnnnnnnnnnnnnnnnnnnnnnnnnnnntagtgttgattgaagataacatgaggtattgaggtgcaaacccgaaaacaagaatgttacaaggggatctacgagtaacggtatctgataagagcttcagttccttttccgtgagagcggttgggccctcattagccctgagctgctgactggaatcagctggactcaagcgaaatgtggttgaagagga

SEQ ID NO: 36912 - DNA, 2587 bp, Arabidopsis thaliana landsberg
cgttgtataacaatgaatgacttgaaaaatacataagcaatcaacaagatgcctaatgttctcactaatggtaactgcaaaagaacaacaaaattctttctctaaatcaggaaaagagaggatatatgtatgtttgtgcaattgcttatcgagcttaccatgagcaaagttatcgagaaatcatcgactccacctagtaaaactggaagagaatggcgcaggaagagcagaaggacgaactgcacacgaaagatgaacaaatcattgtgttcaaagcagaattttcgatatacatgttctcaagaacacagagagaagaaacatactagcaaggcaattagacggcaacaaatcaagcttgtggggctatgaaatgagtaaagatcatgatcatcatccgcatccccccaggttaggaaataaggattacgaagatctagtccctcgattccccaatcactactgggatgtttccaacaaagataatgattctcagtaagatttctacattgtgcagaggaagaaaggaggataccaaagcaagacgaacaaaagtacccgaagttcatagaaatgcctgtgtagtgaaacaattgtcgtggagctgtgtaaccaggtttatattgctgcaatttgaacaaggtttggtgagacaatttcatcaaaacagagactatatgattacgttgtgctatagaatttatacctgacgacaaatttcgcataccgtatcacctttctcattgcaccatctctggacgcaattatgatgtgcaaactgcaaaaaagttgatgacaatatgaatcaaaaatcagaaatgatcctgtttgtggaaaacaacagtaacctaaagacagaacctttaatgttccagaacaagaacaaggcgtatccatcttggtatcttcatcttcatcatgacaaatcctacactgtacaaatttgctctcacataaatcagctcctgcagataacgatacagattcaagtgcaacatcttcgttaaccgagtcagcttttggctctgcacggttaaccgtcccaagaccagaatcgcttgataaccgatcaaccaccaacactaaatgatctcccatctttacttttaccacaagaaaaaccaaaaactccaatgatatatagaaaccaaatgtcagaaaaaatcaatctgcaacaataacatcagaaggaattatcaaaaacatgaacaataaacaaagaagagacataacatgaagcaacaactaacggaaacttgagaagcaaagttacaagtttggacaaaacaaaacaagaatctcatatcacaaaattgttgttttgtacaaaaagattatctgcaagaaaagaatacataaaggtaacttttacacacaaaattcttttcctttcttcttcttcaatcaatcatcatatgttgtatgaggagaagcagtacaaccagaatcaaaaggatcttcagaaccacaacaatgccaatattgtaacacttttccagaatttggtgtatccattgttccacctgtatatacactctcaaatttcctctttgtctcacctaaaacaaaagaaccccaaaattcaaaaacctaattccgaaatcagagaggggatttttcaaattttacctccgaaatgagcagtatggaatctacaagcgcgtgggttattgaggagaggatcgaattgggttttgcagtttttgcaagttcttaaggttttgggtccatcggaagaagaagctgtgcattgtgagaagaattgtcgtgagtttagtttcggggttttcaaggttttgagagagtgagagtaaattagggttttggggattgagaaagaagaagaagaagaaagctgaaaatttagtaaagcttgagacatcgtcgtgctccgataaaatgggagagatgatggaagcagacaagttatgaaaacaagaaataattttatttttttactaaacggtggcgttttagcattttaaattcagaactttttttttctgcgagtgtaactattgctataatccatttatactagaataatcatatactctaagcaaccggttgtgataataacactggttcttaaatttctacagtgtattaatggtcacctagcttgtactccgtgctggaaaaaaattaagaacacatgcccgtcttgtcataaaccggttatgtacgaatttcgttgcagagccatggagaaagttattgaagcagctagagtgtcagtagtgggagtgtctcatacacaaatctctctagccatgaagagcagtgtgttttcgcacaattttactgcccagtgcgtgactgcaattatacctgcctatccaaggatctccgcaatcacgtccgtgccaatcacaaagacgcccgtcgcggtttataagacgatcgctgtttttcaggagaactgattgtagttcaagtttttcgcagattgtgttagagataagaatcccaaaaccaaaagtacgctcaaaatgtgccatttgtatcagcccggcgatatctatcttagttatgattgagaaaaaatgtgcattattttctgcttctataacattacgcacaccaa

SEQ ID NO: 36913 - DNA, 1630 bp, Arabidopsis thaliana landsberg
gtcgtttcattggtcaggtttgtattgaagaattttgtgcgttgatggagttggtcgaattcggctgccgtagaaagtataaggcgaagtagaagagttagggtttcgaaggatagaatttgtgtaatttttgatcataatgattagtcgcataagtcataaccatttattttaaaatgtatttttttccttggaaatttatgtgtattaaagtattatttctatatttctagaatgacaaattcaaactaaaaggtaaaaacagaaaagaagtacacataatggaaaaatctattacatatcaaaatccatcgtagaagacgtttgaatgggaaacatggtgctaatgtctttgttgtttcttggttaaagccacaaaagaaaaaaaaaatagtatatacatttatctattgtctacttgagaacattaaaatgtaaaaagtctgttaagaatatagtttttcttcttaaatgtatgttaagccaatagccttaaatctatagctagctttgaaaaaattattgaagtacatctttatgtaaatgtgctaagaatatagtttttcttcttaattggtatgttaagagaatagctttgaatctagctagctttgaagattttattgttgtatgggctaagaatatatattttcttcttacatatatgttaagaaaatagctttaaatctagctagctttgaaaaaatacattattatgtaaatgtgctaataatatagtttttcttcttaaatgtatgttgagaggatagctttaaatctagctagctttgaaaaattcattgttagacattattaattatgtaaatgtgctaagaatatagtttttcttcttaaatgtgagttaagtcaacagctttaaatcttgctagctttgaaaaatttcattattgacattatttatgtattttaatttggtaacacaaatgtatgcatgcatcaaaaatagttgcgaaggtttaccaaaaaaataaaaataaataataataataatctggaagtcttaaaaagaaatcaatggtttttattattaaaatcaaatttctgaatttcctaaattaggttctaaatatgtataaattcctaagacattcacaattttatataggagaagacaacgatttcttatcaaccagtgtagaaataaattttcaagatcaatattacttaatatttgtaagatattagtttttatcgatgtatctatttttgctattgttcttattagatatcttacttcttctaatgttgatttgaatcttacttttctataggctcattattctttatatcttctaattaaagtgagtatattctaactaatacttgttgcatcctctagcgaaatgggattcaagaataatttatctcttgtatcggtgatggtctttgctcttatccttctccccatgatttctggtaatacatatttttcattctcaaggataaaccattctgcttatttatctggggtcaaattgtcttaaatgcaaaaaaaattatctttatttttctataatatcatggtgagaattcaaaccgagctcttattctaacaaaatttgatcaaaaatgaagtaacatgttcaaatattatgtcttacattataac

SEQ ID NO: 36914 - DNA, 1415 bp, Arabidopsis thaliana landsberg
acggcgggtgacagagttatccataatgtcatcaagcacattgttataagcttggagctgcaaagataatgaatatgaggagtgatagcgacataaagagagagagagagaggagagtatctattactaatagagattgaaaggagaagtctttatcattggtatacccattcaatgcaccaaccgagagcacaagagaggaagacctcttgctcagtcaaatcattgccttgcttcaaaagtttgaaactgtcaacaacagagagaccccgattgagtttccctggagaagaagaagtaagtgtgagaaaaaaaaaggagatcgatgaaaagcgagagagagagagagaaagaggctgttgtagacaagtctgaccttcacgtacattgtagtccagcatctgcaaagaaagagaagaatcagccagcattcgaaggatatatatgtgggatctgactgatgagagagagatacccgatcaacccagagacgagattcattggtgaattcgaaggaagggtcatgaagaaggtcagacttgagaacagaataaacgttgagaaaggttgacttgagatcggtctccattgaagagctttggatacgacgacgatagagactcccaccaagacttctcagatgcaaatgatgtgaaggtattgccttttttattgtcttgcccagattcctacgacagcaaatcgcactcatattcctccttcttctcccgaaaacgcccctcctgtttcttccttatttactacttttgccatcgtcatccccaacacaatcggactgactttctctcccagttgtacatttgtcatgtcaagccaaagaaacagataataaactctgtttttttatagtacaacatgtgcttcaacattagtaaaataggccttcctaattgggctcaccaatcacaatgtggcctctttcaatggaacggtgtcgttttggacgtgccaattgtgctctaccagagtgatctattcccagaagaagaagaagaagacactcctccaatggcgcctcagcttctctcctccagtaacttcaaatctctctttgactctgtcgatacgttcctcttcgactgcgatggtagattctactttcttccattcgattgttatcctctttagttactactctgatgatggatgatgattcgattcaggtgttatatggaagggtgaaacgctcatcgatggcgtctcccaaactctcgaccttatccgttctaaggtgctttcccttttccccactctctattccttttcaggctctctctctctgatcttttgcgattgtcagggtaaaaatgttgtctctgtgaccaacaattccgtaaaatcgaggaggcaatacgctgaaaagttccgatctttgggtgtcacttctgttactc

SEQ ID NO: 36915 - DNA, 1625 bp, Arabidopsis thaliana landsberg
taatcccacacagatacgaacaattcacgagaaaaaacgtgaaatcggaggaaatgaaacaactacaaagcgattacggatttacctgagcatagataagaatcaaaacgacagattggagcctaacgtagtcgcgaagccaattatgtattcgatttcgtaacgaaacacaaagcatcgtaaaatctcaacctcgcagctctcgttacttgttacttcaatggactttcataatacaaaatggctcgacgattctgatgctaaattgcaattttccggcgaatgaaatcggtgaatcaagagagaacgacgatttgagaattttcgtgagggagaaagtaaagagtgtctttggcgggatcgcgttgcagaagaggcaacaaaataaaaaaatgaggaaacgaaatattccgttcaatcgtgacgaagttattataagatttaggaggtttccgtttcttgtccagagtgacggacgcttaacggagtcacgaaattttgggccgaattggaaaatctttaaaagcctaatcaagcccaaaacctcataccggataatatctgatcataaccgaaaccggctatctcggattgcgaatattgttgcaaaaacgacgccgttaattccttacatgtcgactactcatatgtgtcgcccagatttgaagatcggagatatgaatctcttctttctctggatatgaaagtgggataaaaatctactgatacatcgacttctggaggcgatctcgatctctctaggtttgtgattatctttgaatttgctgattgtttcgttaggcgtgaggaattgttcgattgattttttttccttttgtctccagtagaattgtttcgacgacgaagatgaagaagattcaaattggtgcggtggcgctattggtgtttctatctgtggcctctctctttgaaatcggattggcttctccgaacacagttcctgctttcctctggtctccgcatctccagttatgcatcttgttttctctataattctcaatttgattgatggaaatgtgtaaaaagcctgggacttgtgatatctgatgtgagttagcttagattactgggttgattggtttatgtgattctgaaaatcaggtctgctaatggtgaattggatgaggctgtaaattatcaggtcatgtctgcaaaggatctagttggttctgttttcactccaggaggttggtcaaactttctggtatggtaaaatcaacatgatcttatgatttcaattctacaactcactggatgtcaaatgattttacttattgccattactgtctcctctgattagcgctcatagaagaagcttgagcaacctgttgatgatgcacttgcgtccataggcagagaggtcattgaatgatgtattattgatgctttaacactagcataaatgaccttgtggatctttcgtaccttgatgggatattgataagaaactgatgtatcaatattgccggaaatgaatcgccatcgctctgtatcttctgcgttatgctcagaattctactattcacgttctcttccgcctccactgactgtcttctgatgtttcttcaaaaacgtactcatatcctgcccttgataacacattg

SEQ ID NO: 36916 - DNA, 4519 bp, Arabidopsis thaliana landsberg
ctcaaacccataaatcaccgcaatggcatgtaaacactttaactgtgtaatctctaaaaccccacacaacatcttcaacaacgtaaccggactcggtttaatcccctgaaatctcatctggttcaccaacgaacaagcttctccaacaattccagcgcgtgagtaacacccaatcatcgcagtccagtgcaccacatctctctcacgcatttcgtcgaacactttccgagcatgagccaagagtccaaatttcgcataaagattgaccaatgaagatgatatgtaggaatctgaagagaacccattaacgagaacctgctggtgaatcgagagaccaaaagagaggcgctgaagagaagcacaagctttgagaagactagggaaagtaaaagtatcaggtaagagtttattggcgagcatggaagagaatgttgagagaacttgcttgtgatcgccatgagatgataaatggttaatgtgagagttgaagtacttggtggagtttaacacagacgaagttctgatcatagctccatggttactattacaatgaaatcgtctccatatcaatcttattacagtcacagaagaagatattgtatttgtgtaatggtttacttatcaggtttatatcaacccgaaccaaactaaaccaaaccgaaccaaccaaaatttcaaactatttttaattacgaattattattactcttcggagtaggaggtaactaaaaaccctaaagtcaaaaaaccaaaccgcacctatcgatgtcggaacttccagaggatatcgtggaggagatacgatctacttgcaaaacatggaaccatttattcaacgatacaagattcgcaaaaaagcacttcgataaagccgtaagacaatatctagctctcacgatcacaaaggaatttagggtttatttgttgaactttaatctctatggatgtaacaggtgaatttagcataatcaattctcattcttatttaaacttagctgatatagaggaagttttgcactacgatggcttattgttatgtaccattatgagaggttgccctagactcgtagtttggaacccgtgtactggtcaaaccaagtggattcaaatcaattcaagttgctactacggctatgctcttggatcttggcaagacaaggaatcaggaaataataatagctacaaaatattgagctataattattttgatattcacaagcaaaaaatcgcaatttgtgacatgaagtctaattcatggaggaatcttgacgtcactccggactgtcgcttagtgaatgctagtctttacagcgtatctttgaaaggaaggacttactggtttgttgctccattgacaacctatctttcggaagagacacacttcggcttagtcagttttgattataaaacagagagatttgaacgtatgtgtcttccgtcgtgtcacatagcaactatgttgggaactttggctctctccgttgttaaagaagaaaaacttattgtgttattacatggcgcaaatacatcaaagacagaaatatggctaacaaataagattgatgagaccaaagtggtgtcttggagcatgatcttagcaatggatcaccttgaatttgatatttggtctaacgtaaggcttatttttgacgaggagaagagattcggtgtgtgttgtaatcggaaacgtagggtcaagaatggcaagattcactgtgaatgcatagtacacataattgaggaggataataaagtgacaaaagtggattttgcagcatctaagttgtcatatctgccacttttgttcaattatgttccaagtttggttcaaatccagtgactttggagcttggaggcaacatataaagaggcatgtgaatcgttactctatcttttgtagttttctttatttattctggccatgccctttgaacaatttatagaacgacattcacttaggaagttttattatttaacgtctcaactaccatacgtagctaacatacgttaaattcatgttttcttatatataaaactgtgaagaatatgatgacttgaagttcaagaaaggtttcaaatgtttaaagcaaagatccgttgagacttaactcaggtgaagtaaatcaaacccttgttgagttaggttttggaccacattcatggtgaaccggcaaaaggaatattgccgccactcagccatagaggacaagtttgtctatatgtggtgctagctgttaaggagtgctgtaccagacgcggtttcaggattgtacctttgcgtttccatggtgcaagagtgtccgcgtcagcacaagggagccctagttatattcagtataaaagaggtgctctaggttattgagagatgtagagagaactaaggcggctgagagatattagaaacttgttattatcataagcttgtaacagagtttcttaggtctaggagagtgatacagagtgagctttgagtactagtgaagggtatcgagtggtcacttgtaattctccttgtaaacactatctctgatttaatggattccgagcacagtctcggcccagacgtagcatctattgatgtgaactgggttaccaaacttgctgtgtgttctctgcttctgttcttgcactctcattgttcttattttcgggtctgcttgtgttctgttctcaacactctgttctatcagagacagttttcttgcttgtggtgttgtgtttggtttgttctcaagaaaagtcgacgttttgtagtgagaaattccttacagattggtatcagagctttggttacagtccgtttgtggttccgcagtgttaacaaacggttaaaccatgtctggagcaagaatagaggttgggaagttcgatggtcgtggagattacacgatgtggaaagagaagctcttagctcacagtaatatgttgggcttgagttctgttctaagagaagctgagacgccgatggggaaagaaagagattcagaaaaatctgatgaagaagagaaagaagaacgtgaaaagatggaagcttttgaagagaaaaagaggaaagctagaagcaccatcattttgagtatttcagatagggttttgaggaagattaaaaaggagacaaccgctgctgcaatgctggaagccttggataggctctacatgtctaaagctctcccaaaccggatatatctgaagcagaagctttacagctacgagatgcaagagagtctgtctgtggaaggaaatatcgatgagtttctacatctcatagcagacttggagaacacgaacgtgctcgtgtctgatgaagatcaggcgattctattgctgatgtctctgccgagacagtttgaccaattgagagacactctcaagtatagctcgggaagaactacaatgacactcgatgaggttgttgcagcaatatactcaaaggaacttgagttgggctctaacaagaagagcataaggggtcaagcagagggtttgtatgtcaaggagaaagaagagacaagaggcagatctgagcagagagagaaggggaacaaaaacaacagatccagatcgaagtcaaaaagcaaaaagggatgttggatctgtggtgaagagggtcacttcaagggttcttgtccgaacaaaaacaagttccaaaacaagaaaaaggaccaagcaagcagcagcaaaggtgaagcagcgatggtagaaggaaatcacactgatgctgcaggctactatgtatcagaagcccttcattcaatgggtataaaccttgaagatgaatggataatggatactggatgcagctaccatatgactcacaaaagagagtggtttgaggagctaagttaggatgctggaggctctgtaaggatgggaaacaacacgatttccaaggtcagagggattggaagcatcagactcagaatcgatgatggctccacagtattactcactcaagtaaggtacattcctgacatggatagaaacttgctttcgatgggaaccttagaggaacagggatgtagctttgagtctaagaagggagttttgctagttaaggtggatacaagaactcttatggtaggtaaaaggcatgaaaaactctacttgcttcagggaaaaccagaatgtggacattctttggttactgaaaagaaaagtgatgaaacaatcttgtggcataggagattaggtcatatgagtcagaagaatatgactatcttggttaagaagggttttctggacagaaagaaggtctcagaatttgaactatgtgaagattgtgtttacggaaaagcaagaaggattagctttgttttagccacacatgggacagagaacaagctagactatgttcattcggatttatggggagctccaacggtcccattatctctgagcaaatgtcaatacttcatctccttcatagacgattattcaagaaaggtgtgggtttatttcttgaagcataaagatgaagcttttggggcatttgttgaatggagtactatggtggagactc

SEQ ID NO: 36917 - DNA, 1695 bp, Arabidopsis thaliana landsberg
tcatcttctaggtgatgctttatagattgatcaattttttcttccatcgccttgaaaagcttctcacatttgcgatgtaaccctgtgatcctatcgatgattctaccaacaaccggaaagtaatctgctgctgcaaaactccccaccaactccacagttccttgaatgacttcctcataagtattctcaagtttacttccttgaagattgataccaaatgcaactctacaaatcacacttgctgatagtttcattaacttcttgttcaagttaactggtttctccaatgaagcagcttgtttgatgaaatcaacgagggatgcaacttcttcttttcttgtatgttgaaatgattgcaccctttttgcggtgtagagttcaaccactgtcatctttcgtacctccctccaatatttgctatagggattaaagcagagatcttttaaattgtatgtaactcttgcaggataagtcatatatggtcgcgaacaacattctacgtcaaatgtttttaagacttccttcactgtctctggtgtagatgccaccacagtagacacgcttccaaactttagggacattagaggtccatatgtttcggataatttgaacatcgaacgatgaggttttgatcccagttggtgcaagtttccaattataggaagtcttgggggtccgggaggtagattcttctttgtctttctagtgttccttacaatgatcatagatgaaaagaagacgaatgcaacaatgatataccacaaactcattttgcttcctacacagaaaaaaagagtacaattttgatctcttactttgattcttagtttaagaacacatatagttaaaattaaagtattcgagaatttaagagtttcttctacaatattgaaacatcatagaagccgagatccgtaggattaccttcaattcttatgctctgtcctgatgaattagagagggagagatggataaagataagtgatgaccaaagaaaattagatggataagatagagattgttttgtggctttgtgttgtggctttgtgttgtgacgatttcatatttaattatttatagagcatttggcgctgtggtgacgtttcaattacataagcgtgcagttgaaaatattagaccattctcattctaacaacttttcagatgttttcacataaaataatattaaaagtaaagacatttcaaaaatagatgtctcaaatagttctagaaaaacataattttcattttaaagacatctatatttctttcttttgcttttttattctttgatatttaaaaataatcatcaatagacactgaaaaaaataactaatgtggatgctcacatttgaactctacttttagggttatatattcaagttttttttttcaagtttgtagagcaaatgaaatttaaaattggacgatagttattaatataagtataattccaaatggcagataatttgtatattaattggataatctaaaaattatgcaaatggaaaatccaaaaaaaaagagttttttccgagtcttctttatcaatcgatcaaaaaaagcaaacacattgatgtggtggcatggatttattaaaagtcaatgaataaaatttactaaaatactaaaagaaattatttaatgattataagtttgtaatattttgagaaatgccttttcacggtacttttt

SEQ ID NO: 36918 - DNA, 6353 bp, Arabidopsis thaliana landsberg
  unsure (1)..(6353): unsure at all n locations
aatgttcataaaacccaatctaagattggataatagaaagtatgattagaggtttgaaatttcaataatgcaaaaaaatacatgtaaattattgcctaaaaatggtttaacatgattgcaggttaatttatagtaatcacttaccatttaaagagaaactcataggcatgaggattagtgttgagagccaaagcccataaccatgtatatgtataaccttttctgattaaagtttgataatcaatctacctaaattcccattgaagctaaatgaatgaagggtctccgagcacatgtagtgtttattgattccaccttcatttaagttaatcactaatcattaagtgtttaaacaaacctctgtttcttattttgatcgaaagtttgagaaaccatttttgggcaactaaaaaaagaagaaacgcattgaaaattccacaggaggcttgagaggggggcattgccacagtatcgagtgtcactttctcaatcaaaaggttttctctctcttctcttttttcctctcctgcgcgaaaacaaaacgaagagagagagagagactcagacacacacagacacagagtttaggtttgctttgtaaatctgtctctgcacttatcatagtttcgtttctcttttgagaaagaaaaacccaaacttgccatgttttagatctggtcctttttaagctccaaaagattgttgctttttctcttgcttaagtttttgatttattcttcttcttcgaaaagtctgtacctcgcaagagtttgattgtccttgtgttgcgatttccatgtttagtatctgcatttgatagccttcgatgctgcatgcaattcccaagactctttctgattgctacaacgccgtgatttctctctgccatttccttcgatttgatttctgggttctcttcttctcgtctctcttctgcatgtttcgccactctaccttagaaaaaaggttactttcgcctccgatttaggctcgatttgatgaattcgtcgtcgtgtggctatttatcaaattgagcattagggtttctgatttgtgggttcagaattgtttttatctatctgtcttgttgttttttgtccgctacaaaagcctatggattctcagaggggtattgttgaacaagctaaatctcagtccttgaataggcaaagctctctttacagcttaacacttgatgaggttcaaaatcacttggggagttctggtaaagctctgggaagcatgaaccttgatgagcttttgaagagtgtctgttctgttgaagctaatcagccatcgtctatggctgtcaatggtggagcagctgctcaggagggtctttctcgccaggggagtttgactttgcctcgggatctcagcaaaaagactgttgatgaggtttggaaagacattcagcagaataagaatggaggtagtgctcatgagaggagggataagcagcctacacttggggaaatgacgcttgaagacctgttgttgaaaaaaanaaaaccnaanngctccaggtgagctggctcactgagactatccctggttcgaaccatgatggtcctgttggtggtggtagtgctggttcaggtgctggtttagggcaaaacattactcaagttggcccatggattcaatatcatcagctcccatcaatgccacagcctcaagcatttatgccctatccggtttcagatatgcaagcaatggtgtctcagtcttctttgatgggtggtttgtcagatacacaaactcctggaaggaagagggtagcttcaggagaagttgtagagaagactgtagagaggaggcagaagagaatgataaagaacagagagtctgctgctcgttcccgagctaggaaacaggtgagaaacaactaatttgttgttgttattcttcttgtcaagtcatgctcgtttttgttttaacattggatattgatgagcaggcttacactcatgagctagagatcaaagtttcacggttagaagaagaaaacgaaagactcaggaagcaaaaggtaatgcattgtaggtttttctccctttttacaacacatgcattgattaaatttgtgattactagaaacttgtaagagctgatcgttgattagttctggattcatattaaagggaatgatagatgatagaagatgtagtgaagtatagaatagggcacacgcatagtagacaatatatgatagaaaatataaccacgaacaagagacaggaggaataggtttagaccaaacgtcttagaagacatagttttcctttacccggaacaagttggtcttgctggtttctagtcttcatggactttctgttcttcaattttgtctgcgtttatgtgtggccaaagctaatccttacattactttgcaggaggtggaaaaaatcctcccaagtgtaccaccgcctgatcccaatcgtcagctccgacggacaagctcggctcctttctgatctctaaactcttttagtctttttctttttttctcttctgtgtcggttcacttataaaaaagagaggaaaacagctttgtttctttgtacattccgtagactttcttgacttggagcaattctgttaactttaaaatattctcgagttattgtagtagcagactagcagcagtaatggttttcatgagtccgattgaaaaaaaaagattgaacagaaggaacttgtgtttattattcttatagcatttgattgcaaagtgtaaagagttatagacaaagtctaaatggatcacactgaaaggaaaattgtttaactctgcaaagccttcttcttgtaggccacttttgttcttaaatgtaaacttttaactcaaattcatctcaagaatttgtttgctatatgttctgcaatagccaagcttgaagttaaaccaggtgattcgatgccaaagagattaacaagaccaggaactccatgagtctcctctccctgcatcaggaacacacaagactcttgaggataacaaatggtttcataacaaaaccgaagattccacaggacctaatgctgtgagtgtagtctgatgcattttgataaacaaaagcttacctgtatgacaaaatctgcaggagactgttttggcccggaaagcttaggacggatgcctgaataacccggttccaatgatccatctttgagatccggatagtactttctgatctctgggtagaatttctctgatcgttgtgggtttacacgataatcaaacctgaatacaaacagcatgaagatcttgagtaacttcaaaatggactaaatagaaaggataatttaagaacagatgcagtatttacttgttgaggaagcttgatgtatcatctgtgcattcaatccattctacatcaggtccaaacttaacaagtccgttcaaatctacagtgacatggacaccgagacctccttcctcaggtataggatacacaagtttattaaaaggtggagcctttatgcccgatagtgtaaagtagcatccacgagcatagtgagacgaaggaacaaatcgatgatctaagccatgtagtctctttgctagagcttgagcacctaatcccgcagagttaacaacaagattagggataagctcaagctgtgcttctgcctcacaccgagattcagaaaatctggtatcagcaacatacaaatgcatcttcttttcttcaacacgaccgtttaaaaccaccgtgttgtacgagaaagttgcgtggttgttctgtgcttctccctgtagtctcaagttgttgttatccctgtaaaccatgaaatcaaaactcttttcctaaagacagtacaatgaagaccctatatagagagctggggaaaagtttattatatataccactaaagatagcatgaaggaatgtgtatcaagaatgccagattcaggagatagcaaagctttaacacaacgaagctgtggctccattctcatagcttcaaaaccttccaacatccttagacccgagactctattctgagttccaagatgcatcaatagatctagtttcggtatctcagaggatccagtagcaacgataagcttaccaatcttcttatgagggatttcatattcagagcagtatttatacagcaattccctccctcttacacaaaacttggcctgctcaaaatccaaacaaaactcactattgaacttaccaaaacacacatctgattcgatcctcaagagaaagattgtacctttagagagtttggtggataatagattccggcgtggacgacttcactgttgcgggaactcgtcacggtgccgaacgatgatgcggcgtcgaggatcagaacttctctgccgcggagactgagctcacgcgccaccgctaaacctacgactccggcaccgatcactacggtgtcaactctctctttagctatcgtttcagctccaccgcttattcctctcacaattgttttacttgcgtcaacgacgtttatcaagttccaagttggttttagattcctcgttgacaatctcatccattttctacccagacaaggtagcatcttcttagtctgcagcaaaatgccttcagcaccacataaatgggttttattctcaactctctaacattattacattacaggctttgtttgcatttgcagcccaagcttcgagaggccgtatcaagctaaacgccgccgtttcaggtttatgcttcatctttcctcatttcatactttgtccttcaccaagctgatcccttttcatttctctggcttctttactactgttttcagtcgtaattggtttcgaattttgattccttcatctgtagacagttgtaaggatcgatttttggcttgattctttgactaatgggcttggaggaacttagtaatctggggaaaattagagctttcttgagttgtcgtctacaaggtatatcgtgggaatgcctaatcgtggtatctgctgagtcaagtttcatatgtctggatcttgccccgtgtatgagttaatcattagttatcagagttcattagtgtgaattccgataacttgtttcacattggttcttctgtcaagaaagttgctatttgatgctacagtggattgtgcaattgatttgttgtgtactttttggtctagaaagtagagtgcatgtgggtcgaaagtccaacatttattcaagctgtttcatgggatttgccgtcacggtgacatcacgtcattgtgaaagtaagctatagcctaaaaggagtttcagagacaaaggtgctttgtctcttgccatttgttccctctgtcatttccttcatcctgcacagcctctgttggtcagacatcaaaggcaagtttctaacattttcaagcatcaatgtgtggcttgaaagttagagttcctggtgtggctttttatataatgatctgctggaaattcaatggttgaggattttggcaaaacctgaaatatctcttgcagatctctgtatattgtctataaaggcagagaccatactaaccagtaaaatccatgcttacatatatatacaaagcaatgatatataaatcatgttttttttgtgctttatcggacttaatatggagtaagtgaaatccttagacctccaagtttgcttagacttctcgattgttgtgagatgtgctactgtcttaaagaaggtcttatgttgaatccattgtcgagtgtccaagtttaagtgggtcttttgcaatttttcaggaggatgtcatggacaactatcaaaagctcggttggtggggacagattcgatccagcatctggttcttcaagtaataatagctccagaggtctacggctaatcaaagccatacaagttctcagaagtaagcttctggtgaaaattcaggagataaagaaagatctccccaagaaactgttctttctcttggtgggattctactctgcaactgctttctctacattcataggacaaacaggagactgggatgttctatctgctggattggctgtgcttgtagttgaatgcattggagctttaatgtacagagcttctattccattaatcaacaagatgcggagcacgatcaccatgtttaactattggaagactggactcgccctgggactgttcctagactcattcaagtatgaagtttatgaaagaaagtttatcagtttttgtctttacgctcttgtgatggttccagttaatgaaaagtgtgaaaacccttttgactggacacaggttttagcttggacctcggaaaaggcagcgtaacctggctcaagaatggagagtggccagcaaatttatgaaaagctgtgtcccctttatgcctgaaaccaatacat

SEQ ID NO: 36919 - DNA, 1429 bp, Arabidopsis thaliana landsberg
tacacatacaaattatgtaattgtgtcaaaaccccaaatcatgtttagtaatctctattcctaagctagataactatgacccctagaggttaaacttttgtaatgataaagaaagagaataatacaaagcaagagaaataaataaatgcttatgtaatttatatatagtcacctctctatacccttccctacacacatggagacactccaataaactcttcttctgcctcctctgcccatttctcccaaaatctctctctctattttatcagtctctctctcagataatggcaatgttgggcttggttttatctgttcttactacaattcttgcattatctgaagcaagaatcccaggagtttacaatggtggtggttgggaaactgctcacgccactttctacggtggctctgatgcttctggaacaatgggtatgtctctctccctctctctcttctcttccacattctcatcaacctaaagttccaatctttttttgtaaccacattgtgaaaaatgttaaaatcttgattttgtaccttaaagatccaatctttatgttcatctatgctaaaccaaaccaccacattgtcaaattaacggttttgctctgttttttgttttcaggaggagcttgtggttatggtaacttatacagccaaggttacggtgtgaacacggcggctctaagcactgctctgttcaacaatggttttagctgtggtgcttgttttgagctcaaatgcgcgagtgatccaaaatggtgccattctggtagtccttcaatcttcatcactgcgactaatttctgtcctccgaactttgctcagcctagtgacaatggcggttggtgtaaccctcctagacctcactttgatcttgctatgcctatgtttctcaagatcgctgagtatcgtgccggaatcgtccccgtctctttccgccggtaagaagagtaatttattgtttcagtggaatcttatatatcagcttaaacctaggctttgtttagttgagaaagacaaattggagttaatttgatagattttaaactttggggtatgaaattaacatcttagaagtattgggtcaaatgattggggttaatgtggcaggattaaaagttttagggtactagtcgagaagtcttgcgtctatattctgttcaattagggttaatgccgacagaactagaagtttagagtatcaaacataacatttataaatattatggtgtagttgataagtcttatttttatagattctgaataatttggtttaatgttgtagaattaaaacatttagggtgtcaaacataatatgttagaagtataggggtacggtcaaaaagtcttgtcttttgattcttggcgcgagccggtgcagcatttatgtcgggtctctcgtacttggctaaattaccaaatc

SEQ ID NO: 36920 - DNA, 1457 bp, Arabidopsis thaliana landsberg
  unsure (1)..(1457): unsure at all n locations
cccattcgtgagagtgaacaatgagaaagtttcataactctgagtgaaacaaatgtgacagagtgcagttgataacttggcgaaccaacagcgggtagcttgttagaggctatatagagaattatgtaaccgacaaatgttttagatagatccaaacatttaaaacatgatgacatcttcatgtagacctctttttcaagattaccatgtagaaaagaattgtgaacatccatctgagggacctccaatatttatcagcagcaacactaaaagagaataaattgttgtcaactttgcgagtggagcaaaagtttctttaaaatcaataccctccttttgatgattttccataaccactagacgagccttgtgaagcttaagtgaactgtccgatttgaatttgagtttataaacccatttgctactgatcactttgtcccatgtgataactctataatatctcaagtatgatttgcttcaaaagcatcaatttctttttacatagcttcacatcatttttaataaagaattgcatccttaaaaagtttgggttccttgctatcaagaacatccaccaaaaatgctatgtggtctactacaaatccacaatctattaaataatttgaaaggagatataggaccttaccataaaccaaagttgaggaagttgagttaggaaaagtaagagatagaccgtgagaagaagaatgtcttggagggataatataatctttaagtaatattaacaacattttccttctcagacctttgtccaatagttcaggaagacccgaagaggcggatttgacctggccaacatattgagggatcggtgtttttgatggatcgatcggtttagagaactgatcgaccggtccaaaacttgcaagtaatgttgtcgaggtagagatatatatcaatcattcatgttgtggaattgatcgatcttgtgcttacaggtatcgttgagggagtagaaggatcgatcgtttctggtatgagatcaatcgatctgatagaccaagaaacaatatctatagtaagtaggtgtaacttccaaagatgataaatcaatggaaaccagagcaataatcgcaaacgaagancaatcatcatcatctaaatgaaattgagattcaattgcaaacaaaagataataggcttgatggatggcaagcaaagggagagaaatcctcttgaaatcgaacgttgcgtcataaaaatcttgtcagtttcaagatcatatacccgccaaacttttttaccataaggataaccaagaaacacgcatttgcgactgtgagatgcaaatttaagtttatcacgtgatgggatatgagcatagcacaaacatccaaatgtacgccgcataacgtatgaaggttgtttgccaaactaaatttcataaaatctttatccctttagtactaaagatggatttcgattaaggcgatgtg

SEQ ID NO: 36921 - DNA, 3923 bp, Arabidopsis thaliana landsberg
ccttgtttcaggagttgctcaagcttatcacgaccaagagaatgcccagtaaaaaccatgggtacattcagagccccagataaaagagcagtggaatcaccagcatctgcataatgcccgtgaatagaaactggccatacttgttgtccaccaccaatttgctcaccaagaacctttgaaatctgcataatatggctaagtgccctatcaacaaattcagggatatgaggccagaggagctcttttggtacatatttatctttcgggccaaaaggaatacggattatataagcgccactactctctccattctcctgctctatatctgtgtctataggatttaacatctcagacggttcagagtagctggaatccacatctggcgcggtgacctgtctggtcaacaaatcaacacgatagactcctggcattgagcctaatgcccttgcaagttccacaacatacttcacctgagtacataagtcgtttcatacatgtgtgaattgagaaattttaaaactcaaaaacaaaaaaaacgcttgtaggtagaagtatacctggccaccagtatcagaatcgcgaccaagctccatgttttcaccacgtatcaaaccatgaagactgcaagacaatttctaccattattcaccaccatgtgaaacaaacttataccaactacaaacacacaaattctcaagtaatggcctgtaccttattaacacgatgtaaagctttttctctttgtgttgagcaaaccaattctcaaagacatcaacagaactaatccgagacattcttcctttggtgttgttatcactaggagttgggatttcaccaggcaaatctgccttctctccttcagagaaatcttcagacatttcagcagttacttccctccttgctttctcacgctcacgctcccttttagcttcacgcttagcattcttcccttcaacctaagtaaacattacacaatcattaactcaaaacagattccaaatccagtaatcttcatagcacaagatccagaaagataacgatcaagctagaagcaaacgatcctaaaacgaaatcacaaacctgcttcttctggcgagccaaattccagatcctccagcacaaattctccaaccttgtgttacgctcttgcggactcctggttgcagcagcctttggatcaataacaaatcaatcggaaagttgtcaggaaacatcaaaaacggaaacgaaaaggaataaatccaaagcgaagaggtatacctgaacccaggaacggtgaagatcagtctcatcaaagcctgtgataacctcttcaacgaaataacgagtgggactgaaatggccacgctctctcagcagaagagacgatttggaatcgccggttccaggcggtttggaattggcgattccaggttcggctgcgagaatcgcctccaggtaactattcacccagtcgtttcccaccattggtgttcgctctcccgaactcaacgatctggagaaagcagaaaccaatctctctacaaaaactggtgaatcaggaatcggatatacaaaagtgatgatagttagtgttgtgatctggagatggaagaggatgacaggtttctagaaaacgaacgagagagacgaagaagaaggagagggaaagaggtgatttggcgatttgtgaaaaagtgtctcttccttttcttacttttttataacccaattaaatgacccttaattagatatttgactatctgaattaattactgagggaatatccgattttgtcatatctttattattagaaacataattgtttagtattaaaaaagcgtgaggtgtcaaaattacgacgagtcacgtaacactggaagattcgtaacgatttgtttatgaatttttcggtatgagtcttctcaaacgactaattgatactataacaagcgcagctgcgcagtgagtgattgacatttggcaaactctagaccataattagcatatagaataatcaaaagagcataaagaagttatttatacgaacgaatattataacacactgaccaaattttctgttctttaacaaaaaataataataatacagtgagcagctgtctacaattttattataatcttcacgaccacgaacccacgtaaccccctcaaaatcagatattatcaacttacaagcttttaatatgaatgtcggtagaaaactactcggtaaattattgattatcattttaaagtatctatcattcataggttatcatcaatatgttgacgccattcgccagcattactgtttaaattatattaattcaaaaaatccctaaatatgtcggtcacaaaccaattacttttactttatttgacagtattggttcatgctgctgctaattatgatcatctatagtacgagagtgtaaaaggaaaagaacgtcactcctgaaggccaaaaccaatatcagttcattacaaatccattcacaattacgaatcaaatgaaggtaaagagagctaaatgaatgtaaacagaaaaagcgtgtactcaaaacttatattgcccgcttctaaggcaaggaccaaaggataacagttgacaggaagtaacaaacattagcacactatacaacaaaaaacaaaaaataagcaaagtaatgtgttgagagtagaagatagaatgatcaagaggcgtctctgagcttaagcctaggagtccatttaagatggacacaaagcttccctgatttagctccatctaactcaaaccactcttgaaactctccttctaacatcactcgcgtcaatgtcattatcactctccctatcttgtccttgccaaatttgtcatggtcccatacttcaagcgtcaatagatcatgcaaagcatcttccactacaaaatcaaacgtctggttccaaaccggattcaagctatccggtactacccttgtcttggatttcgtttctgatttcttcaatgtgattaccacaaatgcatctgcttttcccataaaatctacagctggtaagtcttcagctgccaccactgtcacagacaacactcctctcactatcacatcttttttcttcgaggtcaccagttttttcatatccgtggcatccgaatcctcgctttccggcttcagtaccttctctaaaatggtcaatgagtagtccgggttaaacgggttcttcaatccgccttctttgcctaagggacaatataagagctccaactgcacctatatcaccacaaatatatcttttatagtcctaactaaaatggatatgttatatttttctacattgtgttatgaatatggaaacaatagttatgataggaggaaatactaacctgacccctattttttgtatccctttggatctctaaatccttgactaacttcaaccaaatatctttaactttcccgggtacgagttcatttaacggtacttgagcagccccaataagctgagaagatccaactccttcgtcgtcaaagactcttactgtcaaatgttgagttgagacatcttccacaatgaactcaaaatgttcattccaaatcggattcaacgagttactctaaatgacattaaaaagaattaccaagagaggtatgcacaatccaaatcagtaagagaaagatagtggaatctgtttagagggaaaatcttacaatagttttggtctttttggttctgtcaggcaaagggcgaatgaatacaacagcgtaaggatcagattttccaatcatgtctttgttagctaagtcctttgcttgcacaagcttcacatccaattttccaacaggtttcaactccagatcactgtcaaaacacattttcagatcttcataaaatggtctttaccaaaaaaaaaatcatacaaagaagcaaaaaaacctgtaatctcctggtaaaataggtcg

SEQ ID NO: 36922 - DNA, 2250 bp, Arabidopsis thaliana landsberg
ctcttttggagaaccatcttgatctccatgctgtcttatggttagaaacatatctaacgaagtggccaaaaacatttatagtcgtttcccatgctagggaattcttgaacacggtacatttttttctctagtgatctccttgcagttattgtttccccaatatctccggatatgtgtaaaccatatgtttggttgcaggtggtcacggacatcatccatttgcaaaaccaaaaactaagtacctataaaggaaattatgatatcttcgaaagaacacgggaagaacaagtgaaaaatcagcaaaaagcttttgaatcaagtgaacgatcacggtcacatatgcaggtttcttttcttcttctggaaaatgaactcataaattctgtttccaactcgtctctggtttgtttaataatattccaacatgggatgtaagtttgatgcttgatatattgttttctgctacaggcgttcattgataaatttcgttacaatgcaaagagggcgtctcttgttcagtcaagaatcaaggtgtcaactgttacaactatttatgtgattaaattttggccatcagcggtgctctaatattattgtgtctatgattcaggcattggaccgactggctcatgtggatcaagttattaatgatcctgagtaagcgagcccctcttatatatatgcttaactactttcaaatgatattaggaatgatgctataatctgatatttgataaatttgctacagtacgattcgatgcttactctcagctccagccttttatgcattaacctcttgtcttatttttgcagctataaatttgaattcccaactcctgaagataagcctggacctcccatcatcagttttaggtttgtcatcttcctgaaatcagctgtgtgaatctgacagaaacttctctaattttggtatggggaggatccagatattagcatgctaaattttcttgctcgtttattttttctacagtgatgcatcatttggctaccctggtggtccgttgttgttgaggggcctgtattccggaatatatctggacagccgtattgcgagtaagaaagctccccacctctgccttgattttgagatcacacaaatgatacatgtttataaaccttcatctatcatatgtggaaacaacaagtgcagcatcattgaacatgtagaacttaaacttttgatgttctccccagaattttaacctctatatatggttttctcgtcgatttgcagtggtgggacccaatggtattggtaaatcaacaatactcaaacttatttctggcgatctgcaaccaagctctggaacagttttccgttctgctaaggtatggcagaagacttctcttttacctgaacaacaaattgatcactgtcactctggaacatatgggatgaccttttattaaacctcaaataatggggaccccttctatattcttacgaagcattgatattttgaaagttgctttgacagtaatattattaaatcttggttttcattacctatagcttgttttcctgctctgttaagtgttaatgctaaatttggtggctctgatatggtgtattgatatctttatacaggttcgagttgcagtctttagtcagcaccatgtggatggactagacctttcatcgaatcctcttctatatatgatgagatgctacccagtaagttcccacacctgtaatatccctcttatttgcaggtttcagttaacatgagatcaaaattgagctaaatgtttcttgtattagagtttacagtcttgtctacttcttacaagttatatgcacaatttaagtaagcaaaatatacataccctcggcttctcaatatgtcttaactggtatgttatttgatgtggcagggagtaccagaacaaaagctgagaagtcacttgggttctcttggggtaactggaaatcttgcactgcagcccatgtacactttatcaggtatacttggggtatttggagttgtataaccacaatattctagatgcaggccctagaatgaaattggaactagccaatttttatgtgctgtggcttgttactttcactaaggagttttatgtgtaggggagtgaatgggaaattatgtggtcagaagagcagagttgcatttgcgaagataacattcaagagaccacacttgctattgatagaagagccgtccaatcatattgtagctagacatatgtatacatgcatggatcttt

SEQ ID NO: 36923 - DNA, 1025 bp, Arabidopsis thaliana landsberg
tcaaagagtgtggaatcagaataatgtggcggagaatgcaaggaaaggacctgaacagatttctattgctaaaaagctagattcagtgaagccgctactacctacattgcctcctcctccagtaattgagataacacgtgacccatctcctcctccttcaccggttcagccaccaccaccaccatcaccacctccccagccggttaaccaagtggaagcatcacttgaagtgcgtgaaacgaataagggaaggaaagggaagttaccgaaaccgaaggctaaggatccaaacaagcgggaaatgacaatggatgaaaagggaaagcttggcgtgaatctacaagaattgcctcctgagaagcttggacagttgattcagattcttaggaagaggacaagagatttgcctcaagacggtgacgaaatagagttggatattgaagctttagataatgagactttgtgggagcttgatcgttttgttaccaactacagaaagatggcaagcaagatcaagcgacaagggtttatccagaatgtgtcaactccaccaagaaacatggtaaagcaaacttctgatccatttatcaaaatgcacactttgtttctgattggttagtactgatctttgtcattatcatcagcctccggtgacagaaatgggaagtgctgagaagagagggaggaaaggaggggaagcaggagaagaggatgtagacattggagaagatataccagttgaggattatccatcagtggagattgaaagggatggtacagctgccgctgctagtggtggctctagttcttctggcagcttcagttcgagtggcagttcttcttctagtggtaatatagtcttaccctttcatctatttctcatttaaatgtttatcttttgccaatgtttaaacggttttcggtgtttgactctatgcagattcagagtcagggagttcatcaggaagtgattcggatgcggatagtgtgcagtctccatttgtggaagcaaaagaagcccccgt

SEQ ID NO: 36924 - DNA, 1778 bp, Arabidopsis thaliana landsberg
gaattgagctgggcccagcaaattctctcaattcattgaagaatattacaagcagaaaaaaaaaaaaaaaaaaaacgatttgaaaacatactggaacaagagaaatgatgatttggagttgttgcagcaagtagaagaagaagagcagctaaactagaagcaggagtgctacagagaagagaagagaagagaagggaagtttcaatttcaatagattaaaaaagagaagagtgagagacctttcgagcagaagagtgaaaatccgaagaacggcgacgaggagatgtatcggaggaaaccgatgatggaaatggttttttagtcggaaggaggaatcagaatttgatctcttctttttgtttcttttgctttgtgagtcgtttaaaaacgtcaagtctcactctctctccccttacttttcaaattagtcaatttcaaccccctttgctttttaagctcgaatcaataattccacctatttttttaggacgagaacaaactgcaacttttttggtagtaccaacttacgagtacaatttcgtatacattcattctcagattctcttgctaagttataagaatggtaaattatttaatgtgatttttgctatttgtgaaaatagaagataacgagcttattttaaaaaacaaaaaaaaaaatataaacttcaaagattttgctatggttattagattatgacattaaaatattaattttaatagattttcattctaaaatgcatctagatttcaatattgatttccaagtagcaagaaaattatttaaaatcatagttaaattaaattaatcttaatttgatttaaaattaaaaaaactcaaaattaagttgtcaaactacaactgactgccacaaggttataattttaatttaagcgattgcaaatatagttcaagaaaccatgcattaaaaaaaaaaaagtggacaaatgttaggtgactttgggtatttatggtcatcaatgtactctattagtggacttgaaaactttgaaaagcccaacatttgttctggctctttaatctgagacctaaacattgctgatttggtccatctaaaaaacatagtcaaagtccgtttgtccggaagttttttctaccaatttccaaaaggcctttctcggcctatatgacctttgtgttggtccctgacttctcctatgactaattgctgtgccctgtgtgccatttttttttaatcagagttttctcattttatataacaacaagttatacaatttcggattaaattccgacatcgtcaaaaaggaagaaaaaatccgaccaactctaatattattggttatagtttttgcgtgttaacattttttagttaatatagagatcaaatttgggccaaaattatctacgagaaagtctgtctcaactatccaaagttaaagatattttcgctgagaagttaaaaataatatttcgatgggcccttcaatcttagctaatttactaaagtaacccttgtcgaaaaatcaaaaatataaaatcgcaaaacgaacacggcttagtttatcttcttgtctctctctcatttcttgttattatccacgaacgaagaaaaacctagaaaacagttgaagaaagaaaatcacaagagaagccatggccggaattggaccgataactcaggattgggaaccagttgtgatccgcaagagagctcctaacgctgcagctaagcgcgacgagaagactgtcaacccgctcgtcgaagcagcgccgatattgagaccgttcgaaaatg

SEQ ID NO: 36925 - DNA, 3258 bp, Arabidopsis thaliana landsberg
cgttttgcttgatgattcgttgatctgttttcgggtttgcagtgcaacagtatttggggtttctacagagtcaatgcagttattatacgactcgagagggaattgtgttcctaccatactcacactattacaaagccggctatacgatcaaggaggtttgcagtagaaggaattttcagaatcacaggggataacagtgaggaagagtttattagagaagagttaaacaaaggagtcctacctataggcatcgatatccactgtctcgccggacttataaaggcatggttcagagaattaccgaaaggggtactcgattctctaccatctcaacaagtgatgcagtgtgagtcagaggaggattttgtgaaggttgtgagactcttgccgcaaacgggaagcttctcttttcaactgggcaatcaatctaatggctgattttgtagagtttgaagttgtcaacaagatgacctcccgtaacgtagctttagtctttgcacccaacatatcccaggtcacttcttgcaccacatcacaattttccaagagtttcctttttttctctactcacattgatcttacacaagtaatgtcagttttatcttagtgctaataccaaaaaatggatcaatatatcaagcctctgatccgcatactgggtctgttttggttttactgcagatggcagatcctttaacagcattaatgtatgcagtgcaagtgatgaacttgctgaggaacctcacagacaaaacactcagagaaaggaaaattgcgacttcaaatgtcgatccttgtgataacagaagtgaagctgaagatggtaatgtcgaagaatataatcaagaagtagaaatgtatgttcttgaagaagtagagcaagaaggagatgatgttgatgatctcgacaacgaagataagatccgagagaataacactgcttgctgatgaacacaaaccatcaagcgcagtgaatgctaatgatcgaaagaaacaggaaacatgaagacagccgttggagttggaaacgtcgttagcagtgtagtgtgtttagattgatttctctttttcgttatcgaaggtgcatgtaacttaggctaattgttccaaatacaacttatgcatttgtgtttatataaacgtatccaatctttccatatgacaacctagaaagataaaagtaccacaacaaattttgagatgtatgaaaccattttctggtcttttatttttgggcttacttaccctttaagattaagccagtaatagttgtagttaatggattttcccagtgtgatcttaaaacaaaagatcaaagcttccaacagcaaaagattcagagattaccatccatagtaagaagcaccttgtacaattctggacgacggtcacggaacactccccagctttgccttttcgatttgatcatattaagatcaaactgtgccacgagaacggcttcgattttatcatctgcctcagccacaatttcaccagttggtcctgtcatatcatcacaacaataatatggaaaagtttttaggaaaatgctgatgaataaatttgcaactaaacttcaaagttactgatctcatctgaataagttaaaacttgataccagcaatgaaggaagttccgtagaaagtgatctgactgggtccatgctcagtttcaattatttccttccctatgcgattcgacgctactagaggcacctgaaacccaaagtattgccacattcatttagcaaaccactacagaaaaatcaattaattattgggaaaaacaaactgattgatataaccactaaagcacattttgacaagttcaaactagatacatgtaatttattattcatgtcactgtcatatagctttcagttacaagttatgctcatagaaagacactaatgactttgaaaactgaaatgtttaagacataataataacttaccacgttagctccagcatgcccttgcataactctcctccaatgaacacgcgaattcaatccctgggcttgaggttcagaaccaatagcagcgggataaaacagtacttcatcaccctgtagaaccatagcttgtgccgcctcaggagaccactgatcccaacatatagctgtacaagacattgcatcaatacttcaattaagatgaagtaacaaaggaaaggacataagaaacagaattctgcatagagcatcttacccactccaattttagcaaacttcgtctggaaaacctattcacaccaaaggggaaagaagagatcaatcatgtgaaccaaataacatgacagttcaatttgagtttcttcttgtcaacactaccttaaagccagtatctccaggattgaaataaaacttctcttgataaccttaagataaaaagaggtctcagcaaaaaggtaacaagaaactcaagctatatttccaactccaaacttgactcaccaggtccatcaggaatatgagacttcctataaattcccaagtcagttccatcagcatcaattatagcaatcgaattgtaatgtgcagtatttgcctcctcaaagaagctaacaggtatcactacacccaattcctttgccagcttctgcatcctgtgttaaattaaaccatccaaccattaaaacactagatagtacatacatacattgagattccactttactgcgttagaaatcgaataagcaatgtcacaccttgcaatggtaggatggttcttgtaaggcttggctcgcttaaagaagtcttctctttgtgcttgacagaagtaatatccttcaaaaagttcctgttatacagaaactacataagactagctaagacgattggatactagataaatcaaaaacacttataaatctgagaaacaatttcgaagagcaagaatgacctgaataagaatgatattagctcctttagcgtgagcttctctgactaatctgcgtaaaatgtaaacaattccattctcagatattgaaattggattcgaacggggaatctatatcagagcttgaaattgaatagttcgattccaaaggtccgtgatcacaataaagcgctcgagaagcttatacgcatataaaattttgaaggaggaggaagatgggagagattgataattagagagagggagggatgaagagaaagagagagacgaaccgctcagcggcggcgacattggtggagatatcgtcggagcaagcgaattggagagatgaaacagccgcttctcgtcttcttcccccc

SEQ ID NO: 36926 - DNA, 1410 bp, Arabidopsis thaliana landsberg
acatctataaacaaaacaagctatggggtttgaccttgtgggcaattttttttttattttagctgctgacttatcccattgtggcgggtcttctgtttgacataatataataaaaagggagggagtcgttggcgtttgatattgaacaaccaaggaaggagagcctatcaaaccacatgcttgcatcatctcttttagccaactctgcctcataattactttctataggaggccaagctttccttcttctttctctatttgtctgatcagtttggttcatcaaatcctttttctcccatggaagaaagcaacaactcggccgttgtggattttcctgacaactttatggaccagctcttgtgggaggagtgctgggaagaagaggcaacgcagcatgaccaggcattatcatcaccatcaccatcagggctgaaggagagggtggcttgcgccatggggcacctgcaagaggtgatgggagagagggagttgctgatccagctgtgggtgcctgttgagacaaggagcggccgagtgctgagcacggaggagcagccttactctatcaacaccttctcccagagccagagcctggccctctacagagacgcttcagctggctacagcttcgcagcagaggttgcgtcggagcagctgttggggctgcctgggcgtgtgttcctgaggagaatgcctgagtggaccccagacgttcggtttttcaggaaggaggagtaccctcgcattggatacgcccgcaggtatcaggttcgagccaccctcgccctcccactcttccaaggaacgtccgggaactgcgtggccgtgatggagatggtcaccactcaccgcaacttgtattatgcctcccaactcaacaccatttgccatgcccttgaggtcatttttgaagcctaacctaactctgactcttgggtgatgattgataacgtaaataagatttccttgatgaattgagaaagaaaaaagattacattgatgaataaagtcagcctgattgagtctttataattcccatgtaagaaatggtaattatatacttacctggcaatattcttgtcactggactgttggaacactgctcagcattgactagttcccatgtctttgcattattattattattagttatttggttgacgtaagcaacctttgaagagcttcaatggttaacatccgttactttatataaacactaaatatattactcacaatcggaatttctatctcgcaggcctttgatctccggacttgacaaaccttcatagttccagcctctctcaagggcactttttcttcttcttctgtcttcaagaacagaagtggcctgtattctccaaggcatctgcagttcacacggactccctctagccgtcaagtgggggcacc

SEQ ID NO: 36927 - DNA, 1083 bp, Arabidopsis thaliana landsberg
  unsure (1)..(1083): unsure at all n locations
tctctatgtagtattctttgagagacgtcacaatttaccttctatgcatttctgtaatcttatgccattacacttctttcctggatccatcattctgctctgttcttgtaggctgcaaagattgttaaacaagtattcactgttnnnnctgtctatgacattattgttcctgctcttctaagtggcggtgtgtggaatcttccaaaaacttgtaactttacattgggtgttccaattggacccatgcttgcaaaaccaaccaaaggtgtagctgagatactgaataaattccaggacatcgttttcacatgtgaatacaaatatgatggggaacgtgcacaggtgatatttggtgtctactgaattaggatgaatgctattcttagatatgagttatttaaatatggtatggcttatcatcaatcaatttctgcagatacattttatggaggatggtacatttgagatatacagtcgaaatgctgaaagaaacactgggaagtacccggatgttgctcttgcgttatcaaggtaaacatctggtgtaactggttgaaaacattagagattcaatctttctactgaagttagtgaaacatctcaatgcagattaaagaagccttctgtgaaatcttttattctggattgtgaagttgttgctttcgacagggagaaaaagaaaattcttccgttccaggtaactcataagtgaatagcgttctgatattaaagtatggttgcagccttatattttgtctattcatttacggtatgttattttatagaaatgccagagaaatgttaaatgtgttagagtttccatcttgttagccagtgaattaagaaataagcatagctgtaatgctcttttagaccagattttcgggttttggacactgtctaacctttaattttgccaacgttactgaataaaccttgttacacttatggatctttaatggcactcagacagttttggtgattcacctaatttttgcttatgtttagtgttggtgtgaagaggattgttaatatatattaaattgttataagctcctggtattggattaatttacattagtt

SEQ ID NO: 36928 - DNA, 1338 bp, Arabidopsis thaliana landsberg
atcaccatatgaatgattcaagagtttgattaatcacaccaattgatattaatatgtttgttattagaaagtatgtactagaagaagctgtctaatacaatactaataaatgaaaaaacgtcatgaagggttgacttctggtatatagatctaggtagagatcagattttgaagatatggattaaaagtagatacaacagaacagaaactagaatagaagaaaaattatttacatgtcatatttttttcatcattgaattataaatttgttgattgattttattgttatggaatttggcagagaaaacgcagaagtgtcaggtaatgggtatagagtgaaccgtcaaaatgttattggttagctaaaaacattataataatgtaaagtggatcgatgtgtaaaatcttttgtggagtaaactaaaaagattaacaaccaccaaacttataacctctctctttttttttccgataaatatatatataagcagccccaccatcgtcttcttcactgcctctcttctctcttctcttctgtctctctcttgttagttcactccacataataaacaccaaagatttcattctcttctccataatttcgaagtttcttgaattgggtttgtttcttgatttgtttcttgaattgggttttggtcttcttttcttactatatttggatatgatgatgggtcaagatgaggttgggagtgatcagacgcaaatcataaaagggaaacgtacgaagcgacaaagatcgtcttcgacgtttgtggtgacggcggcgacaacagtgacttcaacaagttcatcggccggtggaagtggaggagaaagagctgtttcagatgaatacaactcggcggtttcgtctccggtgactactgattgtacgcaagaagaagaagacatggcgatttgtctcatcatgttagctcgtgggacagttcttccatcgccggatctcaagaactcgagaaaaattcatcagaagatttcgtcggagaattctagtttctatgtgtacgagtgtaaaacgtgtaaccggacgttttcgtcgttccaagcacttggtggacacagagcgagccacaagaagccgaggacgtcgactgaggaaaagactagactacccctgacgcaacccaagtctagtgcatcagaagaagggcaaaacagtcatttcaaagtttccggctcagccctagcttcacaggcaagtaacatcatcaacaaggcaaacaaagtacacgagtgttccatctgcgggtctgagttcacttccgggcaagctctcggtggtcacatgaggcggcacaggacagccgtaaccacgat

SEQ ID NO: 36929 - DNA, 1624 bp, Arabidopsis thaliana landsberg
  unsure (1)..(1624): unsure at all n locations
atagggtgaagaggaaaaaaagtaagtaccttcccttgtcgattatatcctcaatgacagtatccttcagattcattccagattcagcaagcgtagcgacaaccatttgtttcacctggacaaatgatggacgaaaatgtcagtgaggataataaagcgcacttctacaaggttatatatgaagctatttgaagatatggaagctttacctcttgccgttcgataaacccttgctgtttaagatcatatagctgaaatgaaactgcaaaaaaatagtatatatcattactgtgttatcccaatcttgtttttgagatacaagctaaaagggacgtacagtgaattttgtcatctataggcgcatttgggtgaaagacggagagagcatgagcaaattcctcaaaccccagtattccattgtgctttgtatcaaacaaatcgaaaacctagaaacaaaatcacatatttcagcatttcttataaacttgatcttgacaaaaatgggtttaagaacacttataatgtgaagaaagaaacattacccgatctgcaaacaaactctcttttttatttgtcttaaacaaagccaactgaaactctttctgatacaaacaagagatgagtaaattagacagattgttagatcaatcactaaagctttaccaaatgaggaagaagatcaaacaagttagagttataccttgtttattagcccatcatcaatcacggcactgctgattttcttaaaaagctcataaagagcttctatttcactcacactaactgcattccaaaaccaaattcaatcatcaatagtcttcagaagaaatatttttgcattcctcaaatggtattgcatcgaatcttataaccggaaaaaaaaaaacaaaaaaaaacgagtcgagaaggtgatagggcatacaaacagtgtctcttgcaagcaattcaggatctccaaggccaccagattgtttatacaaatcaagatcaaaacaccctaaaacagaggtgcataaatgcttgataccgtcaacgcactgcgacatgatatatcttaagcagcaaatcaaaattctctttgcctgcatataaaacattgtgaagcgtggggggctaatttcaaaaaacagctctacagaagcaagcatatgaagaacactgtacctttcaaccatttcctagtgttttttgctgagaaaggatgagactttgcgagagtatctgtaacacaagttgcaaaattcagagtaatctaaataagtcagtcaatataggcaacacaaacattgcttagaaactgaagtcattatcatgattgtactattcagatgactcagttatgtccacataatatatacaatattgaagaagataagaaaatgaatggagaatcnnnnnacttaatcaaagctcattataccaaatattaatcttaaacatcacaatttatggacacacaaaatttataaaatgcatcagaaacaaacccaaattgggaaatttgaatttatacattaatgaactcaaggattacacaatcaattacaggttctgagatacaagacccgatctagatccccacaaatcgtcctaatggattcgtgaatcgcagattcaacagaga

SEQ ID NO: 36930 - DNA, 2636 bp, Arabidopsis thaliana landsberg
atttcttcatatcttaaaatagttagtgctctactgttaaagaatggccgtttgatgtatgtacaagaatatccttcaatatatattctgctttttgtcatcatattatgtttttaggtgtgtgtttccttttttacatgcacatggtgaaagtgaaaactagataaagtgatggagacaacatcccgaatttgaaatctaatatgaatgatagtagctctaaccagtaagatacatacactatcatggttaatctattttttgtttttttaattattgaatttgaaaattatatatgaaaatcagaattcgtgcaaattatagaacaatatattttgtgcatgacattgcaacatgtggaacccaacgttagcctaacttttaaagccaaattcaacaaatttatatcttataacaagttgattttaactcaacttttatccttactaaagaaacaacctgaactggtcatctatttctgatatgtagctcacgtcatgtctatagagtaattttaggaatattttcacatcaattctgtagaaaagtggtctatggtatggatatcaaaagagttaatccatattttgtaattatttttcctgaagtttccaaaaatcatatagaagtctctttcgggtgtggaaatacatgtacatgtggatcaatgaaatgcacatgtcacatgctgtataacattcataaacatacataacatgttaatctattagcctatagtcatagaacatgtgtcatctaggtttataaaatttccacacttattgttacctttattcccaatgtatccaattttgtgcatgacaatgcaacatgtggaacccgacgttagcctaactctttgagctgaactatcaaaaccttaaatctttctaagaaatttccattatattagaggatgaaaaaaagacaacatgaatgaaacaacaatttatatactcgatctaaagaaaataatagcataaattaaaattttcagaaaaaagcaagagggaacattggtgtgaataagtgtagttattgtgctaaattaaattatgttggtctataaagtattggttaatatatatcaaaacatcagaatgctataacgtctagattaacttgagctttagcaattcgcatgaagaaataaaatttgatggttaatttttgatccaaaaatcatctgattactaaaaataataaagaagaataatcggaccgacaaggatattattcgtggacgacaaaaagttggcaagggagtgagttcaatacagtaagacggcatatgtatttaaggattaccaaactttttgctttagccaaggaagctttttctcaagagccaagaggcacacttgtaaaaatatataatcaaatatatgtatatatcaaactaaatcaatacatatcaaatgttgtccttgcatatacacaagtaatttcacatatgtgatagtgatagtggtagagatcatcatcttagttgagacttaattaaatatgaacaatcaagttcgctattgcatctatatatgtttttgccttttatttctaatcatgtagattaagatcatttttatgatatgcgtataaatattgtagaaaagattaaggtgcacaatctagatttggatagatagaaaaagtagaggcattggtttagctatcatatgttctcatcacatcaagagacttggatcttaattaatcaatgtttccatatttactgataaataaaaaagttataaagtagacaaaccgttgatataatttttcacgtccaaagagagtacgtagatcacctcatgaccaggttgctttatagtgtttagattgtatagcattcatattctgactgaatctctagaacatatgctcaaatcatttcgtttggagttttgacccatcctcaaatcatattatatatgcattctatgcaagtacaaatatgaaccattacattttgttgaattaggttgcatgtctttttagttttgcccacatgtttttcgtgtgagaattgtgaattccccatgtgaatcatatatgaaaccataacatggtgggtcgttcacaacttacaattcggaattattttaaacgtgtctgaattcccttggcactgtaatgatccgtatgttacgttgccttgggccttgggctttggagatggactaatatttacacaagttgggttcaaggtcattgagctttctttcaaactatgattaagtagtgggaaatatatgattcatatatcactattacttggtattacagttctaatacagattatacagttgattcatattggttcgccgtcgatactacatataatcatgtcatgagaacgtgttgttcgtgtaaaattaacacaacaagaaaattacgtttagatgtatcaaatgttatcctaacagatttcacatgttatatagtctcagcgaaaaaaaattaaaacatttaaactgggtcaaaagatgtatttaagcgattttcttatatggtgtaacataagttgaccaaaaagattgaatatgaattagtgtgaagattgattaaatgactaaatctcgtttaatcatcaaatctaaacattttttttttttaataaaactcaaaccgagacc

SEQ ID NO: 36931 - DNA, 1368 bp, Arabidopsis thaliana landsberg
  unsure (1)..(1368): unsure at all n locations
gtttgtattttggagtttctgctgtacatgtgggtccactaaaaaggggcaaagggaacactatgtgacataaactactttttctcattcgactgataaatattggcaaatgaaaaagtaatgaaagattttacttggcaatgtaaccaaaagaaaatgcaaattgaaactctttgtaaatgcgatgaggaatttcataagatcaagaatgatttttttttaattcactctatgaatcaactatcaagcacaaaagacgagtatagaacaaagtcacaaactgaagtggataaagatagaaatgaaataaaagataggatgagttcgagggtactctaaattgttataagcccaagcccagcccaagatcctaaaccaaattccagaatcttcaattataactgttcagcagctatacagcaatccaatgacaagccacctagaccaattactttttttcttaggccaaaaagtctaccaatcacacctattcactagtaaatatgcgttcacacatacacattggtccattttttttgtatcatgatgcaagtaccaaatgccaaaaaagaaagaaggaagagaaggacaatctcaccaatcttaggaagatgcagctactcaagttaacaatctgaggaaaatccatatttataagttataaccccaaagtatggaacaatcttgattcttgagacattagtatataaacattgaggctatatgaaacactactttccactatcagtcacccccaaaagaaaaccaaaatagagaacgagattcatattatacacacaataaaaccatataatatacatatgattaacaaatacttggaatgaataatttggattgttctgacaaatccatcaaagcctactgcactaactcctccagcaacttcaattctaattcctctcccatggaatccatttccaatctcaaactctcctgtgaaccaatctcagctacttcaatcctcaccactttattcaccgccaaactgctcaagtctccgtcttcatcccgccaccgatcttccactcttccgttacccggtaatccctcttgcattctgtttatcacatgaacccccactggcttaccagagaggatcatggggctactacgaggtccaagatagctcggtgttagctccaagagcagcgtgttgacgaggtcaaacactagattcttcacgtttgatccgagtcttttctgttccgttgagtctgcgtagctgtttctcagagatgggtctagtgggctctctgaggaatgccacctcgcccagagattgtccgagattgcatcgagtcacngaaactgataagagtgtgttgataaggacacgcaagtcttcct

SEQ ID NO: 36932 - DNA, 2849 bp, Arabidopsis thaliana landsberg
  unsure (1)..(2849): unsure at all n locations
cgaatagactattgaaagtgccaagaaaatgcataaacacagccgaattgcataacaaaaaaccattttctgttctctttcccctttttctcttcctctttctcttctctattcaactatatctctcgtaaccctctccttttataaacgtgaaatggaaatgtattcattaataataaagattaattaaccttatttttcaaactactttaatatatatatttcggacagtgctacataaccggaatagtgcaatttattgacatggaagcattcctacaaacatatcattttgaatgtctaacccaaattcgagcaaaatacatttataaggaattagggcacaacaaaatttaaaacattttgattaaagattggtgtagatacctgcaaaggcatgtggtttgaaatattttgatattaaaagtctgtctattacaacattttacatcactacataaatcttgtgtttcattgtttcagtggtcttccctgaataatcatcagcgtaaacgtttcttacaaaataacgtttttcttaatggctagctacaatatcaaattttcgtctaaatattttttgactcgtaaatagcaattatttagattatgattgaattaattcggctagaaatacaggatctgtttcgaaataaagtagctgatgtttaacacgtgtcattgtcttattggagataggagttgactattgcagacaaattgtggattccacactgttaagttaacagttaacacataaacgaagcgaacatgcatgggcagttgacttacaggcaccgtccgatataaaaagtcaacgtctatatttttggcccaaaaaagggattttggggtttccttactttgaaaacgaatatttctgaattctgacgatcatgtggggttttttatgtaatggatgataacctttttgtcgacgttagagagtcagagttattgcgtattctttaaagttttaagttgacatttatctagaaaattatagttatcgcccagctatgtattcaatcatagctgaattcacaagtggtaatgctgttaaaacttaaaagaatgaagttgatttatacacaagattacgttaattttgtgagtcagataattcattggcaaacacagagggacggtgtttctccagaaaacttccgaggcctaatccaccaactgaatcatatttatggacaaccaaacgctaacaatcacataattgacaaccacttaagaaacagtaaccaaccatagcaaaggtaataaggctgactaaatcaacaaaccataatcctttgtttgaacccatgtcttaaattacttcaccggataaaatttccttaacacaaacaagacaagtacagacactttcctagcatcaataaataaaagatcaatagctcaagtaacaacaaactactatcgttttttgaatccatatttcttacgttcatagaacagatcagttttggcactgccaagattgactatcttaggacaaccatctctatctttctcctgttgtgtacactctttgcagtagtaagcatccgagattccaactcctccgcatatgacacaccgcccttggaacgaaccatagttgcattcatcgcaaatcctaaccagagtacacgggcggacataggaatcacatatgacgcattttccatcacacttctcgcacagtcgcccaatagcaatgccaggttgtttccggcacatgatcaaatcaggatgatgcttggccatgactgcttaaagaagatcttgctcttcctcgattaagaagattttgacctgcaaataacattggttaacaaagtaaagaaaacacaatttttgtttctcagaggcatttcaacaaacacctatcagnnnnnnnnnnnnnnnnnnnnnnnnnnnnnnnnnnnnnnnnntttctatatccaattctagctaaatcaatggaacgacggtaaattcttgaagttcactgaaaagtgaacaagaaacgaagcaacaatggaaaccatcaattcgctgaatcgaacacagataaacaagagaaagctgttcgagcccaaaacggagcggcgcaaaagaataagcatagacaacgctaaaccctaagaattcagagaaacatgaacacggaacgaaatttctgaatcagtaacatctatcacgcataaatcaaagttaaaaaacaacaaaggaaaatattatcgaaactaacctcgaaggagaacgaagaagaagagaaggtgtctgaactagcgatccctgatctccgagccgccgatccgaacaagagatggctctgcaaataaaaagacccgggtcgggtttctaaagatccatgtaggtccgacttaatatgggctatctcattaaaggctttcctgatgggcttttttattttaggtgttgatttctttcctatttcggccttatttgactttttatcttcccaaagtcatttaatttctggaaaatcgcagttgacaaagaaaaagcagaaaaaatggactgtggcggtggattcatgatttgaaaaagtcaaagagaaagatgagagtggtaacgtttgacctggaagaagaagaagaagcaacggccacagagaaacagagaaagacttgtccaggtcttatattatatattcaagcctctttcttctctctcgttgacactaaacagagaaacacaaacgtctagaagactaacaatcaaatcaatcatcagaaaaaggaaacttttaagttttctacgaaacgatgtcgtcttcagttgccgtttgcaactcaccggtggtctctccgtcttcgtctcttttctgcaacaaacccgtgaacact

SEQ ID NO: 36933 - DNA, 2501 bp, Arabidopsis thaliana landsberg
aaaaatcggtttatatgcctcatgttatataataaaaagaacattacccatgcaaactatgtatgcaatccacttggttcatatgagagttttgcgcagaactcattcttagaattgttctgaacaacaagaaaagagttggatccaaactggttcgtaagttttattctcgaatatacataacaatgtgaactattttgtattgctctatgaatagcttgttaagaagaataaaatggaaagacaagaaatagggtacataccagctttggacctggtgaggttagtacagcagcattagttccaaataatggaacacttagagtgcacttgtcgttagggaaagagcaattgtaataagcatttgtagtatcatacaataccccctcaacttgaatgtcaatcgtcgcctgaacatagatattgtgtgagaatggtgtataatcagacaaaaagagcgctacttgggattagaaaggggcgatatactgcagtaaaacttttcaaaaagttaccctaagagtttaagttttaacatatatcatcataagctgcttcagcatttaccttcacttcattcaggtatacgttgcctactgcaacataataactcgacgacttagttatgtcctgctcaatataaccactatctgtcacaaataaaataagtagggcgtgagtgaacacataaatattcagaataaaaatccatcatgttaaaaaccttggacacttgccagagattatatgccacgacagtgtagtgtctggacgcgtcggatcttgtacccactcagagagcccatccacaccttcaattataaacgcataaaaaagctgaattacaaaacaactattctttcttaacagcctgtgaataccagaatatgatgaaatctcaacatcaaatcaggggagggatcagactggcataatgaacattcttttgcaaaacatcttctcattcatatggttattaaagacagaaaacaacaatgaaggtgaccgttccagcaatttgtctcagtggatactaaaacatcaccaaactaaagatttggcgaataaactcttgtgatgaagatgataatttaagtggccactatgaagcatctatctaaattactaaactaattataattaaaaaaggattcttctctagcataccttgggctatcacaaggtataaggaagaacccacagattcaacgttgtatgaaacttttacgcgtgaccccttgttcaaatactgtatccaatactgcaaaatgtagcaaaacaaaaagtatcagtccccgtttcaatagccatttctagataacacaagtaaagagctaaccttgtaagaatcattaggcacagctagatagtgaacttcggaccatttagtcagaacatcaagctgtggggcttggttcaatccatacagtatcaaaccagatcccttgttccctaattcttccaccttgagaaaatcggcaaagatagaaactttgatatcagaaggttcaacaatggtggattctaaatgcatgagaggagagaacatacaatgacattttggacgaacactgaagttggcttaataagaaacgaagagtttggtcccaaccagacattcgttgttccataaagccccagaatcaaagtcatcgacactgatttaaaattcaacgacgacaagacatatatcaacaacaagaacaacaaaaataaagcatagattgaaaaatacgaacttaccaaagatacagaaggtagcaacgacgacaacgcaagaccaagggtcttcagaagtggaattgttcctgacgttctcagatgcaacaacgcttccatggcgataatcgtactcagaacgattccacggtggacgatcacgatgatcaaaaccggaatcgttgccgtgatgttcaaagcgatgaaagccggtttcttcacgggtcacaggcggagaagaagaagaagatgggagagaatccggtagagacatgttgtcgcgaatcgatgagaggaatgaagaaattgaagagataaaggtaaaaccctaaccttaggtttggggttaatgttgttgaggaacgaaggatgatttgaacgacgggtcggcttcttctctttcttcatcgtcacgttgaacggtggattcacaaaacttggagagagacgacgactttggaaaaagtaaaatatttattttcttatcttaatagaaatttaaagataaaaaacattttcgaagaatctctttttggtttggagttaggacaggctggtctggtctcgttttacgcaattactgtaacaccctcattcccatctgtcatcagctacggtatattcgtaaatatgacatttaagtgagggcttatccgtaaataaccgaagcgagtcacatacctggacgcagtcttcgtttctcattccagtctggttttcgacatacggaaaaaaaaaacccgatctacaaaaaataataatccccaaattgaatttaaaat

SEQ ID NO: 36934 - DNA, 1625 bp, Arabidopsis thaliana landsberg
cagattggcctttatgtaggcgaatgatctctattgcttggatctgagggttgatgaaaagcagacaaagtttgtggcgtttgtttattgcttggaaacagggtgggtttgaaataattatcagattatagtcttcaacttagatataatctgcgaacgactcggacataacgagtaaaacactatggagtttggttcgataccatgcatagtgatacccaagtcaagaagcataacctcttcattacctagagaatctacctcaacaagcaagttgtcgtgtttatttgggtctggattaggatccttcttgaagatgcggaagctcttctcgctttcaatatttttctcgtaaagattgtttagaaccatcaaaacctctcctgatgttgtaaccacaaggttaaaaatacttcgaaaaccccatggtccattatgcacgttgaatagataatttcgagtaacatccttgaaaccttggtctttagacaaatcgaggatttgaatgtaatcaccaacaccgatgtaaagaaagcaaccatggagtacaatatcagatatgctttgaaacacatcggtgatgacatattctagttgaatgtgactgtaatgatcatcagctttcttgtaaaaggctaaaaagttgcaagagtcttccaagaaccaaactgcaacaaactctttcattttctcgtctacccacaaaatacctcttaactcttcagctcttggtaatctaaaaactagaatctgatcattagatgcttgccatttcaattccttatcccctttttgctcgaaagtaaagttatctgacaggagagactctagaggcggaagatcgatcctattctcgctaaacacatctattatatagagattggatttagaatccattacaagaaaccaattacccgagtttgcaaggaatatagtcccagagaagtctctcaccgatttgtaaatcctatcttcgtctggattgtacagcacgcaaccatgaactccttcatctggaaacagaattagccatggagattttgtttttgggagagtcgcttgtttcaaaatcgaattccaagtagcacgatggaaatctgcatagctcaatcggttgaaaatatttctcagtaaatcatgagggagttccgacaaggtgagaggattaggagtttccatagggttctgtctgacgttaatgtttgcgtaatttatttggtctttaataatagggttttgacgttagtataaatagggtttggatgcttgtgtgaaaagtaagaattaaaatacatcagattgaatgtaattatggaaaattagaaagttaataaatatttcaaaaccaagtgaataaaatttttttttatcaaaaaaataaaataattacctttgtcctttttgtcgagatctatatatgctaatatagtgttaatcaatataatctaaaggctaatgttcttgctatttaacatcttcattaataaaagagttttatatttagtgatattaattctttacatttttattatgaacacgtgtaatattagattttttacttgctatatatactgttaagacagaatgatggacaaaaatattccgagtcatttcagctattttct

SEQ ID NO: 36935 - DNA, 1616 bp, Arabidopsis thaliana landsberg
  unsure (1)..(1616): unsure at all n locations
gctgtaccaaaaaaactcttccccattttgtcttctcaaccaaaaccctaaaactctctttccttcttctccctagagatggcttcaacaatatccctaaagccgacgcaccttatcctctcctctttctccacaggcaaagtcctccaattccgccggtcccgattcagccacacaccgtcgtcgtcggcgtctcgctatcggactctcgtagctcaactcggattcagaccagattcttttgatttcatcaaggaccatgccgagaatcttctgtacacgatcgctgatgccgccgtttcgtcctctgaaacctttgaatctgtcgctggcactactaccaaaacgacccagagcaatgattggttctctggtattgctaattacatggaaactattctcaaggtattaaaagttttgtctttttttttgtttagaaagaatgaattttggtgtgttatatgattgattttggttggatttgcaggttttgaaagatgggttatcaactgtacatgttccttattcctatggctttgctatcattctattgactgtgcttgttaaggctgctacgttcccattgacgaaaaaacaggttttttgtttgtatcttttgtttcttaaattcatttttagtccatgttattgaattggtggtttgctttctataggttgaatctgccatggctatgaaatctttgacgcctcaaataaaggctattcaggaacggtatgctggtgatcaggtgaaaaagcaattcttctatactgcacacatggattttatttgtcctgatgctatactaagttatgtttgcatcaatttttagttgatagatttgaggaaatagtaggaacgagtgtgttgctatcggttccacaattgtggagtgatactaatgaatataacaaatattatagctttactatctatgaatatagtcctcttgtttaaacaaatagcttccttacttttgttcatctttgcaggagagaattcagcttgaaactgctagattgtataagcttgctggaataaatccccttgcaggtacagtatgttacttcagattatcgtatgtttttccatttgagacaacatttatggttaagctataatttcgttttatctgttaggctgcctccccacactagccacgataccagtctggattgggctatatagagccctctcaaatgttgctgacgaggtagttgggaaaaaattatatccttttgtttctgtaaatgccttgagattcttttttgacaagttggatgcttgtttctaactttaggggctcttaacggaaggttttttctggataccttctcttgctggtnnnnnnnnnnnnnnnnnnngacagaatggcagtggaatctcatggctgttccctttcattgtaagtatcagttccctttcattgtaagtatcaatcttgaaccttgatattaattagtgtggatattttgaaaatggaatctagactagactcatagttcttgcgaactcttattcagtttaattgttcaagcatataaaactgattaaaatgaactaattgaagaaaacttgaggggagtggtgtcggacctcatcgctgatgtctaca

SEQ ID NO: 36936 - DNA, 3718 bp, Arabidopsis thaliana landsberg
aaaaacacaacgccgatgccttttcagacacaaatattttgtgatctgcgttacttcacgacgccttatcgtgttccatgattaatctctcactaacgaactacgttgacttttatatatcacaaaaaaacaagttttgatagttattttgggcaaagtaaatttgactcatgatcatctcaaaagcatttaaatatttaaaccatgattagacgatatgacccaataatttcacaattttcttgattttttttcaatttcataaatattattaagaatccatttcgacttttttggaaattttagcttaagtcaactttttcatttctactgagaaggaaccaatgattttcttattaatttagaaaccacattacacttaatagtatcctgctgcatgtaagttcaagtaatcgccgaggaagtaaaagctcaaacaagctaaacaaaagacaagttgtagtagtagactagtagtacatgaacgaacaagacaagaggagaaaacagttgatgagctttttcgtctctttctaaatcttttcttttattccctcttggatttggagagagctctctttcgctgaccaagcatgtacctgtacatgtgtgggctacctgcaacagccaaatacaaatttagtctcgcagatcagaattgaacagatgtatgggatatgttataagaaaggttgactgagtttgtgcctgggacatagattgcaaggacgagtatcgttgcatagaagaagtcaaatgagaagttcaatatgttaggcatcctaacgctgtacatctccgatgtctgcagacaaaagaaaaaaaaaaaaaaagagcaaagggaccattcaggaatcaaccatatatatactctcccctgataccagtggaacagaaaatctgaaactttatagatggcattaaagttaagtctatatatggattattttacagtgacgtcttgaaagtcaacaaacacatcctgtctactagagtctgagggaaatgcctttaacagttcatgtctactctaagagctctaaattctaatacacataagggtgtaacaacccgtaaagaaatgatattgtaaaggaaagaattgttctctgtttaaggaattgacatgagccagttgtgttaccttgatgtgtggtaaggcaaggtagataagaccaacttcgctggtgataccggtagggtatagcaataaaaagctgctgtatctgaacagattaacgagagagaaataaatgagattagagttgcaaattaatctgtttttcaatgtctattattatattgcacatgaatggcatacctgagccacaagtgccatgaaggtgcaaagcctagagcttccttaaagccgaagaaggagtagcgaataatctgcgctcagagcgagttattcatcaaacatatgaactgaagcacgttatcctaaaaggacgctactaggataagacttcaaccaaaatggagtaattaaggagtcatacttaagtcaaatcttgactgttcgaaatattaacagctaatctcttgttctgtacttcaacaatccatgttgtgataggaaactttcaaagcatcagtaagagaagcaatgttttagacatttcagatttatggcatacaacgaatctaataaatgtctcctagtaagagcgatatcaatggctaccaaaatcaacacagagactagatataatcacctctgtgatagaccagcttatgaccagcgacgtaacaagaaaatgagatcggacctgaaattaaatgaaacaaagttcaacaatcaaatgatgaaacttgcaacaatcaaagagaaataatgaactagtaatgctggtaactttctaagttaacctctggaaaactgtataggatgccccaagtgagaaatagccttgaacctatctgtggcagagttgcagaaacaggagatctgaccaaacctattcgagtttagcaacacagcagaacacaactcagtcaatgatcttaaaaagagtttaatcaaaatggtgtagtgcaagttcgaaattagtctaatggatcagatcactcacctactaatccatgaagaatctgctccacacccggaaaattccaaaatccagattttaatcagaggaaagaaaaaaaaaacaaatactcagttgcaacaagtgtgaaccaaatcattcttcttcttctctaattacccgggaaatgcaacaaaacaagaagaaataaaacacgaattgtgtcacgagagacggacctcgagaacggcggcagtctgagcaagctggagaggcttctcaatggcgtcatagacattctcataacccgtttccttcaacgtcgttatcgctaagtacaaaacctgagccctaataccccaaatgtcaccaaaattcaaaaatcaatccgagagaaaaataaaaactccactagacaaaagaagaaagagagtcgagctcgacttgccatccagcaaagacgatccaattgtagagagtgaggtacacgcgccggacaacggagagaaagcccgccatggaaagtgaatacgcgagaacgactaattctttgaacacccagaagaagaaagagtagattttatggcggagagatcggaggagaggagcatttatgaattacatcatgactagagacaggtaagctacttctcaaccgtcttcttctgatatttatgatttaaacccatactttcacccaactatcaataaaccacccctatatttaatatacgacattatcaacccccaacttccagaattttgggagggtaaattcaattaatttcaatcgtatattacatcaaagagtgttataaaaaaatagctaactcattgaatttcatctcacggctcggttgaagcacctgagtttggttgtgattggctatctttctgttccttatcagccaccaatggtccatttccaccggatctgcgagctcccgtgagttctttagcatctgtttccatgggaggagaatgtatctcttcttcgattggaagtgttctctttgagccttctagtgcaacacccagtactatattctcttctaaagctgatctagacgctgatgatgttgaactatctgtttcatctgtctttgttgattttattgtgccaccacttctcttggcctttggtttctcagttcctgatgtttctgtatcctttggggtgggcggttttgagaccgctttgattactggctttgctactgtttcttcaggtactttgttggtatcagaaacaggggattctccaactttcacattcgcctttagatcaggagaagacgtttcttttgactttggattcgagcccttgttttcttgctctgcggttggttttgctgcacggttttgagattttgatttgtcttctccattgattttgtaagcgggttcaattagcatcaaaggccgccgagaagtaacacctccgtacatcgattccccaaatggtgtgttttccacgtcagtctctgtgtacatcttacggattgtacggattggtgtagctagacgagctcggtggtggcttatgactctaagaaggtccaacaatatagcttcctgtctcaccaatacaagaaaacgaaagcaaataagtcaatagttcttgtgaactttaagtagatgataagataaaagactgaaaaattacctttacacccaagtattcttcg

SEQ ID NO: 36937 - DNA, 3813 bp, Arabidopsis thaliana landsberg
gaagatggttacgtttgattggtctgattccttttaaagactcttggaaacacgtgtccacaacaatcgcatgtgaggatggtgaccacttataatgacgacgagtcgcgatatcagacgcgcttagcctaggtacatatccagtaacattttcttcatcacgatgctcacatatttgcttcattttgctacctgaagaaccttcaccatctaagttcatacctgcaaagataatctctagtttctcgaggaacaaggggggattacaccgatactgcccagcctcaggattcacctatgacaattccaatcaagctctttttattacatattagccttcataaacaatcaaaatcaacacacaaaaaacgttgttaatttgtacctctaaatagttggcccactcttgatcagtggcaccaaacgtgtttgtcaaggaatcccatttgatatctttgcattgaacaagtctacaccaaatcttccactgcttgatcattgtatcccaatgatttataagctggtctatggtgaaccgcacacccatttcttgaaaagcttccaatatatgttgcatttcaggttgattccccaacatcttttgctcgacgcataagtccacaaatacttcgtcgtgttcaggttcccatgcggctttggacgtcataattctttactatatgcatagttagataaataaagacaacaccaacaaaaaagttatttccaaattaacaatatcattattaaagacttagaccggtaattccgttaaaattgtgggaaatatacaaaaaaaaaaggagcaaatcatgatatgattggttagaacccggaagatagcgaaatgattttgtcattccaaatagttttatacagaaaccaagtctatatacaatatacattcaaatatgcatgggaatttttacatcgtggctgaatctagaactaaccttaagacttatcaattccaaattaaacatcatggctaaattttttggcatttgcactgcttgagatggagaattcttgtgtttttttctgagattataggtgtctaagggccctatttataccggtttgagtggattctcttttaggaaactttttaattggcattgactgattataatttgttgcaaaataaaaattgactaatcttcatttatactaaatgatattgtgatttaagggttaattgaaaagatagtcaaattatagagttcaattaagttaattaccttaaaattaccctcgagattagtatttgtttttggttttaataaaataataagtttgcgtgcgaaatttgaaaaaaaaataacaacacattgtttgtttataatacacattatttaattaatttaactgccattttttattacacaaaatttgaaaaatacatgttatttgtttatatgttatgttgtttaattagattaattattatgagtttttaaatttgttatgtagatattgcatgttcctatattttattcagaagctattgctataacataacagaatcttccttatatgatgtgtagaaagacaaggtagggaagtaaagatgcagagaaccgatcttatgcaaacgagaatgagaacatagttggtcctgaagcagtggtggggaatagtgaaggagattcagattattgtttttggattcataacttccactatttcctggcttccacaacatatattaaacgagtcatcattattcccttttaacacaagaactaaaacaagtatttggcttcatctcaataaatcaatgtacaaaaatatttaagaaactgaggtcaatttctttcattagttttcctctacacatttagacctaaccaaacttcgattgaaaacagaaattttttatcttttattctttaactctaaaacaatatacatttcataatgtatttacagagctgactcaaacaaatgagagaacacaacctcacatctctgacaacagattactgagtttccgaagctccttaagtgctgttgtagcagtgacttgtcccttttagatcaaattggttttagctaagttccctatcaatcctgccggaaccagacaaggttcttgttggaaaaccaactcaattgcctgaaaataaaatagactaaaatcatcagaacatttgagcttgtaaggcggtaaagaattgtcatggaaatggcaaaatatctttgttacaataatcctttaccactggaggcaagaaactaacttactagttaccttcaggaccatacgaaagatacatttaccagttcgataacccattttactgtctttgtacttatctttttataaatgctggtaaccgctgaaacacgatgaatatgagaactgagaagttacctgaatgtgtttgagcatgggctggccaaggttcttcagagtcttcctcagattctgacttgagtctccagaagacaaagcttgggggtgggattcagaatagcaacctatttggttctttttaattttaacatcattggtctttgtggcatcagaagcttttctatgagaagtctcctcacttgacaaagtgcgtttaagcttccgaaaccactgaactattccatgtaaaagcttgtactccttagttatgcccacagatttatcggtggagacgtcttcatcagactgagttactggatactcatttctcctatggggagatacagaaagaggtgaatttacacttgtttgttgatctttatcgttttccgaaccggtacagcaatctaaatattttccactgtaatttgaatctatggcaggactgattggatcagaggagacagatgaattctcttcatcgggaagcaaatttgagccagcactgctatctgaatcgttttcaattttggttgaacatctgacaggactggttgggtctaaggagacgaatgaactctcctcacttggtgaacttccacttactatactctcttcatctgcagaatggaattccataatgttttcctcagtttcttgaggatgaatgttctccttgttcacagtcacatgacaatcaacattgagctgctcagacgaatcttcaagcaaactttgtgtcactggagatgagtttgctttccgttccccaattcctaacttatgatgtgatagatcaatcactgctcggaaaagttttgtcacattcaaccacctctttttcttctgtgtaggaggagtctgtttctccaaacaaattttattttcttcttcctcggctttgtgtagaactctccatttcttctcccaatagctttcaggagcgataatcaaaggagatctaggtgaagtggagcaacttttagttcttgcaggtacaaaattgctctggtcgaaaacaccattaattgacagagctgataacatatcagtatccaaaaccaaagcttgtaacaacttggccttctgtattatcttattcaggtcaatgttctctggaaaatttaatagtctttgtagacagcatgttgcattttcagtagaaagcaaggaagatcttaaatataatatcattgaaacagtcattcccaagactaaggttccccgaggacaatcaaagatcctgaagttctgatttctactatcctcatccgttcttgcactattatctgccaaaattatctcatcccacactaacaagagatcctgaagcaaaaattctcttccaaacaaaactctcaaccaacgaagaccaaagtactggggttcaactccaagttcaactagatgactgtgcagagatgaatccacaacagccaaaatacgataaaatg

SEQ ID NO: 36938 - DNA, 1888 bp, Arabidopsis thaliana landsberg
gcatagaagaagcggatgcaggcagagttgctttaaaaaataattaacaacttcatttagcatgcataagtaactgcgacggtttaagagatcataccttgcctcctctaggaaagggtttatcatttccagtgcaggtatgagcatcacagaattggcgcaaaaagtgttcttcgatcatgaaaaataaaaatcaaagacagtgatttgagcacacttcaaggaactatttaagaatcatctcaatgagcaactattcacttggaaggtttcttagtaaggaatcataccatgaagacgactagctgagggaccttgactcactgggaaacaactattggcaacgctctaagtgaataaacaagtaaaattagtatcgaaagataataataacaagtcatggaaccagagctggaaaaagcaaataataatgaaaagagaatcaaagaaagaaacctcgcagagatgacggtttttggcaacagcaggagggttgcacttgctcttgggtttcttagagctcaatacaaagtcacaatgcaatgcaccacacaggtcggctaaacactttgtatcagtctgaaaacaagcaaaatatcactaaataacagaatttcattatcctcaagatgagaaacatataagacataccgtatttaaaagattataatgtctagtactgaaatgcttgtcaagaaatttctcatcattgaaacttttcttgcagtaaccacatttccattcgaagacatcaacatgaaccttatgatgttcctgatctctgtataaatcattatcaggatgcagcctacaattctttggaatttcatatctttcccgttccacaaatggcgtcaaatactgcagaaaaaaatccaaataacaaaaacaatcaaaaatctactccttaccatctaataccaaacaaattcacaaattaaaggaaacatattcagtttttgaatagtctctacttacatcttgtataatctgccaagctgctcgacttctttctcgggaacaatgtatttctggagcattactaacttctacttcttcgttaaccaatctatatttcaggacaagacaaatcaatataaatcagacatgtttagctgaaattgagaataatcttacacaaactaatttaaagtttttgttttgagtacaaagacacgagtttaatcaagtggagttgctagagattcacctagtagattcagattcttcaaacccctacagagagagcaaaaacatgaaaattcattgattatagatcaatagaagaagaagaagaagaaaaacaacgaatcggtaaatcatgaatatagatgatagagcacgtaagatcttcaaatacctgagagactgattgatgaagaagaagaactaagagtagaagaatcacgggcagtgattcccaaagtcttcccatcgaactgtgtggggattttagcgacaaaatttgatttctgcaaaatttctaatttgggtttaggcaattgggaatggagatatcactgcatccaaacagatggattttgagacattattctaggtccaactctctctgcctaatatagttacaaaactttattgggctgggctaggcccaatcactctacttacaaaactatcttgggctgggctctcacaactttccagagtaaataaactacatgcatatttagtgatgaaatacttttccttttctcataaattattgtgctcgacctactacttttggctactagtagtaagtaactaagctgtatcaaatttgttttttcattgttttgggattgaatgattgataaatgactgggtatatgtgattgaggttatataatacaatgatttgtactagtgatatagtacgggaatctag

SEQ ID NO: 36939 - DNA, 1777 bp, Arabidopsis thaliana landsberg
atgtccagaagaagatgcaccatttctgaatgtgttctgtgctgagtcaccccatcccctttcaaatcccatcccttgtagtcttcaccaaagaacattgccaatataagaaaaaaggcaacataatctgctaactaacaaatacagaaaaaaacagatatgacgcgaatagcaaaagatctttactcaaattcgaattcagagtatggtgttgccagaggaagtttagaaaggaactcctctgctcttgccaaagctccctgaagtatggggatattctgtattcgatcattcagcatcataggctgcacattatacagagagagtacagagtcagtgttatatactaattacgcattgtttatgacataagctacgttcaagtgtagaaaaaactaacacggccatcatgtttgtgagtgcggagaaactcaagcaaaggctccatgctttctttgttacggaacataattgaagagaggtgacgattgaggaactgaaccccattcccaatggatgatgaacgagttgggcgaggcaatgttgcattgaaaggttcaaaatcaagttcaaggagataatctccattggcactaatgaaaaaggttgagactttaagccaagcagaaaagaagtatagacacatatacacaaaaactttgctcgcaggatttacttactggccattaacgagctcttccttaaaccgaagatattcagaaacagttaaatgatctacgctcagctcatacacattcacacggacatattccctaacaccaggtctgggacgtatagccaaagcaacaaatggaggcaaaactatggcttcctgaatgcgaaaacttgagtttattaacaaatcaagatatatgaacacaacgtagccataaaatgatactcggatcctatatgttcacctctgcagactgcagaactttcatgaatggacttttgttaagatcttctaatgttccatcaactttcacagtcttaaggaactcatcaatcagctggtgggactgcaatatcccctttccctgggctacatatctaataaagataacaaccaaaaccattacccatgacttgagaccaatcacaacacacatgcatttataagcaaggctcagggagagagagcgagagggttaagaagaaacctggagaaaagagagaggagctcattgcgttgagcagagatagcgtcataaacccattcacgcatagtctcgaacctaccagtcggcatgattttttctcagaggcaaaaacacaaacacttacaaggcaaacccagaagacccaaaaggagaggaatttgtttaagaaaccaatccagcttatgtatacgagatcaaagaaagacgccatttttaaattcactgtagcttgatgagaagtggcgaagaaagaacgacacttggctgcagagataacaaaaaccatgggcgagtttcttcaacgtcaccaccagagcactttaatcctcacttagagcgtatcgcccgtagtggtgggcctccggtgatagccacgttcaaatcggagatcgcttgctctgaattttacgctatagttcgttaacacatatgaataagagtagaagaagacccgccaaaaatggatcagtttctttgtttgttttttaagcttctccactttcattaaatgatgtgtgaaagagtttgtttatcttaaagtaaaaactctgaaatcgaattaacgagaaaaattacatttggttgatacaaagattgtttattgactgatacac

SEQ ID NO: 36940 - DNA, 3750 bp, Arabidopsis thaliana landsberg
tggaaaaaaatagtgaagatagaagagatgaagaagaaaggaaggtgtagtgatattttcagagttggtgaagttggccgtttgatggtgacgttgacaaactatttttgcttaggattgaagaatgcagaagaagcagagaagtaggagaacataaaccgttggcctataaaacctaacaaccttagttttttgtcttcgaagcaaaactccgacagcaaccgctgctgctttatctattctcgttttttttttggttagacaacgccatctctccttcctctctccctctacgcaaagccaaatatttataagaaaatcattaaacataaaaaaattcaaaatccagtattgggccgggttgggccgcgtaaacgggtatccaaattagagggtcgttgaactgagtctgactcactgagttttgtgatcgagtcaaacaaaggtgagcttgggaaataatggcgtagctctactagctcaagtttgagctctcccataatgagtacatcaagcttgtcctccatctcctgcctcctctggagatctctctcatgatgacttcgaaggtttgaaaaacctaactatgaatcttaggatctgattacgtttgacatgtacgttaaattgcacaatttaggagttttcctgagttcaatagaaggtgacaaatttggttcttgattgcttgaaattgacaggaacggaagttgttcacagatcttagtgttattcaattagaaaaagatggaaacttttagccttgttttgctttgtcctgaaattatactctctttgattgaaatttgtgttagagctatcatctttgggtgttcttaatttgcaaaccattttttactttatcacttaaactctcacaaagtctttacgcattattattattatggccaccaaacgactttgcagtaactgtccctcacctgcaggtatgagaaactacagagataatgttaaactgcaacaaggttttagaacaccgggcagcccttagcgacgatccctttctctgttgggcaatttgccaaagggcaatggtctgtgttctcattcccccaccaatctggtaagcttatgttattgttctgtaacgcaaagtagatcaacactcccataaccgcagtgcctgcatcaagagctgcagagaggatgtagttatgccttgcccaccatcccttgtacctcctgaagatatagtagttgaacacgatcccaacagcgaaccacgaccagtaatgcacagccttggccattggcatcacattagcccctgagaagatcaagggaatatgaatctgatgtatccacttcttctccgggaatttttttgcaattaaccagaccgggacaggagcaaggaagccaatgaggaagaaccagttcatcccggggtatatacctttacttgtgaacatccttccaggaccgatgattccccaaatgatcgacgcgttgtagaacactacatccccagggcaagtccacggactactctttgggagcatatctgtgttacagatgttctcgactgaagaaagcaaccaccatgtggtcccgaaggagacagttgaagcaacaatagtcgcaacgagttgaacgatgaacatagatctcggaggaatcttcatgtagtggccaagtttgaagtctccgacaaagtacaaggcttgagctatactcacagaaccataagtcttaaaagccacattggcaagtggctttcccggatacaagaacccgatgatcagttccgatataacattaagacccattcgctggtttgtggtcgctaggataactccaataggcaaagtgaaggtaaaggcgatggcacaagcgagtaaaagtccccaccatgggagctgaagctgtttgccaaatccctcacatgcataaagagctagcacaaaggaagcagcgagaaccgcaacgaaccaccattgaggtacttccttataattcttcttcatcaatcttgtatgcacatctccaaacttgtcctttgtcgtcaatgttgccttcttccacagctcccagataaaccttcatgtaaacaaccacaacaacaacaaaaaaatatttttcatggaaactgataaattgatctatacagtattttgagacgcagagtagagaaaaaaagaaaaaaaaaaaagaatcttactttccgtcaaagagggcgacatgagaaatggttgcggtaagtgtaccgaagctgagcccatagatcagagcaaacagaatgctaaggtaaagcttgctatagctttcgtaagcaggaagatcaatattgaatgttttctggttgaggatacgagtggtgttgtaacgctgaccagtgtgatcaaatgggtgagaggtatagaaaggaaacttctttgcctcataagcgttgctccagtagaagataggaaggatgatgtagaagaagatgataaatccgccaaaggaattggctatagcgaagaacggtacagctaaaggactgcctaagaaacctgcaaccgtggaccaatcaagaccaaatgagccaatgccgagaccgtgcagccctgaaccgatctgttgagcggttacagagcgggtccatatccagcagacaaaggagagatatgagatggaagggaaaagatagcctgggactatgtagtaagtgaagctcaggaagaagactatcaagaagaatctaagtttcgtttgttttccttcacgcttctcctccttctcatgtaaggctctaatccatcaaaaagtaaaatttcgtgacagttacaaatgtgaatgatttggagaaaaaaacacgaacctaaagagagagacttgaacaagatttgcaggccaccacatgtaaggtgagtccactaggtatttcctgaacatacccgcccatccatatcccaacaactacatgacagataaataatgtaactgttacaaacaaaaactatgtaatttttgaattatattgtatattgtgtatacatacctgagtggtttggacaagcaacatggcggcggcgggattgagattccggtgataaaatgctttaacgatggttaggatgctggtggcataagctcctccagctccggtattagcgaatatagtgatcagtacatgttccttcatgttgaatggtccagggttcaacgaacacgaccaatttgtaccaggtaaacggagttttgttgttggtagagtcgtggccatgagctttcctagagggagagtgatgatctgagccacgactgaagataccgtgagcgggttcgaccggtaaccgaagaaattgttcacgaacgcgagtaccacgcaagaaaccattcctaagaaccatgtacggaatgtcaaaactggtaaagatggatcgtcggttatcggtacggttaaacggacctcttcgattggactgtcgttttcatcctcttcttcttcatctgccccagggacaaaatcggtttactcagaaccaaccaaagttgcttagtatgatctacattaatctaaaggaatcgagttgtgtttaagaattatacaaatagagcatcagccataacggtacacaaggaatcaaaccacatcgaaccaagattggtcaaaacagaatcgagattttatttaccggctatgacgatcttggactcaaccttgtgctctggaggcttggatacttcgagagagcctaccattttctgttaggcggccctgacgtcgatcgactcgggtgataa

SEQ ID NO: 36941 - DNA, 1079 bp, Arabidopsis thaliana landsberg
  unsure (1)..(1079): unsure at all n locations
cagcagagggggacattgagaaagcagaagaagcattaagaagacagaagcaagaccaatctactgcgtctagaaaaccagaggatattagtgatagtacttctgttaacaatagcaaagtcccttctgtgctcacaagtcagaatacagtaggccagttacaacctaactcaggtatgtatcctgcaggcagggaagaagcccnnnnnnnnnnnnnnnnnnnnnnnnnnnnnnnnnnnnnnnnnnnnnnnnnnnnnnnngaaaaccaaagtgtaaattcgttggaaagaattcacatgaagttgcagtggatgaaactgcagcaaaatgccccccttgaagagaataaacgcataccatatcaacagacaccactgtctcgatcaacagaagaaacacattatgtgacggctctaggcgatcaattcaagaggcttcagcagcaagatatgagggaaccagttatggtgatgcagcagcagcagcaacaacaacaacgttctcaatccgctaacacaaatgtgctacctgtctctaccatgaatgcatcctttaccggagcagcagcagcaggcagcggttggcaccctgcaaatagatctgaggcggcccaatctaacggatacttgccctcaagaagtctgcctcctaatgatctgaactcaaacctgatgtaccagcaacttcagtatcaacaatatcaaggccaagtgaacaacaatggtcacagaatggcaggatcttctgctccgcctgctgtggctccagctgcttctcttgggctcttctcggggtttggatcactggcgggatcatcttcttctgggctggactggaacacggatgggtcactggggcatttggattacaacaacatcgactggagtctagataaaggcctagcttgtgtgagacctagccagcagtatgtggcagcatcatccccatatagtgcagcatcatccccgtatgaagcgcacatgaatggaaggacaagaatgatgacgaatgggaatgggatgggtgtggcaatgggagtgcaagaagctgctttagttggaaatgggagagagtggaca

SEQ ID NO: 36942 - DNA, 4114 bp, Arabidopsis thaliana landsberg
acagatgccattatagtaaagccctaggtgtgtatttgattgatgccaaagagacaactaattcccttgtccacaaaggggccaggacaatgcaaacatggcaagtttgttgaggtacttttacctagtaaacaaagaggccaccatttcggtaaaaaaacaactaaaccaaacactttgagagagtagcttacttaccatttttctcacatgatttgtcagcctcggatcttctagaagtaacagatgtcatttcctcgtttgatgataattcagaatggctggtcatggaactactattatcaccgttaattaatattgtggactcattgagtatggtcggaagacagacagattttagtgcatctaatttacatgttgttatgcaggtaaaacccatttcagcagacaagttctggacaaccagcacctgcgttttggaaaacagtaaacaaactaattagagcatgtgattttgcattcccaaccagaaattttgttttgtgttctacgcatataatgtaaatttggcaagcaagtaaacccaacagaaatcatgcctgtttcaataagcattacttaatcataagaaactgtaccttgttatgagatctatctgctgccactatctctccctcatcattcataagtatagcaattgcagtagtcttccctccaggtgctgcacacatatctaatattctctcccctttttgaggatctgtgcaagcaagataagaatttaggatctcatcagttttgtaatactgtggctttcccatcgatatctaggatctactatatttgaattatggatatatgtaaactatatcataaaaggggtgaatgtataagcaaactgtaggccgaaaattaacataacttaccaagagcatgagcaacaataatacttggcaggttttgaagaaatatttccccctcaaggatatctaaggagcgaaaacgaaaatgtatgagaaataccccatgatgaaataagatactaagagtcataaattgtaagctgaagtacaaagaagaatcttactatgtaaagaaggcaatctgaaaactctatggttcaaatccaccgcaattccattaggaacacgaaacatcccagcccttgacaacatagctgttcccatgccgatatatagtgcactgcgttcacgatagtaaggatctacaataacatttcaactgttaaagttaaaaacatttcacaagtttcgtagttggcacccctaaaacttatggataatataacactttcaagaaaaaatactgttgagatttcttatctaatacgactggattattgaggaaaactactctttaaaatttgaacgcattccaccgagtatactgtttgactcttttggctgccataatttattactcaaataatagcacctttgatcaataaacaacttaacacgtgaagcgcttaataaatcaaagacctattcttcgggtttcagttactgtgaaacaaagtaatggtcaatcatatgataggttcctgcacttattttatagagaagaaagcaaaagaaacatttctgattcttgcctgttggcagcccctggagagtggtcccacgagtcatattaacactccagtcaccttcatcaccaggttgttccatagcaacacagacagcaaccgcatctcctttctcaacatgggcagtgcaagccagtacacctggcacatagacctaccaaagacccataagagaaattagtacatatttgttcacttaaaagcccggagtttctcagctagattgtcaaaaactataacgaaatacaaccaagatagggattcatattccaacccaactcccagcagcatagtgacaggatagaagcttaaaccctcccaatggaatactttaagatcgcataattttaagtatcaatgtgactagccactaaagtttcactgagagagcgtcaagattacctgggctcctctgagaactgcttcagcacacttcctgctcactagtacctcctttggagggttttcaagaccagagtcatattctatcttatgtgggcctgaaccattgacaaagacaacataatccaaaccaggtatctgacacttggtgacgggactacttccatctggttgtactagcttcaagccctcctccgagtcgttaaaaattttcgtaagcttttcgataaccgcatcactcgtcgttttaacagtgttcaccctaatgcaggagtatgaagatgggcgcctaatatggaacaaaaacaaaatatatatagagtcgagcaaaatgtagcaacaataactagagcagacgcaagaaaaatgtgagaaagtttgttaatttagttacgatggcagactacaactgaaacatgtgaaggagaagctaacattggggaaaatgcaattaaataataattcgatttaggagattagagaatgaataagcaataaggcaaagcgaatccagctaaatgcgcctaaaggagggcaatgttgcttcagaagtagatgagaatgatagaaaagtacgtgagagcctttgaaatgcgagcaaagtgatcgggtccataagctttagtgaagtagtcttcaacttcaggattccatcgcagtaccggatcataacagtaacgctccgaatcggaaggacccatctccatctgatgagagatagagcgtgactgagaaacagaggagaagaaggccttggctctggttaagcaagtggtgagggaagagggttttagcagaaccctcgctttactcattcaaggtggaaggagactggagagatagagagagcttcttcaagggaagaaacttgttgggttttacctttttagagctttaatggtagatgggccatgggttgcaatgaataagcccatatcattcagagctttaatggtgtatgggccttgggttgcaatgaataagcccatatcattcagagctttaatagtagatgggccttgggttgcaatgaataagcccatctcattcagagctttaatggtagatgggccttgggttgcaaagaataagcccatatcattcagagctttaatgacagatgggccttgggttgcaatgaataagcccatcacattcagagctttaatggtagatgggccttaggttgcaaagaataagtccatcatattcatctgcttgtttatttactttgatgtaaggttttttatataaaggtcaaaaaaggttaggtagaagaagctaaaaggtttgatgagagtcttttcctaccaaaccccctctccttgtgatgatgattagcttcacctgccattttctcaatgactgtacccacaggttatataaatggcttctcacatttcgagctccattcctcaccagaccccttttgcaaggttatccctttttctctctctctttcatttgatttcactattagcttcttcatttttgtgagaggctcttggatttttttttatttttgcaacttgtaatggagtctgttcccattaaagtttcttcatttctgagtctttagccatctattcgttggttggaacttggaagagtaggattttagtttgaaatgctcattctccgatcataaagtttatatattttgaatagaatttgtgttcttgttcttgtggatgaagtagagaataatctagggaggttgaaattagattgttgcaagttcgtgaatattaggatttgtctcattgggtctgaagttttgtggaatttcttgacagtgtagtttggcagtttgagagtgtttttcatatccgactctttcaaactgatggttttgacatttttgttgaccagattagtaagttattgttgacgttttgagaaagctggatatggctcaagaaggtcaaaacatcgatgagccggtaatctctgcctttttcagtcttttgtagtgtttctcctcttcatgattcagtcgtaaaccatcatcaaaacttttggaatctggcattcttacaggttgttattggagaggaaaaaggttctgtaagattgactactcttaaccgccctcgtcagctgaatgtcatctctccgaaagtggtatattaagatggaaga

SEQ ID NO: 36943 - DNA, 2749 bp, Arabidopsis thaliana landsberg
  unsure (1)..(2749): unsure at all n locations
agacccactggcatataattgcaaaagggaacttttctaacaaaagtattattattggatgaaggaggggacttacttcattgcctcttaccaccaaacttttgttcatttgtttttagagaaaatatttggtataagactaattaattagctagcaataattaaattagaatggattagcaattgcagtgtattgtttttagagaacatcaatggcatagaaacattcataagtatttataaaaaatacatattattgaatgttcttctatgcataatattatattatcctccaaatgacttatatcgtttgttagatggatccttgcaatcattcattccttacattcataaatatagaaatctaagtatttagagaccttgggttactatttgtgcaaaataaaataaaaaaatagcacttggagatcagaaaaatagtattaattggtaaaatttgtttacatcaaaacataaatcgtttgatgaatgatgaagatctatttgggcaaataattcatgtctaattttgtcaagacatgtttttccaactctttaaagatatgctaatgtaagaaactaagaatgtatggatataaatgggaagagtggtggattggcattgttgtttttgtggataggtccactcatctcttgcatctcatcatatnnnnnnnnnnnnnnnnnnntgaagaccaccacttaatttctctctctactccccccatataatcctatgtcaaatttttcattattaccccaaattaagcataattgcaggggttgtaaatcatcacctagccggctagccgtaatttgctggtttcacaattgattgaaatctcgtcatgagtccatgtataaacacattttgataggtcgaatctcttagaaggctataatcaaaaagtagaagaaatacaaaacatattagcttagaaggctataaccaaactaatctaacccaaataacttgacatatttgttaattactaccaaatatacacaacagattcgattgataatgtttatgttagaattgaatccatgattaaatatcatatatgctatagtttatatttagaggcaatggatgtcatatgatatactacgaaaaggtgtgagtaagagacgtatcttgtcggagaagttacaattgtcaccaaacagttatgtagttagttatgtaaacatctatataagtgcgtatgttctcttatgtaaaaattgtcaagtaaataacaagtttcagtttaatatctctcgtgtctctctcattctagcccatgtctcttctctgttttttattagttagttaagaaacagaacactagttatatgttctccttctcttgcaacggatttagtatttggacaagagagacggctttattgttatcataatgagacttgtcttaaactaattgtaaatatttcagatacacaaatggattggtgatttgaccagatctcattaaatgtgatgaattgatcagatcacgtattgttgacactttttttgttctcttttaggacgaatagaagataagtttctaccaaatgaaacgtcatcccagatgtattttgctgatcttacaaattgactttcttgcggaagaagctgcaaaaaaatttccatgatggtgtaatcatatttttttggtttatcataagtaattgactaattgttaatttaacttagttttgacttggggagaaagaaagacaaaagtgattcaaccataaacatatagttggaatattcattgttaatttaaatttctgatgggtttacaaaaattggaaaatcctccaagttatttatatactatgaaaagaaaaatgaattatgagaaggaaagttggtgtagaagaaaaagcttttagcctttaaggctttttaaccaatagaagcaacatatcatgtgttgacaaaaaaatgaagcatatcatgtgataaatgaatgaggagggtactgatactactcaccaaaattatcttatagaacttcattaagaaattgaaagaaaaacaatacattgtttttgttacgatttggaaagttaggttcggtgcaaaggcctaccccttctatgaatccgaaggcctatgatcatggtgtgatcatcaaatattcatataacaaaatgcttaattgttgatattcttagatttaagctatatgagaacaactatatgaaaacttgattcatcaaaaggcttggattgcatgagagggttaaaagttctgcaagaacgcaacaaacaaacagagaaacagaaacacagctctctctatgaacatatgttacagacacacatcaagcttgtaattaaaaaaaaaacacagctctttctatgtacatatgttacagacacacatcaaacttgtaattaaaaaaaaaaaacagctctctctatgtacatatgttacagacacacatcaagcttgtaattaaataaaacagagcttccatggcatcactattcgcttaaactataagttagtcttcatcttatttttcaagactatatacactatgagtctatgatgactgtcagacataagaagaagaagttttctgtaaattacccgtacaaacaagacttgagctcagagctcagtgtttaaggttgaagcttgtggatggtagtgaagcatctcattccacatcatttctcttatcatctcctctctcaaatcctaataaacatcgagatcgataggaacttgagcaggagggtgtg

SEQ ID NO: 36944 - DNA, 4004 bp, Arabidopsis thaliana landsberg
  unsure (1)..(4004): unsure at all n locations
actcctaaaatttccttaccatagaaggctatttgattgatcaaacctctcttttaccacgacatatctgatatgtctctctcttccttcaccaaaattatcaagtagtttcttttttggtgttttttacataatatttttgatatcaaacctaattttttttgtctttatacataattttctaaaaaaaatgttacataattatcatcccgtcatggagtagatataatatttgtaacaaaatatagtttacataaaaatcataaatagtttgacaaaaaaaaagaacaaaaaaaaagaagaagagaaaaatcataaatcttgtcaaaagtaccggagcctgactggacgaagcgacaaacaatggaggacggcgagatagaggaaggaatggtaactgccgacgaattcccggagccggaagtaacaaccacagagactatacaacctccccgagagccaggaaaatctccactcgagctacttcgagagagcaaaacctccgtagaagaaatcgtcgcgaagatgctctccatgaaaaaacaaggaaatcacaaatctgagattcgagaactcctcacacaaatgttcctcaacttcgtcaatcttcgtcaggtacataccaatcttctccgaatctctccacctctttcgggacacgatgctaattagggttttttcgcaggcgaatcgggcgattttgcctgaggaagataaagtgaaagcggagacggaaagagcaaaggcacctgttgatttcgcgacattgcaattgcataatcttatgtatgagaagagccattacgttaaagctatcaaggcttgtagagatttcaaatctaagtatcctgatattgaccttgttcctgaacaagacttctttcttcatgctcctgaagctatcaaagatcaatcgctttcaagtgatagttctcatgttttgatgcctaagagactcaattttgagcttcatcaggttggttaaccaccaccatctctcaaattcatttaaggtgatataatgtttcattacctttatatgttttttgattcagaggaaagaattgtgtaagcatcgagcgagattagaggaacagaagaagagtttgttagaaaccattgcagagcgtaagaagtttttgtcgagtcttcctctacaccttaagtctctgaagaaagcatcgcttccagtacagaaccagttgggtatacagcacacaaagaaactgaagcagcataatttagctgagctgcttcctcctccgctttatgttatatactcacagctcttggcacaaaaggaagcttttgaggagagtattgaattggaggtagttgggagtcttaaggatgctcaagcttatgctagacaacaatccagaaaggactcaggtaagttgttttgaaaattcactgtgttgtctaattctgaaatgaaaagaatgctaatttggtattggtttttcaggtatgtcgagtaatacagagagttctaggttggaggatgatggacctgatgacgatgatgatggacaaaggagaagaaaacgacccaagaaacttactagcaaagaaggttctgacaaggcaggattatatcaagtccaccctctcaaaattgtccttcacatgtttgatgatgagataccagatacaaaacccttgaaacttgtcattctcaagtttgagcacttgctgaagttgaatgttgtatgtgttggcgctgaaggctctcaggatggaccagaaaaaaacatattttgtaacttgtttccagatgacgctggacttgagcctcctcatcaggtaactttttgtttctgtgtttcagttttcttctacatgtgacttttgatgactttacttttaaaaatgcatactcaattctctttatatggccggttttccatgcagtcaaccaagctcatccttggtgatggtcagacatttgatgagaacagaacttcaaggccttataaatgggtacaacatttggcgggaattgatattttaccagaagtgtcaccggttttattaggccaagaagctcataacactgacccagctaaaagtgatacgtttgtgcctgatctttctttgtatcgccagcagcatagagtgcaaacagttctgcgaagaatacgcttgcggaaaaaagcgcatctggctcttgcgtgagttcaccactctgtatgttttccgtcttaattaaagaacacgatgcaaagaattccagaaaattagttgaccaccatgataatcagcatatggtttgtacatttaatagtttgggtttgtcagtaacctggcggtcaatttaatccctctgtagcattgtcagcttcgtgataagagcttctataggtaattatttctgttgatatgtttatttttgctgaatactttggaaactcttactggctacagggaacagcttgatttgcttatgaaacatgagttaccagtggtgaactgcgaagatgctccttgggcattgcataaggttctctgtgctttggattcctggttacatatacaatcttcagctagtaagtcatgctctctgactctgaacagtgtggaacaagttccagaacctatggaaatcgatgtagatggaagatctatttctggaaaagaagatcttgaaagtatacgggaagatggagaacttccctctttggtcacggcggctgcttcgttaaccagttccaatcataccccatcgaaagtatctaatcaagcacggtcaaggcagttggccttgatgacaaagaatctagattctccgattagcaaaggaaagtccccaagtttcaagaaatacgaagatgatttggatcttgttctggacgatgatagtgaaatagatgagccaaccggaagaactgaggcgcatgtggaagagttatgccctgcgaaagctgataattcatgggtggattatggttcgagagagtttgcgcttgcgttctccaggaaaacagatgccggaaagttgtggaagttagaagcaatggtaacttctaaaaaactatcttctaatacggtatcttccctatatctttttctttcttaagtgttaaatcgagttgtattggcaggtacaaattagcatggagtatcctcttcgacctcctttgttttctctgtctctccacgcttcttcttcatcagggaatgacaatgggacaaatgaaagtgaccattacaatgaacttcgagcaatggaagcagaagtaagtgttaagcccagtaacataaactaatctttactcgatgacaccaaagataacacctttgtaaccttttcgtggcggtatcaggtgaaccttcatatgttgaagattattccttcagatcaagaaaactatctcctatctcatcaaatcagatgcttagcaatgttgttcgactattacgtggatgacccatctccagattccaaaagaggaacagccacaactgtggtcgatgtcggtttgtgcaagcctgttgacggtaagcttcttgtgagatcattcagaggcagagatcaccggaaaatgatctcatggaagggcagaggatgtgcatcgggttatccatgctagagattacatcggcactcacttctttatattatctttctctggtggtacaagcaaaagtttttgcatgtaacattttttttatcgtataaaccgttattgaaacagcctacttgttgggtgaggacctggtctgttttaaacctggcatgtttcaagtccaatccgttttagcctgctctgttttggtctcgatttaagcattaaagcctagcgggtagcttggaaactagaaaagtgaaaaagggctcgtcacaggttttggaggaaaaaaaaggaatcaactcgtagacaaccgttattacaggttgctactgcaattattgaccaattgtgttcctgcaattggaggtagtgaagaaaacanaaccaaatcaaattggatattagttnttattcaagcgattatatagt

SEQ ID NO: 36945 - DNA, 1219 bp, Arabidopsis thaliana landsberg
gatgatggaatcccttcctcaatacgctacaaacacacagaagaatatatggttgctgtttatttttgttgagaatttagactttcaaagctttgaatttgctgacttctttttacctgaagaagatagttgtgaagccaatctagtgtctgcgggaatgtggtggccgatatatttacaacagtcaccccctgattcacgaatacgaaatgtaagaacctaaaaaaacctgaacagaaattttgattgatgaagaaccaaacaaacctgtgaattaaaggaacaaaggtagtcttcaatggtctttaggtttgtaattagtctatctttctcctgcagaaaaaggaaagccaaacatgtgttcatacaactttcaagttcagtttagatctctttaagctttaagttgtataatagtaccttagtggtatatttctctccagatgtacgggaagagatccactcctctagcaaagcctgagaaaatgatattaaagaaaataaagaactgataaatgactacttttcgagttatatagaaagaaacaaaatttgattcaccttatgatcaaattcagacatctttaaaacaatagatatgactattggttcagggaaagatttcttctttccacttccatctgcagatttgcttttcttttcagcatcttgtggactttcagctgcacacacacgaaacggggtagagactttacactcacatagaagcaaatggaagaacaatcacaagaagaaaagactacactgaaaatactttgaagcataccgtcgattgtacattgtgtaactttttctgagaggttgttcgcttctacagatgccacagcttcctcatgagactggggtttcacagcactattgtcggtttctttcgtgtttgaagaacttgcctcgggatttttgtccgaggttagatctttcgaagagtttgtttcgctgctgctcttctcgggatcatttgatggagttttgttctcatcattcattaagtatatgcttggatctaaatgtcttccctgtgattacttggccaagattagaaaacaggtgtaattgccgaattataatccaaatgtatggagctttcacaaacaaatttacctcaattataatgggtttcccatctttcattgctttcttcaaatcaccaccaagtcctatacaaccccaagccattgagtaatgtcaagaaaaaata

SEQ ID NO: 36946 - DNA, 2064 bp, Arabidopsis thaliana landsberg
gtgggtcaaacaattattttggtttgtgtctttttatgtattgttgtccagtggtggtggtggtgtactggtgtattcagactcgaatccattgaaacgtatattacacgcagacgctactcttgactcagatggcaacccaataaggaagaagaaggtggtcgttcttggcagtggatggagcggctacagcttcttgagttacttgaacaaccctaactatgatgttcaagttgtctctcctcgtaactttttcctcttcactcctctcttgccaagtgtcaccaatggtactgtcgaagcccgtagcattgttgaacccattcgtggtcttatgcgcaagaaaggatttgagtacaaagaagcagagtgtgtcaagattgatgcatcgaacaagaaaatccactgccggtccaaggaagggtcaagtcttaagggcacaacagagtttgacatggattatgacattctcatcttagctgttggtgctaagcctaacacattcaacacccctggagttgaggaacatgcctatttcctcaaagaagcagaggatgctctaaacattcgtcattcagtcatcgactgtttcgagagagcctctcttccgaatctaactgaagaagagaggaaaaagattctgcatttcgttgtggttggtggaggaccaactggagtcgagttctctgcagagcttcatgatttcctagtccaggatgtggctaagatttacccaaaggtccaagagttcacaaaaatcactcttcttgaagcaggcgaccacattctcaacatgtaagttccacccatcaagcttcattaactttggctaaatctactgcttttctaatgttggttcaattctacttcaggtttgacaagagaatcactgcttttgctgaggaaaagttccagcgagatggtattgatctgaagacaggttcaatggttgtgggagtgactgctgatgagatatccacaaaggaaagagaaactggcaagattgtctccaaaccttatggtatggttgtgtggtcaacaggaattggttcacgtcctgtcatcaaagactttatgcagcagattggtcaggttagataacacttgatcacatgaagaaatcatttgactaaccaaatcatttgctagtgtcccacctaactagattgagtatggttacagggacagagacgtgtcttggctaccgacgaatggcttagagtagagggatgtgacggtgtctatgctttacgtgacactgcttctatcaaccaacgcagagtcatggtatcatcttcttgacattgttcctttgtgtcacatctcagttgatgaatgaatctttaaccttctgttttgtcttgatgttgttgaacaaacaggaagatatagctgcgattttcaacaaagcagacaagggaaacacaggaactttgaacaagaaagatttcaatagtgtggttaaagacatttgccagaggtaccctcaggtggagctctacttgaagaagaataagctgaagaacattgcaaacttgctcaagagtgcaaatggtgaggacacacaagtgaatatcgaaaagtttaagcaagctctctctgaggttgattcacagatgaagaaccttccagcaactgcacaggtaagcttgttatagatcaaaacaagatgaaatcaatccaccacacagattttgatgttttgattcttatacaggttgcatcacaacaagggaagtaccttgcaaagtgcttcaacaaaatggagaaatgtgagaagaagccagagggaccattgaggttcagaggagagggtcgacatcggttccagccattcaggtacagacattttggatcgtttgctccactgggaggggaacagacagcagctgaactgccaggagattgggtctccattggacacagcagccagtggctttggtactctgtctacgccagcaaactggtgagctggcgcacaaggatgctcgtcatctctgattggactcgacgctttgtctttggccgtgacactagcagcatctaagccattcttctccatca

SEQ ID NO: 36947 - DNA, 1660 bp, Arabidopsis thaliana landsberg
gagggggctaatgcctatagttctcccagaccagcaaaataggttcaagggggccattccggtttccccaagcattgcggagtaagaagttatgagaattcaagaaggcttctatcagctgggctaagtgtgccattcctcaacttctgccgttccattagcaagaatttcctgctaggctctcagaagcttgaaacatttggcgagcatagccctatctatatttcatcttttagagaggcagagcttcaaggtggaccaaggctacttctgcccgtaggcttaaatgatattgttgttccggtttatgatgatgaacctactagtatgatcgcatatgccttaatgtcaccagaatatcaacgccaaacttctgctgaaggggaatctctagtttcatatccttctgaactcaatatccctcgcccagttgatgataccatttttgaccctagcagaagcaatggttcagtcgacgagagcatactttcaatatcctcatctggcagtacctcacttctggacccactatcatatacaaaagctttacatgctcgagtctcatatggagaggacggtacgcttggaaaagtgaagtacactgttacttgttactatgcaaagcggtttgaggcgctacggggtatatgtctcccttcggaacttgagtatatacggtctcttagccggtgtaaaaaatggggagctcaaggtggcaagagcaatgtcttctttgctaaaaccctggacgatcgatttatcatcaagcaagtcaccaagacagagttggaatcattcatcaaatttgcacctgcttacttcaaatacctgactgagtccatcagtactaaaagccctacaagccttgcaaagatcttgggaatctatcaggtacgaaaaataacaaaatacttaactaacaatctctctgaactacatgataattgagaatgcttttgttcgactcaaaacataatttttcttgttatctcttttgttgacatttgacgagacccgttattctttgctaaatctttaaaggtttcatccaaacaccttaaaggaggaaaagagttcaaaatggacgtcttggtgatggagaatcttctgttcaagcgaaacttcactaggctttatgacctaaaaggctccactcgggctcgttacaatcccgatacaagtggtagcaatacagttttgctggatcagaatcttgtcgaagcaatgccaacatctccaatatttgttgggagcaaggcaaaacggcttcttgaaagagcagtctggaatgatacatcatttcttgctgtaagtttccagttgttactcttcttttaaaccgctttgaaataccgaacttgttcttgagctttacatagtaatgctgatgcaagatcttggtttgtttctggctgaagtcgattcacgtaatggattactccttactagtcggggtagatgaggaaagaaacgagctggttctaggaattatcgatttcatgaggcaatacacttgggacaaacatctggagacttgggtcaagacttcagggctccttggaggacccaagaactcaactcccacagtgatatcgccgcagcaatacaagaaaagattcaggaaagcgatgacggcttattttctgatggttcctgacca

SEQ ID NO: 36948 - DNA, 5160 bp, Arabidopsis thaliana landsberg
caaaaggtgacatttgatgctagccctacagttccggaattgaaccattaaactaacgaccaagtgggagaatgtaagaaatgattatttcttacctatgtatggggtcttatagttggtttcatataggattgttatattttgataaacatttggtgtaaccaatagaattagtaagtaaggagttaatttcctaatgagtttagatagaacaataagagggcaagtgactaatgtcatgagaagtcaaatgttaagctacatgtcatggtaaggttaaaaacttggtgagaaagctttgaagcttggtgagaaagctatgaatgcacacttgtccaagataaagaaccaaagttagacacatgttctcacacttgtcaattgcctacatctctactatgatggatggttgagactgaattaaaagggcaaaaccctaatgtggaatggggtcctctccccacctatatatagatgatttgctccagcacaaatcacatgaacaaaaaaaacaacacttaaagagaaagacatataggcaaggggagagaaagacattatcattattcatgtagcccaatttttatttacccaaattgtttaattaaccatccttattttatataattgattctgtacttttgctaatttgaatatcaattttagaagtgatgatcagaaagtaataatgaactaggtttagacctgtgctagtatgaaaacgtttatcgagctcatcaaaaggagaggagagatgggttagtggaaaagagtcattggtggatgcacaagagctgtccaccatctccaggacggagtcccccgtcgtcgaagaggctgtagaaactagagaggagggtaaagaacgaacaaggaagtcttcttttgaactgattgtatctgaaagatgatttgaaattttgggatagtggaagaggatgtagaaaacaacaacaaacagaaaaaatagaacgagaagtgcaataacgagatttgtagtgacattcatctttggagggcgagaatctcaggcaagagtgtaaattggggattatcaatttctcaacccctatccaaaaatattaaaaatattcattaacctagatctgaaaatctaaactggaacttatccgagaaagccgctgtaaatgggtttggttaagcagattttatcgaacttgttcaggtcaggcacgacccacattctttagaaccgctgctttatatgtaatttttagaaccccatacatgtcaaattttggttagccgaagagtgtaactgttaagaaaccacagagctaaagacgtcgactttcctttacttagtgactcaaaacagatcctagaacaaaacgacttcagagatgagtgatgtacttcagaaactggttcaagagtgtttgtaagaagaacaagactttggaagaaatagagaaacaaaacagagaacacacacgagactttggtaacccagttcactcccaaagggtagctacgtctgggccgagactctcctcggaatccactagaatctgatagtgtttacaacaagagtctacaagcaatacacctaatacccttcactagtacttaggattgctctgcactactctgttatcccacaaagaacagctaatacaagtttatactatgaatagctttctctcttaacacctcacaaactctgtaaaatgtctcgcacactctctcaatgacttaagcacctatttatacttcaaagtagattagggcttcaccccagcaaataacaagccgcagcctacgctccttaaaacgccaaaactgccagcttgaaagcgattgttgtctccttctttaacctcctctctttgcacacacaaatggataaattgtccttaaagcaaaccgatgccattgcgaggcaagctccttcatagccgtttgctttgttgtggtcccaaaagtagactaaccaaggttgagttactttaccttgggttaagtcttaaggttaaggccaaacatttgaatataaccttgtgcttcaagctatcagtcttcacaaatctccactagatagcataagccacaaacattcaaactgtttagagttacaagagagagaaaaagtacctcattctagcctctggattctagtctcggattctccgagtttactactcagacttaacacggagcaagttcaaagctatttaaacttactcactgccaagactttggtgaatatatcctctgggtacttctctgtagatatcttcaacacctcaacagttccatctgctatgatctctcggatgtaatggaacttaacatcaatgtgcttggttctttcatgatgcacattgttcttcgagagtgcaatagccctctgagaatcacagaagacctccacactcttctgatcatacctgaagtctttcaacaaaccttttaaccaaactgcctctttcactgcttcattaagtgacatgtactctgattctgttgttgactgagcaacaactctttgtagacttgacttccaacttatggtgtttccaccaagtgtaaaaacaagaacagtgattgatcttctcctatcaaggtcagcagcataatttgcatcacaatagcccacaatcttgaaacttgtgcttttcttgtaacacagtcttgttttcaaagtacctttaatgtatctcaacacccatttcactccaacccaatgatctttactcggtttactcatgaagcggctgacgatacccactggataagcaaggtcaggacgtgtcccaatcatggcatacatgatgcttcccacaacgcttgagtagggaacaaacttcataaagtcttcatctctgaccagtttctgttctgttgcagcttgaaacttaaaatgagctccaagtggagtcattgcaggctttggttctgacatattgtaagtttcaagaatcttattcaagtaaccttcctgagacagccatagagcaccctctgatctgtttctgttgatctccataccaagtatcttcttaacagcccccaaatctttcatctcaaaacgcttgctcaactcatacttttaagaggctattgcttctttatcctttgctgctacaagcatatcatccacatagatgagaagatacatcattgaaccgttctgcagcaccttagtgtaagcacagttatcatactgacttttcacaaaaccaatctctttcatgaagttgtcaaacttctcattccattgttttggtgcctacttcagtccatacagggctttattcaaaagacatacctgattctctttgaacattgactcataaccttctggaggtgacatgtagatcttctcgctctccatgtagaaaagctgttttcacatctaactgctctagttccaagtcctcttgtgatactatagtcagcagtacccttatagatacatgtcttaccacatgagcaaagatctcatgatagtcaattccttctcgttgagaataccccttggcaacaagtcatgcaataaatctaggttgttcaacacccagaatcccaagcttatacttgtagatctacctgcagccaatgattctttgattctcaggtctcgtgactactgtccacgtgttgtttttctcttgagaatcgatctcgtcattcatagcaagcttccatttgttccaattagagtccaattttgcctcgttgtaactctccggctcaactacatcaccatcttcagttgtatacaatgcctcagcatagtaatcttcatcatcaaaacgtcttggtgctctaatctctcttctgtctctgtctcttactaaatgataactcggaggagactgatttacttcagaaacaccattatcatttgcagtttgactgagtggagtagcgtgtactggactttctggtacaggagttgtctgagacatcccttgatctccacctgagataacatcatcttctgcttcaaggtcaagatctagatatgatccagtttgatcatcttcttcactagacacattctcacgtgtcagcatcagatccttgtacacaacattttcttgaaagatgacatttctactaaccacacactttctttcatccagcagtcacactttatacccttttactccaacagggtaaccaataaacactcccttcttagctcttggttcaagctttccatcatcagagtgaatgaaaggtatacatccataccttctcagataactgtaaaccggtggttttcctgaccacttcttgtcaggaatctcaaaattaagagcagatgatggtgttttattgatgagaagtactgcactgtgagttgcctctgcccaaaacttcataggtagacctgaatcactcaacatgcttctcactttctccatgatggttctattcatgcgttcagcaaccccattctgttgaggtgtgtaagcacacgttctgtgcgtttgaatcccttttgattcacaaaaaccatcaaacaacttgttacagaccattgtctgttctaagagtcttcactctattgtcactttgattctcaaccaaactgacccaatcaacaaacttctcgaaggcttcatctttggttttcagaaaataaacccacacctttctagtataatcatcaataactgacatggagtattggcacttccccaatgagaatggaactgatggagctccccaaaggtctgaatgaacatattctaacttcttagtggtaccatgatgagccgaattgaaaccaattatcttggctttaccataaatgcagtcctcgcaggtgtcgagaactgagactttcttaccatctagaagtcctctcttgaccaaaatctccatgttcttttgactcatatgacataaccttctatgccataacacagtatcatccattctcctaactacataagtgattcactagctacaggtttccagttaagcaaataaagagtgtcataccttcttccagtaagtcgcacttgacttccagctttaatgcttaagattccattttctgactcaaacttgtaacctgccttttcaaaagtccccaaagatagcagatttctatccatatcaggaatatatctcacatttgtgagaaccacagacagaccatcatcatttttgaccctaatg

SEQ ID NO: 36949 - DNA, 3796 bp, Arabidopsis thaliana landsberg
atgttgtttacaagaaggaaccaatagagtttctctctactttgcaagtggagatgtatcaaggtctttcagcagatgagctggagagtgaagggttggggttcttgactttttcagtgaacgagcagcgttaccagctatctatcaagagcatgaaaggattgtttggtttccccagtggaaagggaactaaacccaagttcgagagagaagagttgaaggatttgtggttaaccattgggaatgatatagcgctcaactctgcgaggtctaagagcaaccagattcaaagccctgtgatccgctactatcagcgctctttagcaaatgttctgtactctagggaatctacaggcaccgtgtctaacacagacatggagatgattgattctgcactcaagggcattctccgcagaacaaaggggaagaaggtcctgaagggcgacctcaatgatgcaccactagttatgcttcttttgatccacctgtgtggatacaggaagtgggcgcaccccaacgagaagaagagggtgcgaggagccctttgtgtggtggtgttgtgacaccgattctgattgcatgtggtgtacctctcacgtctccagggtttgatccaaggatgatggatttagatcatttgcgtcgttgtgagtttttggatcacgacatggttagcgatttctatcgctagaaattcgagcagtccttaacccgaacagccaacattctgcttccctgcatcgaggccataaccatacttcagggcgagaacattgacttcaagcctgcgcgtgattacctctactttgagagtgctccaccgattgatgacaatgtccctacgacagaagctacagaggatgagattgttgagacagatgaggatagggaagaggagtacgatacgagcatgtatcatttcagtgagcacatacctccagcgcgggagagcaagagcttgagcaaagctcacagaaacaacaataagttgcagaggtggtgcacgaaacaagataggctactcatcaagtgcttcaaggccatcaagtttctgacagacaagctaagctgctcctcttcgaccacagctattccgcagggagagcctcctcaggacatgccctcgaggagatatgacgcgccagagccaagtcgccacaggcctgagccaagtcaccacaggcctgagcctaatgaccgagtagtcccaccattccctgcgaggcattcatcattcgagcctcgggagctcgggagaaagaagaaggctgcactcgctctttctggcagcaggagtacacgacttctcctgtcccgtagcttacgcgaccgcggtgttggccgcagcagaagaagagaggtcgagtatcattagatcggtgatggccgcgacgaaggagcagaggtcgagtacccccagggggaagctgagacacaatagggagattctaagatggcctaggagcaatcacaggcagctattgacgaccaactccgctcctttttccactgaggtaagcacctcacttcaccattgtaatataccatctcttgtttttattttgtttctgtgatgtgttttgtcctcagtactctcttccaaatttggtcacacagtggactatgtgatttaagtttgggggagggctcaggaagtgtgtgttgcattcagttttattttctgttttactctggctacgccacttttgcttctacaacctgtaattcgagatttttgcaagttattcagattctgcatttgatttcatctatcatcttgtttctctactctatatctctttacttatgcaatattatcatttacctgcgtttatgtctttgagcatgttgtctgagtagtgacttacaattcttaaggatgagatacagtacttgtggaatccgtagtctgtataatggttaagttttagaattgattgaatcccttcaggattgatcaactggaattcgatccaaagcattcctgcacccagaaggtgttcgatggaatgcttgatccactagttcctgagatattcgtctctaatccaagggattggccgtttagagcacttattgactttatcagtctgttcttattgcctgcatagttagattctgttaatgggaattagcttgggctagctttgcttgaggatttctatcacgggagtgaattgatctgttgttgaacctgttgacttgggataacttgattgtgcttgttaaccattcgaataggctaggataccactctattcgattaccccatccttaggaatttctcgtctggcatcagcctgttgtggtcgagtgattttagtaattctgttattgcttctattttctgcatgttcgcttaggactgttagaaaccccaaaactgttattgcttggcttgacttagtgacttctgattacatctcatctgtttgcatcacacccatttggattgacacctaaaatactacaacgacatgattggtgttttaggataattgactaaaaacctattattagaccacattaccggatgagtcctcaagaacacgatgagctacgacgacaagtggaagagctgctagctaagggtcatattaaggagagtctcagcccttgtgccgttcctgtcctccttatcccaaagaaagacggcacttggcgcatgtgtgtggatagtcatgccatgaacaaaattacggtgcgataccgctttcctattccacgattggatgaccttttagatcaaatcggtaaagcttccctctttggcaagattgatcttaaaagaggataccatcaaattcgaattagacctggagatgagtggaaaaccgcgtttaaaacacgcgagggattatttgaatggttggttatgccctttggcctctccaatgccccgagcacatttatgcgcgtcatgaaccaagctcttcgccctttattggtaagtttgtggttgtatatttcgatgacatcctcatctttagctcttcacgcgaggaacatgagaagcatctccgagccgttctcacagtattacgaaatgaaaagttgtttgcagcccgtcataagtgcgaatttggtgtttcgttcttaggctatgtcatttcagataaaggcttggcagttgatgaatcaaagatagaagttgtacgttcatggccggttcctcgaacagtaacagaggtgcaaagcttccatggtttagcgtctttttatcgaagatttgtgcatcatttcaacagcattgtagctcctatcacaagttgcattaaagacggcaagttcttatggacaaaagaggcagacgcagcgttttcactcattaaacacaagctcacttcggcaccaattttgatcctccccgactttacacaaacctttgaattacattgtgacgcctccaagttagggattggggctgtgttgagtcaacaaggaaaaccagtagcttattatagcgagaagttatcaggcgctagaggtcgttatagtacctatgatgttgagttttatgcgatagttcaagccatcaagcattggagacattatctggttcatcgagacttctttctcttcacagaccacgatgctctgagacaccttgatagccaagcgaaagtttcatctcgacacgcatcatggatcgcatttcttcagcagttcacattctcaattaagcatcaatcgggtaaaaccaatagagtagctgacgcattgagccgtagacacacactcaagtcatcttgccatacaacagtgacgagttttgcttcgttatctagccttatcc

SEQ ID NO: 36950 - DNA, 2499 bp, Arabidopsis thaliana landsberg
  unsure (1)..(2499): unsure at all n locations
aatgccaacttatatggaattaacaataatgtcctgagatcattttgttttaaattatactctccttctcttctaaactaattaaaatccgcattaactttacgaatatgtagtataatctatatatcctttgttttattattcatttaaaccaatgtcataaatagtgagactttaatgtatcagttaaacgatacaatgccatctccaattaatgagaactttaagcaaccataagaaaggtttgagcaaggagacgagaaaaaaccaaccacacgattccaatccacaaatcattacatcaaactcaaactaaaaaatatcctaattttattctagcgcataatgagggatgggtcaaacataccagtaaaccgagtgtaaaatgcattaccagtcatatatattgaatggtacagtattacaatctcaaaacaccttttctctttacaaaatactctcaacggaggtaaaggcattgcaagaataattcaacatggaagccaagtttctttaaagatgatgaactatggttttaaattttaatctagcgcatgagggatgggacaaacataccagtcgtaagaattcagtcatcaaaacaaaagttattgtcgaatctaataaagttgttatacaaaacgcaaaacgcaaaaagaaataggaacagaagaaaattaagccaaaagagttttcttattattgattctaaaacaaaaaaagagagagggaaagggtggtcaaggtcgacattgacacaaacacaagaccaaccactctaatctcacaaacacaaactcaaacgaggttgctatatagttatgataaaaatttatatatagcctaaacctctcattaaaacaaaaaggaaaaaaaaagttgcatagatagagcttccacataaagaattggttatgcagcggaaggggcaagactaataaggacatcgccaacagattccttggaagccaaggttgcattgatcggactcagtttggactcagtctcgacaaagttcttgtaatctaaactcgaatcttcataaatatcccaccatttcttcaccaacattnatggtcctcacgatccatatgctcttcagtttcatcgaatctccaaggcttcgaaccctacaaaatttgagtaacagaaatacattaaatctacattaatgcatatatgtagagacgaaataaggaattaaaacgtacatttgcacaataatgaataacactgatttggtcaaggtcaatgtgttcaggatgacgccaaagcatagccattacaaggttgtaggtcgaagggatgggcttgtaaatatctgtaaagtatatattcagaaaatcttataaatagaataaacaataatattagatttgtaaaataaatgtaaataatgaaaataaaagtctaaaaaatcctaattgatcggacctgttcggcgaatgaagtaggagtggtgacttgaacagtttgaagaagatcctcgtaagtgaggagatttggttcaaagaccaacatacccgcgttgaaatacaatggcggcacatgaccaagactgttcatcggccacctcactttttcgggcgactgttggcagtaaccaatcttgtattgaggtgtttttgaccaagaaccctcgcaaaaacagtctttgacggcgtacaagtagccagatggagtgtcaaatagatgatcgatgttgctaaacacttgtatgtctccatctaaatatatcatcttctcatattccacaaactgcatttatatatgtaatcatatggttagaataaaatatatatactataagacttaagacaaactttatacatatgttcttgaaatgttatttactaaattaaaacaacttctgagaataataataagcgttattattatagatttgtgactatatataaatcttgattagtatacggcacatgacaatttatttgttagataaaatgataagcgttattatttgtttctgttaaaaaattcacaacattcaaatccacgtgtcactcaaagtaatttgtgggtacgtgtttacatgcaataaacgatagttgacaaagaaaaccgatacagtgatatacggatatatgcatgtaagtaagatcctacctcccaaattcgaagcttggagtagttgataacgtaataagccatagcataaccagcttggttttccggcggataaaccggttcaatctcccggatgatacatccttgagccaccaagatttgacggtgttctttcggtatgtctgggagcatagccacaacaagaggataagctgctttcaccttacgaagtcccttggctaaaccaaccacacccatccaatagtcttggttaccagctaggaaagtgacgtaagccctttttccatcattaggaatcaccgccacgtcagcctctacctttctttcgatgttcatctccgttggtgccatctcaaaagaagcttagtctctttagataagttttaaaag

SEQ ID NO: 36951 - DNA, 1041 bp, Arabidopsis thaliana landsberg
ttcttttttaaagaatatattcggacatgataatgaattattccattaattttgtaagtaatattagctaaagaattgcagtacttcacaataatgtattactaacaatcacctcgtgtatgaactatttgtatttgactatagaaaggctattatgtaattctcagtctgagcgggtcgggataatattgcaacgtaactaacatgtttagacaagccatcataaaatttcaatgtatgaagataattcgtaattgctgtactaattaaatttatgtaattttgtgtggattgacaaaattcgtctgtttggtttttgtacgtttgttgccatttagtagatgatatgtcattgggtaaattagcacacgaaaatcatttaatatatataataaacagtcattataacatgtatacgtaaattatattacgaattgtgataagtctagccacggggtttacgaccaaaagcaatacataaataataatcagggagatccatgaacatatatatacaaagagtgcggacacgagaagcaatatgtgccaatgtgtggaggaatgtctccatcattaacctaattatattatatttttatgttttataatttttatggtcttctccgctttgtagttttagccttacagccattaactatcgtaaattagggtactaatacttgttattttttttggtaaaaggtgaaattttatactatttttgatttgtgatagaattacagagaaaactagaaacagattaaagcaatctacataaatataaaaacaacattacaactcaagatgcaaaggatcactactaagtggtcaaagccaaattacaaagagaaacaccgattccgagtccgcaaagctcagaaatttgcgtgattgccacatgaccgaataactggaattctcatcgtagttaccacgagcatatctatttgaagctgtcctcaaaacctcaagatagaaacctacaactttttccgagaactaacgcagaaacgcttagactgtcatggtcttctacaccaa

SEQ ID NO: 36952 - DNA, 4277 bp, Arabidopsis thaliana landsberg
cagccaacataatactgagaaatgtttcaatgcatagttagacggaaaaaagaacagacctttgttgaaaccaatggggctctttcaccaggaactttcacatcaggcaagaagctaaagtccgaagcaattagggacatctttggcagctttgcatgtaaaacctctagcagtttctgaaattacaaaaattagaacagagtaacacaacatctgttgtaatatgtggacaccatttttttcttaccaaacaacctgttggaagccaactacgtctaggtttgggaaatagtttagaccaaatttcttttggttttgaaaccggatcatcttcatgttcaacaatttcaatgcaccgcttaatcagtggatcttctaaaggcttgtatagctcagagagtgcttcgctacagtttataagagatcgggatcaataaaggcagaaataaacttcatttgagccaaatattctctgtacctctctggtttattttcaaccaagacttccatccatggggaaagttgacttttggaatagacaagatcatgtgggagattatctagcacctgcaatggtataagttaatacaaatattacacgtatgattccctcttcaattcaaaataccaacctatcaaatagaaccacatcaacataattacatacctcaagcattatcacccagcacggttgttgctccacattctctgtttgaaaatttactttataagcacagatagataacttcatagtcactaaactgggattgttcgataatatgtggttggctaatttataaacatcttgattaataagtagtctctagaaaatttgggtattatcgctaattctaagtcaatgacaatctagtagcataacctcatttcactaacgatttctccgactagcttaatcttctaagaatattatattattttttttggcaaacaactcactaatttaatattttcaaccaaataccgaattctagcatagcaacaggaaattgaaaaccagaatctgccttgtgctgaacaaaaagaaccttactccatccagctaggtcagatgcatcacgacactcaactcggaactttgatagatgacttccaacttgtgcaacagtttccttctgaatcttagcaagtgagggactgatttctatagaactgatatatattaaaaataccatgcagttaatataattgcagcatgtttcataacagtttattattcttaagttccagccaaagatgattttgtatgaatacatgctagcttaaattgacaagagaggaaaactggcatacgtacgtgtagctcatgttcttgtagattctctccggagcattcaacattatatagtccaatacacccttggcacatgtgcccgatccaccaccaatttcgtatatctaagcacatgtttcaagtgttattgattaacggaagaaccagtgcaaatgtcgactttaactcacaaaccaggatgaaaatttcccttttccagatattaaaactttcctaaagacatatgatcttaaacagaaattcatggcattactttctccaccttcaatcgtgatatataaactttcctaaagacatatgatcttaaacagaaattcaaacgattctaaactacacaaccattttcaaaagaaacaaaacttataaaggttctataggtaaaccgtggtttctctatttcaagttttaaagcatgaacagaacaagctaaaggcctaggctatcactaactagtttccttgcagtctgataggtaaagataggtcaggactaactagattcaaaacttttcatataactacagaaatcagagacataatatcaggttttgttttgtcttgaaattaaataaaatacagatgtggacgatcagataagcaaacctttaatggaactgagagatttgtggtacgcagtatagcttctgcaatcccatgagcataccaaggctacaagagatgattggcatgataaaataggataaatcacacaagtgaggcttaatcaaagaaaacaccaaagaatctatccacaaacatttcaccttgaaaagctccactggagtaaaccaagaaatgtcactctgcttgtatactttttccaagagtttcatgtatgctttcctccctaggacaaggagaactatcgacttactagacataaaagagataatataaccataagaaacaacagataactagccaaacaaagatcatgatgcatctcatgtagagtaagaactgatattgctatagtttcagggcagttatagaggcgtggctaaaattcaagaattaaacacttaagcaagtgaaagttgaactttgcgcctaccttcaagctggttgaacttaatgcttctctccaaaaccccgacagattttgaccgttgagagaagtagccttgtattggatcatataatgcagtgtgtatgaaatctcgaacctgtttcagattaaccaaccatttagtctcacattctagaaatcgccaaatgagaatgaaatctgataaacatcaagactcggatctggagagaactatgagactgtaaacacaaaacggagacagaaattcttaacaaggattcaaaacagctaactcagagcagaaaaatttctttgaaatacgaaaagttttgccttttgcattgcttaaggttgatcgatttgtcattaatattacttatcaagtaggtaaatctgaaccatcgaaaaactctgagagattgagaagaaactcacgagaactggttcatcccctatgagcttctgagtagagaagaaagctcgaagcgatccaagacatggcagctcgaattgatcaacatttcgtggaatcttccgacaagggatatatcgaacgaaagccatttctatggattctctctctatctctacgatggctcgatcgacattcgagaatcgagatacagaaggaactcaccggttcaggaggtttcatagaggtttagggtttagatccggtttaattcgaccgttctatattcataatccttggttctcttcttattataccaagttcggtttgtttaaaatttaagctttcttaaaaaagatttatcattttgtactgttagaactttattattgataaattaaaaactttacttaaatcacataaactattattatttactaaaataattcaaattttgttacaactccaaaacccaaaaaaaataaaagtttttttttttgaaaaatataaaaactaaaacttaaggatcaaatttaatcaaatattatttttgaaaaatcgaaaaatttagtttaaaataagaaaatcaaaagtgcaataacattttttaaaccaaataaaaccatcttatgtaagcatagatgtgtataagattgccatggcagaggtgttgtgttcctcgaagcatctctgacagtatacatcctcacgtgccttgtctacatgattttgcatcatatccatttgtgaaccctaataacgttcgcattaatccccacttggctaatgctagacctcaacttcaggtaaaatccaattatgcatggtgttcaaaaatagtaacctatttgagattcatcatcaacatgtggttcagctctgtttgctttacgtacttgttttttatattacaagaaactaaaatttcggaatggaatttttatgtctggtatagaaatctgaaatgggtctatcaaagttcgaacacatcatccatgtttcttgattttcccataggtggtggatttggtgaatagatttgactcagagctatagaaactaatctatttatcaaaatgccgtgtttagatacgcactattggaatttcactggtctcataggcgcatttctgaatctctccatagcttatttgcttctatgtacatctctttgtatacatctcctgttgagatttctagggtttctaggtttacctcttccaaaatttcacaatggacgtttcggtgtatcaaacactatgaggaaatgcctccatgaagaccttctggtggatcgtgcatcagacagaatctcagccgtagatcgatcgataaaaagcaaaatcctttttggttcgattactagtgacgatgattcgaaccggtttgttgagttaaagctggtgagaaagaacagtggtgatataagcaatgctagagttaaagatgaaacagaggatttgtcaagagacgaaccaaatgtgattaacaataaggaacttggtagatttgatcttatgaccg

SEQ ID NO: 36953 - DNA, 1166 bp, Arabidopsis thaliana landsberg
ttttctctttttttccgtttacctcttctagtcgcacttgatgtttctgtagatcctccttacaaacagatttgatcccaggtagccacgagctcctgcaaaattttcacataacaaaggtttagtcaaatcaataacaccactcgctagtttgaagagagtgaagagagtgagctcaccgcaaaggattccaaggccaagacagaacatcatggtgtatccaaagtagaagcttgtctggaagaatccggacatcttggtctttacgtagtagtaatagatggagtataagtacacatagacagccgtcgaagcagcagagaaaaatgaagtccactgccagtgatagttctctgcattcagcaggaaatatgtacccacgattgtcacacacaccgtcactatgacgagaatcacaaaaaccagtaacatgaatccatacacatagtagacctgtcgaacaaacaaaaacagacaactttcaaaaatagccactacaatttactttcgtcgttatatgattagcaaagacaaagttagtcctacttaaagaagtacagctgctcaaactttagctagaagtctactacaactagcgtaggtcttaatgtagctgttgtgattggttaatatgcattcagtgagggctggattacaaacgctggttaggcagattgctgaaggggggtagatttttaggggtttcgttgaaagttgagagtctctcactaatcaaatctctccgggttggccaattggaataagaatttgcaattccataactttgttcttattaagagaaactatatttaccttgtaattccagaaggatgtgaagacaaagtacatctcaatgaagatgcttccaaagggtagcaaaccccccatcagggagacgactgatggagtcaagtaccattttttctcagggattggacgtggaatagtcttcacacggcatggattgttaggagcaccactccaatttcttccaacaaccgttccgaggagggctaaggggaaggaaatgaacccccaaattacaaacacaaccaccattgtcccaaaaggaatagccgcaagagatccatagaatatggcaattgtgtttaggagaaagccaattccgaagcacaaaaaggggaagagagaagccgtgaggacca

SEQ ID NO: 36954 - DNA, 1844 bp, Arabidopsis thaliana landsberg
attatcaggatcgcaaatcaagtagtctctgtctagtttaagtaccattagcagtaacggcagcaggaacttcttcctcttcttcctcttcttcctctgaatatatcaatacaacacataaacgaatcatcagcaaccaagccaatattacagttacaaacagaataattgaattgaaacagattttatcttgcaaactcaccagaatagccttgtggctcaatgttgggagttttgtatccaacaaagtaaacacttccttttccccaagtgtgagaaagctcaaactccttgtcgaataccaaatcacagaaaagctgagggatgttctcagtcgatagagttcccagaaccaagttctggttcccaacctttacatgtaaaggaacaaactctcccttcttgtttttacattctccaagcgatgcctacacagataaacaatccaagattgtttacactagacctctaacaactctcagattcaaaatcaataatatttgatactaaacctgagaaacgtggataagcatgccttcttcaggagtcactgtaactggctttcctgatttaacttcaattcctgattacatcatttaaacaacaaatcaatatgagtatcaagaaacagcttcaagttataccctaccacactatttcttatataagataaccatttctaagtgagaatattgcaacttaaaaccctagatgaagctatacaactacaaaacacaaggaagcagccacaagagagttcgaaaacagatttttaagaaaaaccaaaaagctttagaaaaacatcgattaaatgactgaaatagagaagattcttaccccagaactccatagctaagaatcaaggttgagaaaaagagaggatttttagggtttaagagcagctgaaaatgaaagagaagaagcaagggttttgagagattatttataagacagaaggtttttacgacgccgttttagggtttttaatacgacgacgttagggtctttagggtttttgttcagtatcaatacgacgtcgtttaagatatgcaattttgttaacaacataaaatgctccgatcaaaattcaaatggcgtggatactggagaaatcctcatccgtcgaagctcagggtaacgccgtccgagctctcaaggcttcccgtgcagctaaaccagatatcgatgctgccattgagcaactcaacaaattgaagctcgagaaatctaccgtcgagaaggagcttcagtctattatcagtagctccggtaatggttcgcttaaccgtgaggcttttcgaaaagctgttgtcaatactctcgagcggcgtttgttctatatcccttcgtttaagatctacagtggcgtcgctggactttttgattatggtcctcctggctgtgctattaaatccaatgttctcagcttttggcgtcaagtaaggaacaacactattcacatttctctgtatttaaattcgacaagattttggttgtataaaccgagttagatttgttactaaacgtgattgaatggagtagaaattgagtcaaatgtgacaagattcatagagtagagttacgtttggaattatacagattgatgtgggtcaaatttgacatgattcatagagtagaaattgtgttaggcttgttcttatacgggagtgatttgcttcgtttgcagcatttcattcttgaggagaacatgctagaagttgattgtccatgtgtgacaccagaggttgttctcaaggcatctgggcatgtagataagttcactgatcttatggttaaggatgagaaaactggaacatgttaccgtgctgaccacttgctcaagg

SEQ ID NO: 36955 - DNA, 3925 bp, Arabidopsis thaliana landsberg
  unsure (1)..(3925): unsure at all n locations
ttgatgatggttttggcttcgcatcatcaattctatgactactcacaatgtggccacatgatccatcttcaagttcttgaaccactgaaggatgcccgacaatagcttcaccattcagtttactcctaagggaaatcagcggaacattacggggtttatagttagcttttacctcgatcttcacgtcatacagttcagaatttcttcccatagcttgagtgccaacgctgaaaagactgcgtggcttttgatcagagacagaccaatgaggtaaagcattgttgttggcttcttcggcgtacgcatttcttctttctacttgttttttactcatctgccttgaattccttttcccttttagctgccatttagaagtgctcttcttaatcccattgaaaagtgtagctgctggacttgtactaggagatccattacttccttcgcttttcaccacatcatcatggctactctgaccaaaccgtctcgtcggtccagaaacaagagccttcctgggtgaagaagatgtgaaaggcaccgtcgaaatacctggaacaagaatgggcgtcagtttaagtcatgctaatcacaaacagaaaaaagaagccaccaaatccgatctaattgatcaaatgtttaatcctaacaggcagagaaagaaatgatagaagataaccatcttacgccaagaccaacaaaacagaaacaattaaccatagacaagtcaaaattagggatgcatctcaaatatacactagtcactaagttgaacacagaattataaaagaaaaaaaaaggcatccattgcccaaacaaatagtcactactattctgtcccgggtaaattttccagacattagccctttaatctatatgtaacaaatccaattgatgatttttccgtgcttttatgtttccgctcatcctaaaaatggtgacatccatctctttccactaaaagtaacagaagtgtgaacaaacatagacacactgcaaatgtacctcagataatccattgaacaaagatagaaacacttcaaaacagatcattcaatcagcagagcttgtataaaaaaggattagccatacctgaagggtatttttcatctccatttagtggaacatcaaataatccattggatgagtcatcctttgccaaaactgatatgttcgagacttcactctctttccccttgtcattgatcacttcaacaatattttcagaaacattctcagagaaaacctcattgctgtccgagttattatcgctttcagaaacccctggaagagacaaacaatcagaattgacaagtttgtcacaggtaccagggatagacaccgtagctgtactctctaacacttttgtcagtgtccgtcgtcggtttttccttttagagtagtcattcgcaatgacgacaggcgacctttttcttttcattgacggagagcaatccctgctactgccattggaaagactcccatttgacacagaatcattgatgttgtttgtatcacttttaaaaccatgttcctgcgtatcctcgagcagagcaccgacctgtactttccctttcgatccagtacccattccaatatcctcaagtcctctcattcgtttgtttgtttgagtcccatcatcttccgagtcatttggtgttcttcttctcttttctgacaaaggctgcaccttagaagctttgccgttcttggtttttttcaaagacatagtagattgcaatgcaacttcagtctctgccacatcacccgagtcctcaataccnnnnnnnnnnnnnnnnnnnnnnnnnnnagccttctcaatacacggagggtgatctttggcaaggtgtgcattctcaatctcaagagcatgagcaatagcatattctctacgggcatacttgacagccttcttaccaggagtcgatgcagtagcctttgccgtcgcaatacaagcatcatactccccacaacgaaacgccttcactctcttggacttttcaagattataccaatccctggagagacaaatgtgtaactagttaataagttgttagagagatcaaaaagagtaacagaaaccttgtctaatcattcataaagcaaagatcatattgacaatgattaaaaaagctaagcatcaaaacaagatgcaaaaagagatttaatcgatcagtcaaattgatggaagaaagtactcacacgctagcatcgtcacgacctagaagcttaataggagtaccagatttaggagaaacaatagtaccgtcaggaacctcgtgatgagccataatccgacccggccaccaagccccgttacgacgtcggacccaaaccaaacctcctaccgacgcatcaatcgccttacagtttcgctcatcactactacccatcacccaccaccaacgcaccaaaaacccctatcgaagcaccacaaaacccagaaaacaccctaattgaatctacaaattccagcagaggttcatctccatgaaagtcaatctctttcttcacagaggaaaacgttgaaaccccaacaagaaaaatagaagcccacgagttgtagactcttatgagactgattgcaaaaagggtttattgaagatcaacgagagatccagttagtcttgagaatatacagtacgtcgctttcttctctaggtttgagatttttgttttctatcaatcagtagcagagaggccgttgttttttattccaagggttttgggcttcctccggcttcaagaaggaacgcagagagagaagacgacggaacacggaggagaaagacacagaaaaacagggaagagagaaaaaacagagacttttttttcttctttcttttgatttcagagtttttgtaccaaactaagaaaacaaaacgactgcgttttagattttcctttaggttacttttttttttcaccttctacaagactacaacagtgatttcgatttatgcaaccgtggcggtggcgctgtcagaaaatggtagtacgtacaatcatccttaatggtttaggtcaccaccaatcagacccattaagctttctctgttaagcttcacatggaagaccaaaatgccatgatgacttatcaaagttaaattaaagcagagccagaagaatctacattgatcttgatacccatgtatgtacatattcgtttatcgagcgctccaactaaaccaactgcaacaagaataaaatctaccaaaggtcctcctaagtacaactcacacaaaattgggcctatgaatcatttctaatttcacaagaaagaaagaaaaacagagctaatgtttcaacaagatgactccaccaaaggagagttttggttccagtttccatcaatcttttccatgagatgatgcgtagtctctcattctttgtttcaggtgctgcaagaggttatcataattcattagtatccatccatgaagatgcacggtacatctaaagtaagaatgcatgtgggagatgaacaaccaacactacggtttataggggagttttgtaactcaccttcaattcttcgtggagaacaacaaatactttcttcaaacgtttgtgtctctgcagattgagtgagagataacatatataagaaagccatcatcaagtatcatagtgtacaatcaaacaggggaaaaaatgcttaagtatgagtcaacagcaagtatcgtaaaaaaaactcacataatcggatccgtaaataaaatgcacataagctgagagattccctttcaatataatatagtcacttcttctcatgaagatcaatctaggtaacaatttctcacccaaatccaatttaacctattaccttaataggataatattcagctcctcatgtctttcaaattttctcaaatcatacacaagcaaacaaagtttatcattccaacatttttatacgacgctaaaagtg

SEQ ID NO: 36956 - DNA, 1672 bp, Arabidopsis thaliana landsberg
ttgtttattacggcactgagcaacgaatacgaagaagaaactaagttaatatcaataccagacaaaaccagcctttttcacatttagtaatgggatttaaaacttactgtaagtcgatgtatcaatctgctcaggaagctcctttatatcgacctcaaacctctcttgaacctgtccaacatttatacttgccactttactaaatacccaactcaatatcatggggactttttccatggaatttattaaaagatcaaacaccatacctgattaaggacctctgaatctgaagcagatgcaacaaatgtgattgcaagacccttggttccaaatctaccagctctcccaacctatcccatacacacagcaaaacggtaaagttacaagagccctttcagtgagatcaacaatcaaataataaatctcaggattatatacttaccctatgaagataggtatcagcagaatctggcatgtcatagttgataacaatgttgacacgctctatgtcaatccctcttcctaccaagtcagtcgccacaaggatccttttgtgcccttccttgaaacttttgtatcgagtcaacctacataacatatcgtattagcctttaagaattggactcctctccatgagggctttaagagcaggtagggtccttcaaaaacattgaatttttaagagaatgtacagacctctcttcttgagacattccagagtggatgcatattgaggggaaattgcattccaccagtaacttgttcagctcagcagccctgctcacgctcttcacaaaaatgacaacttgattgaagtccaacgcatcaagaaggtcattcaacttccggtttttctccatctcgctcagtttgatgtagtgctgttacagtatgacagtaaaaggtcttttaagtatcaaacaacaaactatatttccattgaataagaagacctaacaccagataagagtacctggacaagcccatgaagagtcaacttggcttcatcatcgacatatatttccattggctgaaaggaatagatatcaggtaataattagcaagcttttctcaggaaatgatttacactacaaaagtgaagatggatgtaaaacccctcatctcagatcctcgtccaccaggttctcttcatagatgtgagttttgctatgatacagcgatattgctcggagcattttttcccatacaatcacaatgaaaccttgggacaacacagtaccccacccaaaacccacccagcactgctagaattgcaaagaaattgaaactgaataaaaggtaatgacgaaagaagatcctgttgtgcaatggtcactcattcataccaatgctacagaggctcacactcacagttctcgatccctacaaactacccaaagcattagtggattgagacccatcgagagatcagttgcagcttttccagggcagaaccgcagaagatgcccaaataatgctataatcacccatagaaaccataccaaagctacagagtctcacactcacagttctcgttccctacaaactacccaaccattattggattgagacccattgagagatcagttgccgcttttccagggcagaaccgcagaagacgctcaactaatgctatgatcactcattagagggctaaaaatagttgaaaact

SEQ ID NO: 36957 - DNA, 1472 bp, Arabidopsis thaliana landsberg
aacacaaatctattccatttttgtttttgttaaaatattgaacattttaacggaaatgaagacactttttttcttcctaactattgcagttttggtttcatcatgtaagttcattcttgatcatatttatattttaatttaaaaagttttcaaaaaactatttctaggtacatcaaatattatgacaaaatctatttcagaaggaaaaactcagttttccagtcctgcattaagctctattattgatccagcagacgaacatattggacattctcccgatgacatgaaaattatcttttgccaacaatgtgcatttcattgtaatgagaaaaagaagaatatagctcattgtgaaaattctatttgtcgttgtacattggaaaacattttgtaagacattccctttttaaaaataaattatttataaaattaaattcttgtaatatacaaaatttatttgctgagtttatgttttcattttgcaacttattttaatccaattgttatgtatacgtacatttgcatgaaatgtttatgttaggttattgaatctaaataaataaattcgctaaactaaaacttataatgatattcaatatctaaaaatagacataatagagaaagtgagaatgtataaaggcaaaaccagttagggttattttcgaaatctaaagttcttccttggtttccatgtaataaaaccaagatgctagaatatgctattgaatggatttataataggaatcgttgtaaagtttttggtccaaatcactagaacttccgattttaaagatgtctctgacggtaatttttttaaaaaatctctttgattattggatgaaaatttgaattttcatggaacatcaaaggatgatactttttgttcagagaaaaaacgaaaaaagaagaaaaataagcgattcaaaagacaacttgtaattttaagtatttgattcagattcggactattcgtatacgatctctaaatatttggatagagaacatgtttattttatatgtcaacgaaaaacaagagattattagtttccaaaatatgatttagttcagtttttagggaggaggctagggcgggtttgttgcactatgaattggaagtgaaaatgatatctctgttgttaagcgaattctacacagagataaatttgtaaacaaatcaaaagacgaatcaaagagagtcagtatcgggccaagcctaatttaagaaaatagtcccaaaaagcccatttactctaagagaatgtcaagaaataagtatacgaatgacacgtgtccttcttctttctcgtcgtctataaataccaatttaccattctcctgcaaagtttctcttttcttcgtggggtttagagagagaaacaaaatagagagagagagtttcttcttcccacatcaagagccaacccatcaaaaattaacccgtaaaatttcatttcttttcgaaaataaaacct

SEQ ID NO: 36958 - DNA, 3534 bp, Arabidopsis thaliana landsberg
gtaactatttgaatcgttttaaccaattcctaatttgccatagtatgtcggttttttaactgtaatttaaaaaaaaaatgatttcaaaaaaatattgaatagtcggattaatattataaattaacaaaataaatagaaatgatggtggaggcgtggaacaataaatagttaacgagatttgatgaccgatgacttgtcggagaagaagcaaactctctgctgacgtatgctttgtgtcagcttattttcgaagcttctttcttacgcgttattccttatttttaattgttttttcatttactttcctaaatttactgtttctcaatctattcaatttattagcttaaatttccactaattttgtctctttctgttggttttatctttccctcagagcacattttccatcttatactctctatctacatgaaagtatgtgctcacgctgtttccataaaggaatattaattttctacagtataaaatccgttaaaagtttcacactaatgagtactactaacttctctcacattggtaaatgcgctaaaataaaaaaggagttaataactgcgtgtttatcactagtgagtttgtaatagttattgtggtgattaatctaattatagttggtccttgatttaatcttaattaagaaaagagaaattaagtattgcaagtgtaaatatgaaaagaatcggcgacaagacgttcaagtcaaaatagaattaggcgatataattttacgtcaggagaggatatcacaaaaaaaaaaaaaaaaatcccgtaaaaaaagaaacaattgtattggaaaagacaagttgtcgttaaaagttaaaaatcaaacaaagccgcgaggagtttaaaattgaaaacgcaaaataaaacaaaaaagagtactgtaataaacagatgcgtcagacccacaccttttggtttcgtacgtgtcttcccttacgcgcctctcctcgtatcccttggtctcttaccgttttaaccggttatttctttgtactaacacgcgtaaaaacaagagtattgctcaaagatcatttgagttgaaaattctgttagagtaatttgaattaatacgaaaattacttaagaaacaaaatttatctacactttttccgattacttttttgtttttattcaaatatgtttttagcaataatatagatagaggtaataagttttattgatcagccccgttgtaactatgtccatacatttcgtatggtaaacaaaatcggtggaagagaacgtatttaaaagactaaaatgaacatttttcttcataaaaatatgcttaatatttaatcggcttacatgttaaaacgttatgatttgtaatatttaaatattcacaaaatgagactgtttattagtctcctcaactatactttagtttggcgtgatgtctacgaattgtaatctagttaatagtaaaattttcttaatttttttttgcatatatggttgtgagttaaatgcccatatgatatctatcaaaagtgtcttttctaatttcgccccctttacaattatgaatatacaaaacgtatatattttttgtgattatgatgaaagaataaaaatattcgaaagctcataaacggtaacccatcgatatatagcttataccacacactaatcattggaaatagttaattttgctcacgtgaatagtaaaatgaaatgtaacaaaaaaaaacaagaaatgtaacgaacccgaattatatttggacaagaaaaagtcaagttagtattcaagaattagagaccaaattgtaacaaatgccgtttggagacacgacacaatgtgggaataaagaagaaaaaaaactgcaatgaagggacaaaaattaaatgctcggcagaggacggcaccgtcttgatccattcacaaccgtacgccacacacccctcaccggcgtttaccggtgaccagtgttttctttctttctattatattttaattccatttttattttatattcttttgcccgcgtaaatgagacgaaataataaataattattataaaaaaaaacaaatgggaaacctcctaaatccaagctgttttccagaagaacccaaaactccacaaaagttatattcacacctctctcttatctcaaaaaatcttataaaccattacaaaataaaaaacatataatcacccagaaagcttaagaaaagttttcctttttttccctcacgaaatctcagagaagatgatatatatctataaaagtatcatctcatagattccatccttttctctattacatggagaagaaaaaagaagaggatcatcatcatcatcatcaacaacaacaacaaaaggagatcaagaacacagagacaaagatcgagcaagaacaagaacaagaacaaaaacaagaaatctctcaagcatcatcatcatcaaacatggcgaatctagttacgtcatcagatcatcatcagttggagctagctggaaatctctcaagcatcttcgatacttcatctttaccttttccttattcttatttcgaagatcactcttctaataatcctaattctttcctagacttgctccgacaagatcaccagtttgcttcttcctctaattcctcttctttttcatttgatgcctttcctctccccaataacaacaacaacacctcttttcttacggatttgcccttacctcaagctgagtcatcagaagtcgtgaacacaacaccgacttctccaaactcaacctcagtctcatcttcctccaacgaagctgcaaatgataacaacagtggtaaagaagttactgttaaagatcaagaagaaggagatcaacaacaagagcaaaagggtactaagccacagtaagtttattcattaaccctccattctgatactgattttgtgttggatttttattaattattgtgagtttttctttctttcttttctttttgaaggttgaaggcaaagaagaagagtcaaaagaaaactagagaagctaggtttgcgtttctgacgaagagcgatattgataatcttgacgacggttataggtggagaaaatacggccaaaaagctgtcaaaaacagtccttatcccaggtataaatacatataactctgtatatacatatatattgcagccctagctagatccatttagaccatcagaccatgctcactatatatgcatgtgtttacatatactttatatgtaaagatatttatatgcatatctactttatatgcacatgtaagtatatttcgctagatcgggtttatccaatttatggatcatccacatttttctacatattgtacatatgcatgttcattcagatattgatatacataacacaccatatctgtagtcatatataatttttttttatatttaggtgtgtgtagagtagccctacattcagtgttctctatatatgcagagtctaatatgcatataacatgaccctattcaatcatatatatgtacactatatgttaatatggacgactgtatatacctaagacgcg

SEQ ID NO: 36959 - DNA, 1158 bp, Arabidopsis thaliana landsberg
aaatcaccattgaatcctccccctttcctcccttcttcttccctccaccaaaatccaattggagacatgcaccaacgcgacgtagatccgagcgggaaaggaatggcaccttggagagaagggcttgaggagggggcggctagggtttgatgggggaggtgggggtggcggctgcaaatgggtggaggagtgagaggggcgtcctccaaacctagagagaggggggcggctgcacaagagaaaagggagggggtggctgaaaaaaatcccaagggattaagggaggggcgactagggttaggggaactagtgggccggatcaagaaccacggcccaactcgttcacacgtcaacccccgacccccccccccgtagacgcttgagtctaaccaaaattctactattttactggtgaatgcttccccaaaaattcccaaccccaaaagcgtaccacccgaaagaaagaagaaaaaaaagaaacaaggaaagaataacctccaacttctcttctttgcaaaccgggtatcacactctaccccccttaaaaagaattcgacctcaagttctgacgcttctatcggaacgacaaaaggaaagattaaagaatcaacaacacttacccacaacgaaaagttccggatacttctgccgcatcaggtcctcaagttcccacgtagcctcacgctcagactgattagtccataagaccttgacatacttaattgatctcttcctcaaaacacgctctgagaattccaatatacgcaccagacgacactctagagtcaaatcctgctgcacaacaattgattccatttcgatctgatgatccaggtcccgcaagaacttcctcaacatagagacatgaaaaacccggtgtacccctgccatggaatccggcagcagcaagcgataagccaggctgccactcgggccaagatagtgaacggtccaatgtatcttgggctgagcttaccagagaaactgaaccggacaactcccttagtgggtgataccctgagaaggacttggtcacccacagcaaattccagatcccgcctcctcacatcagcataactcttctgacgactctgagctgccaaaatattctgacgaatttcccgaaccttttcagaagtttgctgaacccaatcaaga

SEQ ID NO: 36960 - DNA, 2000 bp, Arabidopsis thaliana landsberg
agtataattgaaatacggcgcagcatcacgtatcctctcaccttgatcatgtcaccctaacaaactttataaacacacaaccgtacgtttatatatacgtttataaagattacgagatctatagtattatttggaatcgattacttagattttcttaacttaatagggccgggatgtgttggcgaatagtaatcttactgttacttatatctgatgtccttaaaaatttatcaatatgcaaacatagtgtaggagttcaataggtaactaatatgacgctgcacatatctttgtaatacgtctgaacttcttaattgtcacacaaacaaacaaaaaaaagtaggtgtaggtaatgttgtttttaatgtgtaaacgatcagagttttaactttggttttgttggacggtttgtgctttggttcatgatggtagatgcgagacctagggtcctggtaaaggacgaccaatcgaaaattttgtgtttagatgaaatcgtttttaaatcgacaaagttggtttgcctccatgagaaaacgattctctgggcttatgggctaatgaggatgggccaagcgtatgtgatgggcggagagaatgataagctcagacaaagagagtgttgtctaaacattttactgtatgctttctttcagaagtctaaatagtaaataactataacatggagacgagctcgggttgcacgtgcatgctcacggtcacaagcacgggattgttggtgtgttcggaattccaaagttcagcttcaccggtgaccggactcgagttgttgctcagataagtaattttaacaaacctttattttttcttttccgatacaaacctttttcacaaaagaaaaagggttttcaatggaatagggtaaaagctcagattggatcaattaccatcatttcatttctttctgatcattctctccaagtttcggttttgtatttaccaaaaacaagctgcatcttgagtgttgccgtgttggtgtattgaatctgatactttaccattcttctccagaaagtacaacaccgtttctagtactggcgcgctagctataactggtccatttcatcatcttcttcaggcaggagaaactagcacgaaactatgatattcccatgcatgattccaagtaaatgctcaaatgtgaaaaaaaaatatgaaagcgagcttatatcaaaccgttgactttgcctctgaataattggttcttgcaattgttaaaatatggtccattaataacgcaaccggccattgttcccgaatattataacaacttcttctcacgattgactatcctaaattgatgagttaaagagtacctggaaatatccttctttaaagcatatcaggtaacaaacctaataagattccaaaaaaatatattatattttcgcaatactccaccaaaaatgaaggtgaagaggcttccagtgaccaccacatatcggcatggcttcgagtttgaccagaggttttggataatgccaaaaataatgattaatggttatctttgcacaaggactacgaacaaagattgtcttctagtcttctacaattcaaacaagggcagaaaaatcgtttctcatgtgttttattatataaatctccatggtgaatgacccacccattcagcatcaacgccaaggtctagctattgtatgtgcccattctaaacagatttctaaaattatcacgtaaaatcctacaattgtgtgaaatgatgattaattataagcacacaaaaaaatatatattcaaaggacataataattcgattgaataacataagcgaaaaagtaatcatgtatttttttcgtagattatttgtggaagccggaaggctatatatatgactaaaacaaccatattcatctaaaagtgtaaaccctttccatttccaaaaatttaaaagctatacaattagataacatagtttcgggtttctgtaaaatattgaattaatcacttttaccgttctaccgaaa

SEQ ID NO: 36961 - DNA, 1617 bp, Arabidopsis thaliana landsberg
cagttagcaccatcatacagacaaatatggtatctagctagagagtaaaagaaagactctgtatcagcaacattaacttgactctcaagctagtttgtgactatgaagtagaaaatgaaacatacatggaatttgggctgctttctgcggttgtagtggtaagtagtacagtaaggtcccggcccaacgatatttagggccctagggaaaaacattttgggccccttaatatatatactaaaagtttaatatatttgggcttattgacactaaaaatattttttcccactttacgcattaatattaagctatattggcatttgtgaaactgtcactatttcatttggaggcaaattgtcgttacaccaaccatatggttgcttatggtttgtgggttgatgactcttagcttggtgatcacggaacaataaaacacaagtccatacttatgatcactgacattgatactcttcacccatggaagcaatgaatcctccacttgctgcatcaacgtgaataggagtttcccaagccgtctttgcattcttctcagctaagagatcgttcaatagcttcacatactcaaactctccagtaaatgtggatcctagaatcgctgcaacacagatggaattctcatccaccatctctacagctttagctgggtccatcacgtaatagtcttcacttagtttcacctctttgagctctacctcaaagtaccttgcaaacttctcccagcacacctgagcggatgaaacaaagtttgaaaatgtactgatttttgaaagaaacagatcactatccaaagcaaatgtgatggtttggaggataagaataagtaaatctttagacctgaacattgactccagtaacaatgttaggcttatcaataggtagaccctgagcttttctcctatattgccatttcattttgaaagctaaaccagcagactcagatgaagcaacaattccacaaccaataacagcctcgtcttgtccaacaggagcatggaacaagtttgctatcatatttacacaccggttctgaaaaataggccaaataaaagatgtatgaccatttgcaaaaaagtggaaagcagatggggagagaatgagaggaaagaagaagaacctggagctcagtggtgagtcaccactggtgacatcttcgtatttccagccatagcgtcgcacatcacttcacaaacatatccgttaacacctacactaccatcagatttaactaaatatctctgcttcattcaaattgttttctccacttcaggtgcactacagaaggagaacacagattcataagggtattgaatgttcaatataaggcagaaataatcatcaacacaacacaacacacgtctaagcttgtcggtgtcggagataaacaacaaaaagacaaagaatttacctctccaacccgtcgtcggatgttaagcttttgtcccgttccagtcatggcgtctgagatcggctgagaataatttgattggaaatttgcggctgctcgtgcccagattttgcctctcttcaccgtcagaattggctttgtcgccgccggaatcagtaatggttgtagaatttgattcgaaatggtgtaat

SEQ ID NO: 36962 - DNA, 2240 bp, Arabidopsis thaliana landsberg
attgagttccaacgtaactctgaactggatccagagaaacggatttacccgggtgggtattttgacccgttgggactcgcggctgatccagagaagttggatactttgaagctggctgagataaagcactctcgtctcgctatggtcgcatttctcatctttgctcttcaggcggcctttaccggcaaaggccctgtcagcttccttgccacctttaacaattagttaatgaacctttctatctttattttatcaaaataaaattatacttcaaaaactgtataatgcatgttacgctatacttataaagaagtcttttattgtttcgtgtcgtactatcgttggaaatttggttgtcacatcaatcgttcaaaaccggcctctaaatgttggtctagtggcttacggaaataaatatcgaagtatttattgtttatgttctaaactaatataccgtgaatattcaacatttttataaaaaagattatcatatcgaaattcgatatacttgaccatccaataatggcttgtattgcttttttttgaataatcaaatccttctgtcgtattcttaagaccatactagtattatcttatttttgatgaaagatgagaatctatattggagccaaaaagtgaagttaagatatgatattttcttgattactaaataacacaagggagaaactgttgttagtttgagcttaagtaagaaaatatagggttatgatggtttaattacgcacgattactactaataactaaatattctgtttatctgatctcattatacatgtagatactatttgttgcttttacaacaattgtagcaatgaaagaaaattagaaattgaagaaaatcttgaaatgaatagacaaaggaataaagaaagtgtaagaaagcaataaaataaacatgaatatagaaaatgcaattggcgaagagtacacgttgttccacttttctggagaaaaaagtgaataattgaagaaaagacgttataccttccccatccacattttcttgcttaactgcagaacaacaccaaattcgaccctatcaagttttgattcgtgtctacatagaaagagtctcaattgttctgtccctggacttttttttgtttcgtttttcttgttaagatcgaaaactctgttttggtagatttttgtgttcttgattttgattcaagatggggaggctgtttgtggtgaatcttgaagggaagatctatagctgcaaacactgtaagactcatcttgctacttatgaagacatcatctccaaggttttgtcccttttccaatttcttgacttttctggagattattctaatgggtttgtgattaatctgtttttgttgtttttctgcatgctcctaaaatttgaaatatataatgatagatggttctctagaagatgttgtatgttgataagatgtggttgtatgacttatagaaatacttcaactttcttaacattctttttgttgtgtatttctcttctgcttggaatagggtcatgttatgtagacgagactgttaataaaacccctagatcactttcgaaattttcattttgagttactacattgttgaagtcatggatcagtacttgtattttgcccacttgccattaagcagataatgattacaaccacatagttttgaacattgagctcccctttagctgatcagaccacatagttttgtctttttgattctctctgtggtctaagatggattatctttatgcttcttgagaataacagagagttgagctattgagctttccctgattctgcatggggtgtttcttgagctaagactgtagtgtgttgtgtttttatgtttccttgttcagtcttttcactgcaagcatgggaaagcttatctcttcaataaggtgtaagtgtttcttatttctaaggaatacttgctaaattgggctggcttatctgatgatgattgatctggtttagtgccaatgtttccattggagagactgaagaaagactgatgatgactggtaaacatactgtggctgatattttctgtgtctcgtgtggatcaatcgttggctggaaatacgtaagcaaggcagacatcaaatgttcttaaagaacctatccgtgttcgattcttcccctgcccagttgtatgttctgttttatcaggagaaaactcaaaagaagaaccagaagaacaaagaaggaaaatcagtgcttaggggttgattt

SEQ ID NO: 36963 - DNA, 1036 bp, Arabidopsis thaliana landsberg
ttcactaaatgtgattatattttgttttatcttcatatccgataagttttgggccaaaacctatacatttcttcgtgccaaaacctataaattttttagcatttattttgcctcgcaactagtgttccaactcatacattagcccgactccctcgaaattttagtttaaagtttaaccgaatctaaggaatattttgccaattttatccggagtttaacaaactccggataattgaggtcaactttactatataagattttaggagaagtggagagtaaagagaaataattactcgttcggcgaggctgtgactatcagtggcttggcctcgtcgagctcgaacatgaatgtaatctttgtaaggatcaattgatttagttttgtctccattttcttctgattttttgcatctctttggatcagaatcttccttctcttcaatctcctgataatcaaactaaaattagtatttgtttaaaccaaacaaaaaatgggtttattcgaatgtgaagcttcattatgaacctttgatgatgaaactgcagaaggagaattctgcttggatttagttcttcttttccgggaaaattcaccggacgattcgccggcgggaacatgagacgcaagaggcttaaaaactgggctgcttgatacacgtggcattttctcattggttgtgatgggtggttcgttattaatcggaaacggcgagtttgttctgctgttaaaactccggctaccaaaacacgagaacctcgccgctctctcagcgaatcccgggtcgccggacagttctgccatcggcgtcgtcgttttcgtctccatcatacttccaggcggtggagagctcatcggagttgcgtaacacgagtttccactgctcgccgtaattccatagatatcgccgatgttacccagtttcccgatgagctctctcataatgacattttctccacctactcctccaaccaagaagtttgaatttgacggcgtaggagaagagacgagtgagctcagagccgaatcaaaaatgct

SEQ ID NO: 36964 - DNA, 1270 bp, Arabidopsis thaliana landsberg
gaatcgtaatggccacaggatttggaaggtgatacgattaaatcatacttgtaaaagtagatgacagagctcttctagtttgtgttaaaaatttttatctacttgtcctgtttcatctctcagtgctctgtagtaaaaattgtgtagtagtagttctcattcctggtacttaatctgcctgctaaggcactaaacacagggtaatagaataatccattgtcttagacatgcacttaatggttcattgaccatgaccatcatttgttaggttggctcttggtggctttaatcagcttggttaaagaggcttttgtgcttatctgaaacctgaatggtctatagtgaaagtaaatattggacttggtaggggtttttattgacatgcctctggtctgttctgtacacttctcactggaaaatttgacttgtatggatgatgttgattcacttaaactctttcttatggccgttggtctcccaattatggttgacttttctgccttatctcccatagtgtaattgactcttttgcataaatgtgtcttttatatagaggatactgatctccagagtgttcctgagcggtttgaatcaatggatgagtatgtcagagtttttgaacccttactttttgaggaatgccgggcacaactttacagtacatgggttgaactggctgaggctaatacatatgtgaaagttcgaataaaatccatcgaaagaagagagagaggtaactggccctagatcttgttcacatgtgtaagcatgcatagacactttgtgcattgttaaacagtttattggactttgtttcttctccttgtttctgaaagttttcttgtaaactcacagtttatctaggaaaatgattttgcccttgattcacgatcttataacttaagcagtttaccaggtctcttgattagggtcctcgttttgcttgtcattatgttctctattaggtttgagttgtggagactggtttcttatatctctttggattgacaaccttatttgatacctttttatgtctggccgtctgagaaacacttccaagtttctgttaagttacttgactgctagtctttgtttatgtatttaggatggtatgatgtaatacttaactccttaaatggctgtaaatgggctttcaaggagggagatgttgcagttctttcaactccactgcctgaatcaggtgcgtttggagatcattgatgtctggttgtttctatattgctagcttctgtgcattttgtataatttt

SEQ ID NO: 36965 - DNA, 2756 bp, Arabidopsis thaliana landsberg
tctgaggaaccattgatctcgcctgtgctgaaaacaacaaacaaaaccatttcataactcattagaaggtgaccaaatcatataagaagaaaaattgtaggaatcataaaagtaaacacatacgaggtgcagaagaatctgtaaacggtgcaggatagacgcgattcccatatcccgttgaaggaggcacgataagagcatgacgatcagaatacatatcagcatcctgaaaacacatagactaataagaaaaagaatcatctaagcaacaacattgtcagagagaacaaacaatttggattcctcacttcatcacaataagtcaaaagaggaatctgagagccaggtggagctgaatccaatccaccacgaccggtgttaaggcgtgaagagagtgcggcttcagcggcatgttcagggtccatcccatgatcaaactcatactcaagatcatcaatgtcttcttcttcttcatcatctccatcaacccgtggactacctttaatccttttgtatcgagttttgcactgaggacaagcttgatttccttctctacgttcatactcatagcatggtctacaaaccgggaatgcgcattcgttgcaagcaacaaagagctcactgctaaccgttaattcgatttcatctccacagatttgacatgtttgcccactcagttcttgtactgatcgtatctacatagagaaatgagaacacatgagtctttttagtattttcatcaaattgcatcttaatcaaatcctaaagatgataaagactcaagaaaacattcatcgattatgaattacataattgtgaaactgaatttcataaagttgtcatttttacataattgagacagttattagtatctgaatccaggtgaaatgcaataaagaccagctcaaataaaccaagaacagaattagtaatataaaaaaatggactttctttgaacttattgctactgctacaacattgaattcggttctcaggacatctctgccgacacgtatgaatcatgcaacactacttgaagaaaagaaaaaagaaaaaacagaacatgtgggttgcggcattactccctagaaatttccaatttcagatcaaaatattccatctagattctcataatctagatcccaaagaaagagaaaaaattaaacttttttcgtcacaaattcatacaaaagttattcttactctggcactctcatcggcgttaatgagaacgaattcattcctgttgtgagagccagcaatgagccgaccaccagtattcatgatgtcttctacaccgaatcaaaacgaattgtctctcttactcaaagaccttgacccgacccggctaggataatggatccagactgttgagctcccattacatacagattcagagcatgcactaggaagagtggaagacgaaggagacgaaataaaccgaatcgacaataaatgttggctccgggataattattaaataaaaccaaaaaaaaaaaaaagagatcccgaaggagaaaaaaaacgaattttcccggagacagctattgattccacaacaagcaaataaagaaagaaagaaaaaaaaactgttttggatttaagtgagtgattcactgattcaaagagaattttacagactgacaaaagcaatgtggaagggtttgtgatagattagattgggataaataggaatgagagagacgagattcagacaccacccctgagatagagttgtgttaaaatgtggacagcaaattgagactgaaaacaattgtatgtatatacaaagagagaaacgtcacgaaataagtgggtcccggagaaaacgacgcgatggctatggtggtggtggagctggactctgtcccaccttcaagaggagttggtgaacaatggaaaaagaaatacaaaaataaaaaagacactgcgtgaacgaaactgagatatttatacaagttcttgagaaatttttgagaggtgtttctgggaaaatggggtagtgaaagctacactgtttatcgatacggatccgggtcctcgtgatcgggtccagattaatgtcgttgttttttaccacgctgtaatttcaagaaagcccctgaagattgattgtcttctattaaaacccatatcttattattcttatcgaccaatccatatatcaaagaagttgtgtttaggaaaataaaatattgtttagtatgcgcaactttattatgattggatgatcagatttattttgttaattattggatcatttattatatacatccaaattattatgtaacacgtgaatattataaatgatgggaaaaaaaagaaaaccaaagtttagaagttttttttttttttttctgtgtaagcttctaagtaggtacacatagcataagaataatttggttgtattaactaaacaatgttattcaaatccgtgaccgttggatcagtatcttttccaaaccaactttgaataaacaatttgtttctttgtacaaggtagaaaatattgtcggtggcgtaacctttttctttcattttggagacatttcacaaatagtttaaaacgtggaaaaagtttacaaattatgttttttttggttggctaaattaaaattattctggcgaattcgtaacacataaatcattctgctttgaacaaacaacatttgaaagatcacatagtttttcccccatctaattgatctaaatgcattaaaataaactaggctacttcgattaaattatgaatatgc

SEQ ID NO: 36966 - DNA, 1206 bp, Arabidopsis thaliana landsberg
tatctctgttaaaagtctctgactttttttacttttcttgtggatctggttcttaccactgcaaatcaattaagattgaggggtgtttagtactagtattaagattacgtacccttgtagctaattttatcaagaattgattgtgtcggtgggatggatttttccggatttgacttgtcttaattctccaatttaagagatttcttcaattgcaattatgaatctatcaatgtgaagagtaataattatgttattgggttactttgatctggtgtgagatccagtctgatagtgtcactactatgatctgatgtatttaactctactgttttgtgcagataagatcagtccaagagctgagtggacagacatgttttatctgcagagatgagatcgaattgagtgtcgagggagaaccgtttgtggcgtgtaacgaatgtgcattccctgtgtgtagaccttgctatgagtacgaaagacgagaaggcaatcaagcttgtccacagtgcaaaacccgttcaaacgtcttaaaggtttcttgttccttagaccaaatttctttggttttacagttttgtgaatgtagaagattttctgatttgttctgcctattgtttaggaagtccaagggttgaaggtgatgaagaggaagatgacattgatgatttagacaatgagtttgagtatgggaacactgggattggatttgatcaggtttctgaaggtatgtcaatctctcgtcgcaactccggcttaccacaatctgatttggattcagctccacctggctctcaaattccattgctgacttatggtgacgaggtaaacatctcataatttatccacattgtatataactcatcttcagtaattggctctctcagatttctcttttgttttataacaggacgttgagatttcttctgatagacatgctcttattgttcctccttcacttggtggtcatggcaatagagttcatcctgtttctctttctgacccgaccgtggctgcacatccaaggcctatggtacctcagaaagatcttgcggtttatggttatggaagtgttgcttggaaagatcggatggaagaatggaagagaaagcagaatgagaaacttcaggttgttaggcatgaaggagatcctgattttgaagatggcgatgatgctgatttcccaatgtaagacaaaaatacaatttt

SEQ ID NO: 36967 - DNA, 2236 bp, Arabidopsis thaliana landsberg
agtggttaaacttaccagatccatgcttactaaccaacagaaaccaatcattcatgacagcagaacttagtttagacctttattatgtgaaacctcgaaagctaatattgaaatcccaacttatctcattgtgaaaacttgctagctaaagacatgtctaagcaatattactaactaatgcagactttctctgaagtactagcaaaaaaaaagagaagcagcgttctgatcaaaaacattagcattgtaacaaacactatgctcatcttatcagtagctacctagattcttgacaaaaagtttccctgagaagaggacacaatggttaaacttatcagctcaatgcttagtaacctacagaacgaattcattcttggcagcataagttagtttagacctttactaactaactaatcacctagatatctacagacatatctaagcaatactaataatcttgcaaactttctctgaagtactaacaataaaaaagagtagcaaaatctgatcatatatctaacattgtagcaaagacatctgctcatcttatcagcagctaggtagattctagtaagaaacaaccacaaaaaccacaacttgataagaagcaaacataccgtggatcggttccagacaaagataagcaaacccaaccagttggtttaacaagctccacacttttaatctcctaaaacaatcaaaagagaaggagacacaacatgatatatcaatccttcacaagctaagagaatcctctcttcttcttcagaggaaaaagatattacctttaagttatgaaaaccatcaccagctcgaatagagattttacttggtgtatagctctcatcaagcttaaagtcaacgtacaaaaccactaactttcaaaatcaaaacaagccaaaattcattaaccacaaaaaaagaaagatgaaaactttctcatgaaaatagaatcatacctgcagtttcactttcttctggaattgaatgttaatcaaatgtggttgtaacccatctgatctacaatttcagaaacaaaaaaaagtcgaatcctttaattgaatagagacgaagaatgagggaaagataagagctttagtttttttttcgttttctcaactgccaataagtctcgagattgtcgtcgcggagagtggtgacgccattgccgggcttacaagagctaacgctccaagctgcgtttttacccatctctcttagatcgtcgtctatgattagcttatagtttcctccactaatctttccttcttcttccgattccgatgactctgtcgccatatctcttctccgagatgtcagattcgagaattgagattccaacaatttgtttctttaagcctaaacctctccgacgaggttttgaaaaattcgtctttttggttcataaacaaacgtcgtgtcgttagtgaacgcttggaacggcctgatatttgttttgttaaaacagaaacggcaattacttcactttctgaataaaagtgacaaacacttggaattagaatagtttcacctacacaagtcattaacgattcaattccatgaaagccatgataagattgtgatgttcaacatcactataaatataactaagattttttggaaggttcatacaatcaaattaacgagtgacataacgagttaacgactacactaacacaaatacatatatcataattgaattcggatagtgacataacgactacattaacacacatcactaaataatatgttataatctcaaaaaaaatttagttcttatatttccagataaaaaggaaaaatcaatctacgggttccgacataaatctagactaaatacgactttttttttataaaccgtaagagctttatcgtgactaactattgaaattgagcaatacttggataagtcttttaactactaaacaaccatgagttttacaaccatgagtcttctaaaactttaaacatataatttatttgaaaatctctttaactctcttgttaatatataaaagacataaatataatgtatcatgtaagtgtttaagaaatttaagattacatatacaattatacactatagagttaataattataggataatggcacgaaaagtttgtaccgaaccgcatcatatcacatatataaacaatattttctatgaatgaatcttttgaactctaattaataagagtagacaaaaaaaaagagattaaaaattataattaagtga

SEQ ID NO: 36968 - DNA, 1297 bp, Arabidopsis thaliana landsberg
  unsure (1)..(1297): unsure at all n locations
ttttaatcaaaaaaaaatgatcaaagtctcgcgtttaaaatatattagaaatttttcaactagaacagcagaacattagaagtgtagcatttgatgaaatgtttttggaaaaattcaatttaaaagttactcacataaagctcataatttactgtcaaacaaaaaataacaccaattgaaatagtataaaatacatttagtggaaatcaatcttaatttattgtgatgcggtacaaactcttaattaatttgatcatgatcagcttataactagtactgtaagaaaagttctatttattcctaattgttttaaatgttatttattttcttatttgaattgtggataagtttaacgaaattagtttctgaaattattgatataagttataaccctggagactggagtggacttatggtggtaatgtaaccgtacccatccggtacaattaatattaaaaaagaagataaatgacaatacctcataattttgggaagcacaaaagaaaacttaatacaaacaagcacattatctagtacgcttcaccttagatgaacatacttcaagatttaatttcacctcaatgttaacaagatggtagccttagagttacaccaataacgcttatgcaatgccctcagctgatattacaagtttgaatacctcaccaaaaggttataaaactactcatcattttagtgatgtctagggtccggcccaccagggctgagccgctttgaatcaagggtgcctagaaccatttggccgtctttcgatcttaccttcagctcttctgatcttttgagaagttccctcataatctttcttatgttacctgaatctgaagggcnnnnnnnnnnnnnnnnnnnnnnnnnnnnnnnnnnnnnnnnctcgagtagaagcaatataaggcaaacccataacttgaaacttgccatattcagttaattgttattaatattgcctactaatccctcttcaaggtagtctttggaggttcagatttaaatgtgatatcttacatgcttccaagtataggtttatatagttaagccaatgcttaatgaatgttgacctgtctaactaatctaaatgtgtatttttaaaaacttaagtaaactatattagcggcagtggttatcaagatttgtgatcaaattaaagtttgttttttaagtttgagttgcatactcatgtgtgcactaagttgaaaattagccagatatcttttttgcctacacggcgatccccaagatgccatcactctaaacactacggactctcgataggccggtgcta

SEQ ID NO: 36969 - DNA, 5950 bp, Arabidopsis thaliana landsberg
  unsure (1)..(5950): unsure at all n locations
cgtcagagtctgaggggatctgggtccctatagtggaaaaaaacttctgatataagccggacaaagctatcagcctccgcagagcctacaacccctggaggtttctggttattgatctgcaagcttcagcagcaccaataggcagctacccaattatggttgcagaccctatttcctgggctgtagtttcatgtgggattcactcaccaccatattatagtgctattcactcaaatggagttgggacgccaagaagcatgaatccagatgcaccagagtttgttccgagaagatccttgcagaatagctctcaacatgcaggtgaagatgcaagtgtatccgtcgactccagcagttgcctaaaggctgagaaagatgcagttgatttgaagaagcgagagcttgccagcttcatagtaaagtcatcacagaaagaggttccggctgctcttagcaaagctgagtcaggaggtacctccgaaaaggatagtgcagtaaccgagatagtttatagtagagaagaggagaatggagcgaatgcaaatgagacaaatggaggtgaagggtttgtgattgtggcaaagaaaaggagaaggaagaacaaggtgcgacttacaaatgttgcggctgggctgtaccatcaaccgtcgtcagtttgtgcatgatctgataagtgggtttcatcaggttaacaaaataaagcttctcgtgaagcagagaatattctcatctcatttggttttttggcttttttttattgggataggtagttggttgcttctattcttatgttgcactctaggtgcagcttgaccccgttgtgttgtaaatttttcgtcgctagttgtcttgtttctgagattttggaagttttttctggtctattatagtccagttatctacagcagttttaggtggacaatctgaagctgataccagttttttcaaaaccaattgggaaggccactgcgcctattgattgtgtggtcggttcaaaattataacttgcccaaagcgaagacagcttactggcgcttaatcctacattcctactgcacctcagctatctagaaccactgaaatttgagtggttcagatgttcagcagcatcggaactgtgagatcaagaatctaatataacatatttttcacaattacgttttctataaaaagatcatcatcgaaggctcgaaagcattcccattgagcaaagaaaaaaaaagcagcattcaatttggtccgaaagctaagaatttccgagtttctgaagcaattattgttatagcaagctcctattcatgtgattccataggaagaaaacaaatgaaataacattgcgacaaatatttacatgctcaaaagagagactttagattagattctcggaaaaaaaaaagacacacaaaacaggatgctgaccaaagtttaggacaactagtctcctgaaaatagcttaaaatggtaaaataccaaacaagcagatgacggaaaacacgaaacacaaatacattacatctcccatagctttatatgagccactacgtcccttctccattctatttgctactagtagtcgttactattatcttttgtgtttttttcccttcccttataaaactgcaacaagatcaacaagcacaatcaaacatccactttctattaccctgttactatcccccgtaactaaaatttgaatcacttacctaagattttcaggaacaattgtggccttaaaagtgttctgtaacaaagcttggagaagcaacatacccctgcgccaaggtgtccctaaagtcccttcttaaattctcacaaatgttttcacttgctaaaggtcatctccgagtacctgtatatacagcaatgacaactccaacggctattcggatcaaattgcacaaaacttactctacatgaatcctatatgatattcgaccttaagtctatgaatgtagttatttccaagttaaattcgtagacataatgcatcatgattccctaatcctaaatggtttcattacttccatatcaacccatgatcaatttgattccctaatcctaaatggttccattacttccatatcaaccaatgatcaatttgacagagtaggttcgcgttaacttcaaaagctcacctacgaggctgcttgcttggattgttgctttgccgttctgaaaccccattctctgcaacctctacacagatggaaagtagcttaacttcagatataatgatcccacaatcaaatctcatttcgtgattgtaataggaaagacaaattttgacacagtgcttattgaaacagcattccctaaacatcatctcccatatctcatttccagatgcttatgtactaattatctatcacatccaaccacatagtctttcattatgatttctttcttttaatgcaaattcattccctaataagcgtaatactatacacaaacacctgatgtgtaaccattagaattataacagaaagagcaagttttgcaatacgactaaccaggactttccatgggtttgaccaggtcattaagggtatttgtgctactgtctttgctgcaaaaatagtaactggattaagcaaactaaaaatccatgctttgcaaatataaatatatgccaagcatatgtagtaggtttaaataagagaaaaacacaatgcaaatttgcgtcagttaacattgtttttgcattaaaaacatttaagagaacgaagtcaattaatctctaaacctggagaatcccgcagaggaaggtaaccctgggttgtgtgcttggtgagccgcatatggtggtggactgtatgaagcccctaaagctcctggaccagctaaaactggcatcctgccaatcatataaagagatctcagcagcaagcaggggaaagaataaaatcaggaactagatatagtcatatagatgaagagctcatagcattcaaccaacacagtatccagaatgaaagtaaacattctaatgatacaacaccatcacaggttttgtttttccagtaggtagacccgcacaaaggtgattaaagggacaacatataaaaccacaaataagacggaaattcagcaaccaatacgcacgatatctaattcttaattctttgaaatgcttacaaccaagaacctctgaaaactagcatccacaaagttcatcgagaaggggaaggagctagcttaccatgtcatctccggatttctaacaccatcttcagactggacatatcctggataagccattccaaaagtcggaaccccaccatgctgaccaccaaattgcataactgcatttcaatttgaatttaattagaaagtaatgcaataatctccccaagctggtacaacaggactccgaaaatagtatatatgaacaaccaggcctaggtggctcggcgtcaatagctttcaatttcaccaccatgcatgatttgaaactgaaaattctttcaactcatccattttacaaagaaaagcgtcatccaaaaaacttaccaggcagaaaagtagggaaattagaattgtcagcagatgtcaaactttctggccgccccatcatttgggatccactatacataaaagagctgcttccaccaggccggagagtcccttttcctttagcaatcaatgcagctgtttccgatgaagattctatttcatcaggaggataccgatttcttgataagctagttttctggggagaggaagacaatgatctaacaacagcagagtgctgatcaaaaccctggccggaaggtctttggccagtgccttttgaatctccattgagttgcattggtgatgaaaatctgtcaccttgactatgagattgcgggtaaaacgtgttcccagcagcaggtgcacctctaccttgactagtggactgaagagtcttggcagtccaaactggtgaataaccggattttgtattcctatacttcttcccagaaggcgtgacactttcatttgtgtggagtctttccatactaacttgtataccatgtaccannnnnnnnnnnnnnnnnnnnnnnnaaaatggaggagaagcggaactcaaacttgacacagctacattctttttggcatgggcaccttgattctcagttttagcaggggcagttggtgaacgccgtgaatcgaggtgtggcattttctcacgagagttttgagacccattagaatttcgtaacctacaaattcagtacacaagtacattatattagagaaaacccttcactcaactaggggaatttttttttttaagaactcactgtttgctttgctcagaatgtgcttgattttcattcctcaggggagtgtcggatttcctgggtcctctccctcgtgagacagctttaggaacataaatttgctgtccactagtggttaatgtgttagaactgatcgctctagcgtatccacgcccttgtcccctaccccgaccatgacctctgaatcggcctctagacatcctctgctgtgtatcaaatgcagtttaagaaagaaaggaaaaagataagagacggaaagtgcataaatacaacaaagctaacatatgtcacatgtacatgttatagcaattaagagataagaggaatctaaaattattctaaaaaccatagacagaagctttacatcagaatgtttttccccagtattcatctcttcaaatttgtcatgtccccattttctttcctctccagatccccactgtcttctcccaccacgcattcgcctacgaaagcaagataaagaactatatcaatcgacagatagaaggtagagaggaagagctatattcagaaaaaatcatatttcccaatagtatgaactaagcaatccccaatgcagctactcaaacccctcatgcttgataaaattgcaagataataagaggtcaataactccaccttagagtcaattatctctcctctaaatacaatttcatcctaagttaatacctactttgaaaaatccaacccttgcataataaggttgagttgatacttgatagcttatagtgacagattttgaagcagaattgattgagaaagctgtgaaaaacaaacacagtaaagagagtaaacctgtttccgccagcagacatttcctgaaacctatcatcatgcatataaaaagctccaccagtgggaacagcagcttgtaacttctccttttcattttcttcctctccattcatatcaccagcctccttcaccacaccactcttatcattatcgattcctccaccactttcctcctcctcatcctcataactatcctccccatcttcgtcattatcatacttcacagtaccaacttcttcatcagataggtcagaatcaaccacagccctctgatttttcacatctctaacagcatcatcatcatcactatcgtcatcactcgcttctctcctcctcgtcgccaaggagcggttcagctcctcgggatcactctcatattccgcttcagatgtcgccatgaaattctctctagaaacctgaaaaaaaggagagcggtactcgtaaatccaaaacctagatgaagaagaaattcaattgagaaatcgaaagagtcgctcaagctctccgtactaatcgactatgtagaagaaagctcgcgcatacctataaaccctatctgagctcgagaggcgttcttcagcgattttgggggtttccaatgaaatcgaatggagccagaccttttgttaactgttaattaatcgattttattttgttatttcgcgcattaaatataacgactgtgacctaggttgacccaaataaaggtatttaacgggcccaaaaagaaatttgtaggccttttaatgggccatacactttcagagcccatttaataggttgcgttgttactacgaactcattataaatatgaaccgtagccccaatcagagagattagatacttag

SEQ ID NO: 36970 - DNA, 2438 bp, Arabidopsis thaliana landsberg
cttttaagctatctagtggtaagctataccatttttttcattgtgataaatggaaggagaaagaagagtgattaattcgattgggaagatcgattgtgcaacactcgaggtttgggacggattctgaggttctcgattatgatcacaggcggtgattactatcattatgtatgattttgttggccttagggttttcgtggaatgtaacactctcttgtcttttaagttatgatgttattgtaccgtgatcgtgatgtatctaatgcctcaagtttcaaatattgattctctctttgttatgatttttgattccagtgagttcctgtttatgttttgaatgattttgttgttcctgtataaagtttgatctatttgcttaagtttgatttgattcaacaagtgattgatgttcaaaaagtagaagctgtgtaggggttttctgaaggaggatttggtctctctgtgacgtttctcttctaccaagctgaaactgctgctccaacgagttagatcagtaaggtaaattttccagaacaagaacgacgttcccggattctcattccatttcactggttttagagatgtgagattgatttattgaaatgaagaaagagagagagatgcaggacagtagctttgtttggttgtggattttacctactctatcatctttatctgcctgccattattggtttaggggcacctggacattaggtaggacttaagagcaacgtgtatcacatgtggcaaagttaacaggaggaaggttgctaactccattctttggtatgtagattgatgttctttgtcaacagataacgaggctgtggagaaaagaaccaaaggtgactgttgttagagatgaggaatgcagagctcatcttcatcccaacaccaactgttggtcatcttgttccgtttcttgaatttgctaggcgtctcattgagcaggatgatagaatccgtatcaccttcctcttgatgaagcaacaaggtcagtctcatctggattcctatgttaagacaatttcctcgtctctgccgcttgttagatttattgatgtccctgagttagaggagaaaccaacacttggtacacagtttgtggaagcctatgtgtacgattttattgaaagaaatgcccctcttgcgctaaatataatcatgggtatcctatcttctcctgcatttgatggagttacggtcaagggattcgttgctgattttttctgtctcccgatgattgatgttgcaaaagatgcaagtcttcctttttatgtgttcttgacttcaaattccggattcctagctatgatgcagtatctggcatatggacataagaaagatacctcagtttttgcaagaaactctgaagaaatgttgtcaattcctggatttgtaaaccctgtcccagccaaagtactgccgtcagctctgtttattgaggatggttatgatgctgacgctaaactggctatattgtttacaaaggctaatggaatcctagtgaatacctcctttgatattgagcctacctctctgaatcattttcttggagaagacaattacccttctgtttatgctgttggccccatatttaacccgaaggcccatcctcatccagatcaagacctcgtctgttgtgacgagtcgatgaaatggcttgatgctcaacccgaggcatcagttgtattcctttgttttgggagtatgggtagcttaagaggtcctctagtgaaggaaatagcacatggacttgagctatgtcagtatagattcctctggtcactccgcacagaagaagtgacaaatgatgatcttttgccagagggattcatggaccgtgtcagtggacggggaatgatatcggttggtctcctcaggtggaaatacggcccataaacagtgggaggttttgtttctcattgtggatggaactcaatagtagagagtttatggtttggtgtgccaattgtgacatggccaatgtatgcagagcaacagctcaatgcgtttctgatggtgaaggaactgaagctcgcagtggagctgaaactcgattatagtgtacatagtggtgagattgtaagtgcaaacgagatagagacagcgatttcttgtgtaatgaacaaggataataatgttgtgaggaaacgagtgatggatatctcgcagatgatccagagagctacgaagaatggtggatcttcgtttgccgcaattgagaaattcatacatgacgtgataggaaccaggacttagccttttcttatcggattctccataaactgtaacctgattatgcaacagtcctttgaatctgctttgtttctaatatttttttctattcttttgtcaccagccctgcttttaactttgtctgtgttgataaactttaacaaccaagctgtgagtttctttgttagccaatgctgcat

SEQ ID NO: 36971 - DNA, 2149 bp, Arabidopsis thaliana landsberg
taaacatgcaagtgtccattatctaaatgaagaaaaaggagagttaatgagttacttaccggtgcgggttctctataaactatattctctttttgtgaagaactagctaagtgggctcccattgtgtcaggcacattgttggaccggttagccttcacctcacctacattgctcctagagcttggatggatcactgaattggtatccgtaaagcgcttttctttcttgaacgacggggtagtgagtgagacatttgaatttcctgaagcaatgaactccggtgttatcttggagtctcttaaccctcttctcacagattcatgtccacgccacttcacagcttcagcttttttcctgaaattttcaaaaggaaaaatttgtttaggaatctcgcatgcatcattggcagacgaatatacgctttcttagcatacgccaccttttaacttcttcgtctcgaacctttgcatcgagttccttgcttggcggatacttaagcaaacttgatatgtgacaagggagtggcttcgttgtaaaaaactggagagggaaataagacaatcatttattaatatttttcgagaagcccaattaagaatgttaataaagaaaaacaaggctactacctcactcagtagtgtcgaagaagcggagcatcttttctctggttctacagatagaagcttgtcaagaagatctagagaagaagatgatagattcttgaacgtctctagaaggacacgcttataaggatgttgcggtttgtaacttgtcgcctgtgggaactttgtcgtattccagaactcttcagatggtgaaccacacagtttaaagatcttatgcatttgctccaccttgaagaagatatttcgaataagaaaatcagttgaagtcaatggagctataggctgaagcagtattgattagaaaactcacctctgttcttcccggcatgattggtttacatacaaagagttcagcgagaatgcaaccaacgctccagagatcaatggcgggtccatactctgtagatcccagtagaagctcaggagctctataccacaaggtgactacacggctagtcaatggttgatcttgatctggtttataaaaactcgccagaccgaaatctccgatcttgagaactccatcattgtttaccaaaagattcgaacccttgatgtcacggtgaaggattccacggctatgacaatgctcaagtccacaaagcagttgtttcataaaacacttgatctgaacacaaaacaactagtgagtttattgattggccagagaacacaacaaggttatttaagctttttgaaagtacctctggttcagtgaatttgacaccaggcctaagagccaagcctgaaagatcatgctccatgtactcaaacacaagatgcaagctacctgatagctttgaagtgacaagacattgaagcttcataacatttggatggtcgagttttcgtaaaatgttgatttctctagccatgaaccttacactttcaggatccatattagcaaacctcaccttcttcattgccacgattttgcctgtctcaagatcccttgccttatacacaatgctataagtcccttgcccaatctgcaaatacaatgttcacaacattacagtccactaaaccaatccaatgtatgattcaagacaaatgagattgaaagagactaactttgtcaagcttctcaaaggaatcagcacgtcggggaacccaacctttaatagcttcaccagcaacagaggttaaccaataaggccaaccagctgcaataagctctgcttctgcgctacgcggaacattcgaaataatcaatcctcctcctttgccattatccgaaactcttcttcctctttgagaccttgaaggtctctctacaataaccgtcttaccatcatgactatcatcaataggaacaataagaccactcgctcttcttccaccaccagagcttccatcaacggctttatgcgaaaaatcgtctttattcgaaggcagaggagcaatcaattgaacagaagaagatttgttccaatattcatttgctttctcacgatgataaacaacaccctcttcatcttctgctgctccttttgagcaaatgcagcccataataatagtcc

SEQ ID NO: 36972 - DNA, 2539 bp, Arabidopsis thaliana landsberg
gggcaaactcgaccggctcctggtttctttaaattcgaccggttaggtgttcgtgttcctaccattatggtttcgccttggattcaaaaaggaaccggttagttctctttttctctattataattttacaaatttgttcttactgtgcattgctttttagtagaatcctcaagcttttttccaaattaacaagaacactccgcttttgaacttgatatataaatagttttgaaactactgaccaaaaaacttatatgtagtatttatgcctatttaacgtactatttttttcacttatgaattattaatattgaaactattcatttctttaacccaaaaaaagaaattcatttgtatttcatgtatttccactttctactactatttccgacagatttttgacatttgctaacaaaatttaaggctgcaaaaaccaaatcacatggatggcatttgacaactataagattgtattcattaataatggtggagaaaataattgaatccattgattatgccattgaaagatggagtatattataatttgtcggcgtcgttgcgtgactcatgtttttcaaccatcctttgaccccatttgattttaatatatttttactatatatagtttaataacatcttattttattatatgttttgaatgaagtcgtaagtgaagcaaaaggaccaacagagagctcagagtacgagcattcatcaataccagcgacaatcaagaaactcttcaatctctcttccaatttcttaacacatagagatgcatgggctgctactttcgaagacgttgtatctcacttaaccactcctcgaaccgattgtcccatgactctacctgaagttgcacctatgagagccactgagcctaaagaagacgctgctctttctgagtttcaaggtgaagtggttcagcttgcaacggttctcaatggtgatcacttcctcagtagctttccggaagaaattgaaaagaagatgactgtgaaacaagctcatgagtatgtcaaaggagctacttctcggttcattagagctagtaaagaggcaatgaagcttggtgccgataaatctgctattgtcgatatgcgatcttcgctcactacacggccacacaactgattaaaaatcttgtttgcattcgtcttcctatgttttgatctgaaaatgtgtgattttatgtatggaaactagaattgaggaacaaagaaatagacaaaattcattgttaatgttagtgatatgttgagcaatcgaaagatcttcataaactcccaatataactgaagcccaattaggcccatatataaatattcaacaaggcccaaaatgagttgcatcaatttctttagttggagacttttcttcaattgtttattgttaggggcagtggagtgaaggagaaacaacaatgtcgccaatttctaagattctaggaggatgcaggacactgatggcgaaggcggtgactaatgcgacggctaccggcgccggcgattgatagaagaggaggaattcataagatttttccagtctcagagtcgctggctagattcgtcggccaaagcgaagactctttttccaccgccatggagaaagtggagcagtataccgatgatcacaatctttgggttagggatttcgaaactcttctccagtttcctttcattctacttttttttttggtgatttctaggtcttttgatctgattctttctgttggagcaatgtatctgatttataggtctttgatttgtagaatccggagaatatagaggagatactgtgcgatgataacttgaagacgattttcgatggccaagacaaagtcgtcggagtcagagagatgacggagcttttgttgcgacattttcctaacgttagaactatgtcggcgaaggtgaaggctaccggtggaggtactatagaaaaatgggggttcaatgatattgtgaaagtctcagagccgctggctagattcgtcggccaaagcgaaatctcttttgacgccgccttgagaaaattgctagattatgcctttgatcacaagctcgtagatgagggtgttactctgctcgagtttccttgggttagcttttttactttccttatgatctcctctttacatgtttatgcatttagggattggagtctctagagactggagaatggtagtgatttgattcttgtgttggtcattattggagtaattgacatctacgctgaaaatgttgtttactcacttgaatgttttggttttgtttgtggaaatggtcttttctgattgcatattttgaaaacttagcttgtcaattcatacactgtcagatgaagaattcaccagttacgaatatagagtgtctttaggtggctttggaccttgtgcttgcttctctgtttggtggtcatagattgcattttcatgtttagagattatgatttgtttagcgctcacctctttcatttgtagattacgaagtgtaataaatggaagatacgatgcgatgataccttgaagacgatactc

SEQ ID NO: 36973 - DNA, 1159 bp, Arabidopsis thaliana landsberg
agtgacatgcgaaagaagctttagatgatcaattcaggctcaagtgatctctcccgtgtggcatgtcgcgtcatatctgcagtctgcttcccttggtatcctgggaatggagaaggaatctcaaatcgcactgaaagagggctcgaaccttgaagcaaagatgaatggagttccccgagtgaagtaagatatatagcatttaagatttttcttgttgggaaagatgaaagaacatcttaccaagtaaaaggggtatgaatcttttgagcacaatgatgggaaaacactcaagagcaatgcaaaactatagaccctcttcttctggttgtatgaggtgttttgcccttcttgtgcctctttttatgggcattgaattgaaggagtcatttcctttattagctttgaaatccatttcctgaaactttattgtactaaaaaccccattattgcagaaaccaaaagagggttttgtttcttttgatctataggtcacacagactaaacatgtatgaactctgtcttttgactaaagagatattcgacagtgaaaggggtttttgtggttaaattccaatagttgagtaaattattcaaaattttaaccaaacacaaattcgtgtcaaaattacaggactttcgactcctacagtatagtttaattactcgtccgattgtgaagttagttaactcttcattcatcttcctcgcttttcaactttaattaaacaacatgtgcatttcagttaaatagcatacctggaatctgtgccagtcctgagatacaatagaaaaatgtcgttaagagtttatttgttcacccaaaaaccatcttagagaggaacatgaaacggaatcttagcttgcaatattagggcaagggaaaatgatcttgatggattacaaacacataaaaatgatacaccaaacatataaggggggtcagatttgtggaaaaaaaaacaaaaaaatgaaagtgaaggtgaaaataacaaggatagcaaattgagagaaaagccagtcagaagaagaagaagaagcttcatgaccccagttatttcacacctcatcaggtcccggcgtacagatttccaatctctcctccggcgacaaaagcttggaagcagaagtggttcaaaattgatgtacacactgcagtaaa

SEQ ID NO: 36974 - DNA, 1628 bp, Arabidopsis thaliana landsberg
ctgtgtctcgttcgacgaacttactcggtatgaaggagcaggatggcaatggcttggtgattcatcacacattagcaggattgaagtatagtttactgaatttctgttacatcttcattattgtgttctttgtagcagtagctatttcaaaactgtaataagatctctagtcagattctcatgctcctatcggataacagagaaaataataagagtcactccacaatgttttcttcggaagtgtttttgtcttctacagtgtctccatcttcagaagcgttgttagcttctacactgtcaccatcttcagattcactggcgcttctcagactaaactttagagtgataggtctacccattatctcctatagaaaaaccaaattgtaatgaaacactttacatgctcaaggctaaaggagcaaactttatattaatatgcttggaacttcataccttcccattgagttttgtgattgcattctcagcttcttctctagtagcaaatgagacaaagccatagccagaagatctaccttcggggtcagcgaaaacaacccgagctgagaccgggttgaaatctgcagcagtgaaaagctctcggagatgtgttgatcttgctttccaagcgagattagatacgtagagtttgtgacgagtgtctccaggggcaggagaaggaagatcgttcggtgatttcggagtaggcttcttgaaccttcttgcaaagcttacgctaatgatcctccctgacacttgctgaaaacaaagaagatagaagcttaaacatcaaaccttagctaacaactcaacacaatgtatgatttagtagtttgaactatctacctaaaaggctttgaaattaaacaaacaacactcaatcagaaaagaatctaagggatttgagcttacaaaagtatcgaacttatcaatagctgcttgagcttcttctccagaagccatagttacaaaagcaaatcctcggttctttccatccttttgccttataatctaggaaaagtttataaattgaggtaaggcaattgctagtaataacataaagattgaaacgaaattgagaaagaagaaagacctcgacattgttcacagtcccacattgtccaaagagctcggaaatgtcatttacactcatagaccaaggaagattgaatacaaaaagcttccttttcagatttgaattctgggtttcttcagtcttctcctcctgcgacgtttcttcatccgccgatgtttctttctccgcgacggaacagagtacggagacgagccgccgtgagttatcgctgccggaacgtagagagaagacgggagagagattgctgggaattcgaagactaagggcagtaagttttaaggaagaagagcgtttagaaaagagataaggttttgaagaggaagaagaagaagagaaggagaaaatggagagagaagcttccaaaaccgccattgttagctttggcactagagaaatggattagaccgagacaaaaggataaaactttttgggccggtttggttattcggaaaaaaatgaattgtgaaccgggtctaacaaaatcggtttttgaaggtaaatggcacgaggaacttaaccgtaggtcatgtatttt

SEQ ID NO: 36975 - DNA, 1245 bp, Arabidopsis thaliana landsberg
acaaattttctcttgcagctttcttgaaacaccaattgaatcttttctctctaccggcaaaaaaaaaagattagtccttttaggtctggaaacgccaagatcactcgctctaaaccttagattttgtctgcatttcgggataatcatttcatcgtcagggttcttcaaccaaactacatttacagaagaagaagaagaagaaaagttcgttactttttatgcgtttggataaacaaactcaagtttcttcttcatacatcgatctgattttccagatcaaacttcgaaaagagaaaaagccttctttaaatgattcgtgagttctccagtctacaaaacgacatcataaacattcaagaacattattctctcaacaacaacatggacgtgagaggagatcataaccggaaaaacacgagttttcgtggttcagctccagctccgattatggggaagcaagaattgtttcggacattgtcgtcgcagaacagtccaaggaggctaatatcagcgagttacttcagtttagaatcaatggttgtgcttgttggtctcacagcatctctcttgatcttaccgttgattcttccaccattgcctcctcctccttttatgctgcttttgattcctattgggattatggttttgcttatggttcttgctttcatgccttcttctaattccaaacatgtttcttcttcttccacttttatgtaataaacgtttctttaattgaagaaagaaatccttaaacaaagggaggttttgtctattgtcattacataaggtttcagggtaagagattaatatttcatttgtaaaacttgttttcttgatgcagaattatacaactatttatataaataaagaatgattaatagtttcatgatttcatttttctcatggtctgaagcaaaaccaggatgagagattggtacaaaatgtaagaaattgaaaggctttcattacaggagaggagaccaataagagtctgagacagaagaagtgaaataatatgtagatgaaataatataaaaggctttgattatctctcccatggtttaggatgcataaaagacagatagagagacttttgacaaagacattctcatagcaagtttgtacaagtctacaagaaccctttttcatcatctcacaacctgaatcagaatccataactatagtggaatggatgtgtttcagatattattttatcaactatttaaaacgagctgcgttaactga

SEQ ID NO: 36976 - DNA, 841 bp, Arabidopsis thaliana landsberg
attcctgctaatagatacctacaaactcaaaggagacttcaacccaactgagatggttggcctttggaccaaggcatattgctcaatcatacaaggggtttgtcattaatggacacagatttcacacagacgacatgaacaggaaaactcaaaacagtggggttatatatgaagcattttcaatgtgtagatcaagtacgaaggatactagacagcaggctgatatagtgtcatactttggagtgataaaggagatcatcattttggactatcacatgttccaagttcctatattcaagtgtcattgggctaacaaagggaatggagtcaaagaagaagacggattcactctagtcaatctccatttaaaccaaactgcttttcttcaggatccatacattctggctgcccaagcaaaacaggtcttctactatagaaaagacgattcttcgccttggtatgtagtaatgaaggcaccaccaagaggatatcatgagttagaaacagaagaggagtttgttgcagcatcagtattgattcaggagaatgacgatatagggaatgaatcatctgatgatgaaagtttctgtgttaggaatgactgtgaaggtgtcttagtagctgattaataggactgtaaagagtctttgcgtgttggttaatgggagtttctgtgttggttaatggagtctttgtgtgttggttaatgggagtttctgagtttttgtgtttgatattattaattagtttgggggtggtttaggtaaagaatgtctactttacaacaggagaaccaaccttgccgcagtaagcgtgtgcaggggataagagtgagttctac

SEQ ID NO: 36977 - DNA, 1622 bp, Arabidopsis thaliana landsberg
acctggattaacaaggttttttatctgatttgttttacattttgagcttgttgttgcttgtaaaaaccaatggggatttttttgtatgcttgataagcttaaattacaatcccatgttgattaataaagacacagctttaagagcagacgagtgatttagtagtagagcatctttgtgcctggctgcaacagagtgaatttcaataggagtctaatgcattactcatcacatgtatatgcacgcaacatttagtgacgtaaatggctttgaagggtaaagtttctttagctttgtcgtctatgttttcatatgtttgtttgttttatagttttgaggacttttgaatcttttgatgctgttgttgttggcccattgattcttcagcttgatgaacagagaagtgttgcaaccttttgatttaattgagagttttgtattcatcacgtgagaatcacgtggggtcggttaaatggttgttgcaacgactcagggttatagtggtcttactaattggaaatggggaatatttcgtttcttaaacaaaatattattgattttgtagacttttgaatcatttgtataaataaattcttgcgatatagtaacaaatattgtaaatttgatttgtttattgttgaacaaaactagttattaaggttttttttttcatagataaaaaatcaacacatattaaacttgatttttctataaaatatataaccaacaaaaagagagagagaaaaagtctgcatgtaagcatcagagaaaattacgctgagaacgaaggcagatattgatcctttcttcatcaacatgtaaatgcaccaatcttcatatatacacacatgcttatctgattaatggtaataccatacaattcatgcgaaataggtgctatgctctagagagtttcacgctcattcaattcctcttttcttctctttctcctttcctgattttttttttttttttttctgcttcgctttgaatatgtcacgtgaaggttgttacaatcgcagattaatctagctttgttattttgactgagattttcaaagctcgtaatgtatttttttattccaattcgtaaggttatgttttgattgtagtgatgatgtgtgttgatttcgaaacatgcagaacgattcggtgatgagaagatgatcaatcatcagtgaaatttgtgtgtattgttaaagagtaatggattctgcaaagggttggtttaagaagcggcagatgcgtggaggatccagatataaaggtgcttcaggtggagctggtggaggtggaagtaatggctctgccgatgagcacaacgtggaaactgatgaagaagctgtttcaaacactaccaaacagaaagttgcagcagctaaacagtacattgagaatcattacaaagaacagatgaagattctacaagagaggaaagaaaggtattctcttgttactctaccaaagtgtacatctcttatttgcaaatggagcgtgatttagtgtttttttgcttaaacaggcgaagcatgttagagcagaaactggcagatgctgatgtgtctgaagaagatcaaaataatctcctcaagtttctggagaagaaggagacagagtacatgcg

SEQ ID NO: 36978 - DNA, 4879 bp, Arabidopsis thaliana landsberg
  unsure (1)..(4879): unsure at all n locations
accatatctactctggtctcagtagtctgcttactctcgagtctcctccatatatgtgaatcgctggattcttcaatcgtttaaagatatcactatcgtaatttgtgaagaaactttagacgttcgttttcttctttttagagtaaaggtcaatttgctaaattaagcaactaatttagtaaatcaatgtaaactaatttttaacagtttttttgtatttttggttgatgttaattttcgnnnnnnnnnnnnnnnnnnnnnnnnnnnnnnnnnnnnnnnnnnnntcaaacctcacctgagaaaccgcaaaagtcagatctattacctcacattttacggtggaagaacatttgatctcaaatcgggaaaaatggcgagtgtgtcaccattagcaaagtacaagctcgtgttccttggagatcaatccgttggcaagaccagcatcatcactcgtttcatgtacgacaaattcgataccacttatcaggtttgatcattttcttctatcccatctcgatcaaaattaattttgatccattgtctgtgagatccacgatcctgttgctgtaatgaatggatcagattcagaattgctagaaactcatagcattgtgttcattggatcaaattctgatattagttatggtgtttatgttgcagacaacaattggaattgattttttgtcaaaaacaatgtaccttgaggataggactgttcgtctccaactatggtaattcaattcaatatgctcctatcttttgatctaaaacttttcacctttatcaaatatatatctagatgagcatgatctttactgtttggtataatgtttgaatggaacatcaaaatgtccatggaaattctcagcattgtgtatcaaccatgttcattcttttagttatatgtcattttgaatcatattactgtgcagggatactgcaggacaagagagatttaaaagcctagtaccaagttatatcagagattcttctgttgctgttattgtctatgatgttgccagttatgcgacttatttactctataacaaaaaatagtttcataaccactcatcatgctcgttttcttcttacaaaagttatatatgtgcaggtaagcaatcatttataaacacctccaagtggatcgaagaagttcgtgcagaaagaggcagctatgtcattattgttcttgttggtaacaaaaccgatcttgttaataaaaggtataactatgtccattaaaatcaaatcaaaagatagcttcttcatttcacaaaccccatatgatgttgtgtgatgtgattgattaaactataggcaagtttcgatagaggaaggggagaataaagctcgtgagtttggagctttgttcatggagactagtgctaaagctggattcaacattaaggtaaacaaacaaaaacacacacacacaagtcaatgtgatacaatattctctttaacttggttgctgttttgctgagtgcagcctttgttctgtaagattacatcggcgttacaaggaaacgaggcagtttcttggacgaaacaagaggatttggtggatgtgaatctaaagccactcatgttttcatctcaggcaaatcatcaacaagaaagcaattgttcttgttaatgacattattatgcttacagactcaatcagcaactcataaaaattggattaaatcctttgttgttacaaagaaatgaaggatctttatagttggtgtgattagactaaatgtctctgtaaacatcggtttctaacttgatttaataaaataatctaaggtctctacaaaattttgtaatttgctacattaaggtagtaactatatgattaaaatactggaaatgtgtaatcaaaaaactcgttgtaagaaaatgaatgatgacgtgtcaaccatttttattcatggtcaccagaaaataaatagagaagaaagcatttcactttttcagcaaaacccaaaacctgagaaaatttgctctgccgcataaacgatgttagtgacaagggactattgaatcaaatctcagttttgttcttagcttaatttgtttaaatttcaaatcgcgacccattttgtttctggacctttgttcgtctgtttattctgagtatgaaaaagggttttagggtttaagcacaatgtgattcgtgattttggttgctttgtcgcagatttccagtgatgggttttagatcggtttatcaatctctcacggagttatttccacaagtaaaacaagctcttaatcattatctctgtttcactcatgattgttgtggttgcaaagccactggtttgtttgtttttgttgttcgttgtttcttcatgaaatcaagttgagtagttatttggtattactatattagatccaacagcgaaaccaagaaagctatctgtatttaatatttcaattaatgttattttatagtatgagcaaatgattgatggcaacaaatctcacgtgctaccaaatgttgttgttgagttctgctgtttcattttggtgcttaaataatgtcacattgtttttattatacattacagattgatccaaagattctaagaggtgttgcaattgagcaccaacatgatgctgatgaagctgcctctgttgttatctctgagattttccctttctcttccccaaattccactcaacctcacaacaagaacaagaccaaggtttccgacaatccccctaacttgaaaggtatacttgttctatagtatctgtatgacattttgaacatttcaggcttgtggttacttgctccacctagattagcaccattctctttcaacactgatcaaagtcggttgttggaaatgcagtaaaatgtgacgatgggagtttgtctctgtctcaatggcttcaaccatctaagcttccacatagttaccttgctttgctcaacgaagattctacacctgatgttaaacctcctctcgattacgtcgtggagaaagttgttctgccaagtcgtggccctgcaactggtctaggaggagggatccgaaccatgtactcttctgacaacattggtggttcttccttggtgaaaccctctattcgtgtacaaagccgcaccaacaatgaactctctgtaagtatctcataacatctctactttttgtcttttctttcgattttacatcctttggcggatctgaaagtagtataatctacttgcatatattatatcagggaagcagcagtaaggttcctggacgtagacgatcctctcgcaagtctgtgcagccttggtccccagactactctgaggtcaagtttcatcacattatttaagtaatgtctgatctggaaagtctctcttttcaggagctaacacttctgtttattgtatcagaagcttagaagttggaaaaaacggagcaacaacaacaaccgtgacttctcacagctctttgacaacgacatagatgtaccctcgacacgatccaacaaatgttataccaatgagcgtgtaagtatcacgtatgatgattccatctgttgtttgatgttatatgaaccattggttctacgttttataggagcgcaagcagagaattgccgataacatcaaggcattagggaaattgctcccacataaagttgaggtaacattgttagaattatatatttcatatttttgcaaccagagcttgtccacatatagcttatgagagattgaatcttaattgttgattttatgtgatcttgtagggggataaccatgaattgacactgaatgccatggttgatcatgttaagcttctgcatctacagatgaaggtattgtcttgcttctcctatcttttttcttctttctcaacttgtttattgaggacaaataggtttgatagagaaagccaaatccaaaccaaaagctcccaatccaaaacctgacattctaagttattacgtatataggaattaagtcgaagcaggttgggaggagaaccaatatctcatcataaggcaatcattgaggtaatacatttatgtatctgaagcaaagatacacgatatagtctgtttttgtatcttagagtgaatgtagggtttgtgatagggatacggtcactacatacatcacgagcagacgatgggtaaatctctggcggaagtaatggaagatctgcttacaaaggactttgatgctgcggctaacttgttggagagcaaaggcctttacttaacgcctttgtcctctgtccaaggctcctgctgactcctctcacaatctcaaacacatggaatcaaaaacaaagtaaaaaaaaacttttgaccactcttctgtttagtataacaaactaggagatggaatattttgtctaatcaaactcttatcttgtgagttcttccaatgtctgatcatgaagaaatgtatgcattctatgaagaaagaattatttttgtcaaaataaacgaaatatagacgatgacgtgtcaaccaatattggcatcgtcagcagaaaaaaagcaccaagtcacacactttaaccaaaaccaacctaatatattctctgttttagtgtgagagagagagcgagagatatgaaagcttaaagctttgagaaagagcaactactgtgtgtataaactatcaatattattagtcttctcgtcttccttaagatcccaacagctattgaatccaatttgttcttgggtcttgttaaaagtttccgactttgctcaatttgtcgaatttgccatcgaaaatttagtaaaatgcgtggccttgatcgatggatagctgaagcaatcagatcagagtcattagatcacaatggtcaaatcatctgccgtggggttgttctcgaagaatctcttcccttactcgctgtctcttttc

SEQ ID NO: 36979 - DNA, 2568 bp, Arabidopsis thaliana landsberg
  unsure (1)..(2568): unsure at all n locations
tattatatataagagtatttccaataaaggtaactagattttcctattaaaataactagatagcgaatgttaataaagaatttatactaacaagaacttcatctaaaatttgtcaatattatttttttgtcacaaaatatcatttaattattactatagtaatttttttttttttaaagttaaatactttagtagtagtggagatgctctctaagtttaagtttataaagtaaacacaaacgcaaacgtaaacaaacaatcaaaacaaacaaacaattgttttacgtacgttttcttgtccaattgcactttgcgaaaacggccatataatgaacttgtatacctgttgatagtgacaacaactgattagattggactaattagtagaaaataaaaagaaggtgagattttatgaagtaatttacttgacagagtaagacataatggacacatcttgaaatccctcagcatctagagctgcacgaaccgcgcctacgcgaccatccaacatctcactcgtacaaacaacatctgctccagctcgggcctgcatcagttcttattagaatattaaacgttttagttatttaattggtcaaaatggtttcatttttacctgagaaactgcttgtttccgcaattggtgaattgtttcatcatttaatatcacgcctataaaacatagatggatgttttagatttactacaatttgtgaattggtgaataggtttttaaatgtacaaaacagatttcttaccatcttctcctacgatcccaccatgcccagttgttgagtactcatcaaagttgacatcagtgtagataaccttgagaaattaataagaaagttgtcattattcaagttcagaaccacttcctctagctattgaccaaagaagtatatatatatcttacatgatcagggaatctgtccttgagaagacgaactgtcctaggtattagaccgttgtcgttaaatgcctcttcccctgttggagactaaacagagaagggttagttattgatgtattcatattttgtaaaccattgtcaaaatatgtgtcaaacaactcaaaaaatatgcacaacactgattaagaagaaaatgatgaaacctttaacgcttccggaactttaggatacaactttacgctattcacaccaacatctagtgcccttgcaacctattttcctcacaaaacacatacaagagttagccaaaaagaatgcttcattatctttaagttttattttaggtcctaatagaacaaaccgtgaacaaagttgtttacaagtaaaatgagaagaagatatcaaatttatagtctctaaagttttcatatagaatcatcactcacttcttcaatgaggccgtgtctccagccaagcatgtaacgtccaggcatcgatgttatgggaatgtctacctcaccttcaaaggttccatatttcacgtaagaaaacgaagatagtttttttcgatagcatgtaaaataccatgtattcttgccatttaaagaatcacattggcttaaagcacaacaactataaatcatttttgataattataaccaagttaatcctaaataaaaactcaaactaaccttcgtgaatgaagagagggtatatgaaatttgcaggagagatattagtctcttgnnnnnnnnnnnnnnnnnnagggcactttcggttacgacgtgcgcgtcggcttagctgctgaaacacttaactcacattagattgaaactaacaaaagaagttcaaagccaaaagaaaaacaaaagtgtttaggttctaaacattttggttttaaaataagtgtttacttacaagaggctgatcaatcagaggtgtggctggtttactcgggactggaggcgcctcgagagcatttaccggccatatcaaggtcgagtcgatcttttggagttgactagcaacttcactgcttttaaaagagttgactctgacgttatacgaagctgctttaaggcctacgtagctcttttgctcaaaacctttcaccgacggaatcttgcaaggagatcgaaacatggatgacgtcatgtatatatatatggtgaaaaatagggagaataaacacgtgaatgagaccgagatgtatataactcaagagagtgagactgctattttatagaccttttctgcgagagagaaattattgaacagtaaattattcttttattttgttgtcgtagttggcaaatctcgatcatcttagcgtgcaagttcttaattataaaaaaaaataaaaaaaattatcgtattcaaaattcatataatcttattagcatatcttaattgggtgatctacgatatcttggtgtcaacgaatctttagttgatttacaaaaaaaaaaaaattgtagttgataaattaaaatcagggctatctccaatgattttcatgccatgttcaaaattttataaaaaataataatctaatgtgttaaaataatttcctgtcctttaaaattatgctcccaaaatatttaaattgaaattctttgattcggggcgctttctgactactccactcgaaggtg

SEQ ID NO: 36980 - DNA, 1687 bp, Arabidopsis thaliana landsberg
  unsure (1)..(1687): unsure at all n locations
tggaaacatatcaaaaagacgagtcagatatactcaaccatgttttaaggtagtaaaaataaatagatcaaaatattcaaccatgtttccaatggcaagagaagttcttgcaataccaatatctttggctatatatgagtctgtttttttaaccattagtgattgtaatttaaatcaatataaaagctatttggtttgtggtgttgttaaaccgggtgaagcactctctcaactctttatacatattttttctttttgttgactaataaatttaacattttaacacacaaaaaaatgcttttgacttaaaattggttacatgcattattaggttcagaaaaaatgaggtatttaagatttatattcagcaatggttcatatatatgctctcatgtctgattttttcttttaaatatatttatgttagaaaatgatctgcaacacatcagactaaaaaactgaattatttttttaatatattttctaatattaatagaaaacggtttattaaacaaatgaatatgcaaatactctaaaccgtgagaattcattgtggagtttcatttgtatataatatttattttctttgctttataactttaaaataccatcatgattattatagttcagcttctatgtaatgaaaccatgtagacaataaaaataaagaaaataagaagcagttttttggtctaaaaggcgtagaaaaaaataattaagaaaacttgaacaaaaggaaaaaaaaatagaagggagagactaaaaaggatatatataaggaaagtggaaaaaaatcatctaagcaagggaagaagatcaaactcgagttgtttaatctcatacataaatccgctttcaaattaattttatgttttgtcattccataattatattttttcttaaaaatagtcttgtttagttgttttccattctttatctcaaaccaaatttacaaatttaaataaactttaaacagaaaaaccactattatgtagtaatatattaaatattgatatatttcctatatcaaactttataccaaataccataaaaataaagtaaaatttttattttaaatttagaactaaaaaccaataaaaatagtgtcatttccattatgttcttttaaaccaaactttacattctaaaaaacacacactattgatgtgtatattaaacattgatatacttctaaatcaaacttttcttaagggtattttaaaagtgataagtatttgtgaaattgaaaaaataacaatttaacactaaaaccaataaaataaagagaaaaatgtttgtggctaacaaaaaataataatccagattgtgattacaaaaaaaaaaacatttctagggcatgtcattgacttcctttgaagaagaagaagaagagagagagagactgaaaaagaaaaagtaagaaagggaatgaaataaatccgatcgaatacaattttgacgtccgcaaggacactattctctctcttctcatcttcttctttctctcttctctctctctctctacagcgaagaacaggacacaaattactctgtgaagcttagaaaggtataatttttaataaaacccagaaactacaatttctaggcggcagagaaaattngcttctacttctttttggttctctttggcttctcgnctctttatccccaaacccatcaataaaaa

SEQ ID NO: 36981 - DNA, 1467 bp, Arabidopsis thaliana landsberg
  unsure (1)..(1467): unsure at all n locations
cctttcgaaacatctgaaaaattgttcgtaacatagcagtgcacctatctaaatactgttcaaaaagatacagatgaaaaaacattgaacaccagatgcgcaaagtgacaaagtcaaaaacaaatcctcaaaacagggggtttctcaagacaagaaaaaggtatcagttcttcgtattccagtaactcttatctgcaatactaatacgtctcagaagaataacaagaaaatgaaaacttacatgtctatcaaatctacccggtcttgtcagagctggatcaagtatatcaggcaagtttgttgcagccataactattattccctgcataaccaaaatagaaagcaaagtactattatattcctgcaaactagcggaagtaatcacaagatacactactcctaatcaacaagtacctcattctgctcaaaaccatccatttcaacaagtagttgatgcaatgtcttctttgtatgcccttcccattgttttcttgtggatccaacagcatcaatttcgtcaatgaaaataatacaaggtgcctgtaacacatgatcgtcattaaatataaaagttcattcatggtagcctaatcaaccaaactcttttaaaatagctgataagcagtgacaagttgagtcataccttcttcttggctgcctgaaacaaggatctcacacggcgagctcctaccccaacaaacctgtaaatcgaagggaaaaaaacatgatattagaagacattatccattattgaagaagccacctgattgaaataattactaaatagataatgataatgttgcctaaggcaaatgccagagaaagatagctagaagaaggctcacatctcttcaaattcagatccagctctatagaagaagggtactccagcttctccagcaattgccttcaaaatttaaaccgtgttaacttattgtaaaatcaatcagaatattggtagcgtaataagaatttattattaagtggaatatgactgtgaaaacacacactcataataagtaataaccaattcaacaagagacgacaatataacaactatgtgagaacttactttggccagcaatgtctttccagtaccaggtgccccggttagaagaattccctggaggcaaacatttcagaaatgtttcaggtcaaaatgctaactttagtagacgggagaaaatcaaatgcaaagacttctcaattgtatattctcaaatgcaaagtaacaaagaaagtctatacctttggcaactttcctccaaggcgggtaaactttgatggatttttgagatattcaactacctcttcgagctcttgttttgcatcatcacaaccctttacgtccttaaatgttttgacattctgcggcaagtaaacttgataattgttaggaaatgacacaatnggagcagctcttatttaatatatcgcttcagggcaacacgaacagaactattgaat

SEQ ID NO: 36982 - DNA, 3356 bp, Arabidopsis thaliana landsberg
  unsure (1)..(3356): unsure at all n locations
aggggttcctgtaaatatcgctctgatcaaagaagaagatgaataggattatagcgcaaagcccattaaaaatccctcgaaatttgggattattcgagctatacataaaattcacagctctcatttcgaaatctgaaaacttgaatcctatcagcaacaactacccccacagatcatagcgtaatttagctgcaaaaccacaaatcgggagagagacctagggttttgaaaccctaggatcctggacgagattgaatcaaagttttcagatgctcaccgatttgaatcgacgtgatctctgatcagaaaaccgttttctccgtacgaaacatcgatcggtgagaatcacttgtgtcggaatcttaacttgcttaattagtatcctaattgaattgggtgggtttatttgacccggaacccaaaagttgactcgttgtatgaaccaaagtcaaatggtcaagttttcttttttctttctttaaagttaacgtccaagggtctggtgagtggtgatacgagctatagatattagatattgtggcttaacaaattgtatgatatagagactgaaataatctttacatgtcgctaatttggtttacactaggaaccattttctatgtgactcggatcaacatgacaaccatgatgaacacacatgtcatggcgaggatcaagagccactggaagcaactcgtctttgagctttctgaataaatctttgtggctcttacggttgcgtgtcctgtgcttgctaagctttgctcaatggcttcctcggtagaatcaagtatctgttaatgtaccatcaacaacaaaaaaaaaacacagaaaatgttaagaacaatgaagccagtagaaacaatatatgaaccgatatagattcttctcttatcccattgttgatgataattcataatagtaagtataatgggttttgtaaggaaaaaggttagcatctcaccttttctgtattttgcacagattggcttatcatttgacttctctccttaagttgtcttgcaagtaccaccatttcatcggttagatcctcttgaagctttctgtcatcaaatgaatcaccaacttggcatgaagtggcaaaattgaacttatattaaaatcaataaagctctactctttgcgataaatttttctctctactaacgaaagtgcatagatagaaatgagttcctagttcttcttggtgatcaatgcatctacctgtgcttgtcaatgtgcgcttgagctgcggtgtctagttttattggttttgatgaatcagcatcagcagcatcaaagctttgctccttggaacttgcagggctaactcaatcaaggaagttgataagtactaaaagaaagaatttactacaacttgagaaggatgtgaatctagtattccacgtacacgattcttcttctcagctgtggcgaagtggggcttcgaggctcatcttctatttttggtgagcttccactagtcgaatcttttgcaaagggttcatcagatacctctgtctcaggctgtaaatttagcaaaaatcaaaaatttggtataagttacagaagtaaaacttgaaaattcttgcagctaaacaatggttctacgcaggaaccaaccaaaatgtgcgttcctgaaactaattcctgagaccaatacatctagtaaaaattggggaagtaactaacaaagtatcatatcaacaagagcctaatgtcctagctagacaagtgaaaagaagtgtccctttctagttcaggtgacttacctcttgagaagctatcttggaagcaacagcttcaatcttctcatagtactcattaaccttagcctttgtaactctggacaaagagatcaaaggagaaaataagcacattctcataatggttgcaagggtatttcaccaaaaaacatgtacttttagaacaacaactataatacgaagcaatccagttcaaatctctaacccttgatcctagaaagagacaccaaaaagcaggaatctttttaatggcaatggtgaatcaacaagagagtaagtaaacctgggaaggccttcaggggttttttcttcggagagttgttctaattgttccctcaatgtagcaacatactgcagattttttgtttcatacatcaacataaacacgagactaatagtttacatataatgaagatcaaaagaaacgtacatgcataaacatcgactgattttgctggttaggtgcagcggaaagcaatctccgcaaattgatctccgttgtgcttattcccatcatcagtaaatgtgacccctagagaatgaagcaacattcagatcgaggatcacaggccagtaacagaaatcaatccaaaacccaatgcacgattttgaattcaaattgaatatctggatctcacgaaaacagaccttgtttagataggagaggagaggaaacaaaatcaaattccgccactttctcaacaccttccgttgtcaggagaagccgtcgtaaaaaaaaatcttcaccggaaagtcattatttttttctcgagaaattattcggttattggctttggnnnnnnnnnnnnnnnnnnnnnnnnnnnnntaataattaacaaccgaattcgtagcaaattagatttacctcttaatgggctaggctgggctttaaatgtttactgtgcttaaatgtaaaacattgataggcctcttacttctaaatctaattttctgttttctcgatctccgtcgaaaccaccatgcccagagatctcgatctctgtgatttgtaggttatcatggtgaggtgtcaatcactgcttatggtgagaagtaacctgacagtctggatgatgtaatcgacttcgaacccaaaagtgattgtcctttacttaaaccctagttcttttttattacatattatatatatatatatgtatgtgcagtgcaattttacatgttagttgataactgatatatacatttttttagggggtaagagtgagagactaaacaagatgttagtggaaattgcattttggtcagtggaaaatcctgctccccattatacacctacaaatctgatggtaatcgccaaaagcatcccaggagagaccaagttcgaagaacatcttagtttgttggatgtttatgagttacaatgttatcttagttgtggctaatgactggtcaccagaagcgccgcaaattccgtatgtaaacactgtatggttttgggaaagcctattggccaattacgtagcctaatatctcgtgtcaaacaagagactttcagatccgaagaagatgacgagggcgacgatactccttgtccatattgtggagaagggtgcccagggctcctcccac

SEQ ID NO: 36983 - DNA, 2245 bp, Arabidopsis thaliana landsberg
  unsure (1)..(2245): unsure at all n locations
aaaaattaacggatgctccttttcctcagacttatgctgtatttcacgttccatatgcatctcattttgtaccagttgaacttggggtatctaacagggagatgctgcaaatgatttctctggagaatatcctgcttctggagtggtactcactgtaaactgatgcgcttaaaaaggatactgggaatacacgtcaattggctgattttctttgctgtggaccactccgtcaatctcaggactggctgcaccactatctgtaataagaggcgggctcttcctccttcttagaccttcagtgcgcggagaagcaactccaaaattagaatcagaattcattctgtgaagctgtacacgtaggttcagcatttcagatttcatcttttccacctgcaaatttcgctgcctttttttttcctcagcctcacgaatttgttgcagttgctcggtcttccgtgctgctttcttctcttgctcccgcacaatagcaccgatttgctctgcttcaagataccgcgacacataatcaaactcctgggaggaaaacatgtaggactgaagagatactagcataaatatgatgatctcaacgagagcagatcttgcagtgattcgaaacccatagtcatacttgtaaaatccaatcacctcgtatatataatcaaccgtttcacattttccatcattgaagtttccaacaaatggagactgatatgcgagagaaaagatgatgagaacaaaattgtacacccgcaagaacctgaatattttgtttttcttcttcagtatttcaagtctcattcgggcaaaaacaagagcgaatgcaagataacccaggtgtagaatgtcatactcaagagttcctgtgattagaatcagaataagcacaacatccagcagatggacataacaatatagcctcaggtaatcaagcacagtccacatgctttttgtctcgaaggagagatctctccagacaaatgaattctttctttgagacttcatctgatgatatgtcgatgactcagagaaactggatatgtgatcagcccgaagtttgaaacaggcaagcatgaataccacaaaatagctaataagagtccgggggtcgtccactctcactcctgcaaaaataaatagaaaaagcttctccaaatagtacctaattcttggatctgtaaaataaagaattattgcacaaagaaaagtgcttcaaaaagtttgaacggtcataccaagccaacactcccggcaaaatttaaagtagagagctgcgatactccagcagtcatggcaatgcacactagtttcacttggagcctgatctgaaggcaaaaaactattccatgtggcaacatactcaattgcgagaattgatgcaaacagaaaaacaacaacaggccatagtttctgaattacacgtcttctcaagaggacacatgcagcaagcagtgcaatatataccatggagatggcattcagcaaagcaaaactcgcaagaagcagcgcaatcatgtttatctcaaggccatagagattaaacatattctctatccaaaacttcaagtaaattttcaacagattcttctgtgtttcgaacctctccttcttcaatgcaagaattctcctcctgttccacctgtgactctctttgatacttccccagaagtgaccaaatgaaaatttcctactactgccactttcagagcctccagtcttggggtgcaaaaaaccagctccctggttaccacggggagagaagaaaggccatgagttactcgttgcctcgccttgtttcattgatatagaagcatgatcagtcgaagatggattttcaccattagaactggaaacacttgcagtagtgtcttctgcagagacaaaaagtggacacggctcttcatattttcctttgataacagttaaaccagatgttctttctagccaacgaaatacattgtactgcagagtacaggctgcaacaaccagcacttttcctgggggacctgattctataccccaaaatccaggttcatatactcgaagccccaagtagaaagacaactcagcatatttttgcccagggaacatctgagcttgcatcccccacaattggaaaagatactccgcagacaccagaaatccagtataaatcaagaatgatttggatggtattgaagaagactttgggaaggttgggcanatgacaaggccaaggagatatacaaatccaaacacactaatc

SEQ ID NO: 36984 - DNA, 2608 bp, Arabidopsis thaliana landsberg
  unsure (1)..(2608): unsure at all n locations
ataagattttgtctacctttctagccagtaatggatgggaatatcgacccagctgttctggcttctctccctccatccatgcaacttgatctccttgctcaggtaattaactatatttacaccatatctttgcagcatgttaaatttcatggacgtttcagattatttaataatgtctttacttgtagatgagagaaaaattgatggcagaaaaccggcaaaagtaccaaaaggtcaagaaggtgagttacataaatcactggctcattcttggtccagttatgtatttgaatctctatgtataaggagacgcggaacactgactatggaagtaattatgtataggcccctgaaaagttttctgaattgcaaatagaagcatatcttaaaactgtagccttccgtcgcgaaataaatgaagttcagagatctgctggtggaagggctgttggtggagttcaaacttctaggatagcttcggaagcaaacagagagtttatattctcgtcttctttcgctggtgataaagagtgagtttcagtttgaagtcttattaaagaataaggttctttctaaagtgaaaataactgatatatttaatttgttctagagtactggcatctgccagagaaggaagaaatgatgaaaatcaaaagaaaacgtcacaacagtctttgccagtctccgtcaagaatgcttccccgctgaaaaaatcagatgctaccattgagttggatagagatgaacctaaaaatcctgatgaaaatattgaagtatatatagatgaaaggggacgttttagaataaggaacagacacatgggaatccaaatgacacgtatatccagaggaacttacatttgatgaaagaaaaggagagaacagcttctggttctatggctaagaatgatgaaacattcagcgcctgggagaactttcctactgaggaccaatttcttgaaaaatcacctgttgagaaagatgttgtggacctggagatccagaatgatgattccatgctgcatcctccatcttccatagagatatcatttgaccatgatggtggtggaaaagatctcaatgatgaagatgatatgtttcttcaattggcagcgggaggaccagtgacaattagttctacagaaaatgatcctaaagaagacacttcaccgtgggcttctgacagtgattgggaagaagtgnnnnnnnnnnnnnnnnnnnnnnnnnnnnnnnnnnnnnngaatttaagcaatcagcatatccccaaggacattagtatcgctgagggtgtagcatgggaagaatatagtttgaaaaatgccaataactccgtggagaatgatacagtaacaaagatcacaaaaggatatctggaagaagaagctgatctgcaggaggctatcaagaaaagtcttcttgaattacacgataaggaatccggggatgtccttgaagaaaatcaatcagtaagggtaaatcttgttgttgacaagccaagcgaagatagtctttgttctagggaaacggttggtgaagctgaggaagagagatttctggacgaaataacaatcttgaaaaccagtggtgctataagtgagcagtccaacacttctgtagcgggcaatgcagatggtcagaaagggataaccaaacaatttggtacacacccttcttccggttctaataacgttagccatgctgtgagcaataaattgtcaaaggtaaaatcagttatctcacccgagaaagcatcaaatgttgctagtcaaaaccgcatgctataaaccatggaaaaacagcacaatgaagaaggttctgaaagttttggtggagaatctgttaaaggggctggtgtgcccatagctgatgaggaaataactggctttcttgatgaaaaagataatgctgatggtgaatcatctatcatgatggacgataagagagattatagtagacgtaaaatccagagtcttgtcactgaatcaagggacccttctcgtaatgtcgtcagatcgcgaatagggatactacatgacacagattcacaaaatgaaagaagggaggaaaataactctaacgagcacactttcaatattgacagttcaacagattttgaagagaaaggcgtgcctgttgaattttcagaggcaaatatagaggaggaaattcgagttctcgaccaagaattcgtaagtttaggtgatgaacagagaaaacttgagcggaatgctgaatctgtgagcagtgagatgtttgcagaatgccaggtttgccccttgtctttatacatatgagtcattgtcctctttatacagcccttttgcaaactttccgaagtttctgttcgtgtttgatttgacaacaaacttataatgctttgtcgatcttggttttccgtaggagctactccaaatttttggcataccgtacatcatagctcccatggaagcagaggcacagtgtgcatttatggaacaatcaaaccttgttgatggcattgtcactgacgattctgatgtattcttgtttggagcaaggagcgtgtacaaaaatatatttgatggatcgtaaatatgaggagacatactttataaggtggcattcctttc

SEQ ID NO: 36985 - DNA, 3302 bp, Arabidopsis thaliana landsberg
  unsure (1)..(3302): unsure at all n locations
gtagaagaaataacaatgaaattaatcaaagagaaatttttgtacaaatatctatttttaaccagcttaataaatattttattaactttaaatcttaaagcccatgtaatattataaaaaaaagattaacaaataatgaattaataacaaaaacctataaaattgtgtgtctttacgtaaatatcctaacataatttctaaaatatgtcactagctctcttttgatgtcttaagccattgcttgaataatttttgctatggaccggtttttgtaagcacatccgctcaaactacatgtttttttgtctttggaaagataaatccctttgacatctacaattgagctgaaatgctcaaccaattgcagcttgatatttctctcggaaagaattttgcaaatcatcttaacatatgttgtgtataaacccgtagtagcacgtcaaagaaacattgggtgaccacaacaactctttagcagaagtatatcaaatgattgcacttttgctatactcattctttttgtcctcaccaaactcaactccaacaaccagaccaactgttttgaagaactcatcaatagctgctctgtcaactaggggacatggaccagaagcaagcaaagcatcttgttgataatactcatccgttgacgaatcatccgagctagatgaactccaaggttccttggtagaaggttctttcgatgaagcaaaatcgcaaataaatcctcttttttgagcatcaaaccaatggacataacacaaagtttactatacttttgacacagtccacatcttttttgagagaatccacaattagtttgatagaattcatatcaactttgattaaccactggttccagttataaattttgtttaaccgtaatcttaaccactatatatacggttaaaatggttatgactaattacggttacaggtataaagattacggttaaatacggttacgggtattaatgattataattaatattctctagtcacgaagtcatcgactactttgccatcgacgagttacaatacaaaccaaagcagagaagaatccacaatgtgggagtgtgcagaatgcaccttattgaacccggtaagtcttccttaagagtgtttaaacttgaagcttcttgttgtctctatactgttttttcattatcggtcttgttttctcctaccagttattggctccaatatgtgagctatgcactgccgcaaagccaaaggaaaggcagatgaagcacaaagtctggtcttgcaaattctgcacgcttgaaaatgaggtgaagttagagaaatgtgaggcttgtggtcagtgaaggtactcgtatggagcaccattgtcaactggtgctcctaatgtcggcacttgaaggagttaccagtcttccacaaggactaaatgttaaactcttacccatttttggtagccaacggacaagattctccaagttctgtaaactgtgtcccgacttggacttgtggctgcgttgtgttatgtagagtagtaggctttttaactttattagttggaaagagtattttcattttgcaaacactcgaacaatgtgaaaatttggaaaaaggttttcttttttcctttgaataacgatttttgaggaagttggatgaaaaaaagattctttgttggtattctgatggtggttttctaattttgatgtcgtcgggttcttgttctatgcagagggtctttttgttctcgttgcttccatcttctatctatggcggtttcnnnnnnnnnnnnnnnnnacactccctttcgtctacaaagtcttgaaaccttagacccattgcctgaagttaaatgagaaactcgtctctgaggcttccgaggtatgctcttcttcttaaccattctcagagcctctattgtttgatttctagaatgctatacttgagttgtttctaatcctgctttgtggaatctttagctaacctgatagaattgtgcttttctatccttggtgttagatcaagcggtctaaacttcccagttagactttgaggtttttgtctgctcttgtgaacaatcatttactgcgcgtgtgaattcaggtacctagctctttcttcaatcaattcagacataattcgtggctgttaaaacaagctacaataactcaaatgtagaattgttcaaatatcatgtgcgttagcgttaatgtccacgcacctgaaatagattacgtaggtttcactaggacttgttagaatcgtgaaacttataaaaccggtctttttgttaggcaatggtgaggcttttatactttcaggtttaaaaaacctgttgaagcattagagtgttgatgaatatgagtttccctaaagtagatagtatcttcagtctgaagtatatatgcatgtgttgtttctgatcatagtgtgcatcaaatgggatggttctgaagatcttttgacaaactctttgtctatcaattgatgtttaaggttcaacagcgattcagtttcataaaaggtgatgtttttgcttttgcttttgttagcagatggtacctaatcaaaaagcttaggatcatatcgagtgccccttatctgatagaggactcaaggaagcagatacttaacctttttaagcatcatgctcaatgttagctccttattgtgctactaaagttccagtctattggtatccttttccattcttattatttgtgttggttttttgtgtgtcctgacgtttcacagtgtccattcttcatcatgtcattctccattcttcaacacatcacaattatattttagctaaatagataaaatttattcatatggtttattctaagagatattcgacatttttcaatataaattttagaaaccaaaaaattgtgtaactcgaaagggaaagttcatatattctttgtgaaccaaatcaaattctctaactgaatagtattttgtgttttcatgattttgaagagccaaatctacttgactactggttgaaaattgaaagaaaccctaataagggacaatgataacgaaagattgggtcctcaaacaatggacaccactattttactgccatttaaaaaaaaaagtttaatatttttgaattttattgttgttgttttctcatttcaaaacatccaaaattccaactaagataagataacttatttgcagtaagaaaaacggataattttatttatttgaatccatccatcaacataaaggtgtgcacaaaggacaatattaggcaaatgacaatgtcacgtaatctacgttgcccaattgaataatttgattatcat

SEQ ID NO: 36986 - DNA, 1722 bp, Arabidopsis thaliana landsberg
gacttggattcgactatctcctcttttcttttgttgcctgattcgccatataattctattgggtgctctttcgatcgagtgctaggtcaagttcttgactctgcttccaaagcttccggtgatgattccgtcagggatcgtctcatttatcgtactggcaaactcgcatttcttcttcttgaatctaccaaacgattctctcgaatgcgcgctactcactacaattacaattcttggtccctccctgatgatctcaccattaaggtaatgaattttctacgttgctttagggctctctttttttcttgggaggctattgatcgattctaaaattactacattttttagatacaatctaaagatctgtgttctgttttgggggtagatgaagagaactagagtcttgtgtttggacaagagatgttgttaagttttcaatatcgataccaccgattccttaaccaaaccggtacacactaacacaccatacaagagagagactagcacatcactagctcagctctcaatccaccatacgagagagactagcacatcactagctctgctcttaagtctctcataccattcaacaacaaacaacataaacctctctaaacattcagagccattatttatactagaactgagtttgttcaagatatttttagatcctaaaaatatcttcttcttcaagcaagtttcttctcacgtgcctcctcacttgcacgtgtcttcttttgctttctctcattcacattcttcttgatacatcaatcgtatcagtttgtcatagcagagacactgaaaactgccagatactggctcggaaccgcatactccatgactatttgaacaacctctgcaagattgatcgtctctgatgttgaaccttagatcaaaccccttaaccaaagcttctttcaatttaagccttgaccgctgaaactcatccagaagagaactaagaactggatattctcccatctttacgcagtccgtaacagaatctgagggcttaaacgcgtaatatgttacaatttccccgttgctttttctgcaagtaaacgccgaaagcggacttaccatctgagaagcaggacaaatgaataggtcaatcttctccactgtaggagcgattgtaaactgattggccccggtgaagttcagggacatgcttgggcatcgaccctcgaataaactctcatcgacaacggttaaagtttgattctccaaatcaaaagagattacttgaagagaaaggtttgtgagaactaaagttaggttttggttgttcttgcaagtgagttgaaactctgtttggccgcaataattgggtttattgactccccacaaaggatacgtcacgtttggcaacagcctcggacctgcgtactaatacgagaattgggcaataataagagcagactaaaaatgatatggactttatctagcatggatttaataagagattgacaaaaaaagatccagagtcaatctaattgtagtagggctatttttcttttcttttttttgtcatactcatatatattgggtttctaattttcaacaaatgcgttgagaagaatagttccataaatattgttagtccaaattttaggtgtcagtatcaacaatacactctctttttaactaataaatccaagctagagtgaaaaaatatccattttgatattggaaattcatgaatttcaaggtagggga

SEQ ID NO: 36987 - DNA, 2478 bp, Arabidopsis thaliana landsberg
  unsure (1)..(2478): unsure at all n locations
caacaatctttcgtactttttgggttgtaattaatatatcattattttttttgcagttctagaaattcgcaatctacaaagaatggcaattgacgaccaacttttttttagtgtgtttttgaattcattctagtcatgagtaaactcatattaagaaaaaaagaatatatggtctatgattttattttactggaactctttttttttattttatttttaacaggtcagatttagatggaagagatctataatcctatattaaacataatactattaaaataacagagctattaaaactctaaatctcttctatttgtagaaaatcacaatcatggttttagtctcgtctttatatttgtagacaatcacaatcatgtttctacaagagaaaatcacaatcatgttcatgtggatgaaagatattgctcgtgtgcttcgtatttctttcctttaaattaccatatctgacgtagtctattaaaacacttaattcaccttactttataaacatcataaaaacggacatttcatttatgatgatttaagaaaactggtttcaagaaaattcttccatttaggttcgtgagaggaaacgtattgaagaaaagtgacaaaatcgatgacaatatattgttgtggataaataaccaccatatatacttaccaggctagagtttaggaaattactataatacaataaatcaaagcattatggagacatgataatttatagttgtctacatactaaataaacatactacggaaaataataaattgaaaacactatttgatgacaatatgttacatgattgctattttcttacacttttctttattatttggcaaataacaaagaaaaaaacaaaaanaatcaaagggagcgagtcgcatggagttccaaatttggttggcaaggtatccataaatcgaaaagttgcctagtttcatgcactaagcttaaccataaaatcagattgatcacatgtggttagcatcaatcacaaaaaaagcaaagagatagagatatgactgaggagagcccagaagaggatcatgggtctcctggagtagctgaaacaaatccaggaagcccttcttcaaagaccaacaacaacaacaacaacaacaaagaacaagaccggtttcttcccattgcgaatgtcggaaggatcatgaaaaaagttcttcccggtaacggtaagatctcaaaagacgctaaagaaaccgttcaagaatgtgtctcggagttcattagtttcgtcactggtgaagcttctgacaagtgtcaaagagaaaagaggaagaccatcaatggagatgatatcatttgggctatcacaactctcggtttcgaagactacgtggctccattaaaggtctacctctgcaaatatagagacaccgaaggagagaaagttaacagcccaaaacaacaacaacaaagacaacaacaacaacagattcaacaacagaatcatcataattatcagtttcaagaacaagaccaaaacaataacaacatgtcatgtactagttacatctttcatcatcatccttctccattcctaccagtggatcatcaacctttttccaatattgctttctctcctaaatcattgcagaaaacagttcccgcagcagccatgataataacattgatttcaatctactggtgagagagacatttgctttttttttctttcttttacaaatatatgctttctttacctttggagtccatctgatgcttatatatactccgttgttactatagacacattagacacgtacattttgatattttcagtactacccatgggtttgtgtaacagaaattcgtcttcatatattttccggattagttcgtctcgagcaaatatagcaatctctcatgatttacaacagtagaaactaattccatgctgctaattggattagaatacttaccacctacggtttgagagttagtggtctagcttataaggtttcgagtagagaatagcttaattggaagagaatggtgtattgtttctcattcatttactcatattatgatggataaaagatgattgcttgaattaaagaacttcaaattgttcctcactcactactcttagtatcatgacctgaaactataagttataaaagaaaatgcatttctaatacgatgtatgtaaaatgttgctgctatgaatctgattggatatgaagcaacccaattataacttcttttttacatataaataagagaaagtggaagctatgactctgattggataagaaggaacccaattatgattattttttttacataagaacaagtgaaagcagtagctatgaatttgattgggtatgaagcaaccccaattatttaattttacatataaataagagaaagtagacttattcattttgggaaccaaacttagtcatccttgtagaccaaagtcgggtactctggatttcacatgttgtttt

SEQ ID NO: 36988 - DNA, 3369 bp, Arabidopsis thaliana landsberg
  unsure (1)..(3369): unsure at all n locations
tcaagttatcaaattcatattattacagtaagtaactaacagttaactcgatttaacaacactaagtacttacattgtaagctgatacccataatccctaagtcttgcaaattgttcattgcattcagcttctaacatatcaaaaatcctttattcttgcggattgtgccattgaaggtgtgataataatgttgtacctccttttcatttcatcttttatttctggagcagtcatatgtggatctcttctaatgttttcaagaaacaagttagcaactacaagacttcttattaggtcatatcttccaacaggatgacatgtgtgcttatcatcaaatcttttaaccatccattttcttataggattctccactacacaataaataagccattcacaatctttagccttacacctagcacccagtttggttttctcccatctatcattcactacattccaccttgtcttcaatacatatcttatcacactctgcttaaactctttaccattggtatataattgtttcaagctgaacacaccatcaagtagattcgttctaagcagcctctctgcttgttcttcttcatcaccagaagagtcatccgtagctgggtacacctcatcttcgtcccgaatttattcttcataattgtcatggttaaacaattcaatgtcttcttcaacaacctcttcctcatcacatgattctccattatcagacaaaccagcttcttcatctacaacctcatcatatgaggtctcatcatcttcgggaacgtacgctgggtcatcatcttcatcactatcgttctcaatttcagtaacactcctttctcaatgtcaatattcagctcacatgatttctcaacatagatgactacctctttcatccatcgacctgctgcttccattttgcttttattaacttcaacattttcccagaagatgtctatctgctagtatgtcaaatgggagcttgtaccaaattcttccaatttccagttttttttcaatgagtttcgaacacatattagacaatatagacataggatccactttaaccacatcgaccaatccattgacataaagtaatacaccgttaattgttttgaatttcctagaatgatagcaattcagtttcactagctcttcgacacttcnngccgatagaaatacgtgtataagagattagtctttccaaaacagaccacaccctgttttacccaatgatataaacaaaaacttgtctacccgacaaaaacccgacataacccgacaaatcaatactattcaatccaaaagtgaaatctttgtttttaaacaaaaccactaaacgcaaatcaacccaataaactagtgttcttacctcattgcaacgagattacgttgtagttcactatctaagcttcaatcgtgacaatattggagaagatttatggtgatatatattcaaaaagtctctctcgctcaagaacccttagatagcaaaacggagaccttaattacgttaatggattaggttagatgttatttagtatgtgttgggccacattaatggattaggttatgtttattactcttaaattagtgttgggcctgtttaaacccactaaattcgaattgggtctgatgataaattggatcggttttaattgtatatgtgtctggttttaattgaatgggtcgggtcacaattgaatattttcgatggtaactccggagccggattccgtcgcgtcgatcacaggaacggtaccagaatgtatgtctatggtgttggcaccatgactaatgttagttcgtgtatgtcgttatgtaatctctatagattgtgtagtttttgatacattttctttctctggatggttgacgatgtgttgtcgtatagttggcgtagctgagaactattttcccatatttaatccagtatcatatcactattcacaaatcttacagttaagtatattacctaataagcgatgacttattgaaaaggacccttaaacacttgcatacctaaattttattgaactgccaggaactacggtcatattagggttatatatatgtttactgatatgtttttcttaatgatatacaacatatatgttgagaatataccacattttttgtttttgttaatcctaattgtaatgtgtttacatgatgtatatccacaaattgcgaactacttacctaaattatgatgaggaaacttttgaccaaataaaacagatgaggtttacaatagatgaaattctaagtaagcatattagcatattgttttttggctaaatgttgaaggtaataacattttagtaattatataaaaaaaaaatttttaataaacatttagttaaataatttacatgtcaattggctaagatatatgtagttatatgtgtcatttgatttgaacatatgtaagataagtctcatgaaatgtcatttttttcttttttttttggtcgttcgctttatatagagcttcaaagagtcattcctcgggaatgttgtttacataagtgaaatgttgaggttcagtacaaactctttgtgccaaatgatctacttttacatttattctacgagaattgaagataaagaaaaggttgagaacttttccttgtcactatgcaaatcctccaagtaaactgaagatgctgaccattcggtagggaaagaccaaatctgaacagtctgtaaaaaaaactacatcttggttatcgacactaattatacacatcatcgcccaaagcagagcttccacttttgtgtttagcggagtgagacttctaaacatattggatgttctcatagttgacgcctctccatttgatgatgtacaatatcatcatgttcctgaatatttatccctatcttttcatgattcgtccacaaaacactgatatcctataaaattagtatcattggagatatctcttactcgaggcctgatttttagttcaaagcttatcttatgacatctttcacagtatgactcttgttccgctaatcagaacatctctaacggatctttatccctactatcaaaaacttttttattttgtgctttctaatataccaaactatccatggaaatggaagttgatcatatttttgaggtattcttcaaaataagtgatccataccgtttttaaatggacgcgagacggaaaatctctggaatcgcatggatctttgagataacccaaatctacctaggcgggtcgcatacgaatatcggatgattaattaccatctttagcgagccacatatctgccgaccacccactgatcatattcctaacaaaagacacaatactcgcctatgatccacataaacttttgggcagtgtgaaacaaac

SEQ ID NO: 36989 - DNA, 2206 bp, Arabidopsis thaliana landsberg
ctccgatacttcatattctcgctttcccaggagcaaagttgtgagttccatacattcataactaccaacgagatgatgaatcttgttctccatcaatgacatccttctcacaacattccaattcttaatctttggaatttcacgtacgccaacacctgcacgcacaatgaaggcctccttttgtattcccagttcagaagcgatccataaggccatttcacgaacaacgtcatgcatacacacagcacgtcgtccatccccatcatcccactccaacaacaatgatgcgcgaacaagacaacctataatctcataacccttgtcctcagccttttctataccttcacttccatctataatttcctcgcatatccaatgctctatcaaatcttctttcagaattttcgcatcttctggatataaagcacaatacaacaaactcgatttgacttgctcccccttaaggttatcgtagctatacttcaaaagcggaagaaccttatcctccatgcctataaactctgcagcgtatgaattcaaaacatgtatagcgtgacgccattcttgtatcgtccttttgcatgacatggtctcgcctatgacgttgagcgccaatggtaggccacaacattttttcgcaactattcttgcaagttgggggatccccggatcgcttccaagtgttgtttgtccaaccttcttttggaacaaatcaaatgccacattctcttccaagcattggacttccattgggtgttcgacccccatgcgtgcacatacctcttgggaccgagtcgtaaatgccaatttacgtccttttttggttcttggatccggaactccgatctcagctaaatccaccttttcccatatgtcatctaaaaacaacacaaaactcttttccctcaagatattgtataaacaaatccccttttgacttttatctttctgtgtccactcatctccaccaagaccaagcttttgagcgatttcatcttgaaccttctccacatgaaactcttgagacacgacaacccaaatgccaatatcaaatccacacttatccttattgaacatattgtagagctgagtgagaagtgttgtcttccctacaccgcccataccgtacatacccataataccaactccatcttccatgagatgtttccctgccttatcgagcattgtgtcttgaccaacgattgtcggttgaagaggtcattcctcaaacacagatgttgaagcttgctcggttatcactccaaaaacttcacctttgagtttctcaacctacctcaacctcaagaaaacacttttcccataacgatagctcctcgttaaactcttagagcaaaaccggctaagacacagcctttgaatttcaacatttctatctctaagaagagtaaagattatgtcttcgacagtcgcaacactatcaagccatacctggaattcggaaagcctttgtagacctctagcctcctctcttttgagccttctttccaaatcatcccgcttagccttgagctctttcatggttttctccaaagctgcgagattcttctcgagattgtgagtataacttactttcatgtctagccattgagagactttatttacacacggatcaaagggtatcgagagagaacaacccattttacagaaattgagagatctgaaatttgaaatttagtaatctgagcaaacgtactagagacgatgcaaataattattgaagataagacttacgttttagtccactcgaaataagatcaaattctctcgttcgagtgagtccaaaatctcgttttggtccactgacgaccttctcagaaactttgatcgtttggtatatcaataataataatttcttctttaataaatctcacattcacacccgatttggtgaagcatggcggctgttgacctttgctaggccacactatttacaaaggatccattcgctagtggccgaatgacctgacgttaaaataactttcctctcttacatttgtaaactcaattgtcgaaatataacttccttgggaaaaagctaacacaactgatagttttgctttcaattgtttccaaaaaaaaaaagagagagaaaatcttttagcttcgaaatcaccggatactaaaattgtaaaatcatcaaaacttttaatgacagagttacattggcatgccttgaattgtcgtt

SEQ ID NO: 36990 - DNA, 2957 bp, Arabidopsis thaliana landsberg
aaagtcagggtcaatacataaaaactaaaaagggttaattcggtaattatgattcagttcttattgctcttcttctccccacactgagtcactgactctatcactctcagagattaggatagaaataatcagaaatctccgtctattgtcgtcgtcggccggagattaattattccggtgacgtttagttggtttttcttcattgtgcagcaaaaagaaaaagagtgagcgagagagcttagaaactgagcccaaagacattgactactggtactctgttcaattcaatcgagatcctccgagattcgctctcaaatctgagaataacaatcaccattcccgcaggtaataaagcttctattactttccggaggtttgactcgttgttgactttcaacaatttctggtaacttgaacggcgttttgcagtaagagcggcggcgatttttgcaagaagaagaagagaggagaaatggcgaacaaggtttctaacttctcggatctgattcaacgagttacggcgtcttgtttgttgcatccactctccgccggccggcaagatctcgctgtgaatctgccgggaagagtacgatactgaagaagaggagaatgaggaggaaggtgagattcagtacgaagacgcattggagaaggagaatggttaagattagacaattagggctaagaacggaaggaacggtgtgagtgttgagacggtgcaggagatggagatggtgatggacgaagttttcacggcggctgctgctatgaagagagcttacgttgcgcttcaggaagctcattcgccgtgggatccggagaagatgcacgatgctgatatggcgatggtggctgagctgagaaggattggttcattgagggaaagattcaggaggatgagaggtaccggaagtggtggtcgaaggaaaaacgacgccggaagaggaatgctgagagaggccgtggcgccttatgaggcggttgtgaaggagctgaagaaagaagtgaaagtgaaagatactgagattgagaatctgaaggagaaagtcaaagtggcttctatggccaacggtaacggaggcaagaaacaccgattgctttcaagccggaaagttaactgtaccacacagattgctgtgtctccggtgccggagttatttgagatgacaatgattcaggtgaaagaagcatcaaagtctttcacagggattctattgtcactaatgcgagctgcacattgggacattgcagcggctgttcgatccattgaagccgcttcagcttcatccgacggaatgtctgcttcttcgtttgcatcctcggttcagtcatctgtcccgaaccagcacgcgaagtttgctcttgagtcttacatctgtaggaaaatcttccaaggatttgatcacgaaacgttttacatggatggaagcttatcttctcttatcaacccggatcagtaccgtcgtgactgctttgcgcaattcaaagatatgaaagcaatggatcctatggagttgctagggatcttaccaacttgccattttggtaaattctgctcgaagaagtacctttcgatcattcaccaaaaaatggaagagtcgttgttcggggactcggaacagcgggagttggttgtagccggtaaccacccaagaagtcagttctatggagagttcttggggctagctaaagcagtctggctgcttcatctcctggcattctcgctcgacccatccccgagtcactttgaagcaaacagaggagccgagttttactctcagtacatggagagtgtcgtgaggctttcggatggccgtgttcctgcgggtcaagttgttggatttcctgtttgtccaggattcaagcttagccatcaagggaaaggatcaatcatcaaatccagagtttacttggttccaagggcttaaaaaggtttctttgagttcactgtttcttaggaatatattatgtcctcgtgtgttgtttaagactttaagacaatctagcttcggaaaaatcttgaaataaagagaccgttcgtataaactgttcttgcaaagaattttttttggataaaatgtttctatactaatctaaataacaaagctcacataacatagaaagtatatatgttttaattctaacaattcaaagttttatagaagggattatgtaataaggtatggttttcgactagggatctgagaatcaatcgtacaagacttctcttagaaacacttttttcacctgtcacagagtgaagatgaaacagagagaaaaatgttaaaaaaagaagagcaatccaaaattaatcatcatcgaaaagtaaatgagaatgagagaagaatctaatttacttgttctaatgtgaggaacataatggcattccaggttcctagccgtgtaaaattcgggagaaatcctttgtagaatgccataatcccctttaaatagaccaaaaacagaacattcatgattgcatcaaaagagagagattggttaaatgtgaactagaaaagaatactaacctcggtcttcatcgttttgatgaagcaatcgactgtgtttcggtaagtagagtctcccatcattctagatttcacctggaacaacatataaagaagaaccatggccgtttagggcaaataccaaagtatcaaccattttgtttccttcggtaacaggttaatactaatttctccttccgtagagcattactatctaataatgctgcatttaccaaagtcaaatcaccaagcaagaggtcagaaacataaaatgtggaagacacaaacatgtgagacgctacaccgatgtcactttcaaagtagagctatgtccattctaataccttgtcctttaaagagatattctgtgataaatacctactctttgccacaaatcaataaatagaactcagtcagtactaagtctcttttggtttcgttctcaaaaag

SEQ ID NO: 36991 - DNA, 3060 bp, Arabidopsis thaliana landsberg
ccagttctcaattcactccagtccattggcaggctttgacatcccttctagttctaacgtacttggcagttcaatccattttcctatgggaaagcttcctgttggtgctgaacatgctggtcttgttgtcccctcaaatcaaactcggatgaaagtagaaaaaactgttcttaagactcatgatatagtccggaagacaggtgacaaggaaactctcagaggagagtgtcaaacagaagcatcttctggtgctaagactgtttccttacagctaagttgtaacactaaaaacaattctccatattggaagaatgaagagcctacagaactgaatttgtcattaagcaagggagtttgtcccgctcataacacagattctacttctaccaaatctggcaacagtggcctgaacagagaaaattgggatttgaatactaccatggatgtttgggaagatgctctagatcgcacaagtggtgcattcttaaacagtaacagaagtcttcgtgacatagagagatcaagttgtcgtgatacgactgctattacaaagtctgtttctgaaagacagaaggaaagtgtaggatttagttctcctaaggtgacgttgatgcagtttgataatcatgttaatcccacatgctcacttagtctaggcctcagttcatatcctcctattgagaaatctccttctctaccagctaccacatcagaggcaagagctgggaatgtgtgttcagtgaaccttaggactgtgaagtcagaaatcattgaagagagtgttaggcaggcaacagagagtactcaagtttctccaatcgggctatctattaaaggactgaaacatgagggtattggcagattcagccaaggaaatagtccctcatttggcattttgaagacagtggttcctatatcaataaaggctgagccaaataccttctctcaatcagaagttttcaataggaaagatggaatgttgaatcatccccataccccaataatgcaatcaaatgagatccctgatttacctacaagttctacgccatatcagaaggataaatatttaccttgttcaaatggtatcagcaatgcaccaatgcccttgagtggaatgacaataattccaggcgttcagagtgatcctgactgtacatcaaaagaaaattcgggccagagtagcagtttagctaatggtaaattacgcgaagtgctgaaacatggtggagtttacacgacttattctggtcatggagatcataacctcaatgcttcaggtgtgaatgttacttccttgactgaagagaaaatactagatgattgcaagccttgtatatcgaaagaactcccttgtaattctcgtggaactgatgaactttccagaaatgatgaagagaagattactttacctggtaaggagctagaggaacagttatacagttatgggtttgaatcagatcgtggttatgatctatctagagtaataaaggagcaagttggcaaaagaaatttgtgcgatgacgggaaggtccaaggaccagctgccgttttcacggaaagtaatgaggttgcacatcctgagtgtggtggttctgaaactgaacaaaggaacattaatgttccatgccatgtccactttcataattctaaccatgtggaagaaaaagggagtcaacctgcacttcttggttatacaggtaataaacatattaaagcatgctctacctaatcatcaattaagtttaataattatactgttgatgaatcatgtttgaaattagtcgaaatggcaagtactgaagttcatattaagaggcattctccagaacttcaaagtagaatatttgatggatcaggtgaaactgaaggccggatagttcaagatggtgaaggaacgtcaggtgtctatacagtgtcaggcggcattgaaaaccctgaaatagtagataacagtagtccagtttcactcaaggcagaaatgtctactattgacaatgatcctcctatggagtgcagtgacggtagtcagagtcgaattataaacttaactcaggttaaatctccagttaaggcactaaatgcttcaggcagctttgtgccaccccgaatggaaagagatagatttcatgatttcccactcgaaccgcgggaatatactttcagagggaggtgatatttctgagcgcttttcttacctccatcctttcttggtttcgtgctttattgaaagcttgtgtatttaatttctccactgttgtttcttttgctagtgatgaatcctgccaattctcgcgtgagaggtaccatggcagaattatgagaagcccaaggttaaatttcatacctgacagaaggagattacctgataacacagaaagcaatctgcatgaccaggacacaaaaagtaaagtcctatctaagtttttttatggaaaaacaaagctcattgtttctaaaattcaatatgactctcatcttgtgaatgcagaatttgagtttgataatcatggaaacactcgtcggggtggtgcttttatgagtaattttcagagagggagacggcctgcaaatgatggagttacaccatatgctcactcctttccgagaagatcccctagcttttcatataatagaggaccaacaaatatagaggatacatctgcatttcacggatttagagatggtgaaaaattcacaaggggattgcaatgcaacaacacagaacctctgtttatgaatcaccaacgtccatatcgaggtcggagtggttttgctcgaggacgaacaaagtttgtaaacaacccctaacgagattttcctggatttcgttcacgatctccagttagatcaagagaaagatcagatggttcatcctcgtctttcaggaatagatcacaggaagagttcagtgggcatacagacttttctcagtcgaagatcaccctcaggttacaaagtggagaggatgagctcgcctgaccattctggttattcaagagaaatggttgtcacaagacacaattcgccacctgtctcgcaaagaccatcgaatgcggaagg

SEQ ID NO: 36992 - DNA, 1585 bp, Arabidopsis thaliana landsberg
  unsure (1)..(1585): unsure at all n locations
aaagaagatcctaaagtcacctatcatacaccaagcttcttttctcttgagatcaaaagtacnnnnnnnnnnnnnnnnnnnngaggtaagactggccacaggattatcataaacacatgaaacaaaccatctcttactaccatgagagatctgcaaatcaattagatgtttgtcttcaaaacggaaatctaaatccagattatctttccaaaaaattgaccaacctacactctttcctttaggttctattgtacgatacttatcataaccaagccacctaaaaactttcaaaacaaaatcacctttattctttgtctccatgaggaatagaatatccggaaaatgttcttttcgcatttctttcaggtaccgaattgtccagggattcttcaaaccctgacaattccaacctagaatgccttactgatccaacggcggttcacttggaaccaccgtagttttatctttctttagacaagcagaagattctgaccatgtaacatggacttttctcttgaacactttagcaaaccgattctcagaatcatcaaaactaacttgatctccctccgacccatccgatttggatttagtttatcgtaacaaagtaattttccttttcttaggatttttctgcttcatacttaaccctgaagaaccagcatcagacatgtttgctttaaaacccgtagataaatcaaaaccagaaaaacctaagaagagatcatcattaaactccttggagaagtccgaatttgttttgatgaagaagaagccttcatcgcatcagctagtagtataggagtttcttgcttggagatagctttgcctccattatttataaacaatcctttttgtttatttgtgactttagaaacctcactagaaactaacacatgacttggctgaagaaacagacacaaactcttccctcatgagttagcctttgacaatgaaaacatctaattctctcataatcaaaggttattgcaactatttcaccagtaggaagctgtacttcttttgacttccgaagcggattcctaacatcaaagagaaccctaacacagacataatcctgagcttgagatttttcaggatcaaaaagtactagtaacaccttcccaacacactctgctacttctttaatcgtctcctttgtgtaatgataacgggaatattacgaagacgaatccaaactggaatgaacatcaaataatcatctataggtttttcaatccatctttccattacaacacaccaatcgtcttgtgtccaaacccttgtttttaagatttcatctaaatcaacatcagagtttaaaataaactgaagtctctcctgcgataaggcaataccccgaactctagaggataatctccaaattctaggcatgtctaatatctaattagccattctttgatgtgtaggattcaaaaaccgacccaaaatacaccactgatttctctttatagaacaaaacttcgaatgatttgagagaataagaggctccccctctgcacttacatatcttaagcgctaaatgtatatcaatatcagactttataaacaaactatcacagac

SEQ ID NO: 36993 - DNA, 3868 bp, Arabidopsis thaliana landsberg
atatcacctatgaacatactctaagtcactccagttaatccattttttagtaggatataatatttggagggtatttgcggggagtgttaatggctacaatcctaaaagcacctctaaccttaaattgtcttgctttctgacaacggttttacgaattactcgtatccattatattctagttacacttgttatgcttgtttattccaatcccttcttctacactgtttatttcgtagtcacaccctaatatgatagtgataattatatgcaaaacataggccaatgacaatttcaggtcgacgtctccacgtcggcaacgcgtggctctggattttacaataataataataatatatcgacgtaagttttgtataactgaaagacaataatccaattatttgattgaagaaaatagggtgtcgttgtataattcacgtttggttaaaaaaaaaatgttctttttggaagtaagtcattaaaagtggaaaaaagtcattaaaaaaaatcaacaatatattattgtaaattttcttagcacataaacctttgcccaatgtcattttcgaactgtaatcatagacttataatagtcataagtttgaatgttggttaataagacaaacggaaaaataaggtgcacatattatatagttttacttaaaaataacatcgtgtgtattctatacatcatagacttttttttggtgaacgattctataaagcatagactaaagccttaatattattataatgtttacttgttatggtattcccgttatctactgactactgcaacttaattagggagagggaatctctcatctactgatctagagtttctagacatatatagccatataggtgaaacttgaaagtgagaggtcgatgaaaccgtagacgaccaataatacacatggcatgcggtgattggcttgtacttctaagcaaacgagtcatgattggttttgactcttatgcgagacacgcggtcagacgacctttcggacatcccgttcccaatgtttccgtttccggtatgcttgaaacgcgtcgtttgggtcccaatcttcaatcgaacaagaccggttatcgatcctctaaactaattgcaaaccaaaccaaggaagccggtaaggaggtaactgagagaagagaacaaaggctataaacatttgtgggcttaaatctttctcccataggcctaaacagagaatggtcctttacttaagtgtttcttaaaaaattaacgatggttgactcactcaattgtcatcaaattaaggttacttaattgattggtctttgattaatggatttatatctgcagttacgtgcccacttgtccattattgatctcttttgaaccacagtgaaaagctaacaccatgagagttttaaagataaaactcatttgtacttaagcatttataccgaacaaagagagaacaaaagaaacagatcaacaatggcgaaattaaatccttccaacattggactctcactgttactatctacgaacctcggaaactatatcaccgatctagaaacttatggtcataagaactaaaccaaccgcaccggaccgggaatcactctcaacctattaaaaattggatgaacggtatgtaacgtaccgatcttgatctggtttctttataatctctaaaatccatcgatgtgtgtattcattcatcctcaaaactaacatcttttattctcttatggattccgttatgttcgatgaaatctaattcgaccaacaaaaataaaaatccagatcctaatggttagttctctttattcatatttctaaaaatattattaaatcaaatatacaaaaaaatacaattatacgtatttgtttttgttgggtacgtaggaccaatgatatacaaaggaatataccatcttttttaccaatataacccatacggtgccgtttgggatgtgagaatcgtgtggggacactccacgtcagttgacttagtcaactggatttcacaacctccagcttttaatccatctcagccgtcagatatcaacggttgttggtcaggctccgtcacgattctaccaaacggcaaacctgtgatcctctacaccggcattgaccaaaacaaaggtcaagtccaaaacgtcgccgttccggttaacatctctgatccttatctccgagaatggtcaaaaccgccgcaaaatcctctaatgacaactaacgcggttaacggaattaacccggaccggtttcgtgatccgaccaccgcgtggcttggacgtgacggagaatggcgagtaatcgtcggaagctcgacggacgatcgacgaggattagcgattctttacaaaagcagagatttcttcaactggacgcaatcaatgaagcctttacattacgaagacttaaccggaatgtgggaatgtcctgattttttcccggtttcgataaccggatcggacggtgtagaaacgtcgtcggttggtgagaatgggattaagcatgtgcttaaagtgagtttgattgagacattgcatgattattacacgattgggagttatgatcgtgagaaagatgtttacgtaccggatcttgggtttgtgcaaaacgaatcagctccgaggttagattacgggaaatattacgcgtcgaaaacgttttacgatgatgttaaaaaacgaaggatcttgtggggttgggttaatgaatcgtctccagctaaagatgatattgagaagggttggtctggtcttcaggtacatttgaatttgccctacattataattcgcttactgtgaaataactttggtttcagtttttttttttgtttttttatgaccactcccgaccgaggacttaaattaacctgtttttgttatcttgatttggtaagtcatttccgaggaaaatatggctcgatgaatcaggaaaggaattgctacagtggccgattgaagagattgagacattgcgtgggcaacaagtcaactggcaaaagaaagttctcaaagcaggatctactctccaagttcatggtgtcactgctgcgcaggtatgactcaaaccttattccttaaacttggccatatcaatggtgaatccgaatctagtattgggaattgacctaaaactacttagtttttcttttagcaaagtgtgtttcttgcttattttgtttttggtattgagcaggcagatgttgaggtatcgttcaaggtgaaggaattggaaaaggcggatgtgattgaaccgagttggaccgatccacaaaagatatgtagtcagggagatttatcggttatgtcgggtttaggaccatttggtttgatggttttggcatccaatgacatggaagagtacacgtccgtttacttcagaattttcaagtcaaatgacgatactaacaagaagactaaatacgtggtgttgatgtgcagtgaccaaagcaggtatatatatctgctctatactaaatcaagtaaaagatacgtttagattatcttctcgtatttaaataaaatgctaaagagatttttgttttaatggtggtattcacagatcatcgttgaatgatggaaatgataattcaactctttggtgcttttgttgcgatagacccttctcacctaccagtttctcttaggactttggtaaggttttagtatatgacagctattccgttaaaaaagtgtcatgtatcaagctagtgagtatatcctttatatacttgatacatatgctatggaattgatcagtgttttcttctttttctttttgtggattgatcactcgatactaaaaagttatggtggaggaggcagttcatgtataacctcatgagtgtatccacatttggctatcggagaaaatgca

SEQ ID NO: 36994 - DNA, 2204 bp, Arabidopsis thaliana landsberg
  unsure (1)..(2204): unsure at all n locations
atacataatcaatacaatttatttatacagcaaactcaaaattgacatatgatctaacacacatgtaagcaaatgattaagacaagtgtacgtattaaacagatgcactatttttattttggtcgatacccatgaccatgaggatatctcttgtttctttgtatttttaaaacatcacattttaattattaagagaagaaagttgtttcgtttcgtagactataaaactcaacaaagaaaatttccggtcatctgaatgtattatgcgttactcatgatcgtcaaaaagtggatatggttaaattcgcaatccctataaagcaaagtctcggtctccaatgatcatctttgcgtacttatattgcagttcatcgatcattttttccaaaaaaaatcataattaattgtctcaacatgtaacctaaaaagattacacgagggcaccaaaatatgcacgtcaataatttagtgtcaaaaactttggtaaaatattggcatcaccatcattatttctcattctgtttaatgtatatgacagtttatatatataacccttcttaatcaatgaattttatagatcttattagagacttagacctttacatctcttcgaacttggtctaaaagtgggtcacaatactttatattgacgttagaaatttctacataacttgaactatacatgaatttagattatacgatagaagataatatattcctaatctgctgaacatgattaatcaatatcatattcttcttttttatttttcattcttaatattctagaattttcgcccaccagtttttctctttatgaaattcttatttaagtattttttcgcctaccaacttttttattttcccttgggtctatattttgtattaaacgtgttatatatcaaataatagtgcatcagaaggtggcttttggcaagcaaaaaaaaaaaaattaatactagatgttgtttgtagttattgatataatgacatgtttgtatgtatttgacctttaagaacgcctccataagctatttgatcatttcttccttttcccatgacattctccgcggtttttataatattaaaatgtccaacaatttgaaattctttattcttaattggtcatccctatgagtagattggtctcatcaattatttataccaatatataattttaatcatactataaaacaaatttttgtttcaatggcatttgtgctatatatgacaacttaattttggattttattgtgttgaaccataaactagtcttggatcatgcagtctttcactgattttttaaaattgttttatttccggttcaacctataaaattgttaagtctaaaataaagatcacaatgagctggacctcagataatataagactccagcgcgccagaaataatacattgaattttgtttgagtcatcatatacactaacatagaaaatatttggtgtccaataacttgatttaacttaaagcagtttctcttttcatgctgattaagacataaattccacttaaggaagttgaacatgtcactgataggatgatttcaactaatcacgagtataaagtaagacgaataattagttattttaccaaacatgatttaaggataaaggaatcttgtgatgcaagaaacatatataagcctaaaagatgaatgatgggtttggcctaagtccctttctcgttctcccacacgtctccnnnnnnnnnnnnnnnnnnnnntcgaatacatcccaagacttagtaactttctctctcttaaccaacaataccaaattacgtctctctcttccaaagaatagtatgctaacgtctctctctaaataaatactctgatttcaaagctaaaacttacaacaacacccacaaaacttctctctcttatctcgtctacttgatctctctactctctttcctctctagctacttctctcccttacgtctccaaggagatagattgacaaatctctgtccacaaaggaaaaaagctcctctgcatacgtattctctcttctatgtccttcatttatatgacttgaataacaagctaaggatgaggcagaatctgaaacaagagtcacagatcaaaagtagactaatctaagaagctatttccttatgtcttccgggttaaaaaaatcttggggaatttgtcttaagagatcgaaccctaacttatctatctta

SEQ ID NO: 36995 - DNA, 2021 bp, Arabidopsis thaliana landsberg
catttggcagtggcgaaccatcaatgaaatccatggaaacatcacaccaaatcctctctggaataggtaaaggctgcagcaaacccggagaagatgcattgtcgctcttacattgttgacaagtgccacagctccgaataaaagcttgaatgtctttcaccatacccttccaataaaacagccccttgacacgttggtgtgttacttcccgaccagaatgtcctcccataccagagcaatgcaaccattgtaaaatcgagttccttattgcattgttcatcggaaccacaatcttgtttttccttcacaaaacaccctgaccccaactatagtggttcttagcatcaccattcagtttcagtgcagaaatgatactctgaacttcaacatatgcatcataacctgcctgaatatccttgagtaagtcacattcaataactgagagagccatgtgtagaatctccgacccttctactctggacaaagcgtcagcagccaaattctccttaccttgtttatattggatttcatagtcaaattctagtagcttaggtaaccactgctgttgaataggagtattaagacgctgctccagcaggtacttcagactacgttgatcagttttgatagttaagtgatttgaaatcaaatagtgcctccactttctcacagcaaagattactgcaagaagttccttttcgtaaatggataagtgcaactgcttccctttcaattgtctgctgataaacgccaatggatgcccttcttgcattaacactgccccaatgccttgaccacacgcatcagtctcaacaataaactatttatcaaagagaggtaaggctaaaactggcgtgttacacatcgcatccatcagagtttgaaaagcaacttgagcttccgcataccacacaaaagaatcagtttttgttaatgcatgcaatggccctgcaatagcaccataattcttcacaaacctcctgtaatagcccgttaatcccaagaaccctctaagttgtttaagattagctggactcggccattcctgaactgctctaatcttggcaggatcagtagcaattccttctccacttatgaaatgacccaggtattcgaccttaggaacaacaaatgcacacttgctcatcttagcaaataatttatgttctctcattaaagcaaagacagcctccaagtgcctcttgtgttcctctgtagatctactataaatcagaatatcatcaaagaaaaccaagacaaacttcctcaggaatggtttgaaaatggagttcatgagactctgaaacgtggctggtgcattagtgagaccaaatggcatcactaaatactcgtaatgaccactgtgggttttaaaagcagtcttatgaatgtcatccggatccatacgcacctgatgataccctgctcttaaatcaatcttaaaaaacaccacagaacctcccaattcatccattaaatcctcaatcaatggaatggggaacctatctttcacggtcataccattcagctcacgatagtccacacacagtctccatgatccatccttcttcttaactaaaaccactggtgatgcgtaaggacttgaactgacctgaattgttccactagacagcatctcttccacaatcttatcaatctcattcttctgatgtatagcataacggtagggtctctgatttactggattagaaccttccatcagttaaactttatggtcatgttgtgctcgaaatggaggtaactctgttggttcaacaaaaatatcaggaaaatcattaaccacagtctccacaaatgactcatctccaagatcttctgtcaatgcattaactccgcccacacattgttctgcttcatcttctgaactagactgcatatttctcacatataacatagcaatctgtacatcctcctcctgaagtttttaaagtttctgcgccttcacctcacgcacagatcctctttaacccatgtaacagacttcttgttttgatactgac

SEQ ID NO: 36996 - DNA, 3749 bp, Arabidopsis thaliana landsberg
atactcacaccaggaagcaactctagtatcttcagctttagctctgtcggtaggagcatcaaacaaggtggagattccaagccagccttatcacaaagaccaatcaacaacggtataacaagttcatcttttaccattctccacaacatgaacacttcccggtagtagctagaagagccctgcttctcaaacttcaaagtatccacaaccaaatcaataacaggcaaaaacctactcttatcaagagaagtcatgtgcactcgcttacaagacccacctagagttccgtaaactacaagcctagggcctatgttctgaaacctcacagtaactgactcgactgtattagtatccttacgtgtaatcagctcaggtagagtataccttagagatacagaaagtaactcctttgaaaagctaaacttatcagagccatgattcaacagcacgaatccagattctaacataacagcatgtactgataaaagccaaagtagtcaactcactagtatcaccagatttctcaagcagtatatttttcaagaagaatggttcacttagccttttgcttccagctgcagcgagctccatgtcaagctgctcaacatccatcggctctggaccctccatacccgaaatatctccctctggatcttctacggaggtattaggattagatttcgcttgatcggggacaacatcaacctctgcgaacccaatcgaatcatgaacactcgtctgattactctccgattgagaagctacggtttcagaatctctcaatttccaattcgaagattcgccagcctcgagagagaagtaaattaggtcaccggatattaaaccaagagatcggagcgtatcctccggcgaaggcgtgatgagctcgtctttacgattgagcgagagatgaacggaggaaggcaccgtggggttgatccgtcgccggagatcatggagagtgtctgcatcggccaattcaagttttagggtttctctcgtctcgtgatgtctcaatcgtagcttcattatcgggctactacgatcttcttcttcgcctcacaaagtagagtcatgaaatgtgttgcgtacacatacagataaaaggctgaggcggttaccagttatgggccgtatttgggcctataaacaacttattatagtatatggggttttcgtggataaaggatttatgtgtcaatggaagattgatgagattgagtgagaacctatgaattggacatctcataaaacatgaagttaatagaccaaatggttcgagtttctgttaaaaatggttaccaattgtacaatcactaaccaaatctggctctagcatttgcaacaccgttagtaacataactttcaatgagcaacagcgatattattacctcaaactaatttgtagttatggtttggtatgtgtgttagcgcttttgattataaaaaactaaaaatattaaaatctagaaaaggttacaaataataccttcttgaatgtcaatcggattctgacttttttctatgtcacataaattaaattttgtatttgcggccaaatatattaaatggtacaaattcagaacatcatatattcattattaccatataaataaataacatcaaagaaattttttatctcgctacagttttcaccccataaaaaaaatgcaagcggaattgagcaagcccttacgaacttgtatccaacattattatcttcatatggtaattcatttgtgtgtgttcatatagtaaaacgtgtaaggctgccttcaataaactgaagcatatcaacaatgtttttccatcaaacgaatttcggtttttaaaactcctcgtgttcatccaaacaataatttcggaggaaagaaatcatgacaagatgtcaagatcttaccaagtccaaatagttaccttgtgagaaataaaaattttgcaaagtatagaatgagctactctaatgtattttgatgataaattcatactttttagatattaaatatatagaaatcaattcctatgaatctgggaaaatagtagtaataaataccataaataactatttgatattatttttggttatcacaggtggtaactagtttgaaaaatggaacataaatactcacaacaacctaccattttcaaaaatgaggtggcgaatccacataaaacaaacacaatttcacatccaaacattattttgcagattttgactgattactaataacaaaattaaatgttttaaatatagttgactaatagactagaaaacatatgggattagcgtgggatgcgtacaataaaaacaagaagatccatccagattagatgtaattatacaaatcaataaaataaatcacgcatacgaatacaaaatacagtacaaagacccaccaccaaattcgaccgttgctcacaacgttccaagaaaaaaatccccaagtattttcttctttattcaaaaaagtttcgatttttattttcaattatcccaatcctctttcttcttcaactacacttacttaccgttggatctctccgacttaagtaacaaataaaaccctaaattcttcttcccgatctaaacccatttcttgaatttctcatctgaatcacaaagtcttgatcttaaaagctcaacaaaaatggcagctttggcacctggaattcttcaaaagctaatccaaggtatgaaaacaggaattaaaccaactagagagcaccgaagctctatgttacaggtcacagatatcgttcccattgatctcgacgagaagtctctggagccgaaacaagggtttctcatcaaaatctctgattcctctcactcgatctacgtctctctcccttcggatcaagacgacgtcgttctcagcaataagttgcagttgggtcagtttatctacgttgatcggctcgaacctggatcccctgttcctgtcattaaaggggcaaaacccatacctggccggcaccccttgcttgggacgccggagacattggtggttccgaaagaaagaactgatcaagagattgggtcgaagcctagaagaggatcttggggacaaaacgtcgacttttcttcgtctccgtttgttgtgaaaccaatggcgttggagtttgaccattccacgccggcgaagaggtctgtttcagctagatttgcagcgtctccgatcagaagaggtggagtgagatgctcttttggtggaggggttttggggaaattggaaggagagagtccggcgacggcgatgctaaggaagagttgttttgtttcgtcggcttcgaagtttccgagaagtagaagtgtttgtgacagacaggccaaaaagaacaatgcttctctttttagtcccttcaaatcctctctaggtatattttgcttttaacatttctattgatcatttagtgtgtttacaatgatttattcacgacaatgcttgtttcttgatttcagaggctcaagaagatgttgttcccttgtctacctcgaagaagataaaaccctagaaagataccaatttatcaggaaggctcaacatactaagcaaggtgatttgaactccatttgtgttcttcattgaagtttgatgcttggaataatatcatatctttcttgaaagatcaaatagttccttaatcttctttgtgttactttggtgacaggaagcaactcagcttttggagggagcttacaaaggtgcccttcaggcattgcgagaagctacaatcaccgaaattgt

SEQ ID NO: 36997 - DNA, 2567 bp, Arabidopsis thaliana landsberg
gacactcataacatcataacctgcaatcaatcccatagtaacgattagcgtcgagctgaaactaagaaacatgagccccaagaagaaccaacttagcagacaaactctaaaggaaaggaaatcccaaaaaataacgaatataaaggctcaacaagcaacaacccaatagaacagataacaatgatgtataacacgatattctagatttctagattttttttgcattagtacgcaacataatattaaacctaatcaacaaaaatatgccaaattcctaaaaatgataagaatgtctcttaaatctcgaagttaagaccctaattaacttcattaacgcttcttaatctatatatatatagttcttcaaaaatctttcaacgcattaattattcaaaaagtaaacacatggaagccgtgtagttcacgcgccggtcaaatcgaaaccgtagaaaaaagcaaagaaaagaagacaaaaacggacttgacttatagagaaagacttaaacaatggcgaagacgaagacgatgagcaacaacaacaacaacacactagtaacaacagtagcatcagcttgaaagagagaactaaaacctataaatcgagagagattggtggaagatttttcaccagatttcatgggagaagaagagagtcgaattggagacgagctttcgattttggttctcacggcggagcgactccgtgtagctgtggatgaagctgaatcattcaaaacagagtgtggcgaggttggtaaacaagtagatcggcttgctcaaatgcttagaacacttgttcgattcgtctctagttcttctcaacaagtttatgatcggccgattcgtagagttatcgtcgatgttaagaagaatctcgagcgtggttttgctcttgttcgtaagtgtaggagacacaatataatccgacgagtttgtattatcatcaacgctgctgattttcgtaaggtgattaatcttctggaatcttctaatggtgatgtgaaatggattctgagtgtgtttgattccgacggagatggaagttttggtggtggaatcgtgatttcgcttcctccgattgctacgaatgatccgattttgccttgggtttggtctttggttgcgtcgatacagatggggaaattggttgataagattgatgcggcgaatcagcttggttctcttgccggagataatgatcggaataagaagattattgttgatgaaggtggtgtttctccgttgttaaggcttttaaaggagagttcatcggcggaggggcaaatcgcggcggctactgcgttagggttgttggcttgtgatgaagataaggttaggtctattgttaatgaacttggtgttccgattattgttcaggttcttggtgattcttctgttagagttcagattaaggtagctacattggttgctagaatggctgaacatgatcctgttgctcaagatgagtttgctaggcagagtgtgattaagccattagttacgttgctttcgcttgatgtgtttgttgatgatattcatttgagtaagcataatagtattcactctcttgttcagatgaacaaagaggttgagaaagatccgtcttcgaagctttataggccgcttaagagttctaagtcgaatgtgtatcgtgacattggtggtagaactgggaatttcaagaaggagagggataatgagaatcctgaggtgaaacatgagcttaaggtcaattgtgcggaagctttgtggatgcttgctcgaggaaatgtagcgaatagtaggaggattacggaaacgaaagggttgctttctttggcgaagattgtggaaaaggaagttggtgaattgcaatataattgtttgatgactctgatggagataaccgctgctgcggagtcgagtgctgaccttagacgggcagcattcaagactaattctcctgctgctaaagctgttattgatcagatgttatggataatcaaagatgtcgatagcccgattttaaaaatcccagcgattcaatctatcgggtcattggcacggacattcccggcaagagaaacgagaatgatcaagccattggttgagaaactcggtagtagcaaccaagaagtggctataacagctgtaatttcattgcagaaattcgtatgtcccgagaacttcctctgcgcagagcactcgaagaacataatcgaatacggagcaatcccgttattgatgaaactaataaggaacgtcgagcagcaaatgcagttacagtgtctagctttactctgctacctttccgtgaatgctagtaaccaccaacagttggaacaggccaaggttttgacggtgctcgaaggtgcagaacgtttggcgggtctgcagaatatggagttgagagaactcgtgtcgaaagctatatatcagctaagtctatacaatgcaggaagtcacagtcaaatgctatcgtatgttggtccttaaagcaagatacagtttatagtgtgttggattcatatcgtacagacaggaatcttcattgttagatttacagagaaagagccaaaagcagaatc

SEQ ID NO: 36998 - DNA, 2818 bp, Arabidopsis thaliana landsberg
  unsure (1)..(2818): unsure at all n locations
tttcacaggatatctccctacttcttggttttaagttttcaattaacaatcctcccaatatgctctttctctatcctggaatcttctgcagccttctttgttgtccctggtctatcgatagaactataagcctcaccatctcggcatctttttaacgtctcaccagcattataatcagtatcatggtactcatccctttctgaaattcttcctgatttaagctcacctgagtctaacactctcaaggccaaaggggcaactgattcaactagtgaacctttactttcgcggacattatttttgataatttcagagcccaaatccttacacaaactcggagaggacagtgtagaaggtagatgagaagcactatctctaccattttcttgactaacacttctttccttatcacagctttcactactaaaaggcaactctttttcatcacaacttgaacctttaagcctctttctctttctaacgttctctccacttgattccattactgcagcttctctaagtctcatacaatctccactttcctcattttccttcagtttcctctttctgtcatcacgttcgccatgcgaggaagccttagcaaaatccttgacattttcggctaaggcttgagtaatcatagttttgttagtatctaaaacttccagaatttggttggatttgttggatccaggttgatctacagcggaaaatcgtgattttccagtctttggtttcttagaaaccccagaaagttccctttcagattccattcccatattctccattcctcctacatgcgtattcatcaagcagatcagataatttgaacagaaagaaaatattataaggaaaatcaatatctttcacaaataataccttcaagagaatgcttatttttcacttcccgtctaacactctgcttggtggtgtgcctatcttcattcaagtcactcggcttaataaggtgtttcaaatcaggttcacataccaaatttagatgatcacaagcctcttcatcatttttaacactgttgaaactctcgcccaatgcattttcttctgaaagcttttctttctcagctttaagtacgggactaatttgnttttcttcttttgattctttcgaatcaccaaagaatcccttacacatgtgttcggattcttcaatatcttcctgcaatttatctggtacattcttcttaattatatttacagcagcgtccttgcctctctgactattcatggtaacaatggagcttgaacctttttgtgacctctgtactttaggcagttttgactttaaaatttgctcttcattccttgtctcactctgagtacccttaaccacagaagaataatctacatgttcaatacttggagctttctcccgcttgggattactttccaatgagtttagaggttcaccttttatcaggtacacgtcttttcttacgttaatactttcagtttccttaacacttcgatctgaaaatgccactacattatcttctagttccggctttgaacccatcaaagctgcatctttgttcgttcctcttaatatactctccacattagaatctgatacgttatcaatctcttttgccgggtggatatatgaaggtgatagacaggataaaagtggaagcttcatagtcttggaaacaagctcctcacaggactctttgtcagcctctttttcagtattggatacggtatgatttctgtcaagcttgtttgacggtggcctatactttaccctatcccttaacttttccttcttcccaatagaaaacttaccagcacgcttttgtgaatcagaaacaactaacccatcgggtgtactttttgcatccgtcctgtatgatcaaccatatccagcatttttcaaaatcttttctttcgatcccaactgaattagatcatcacagagaggtgataacagctgatctttatgcaaagggaaagacaccatagcctacacacaccaaggtatatggtaaactcatattcatcattgttcaatctttaaggagaaggaagaaacagaaaaagaaaacaaaatcaccataagaattttagtgggcgaatcacaaatcccattcagtaaatcttgttcaacttctgagaggcaattcacccgcgatgctgatggtagcatattgaggccttctttagtaaaggtagaaacgtttttgagtgacgagaggtcacttgaaccaacttttatacgaaacctgagagtcttatgatttgatggagcagaagaagaagtttttgcgtcagacatgtgtttgctatcaggtgtccctatatgacttgatttgacaaacttgtttaatttgaccaaaacatcagaagcaggaggttttgaagcggatccggatattgatagttgaggtactagtgatgaagctgagcaattagatcgaccaccctataaacagaaaatgacattcactataaaagcttaaattcaagctctagtcgaagtttgagttgtttaatgatctttaccaattggttttgttgaacttctggtgaagtcttaggacgtgaacaaacaggagatctctgatacatagacaaaaaggaaccatagccaccaaactttgcacctataaacattcattgaattcataaatgaacataagagaaagcaacaaagtttaaatatacaagaaaacttacccaaattttcagcagaaactccaccttcaaaatctttctgaaaatgtcccaagacgttntcgagtttctcatccttaagaaaaggaaaaaaagaagggatctatctaaatagtagttgtagaag

SEQ ID NO: 36999 - DNA, 1018 bp, Arabidopsis thaliana landsberg
aaccaaacgaaaataatggtttattgatgatatattccagccctcaaataaccggtttatgccttccggataaaatagttgcgataccaaaaatacaaactttgaaactgaaatcaccataataatagtctatatctttagtagtagcaaaaacttactctcatcgaatattctttagaattcctatctccaaaattattattaacttcgctaccaccgctcctagaagagttaattcttttgggagataatgaatcggcaagacgatattcatgcatgatccaattggttttaacaccttttggaggctttcctctataaaacacaagagctttttttataccaatgttttcatgaaacccttcacaatttggtaccgcaatcaatttatctgttccggttgctttccaatatccagacgcagctgctctgtttggtcttgctccgtttggatatttcctatccctcggactgaaaaaataccactctttctccccaaatggagccttagctgatgatacaaatatataaacatagttatatcacttataaaaagtagaatatatatatacaaagataaaagggaaaatatattggttagttacctggtaaatcccatggatcggatttgtagatatcgacatcggcgataatcgaaagcgggactggggaagaggaaactttcttccttaggtaatggagaatgagttcttcatctgttggatgaaatcgaaaccctggaggtaaactcgatcttggatccttgcttatcattgtttaaaggaatgaaattttaagtagaaagttttgatagaaaagaaagaacaacaaaggagagaatattggttttggtgaagagctatgagataaacaaagaagtgagccaaagattgaaatttttcgtagagcaaggtttgagggcaatttatggagtgtagagttctgtcgtttagtgcttgaatgtataattttttaaagaaaattgagattgaaatatttatgaaaaatatagaatatt

SEQ ID NO: 37000 - DNA, 1396 bp, Arabidopsis thaliana landsberg
  unsure (1)..(1396): unsure at all n locations
gggggggcctcgatattgttgacaagctattttctgaggtcagttactcgctctatctatggggcccatttaagggccactttcaatcagtcacgtgaccttgttgcattcttcttattcagatgattgctgaggaagaagctataggagcatcaccaaagtcactgcctttacatttagaggatagcgcttctcttccccaagaagaaccgatttcaaaaccctcgggagaggtcaaatcaaaccccttgggaaagatcaaaggaagtcgtcgagaagaagtcaagtctaatccccaagaagtaaccaaacccaatcccaaggacgaaatgaagtccagtccccaagaggaaaccaaatccaatcatcagaaagaaatcaagtctagtccacaggaagagatcaagaagtccaatggatctgatgatcatcacaatcatcaacttctcagtcagaatgattcctactttcttgcaaaggtaatacctttcaaaacactaaacttggttagagtgtgattatacaaatcctgaataagagttatgttgacttgtttcgacaggttgtgcacccgtttgatgctcaagccccaggggaactcatcctcgctgtcgatgattatgtgattgtgcgacaggtacatttgccgccacccttttcaacaatacacacataacagagaaaacaaaatgaattaacaatcttgttctgtttgatgaaacaaattcaggtggctgggacaggctggtcagaaggagaatacaagggcaaagccggatggttcccgtctgcttacgttgagaaacaagagaaagctccggcgagcaagatcgtggaatcaaacgccaagtaacaatgatccctttctttaacatatacatacaaaaagtatgtgtaagatatgattgtgtttttcttccttctnnnnnnnnnnnnnnnnnnnnnatatgtttccacgagtaaatatgatcttgtaagagttatgatttgtgtgttttcttccttttcttcttatgtatcaacatgagtctaactctagactcttgagtcatatctctacgcagttgtgagaatcctgttttatcttttgtttgataagatcctctgtttcttctgtaatttactctgataatgataatgatctttcttgtttcagtaaagtttgattctttttaaataaaagatggaactttgaatattaagactctgtttctctacaaagttcacaactttacattttcataatcatctcttttggcccaacccctaaagagacatgaacatgagttttttacaaactccatcacttcttatgtacaataagatgctcaaatctcttgctgatggtaaaagtttcacgaaagttttggctttgttcggtgaattgcgagggcaa

SEQ ID NO: 37001 - DNA, 2586 bp, Arabidopsis thaliana landsberg
atctaaatctgaatttaaatcagaactataatcaaaatcaagaatggtttatggaaatgatgaaccatcctgagcaaatgaggtatcagacagagcaaatgggatatcaattcatggatgataaccaccacaaccacatccatcaccagccacaggagcaccaacatcagatccatgacgaatcttccaacgctcttgatgccgccaactcaagcagcatcatccctgttactagttcaagtattaccaataaaacatggttccattaggtttttgttaaatgttatattacaataatttggatgaattgataagtgaaattatgatcagctttaagtttttttgtgtgtaataaattgcattacagtttatgttctcaaagttgtgagtttgtgactgtgttatctttactattatagttttgcaataattatgccttttaaagtcgtagatgtgtgatacttttatttttgttgtttatttttccatgtgatatgtgtttttccccacaaatatgtcaaccaagcttggaaaagctcttaccaaacgggttttagttacaaattaactatcttagctctctttctttgtcatactcaacgctgattttgatataattgtcgtcacaaaaacattccaaagacttgagaagaaacaagaaccattcaatatccatatactaaaaacaaaaatgttgcaagaattcctgcaactacaatactctataaactctctcattgttaaataacaccagacaatcttaacatcagctcttggttttccccaagatttggctttggagatgttggttatcttctagcaatctatcatactctagaagcagctctgcagactgtttctgtagcgctgtgacatgtgtttcagcggtttcgagtttcttctctttctctttcgactcggtctctgctttctttactctctctgtaatagatgacaatttttcttgcaactgcttgatttccttggatgctttctcctctttctccttcagttcgattctctccttcctaagttcttctagttctcctttcgatgacccgacattgcttcttaaagtgattagcttttcgaggtaatgatgtgtccggtcaataatgaagccaaaaaagagcacaacacctgcaagaacatatgagctcaaaacgtgattccaatcatcacaacaaatttcaccactttttcaaatcctcccaaatttagtgaacataagcagtaccaagcacaactatggaagcaacggagtggaaacaaacatagagatcctccttgccaaagatatctatatcacaaatcagttaaatactgatgtaggaaagatacctataaagtgttcttagttttcccactcactaaaataagcagtgaaagcttttgttttgcttatatagatatcatccttcagttatataacccagtagatgttgaatcagccttgaaattcaagccaaatcagcagacaagaaaacatgaaagatggctctttcacaagccattgctaataacaactaagataggagcaagagctgaagtacaggggaggaagataactaaatttgccccaaatttcaatctaaaacatatcaacactgagaaatgattcaaagttcaaacaaaggaaaagagaaactgacccataagagaagcctcgagcaagtgtgttctccagaggacttgatccattggagacattgtcccaagtttggcacccttgttctggatcttaatgatattcatgagattcgacaggaggatcacagacatggttccagcaatggttttcagagtagcaggacgtttccccaatttaagctggtctaagctcttcattacaagctcccttaaaggaccaatctttaccagtagtaagaacgcaatcgcaccttctacgaacagaaccaggaatagtaactgaatcatgtccgattccccctcttcccagttccgaccaaaaggtaaagtttgtaccttttaatctaaattcactcgcactgtaagacccctaaactctcgtcctcgataactttattgggcattaaacctttggagctgatacccaattcacagatcgggaaacgctaaaacgaaaacaaaaattgggggctttctaaacttcagtagctaaatcgttggtaccaccatgaattggagaacaaaaagaacttaagaaattgacgaagacgatcggtatcgctcacggcagggctaaggatgtggaggaggtcagcagcgagttcatagagtacgaacgaacgaagtgttattttgcttaatctttagagaggtcaaaactgagataattgtgggtctgtcaccagtcaaaaagtggaattgtacatgttgttggttgagtagaaaagaaaacactaattgtgggaccattcatttaagaaattcgcattcttcttataattcttcataagtttattgataattataattcttcacaagttcataaccgctttttatggaacttgagtggatattatagtttgggtttttgagggtactatgtaaaacttgtttaatcaatgattttgcatatttcggcgatgttacgtactaata

SEQ ID NO: 37002 - DNA, 2221 bp, Arabidopsis thaliana landsberg
gccagatagaaaagatataacgctggggcgggttttttacaacaatgaagctccttgataaaggtgggatgtaaagagggaatagtagagcaagttttttaaaagcatatccagatatggaaggtgaggtttttggcaaaaaagctaatataatgtttgaaaagtttcaaaaagttggacttcagatgaatgaaatcgataaattagtgatagacaaccccgaggtgctattagagaaatctgtaaaaagaattttagaggcgttgaaattcttaaaatgtatcagaatggaaaagcagtttattgttaggtttttactgtgtcacatgaagcttatatgttcatcctcttttctaggacctagagctgtttggaatagattcaaaatcggaagagatgagttatgtcagatcattaaggaagagcctttgagattgttcagtatagcttctaaaactaataaaggtagaattgaacttgattcactggattggaggaatgcagagaagacgacattcttgtggaagttagggtatgtagagaattccgatgagatggtgagggctctgaaaaagttccaagggaggggagatgagctacaggagagatttgattgctttgtgaaggctggtttggactataatgtggttagacagcttgttaagcgggcgcctcatatacttaaccggccgaaagatatcatagaaaagaagatcattatgctaacagattatttagtttatccaatagaatccgtgatagagtccccaacatatttgtgttatagtatgaagagaatacatcagagattcacaatgtacatttggttgagggaaagagatgcagtaataccgaggctgacactaggcactattgtcggtatttctaatacccttattgtgtcatactttgtcaatacccacccggaaggtccagctacttgggaaaatataaagaaagcatctacctgattaactggtccgttcaatgatataacgttatcttcaatctagtgcagatgtctgatgatctataacattttctcattgcttagctcacaaccagtgaaacctggaaattctcagtgcgatggagaggatcacagaatatgtcgatgcatagtgaagtatttccgcctgtgaatttgattgcacctctctactcatcagtatagatatagatgccaacaaacgaacaaggaaggacttcgagaaagctgaaagaacaaaggctctccgtaatgttgaaacgccactgaactcagtgaagtgaattttagactggactgaacagagtgacaaattggaaaggcgcagtccttcgttggtacaatattcttctattgctttacgatgttggaaaggcacacttaacatataatgcaacttgaaatgctttctttgttgaagaagacagattgacagtattggtcagacaagcccctgccccgaccctatgccaaagagagcagctaacatctacttactgggacatagatgtgacagttctgttcagaatgcattattacaggttgtttggaagaatggtttttgttctttactcttagccaccagtagtcttatcttctgtaattatgtaaagagatagctatgattgacaaatgatcatgttttttcctgactttttgtggagtgtctttgtctgtttaagtttcaggtatctgagaatatcttgtagataacctaaatattagatttttgtattgaaaacaaaagattgcatatagttagaacgttttgggttaatcagcactcctaatcttgtacatctatctatccatctctctttattgaaactgaacctaaagcatctgtataaaatctgagtaacatccaaaaagaaaaaaacccttttaacaaagatatctaattacatttgacttatggtgcagtttcatgttgtgttgtgcagatcatctcttatggaagaagaagaaggagaagatgaagcagaaagacaagaccgcgcaatcttagactctttgtctttgctatatgccttttggacatcatccttaagctctctatatctcattcttttcaatcttctttcatgtgtagatcccttctcaaaatggaaatcgtcgaggatgtcgtcgtctatatactcagccatgcacttatctagaacctctgaaccatatggaaaaaaccttagaccagtctcaactgcattgtgaaacggtaatgaagtcagtcaa

SEQ ID NO: 37003 - DNA, 1578 bp, Arabidopsis thaliana landsberg
  unsure (1)..(1578): unsure at all n locations
agcttttcaaccacattaatctttacttgatgtgtttcgaacgtgtgtctaaaagtgattggttattgcacacaccgtgtagggtacggacacgtgttgtaatatcttttggcagttagactttttttttttaatttaacaaatataagtatataactcatgggttatcttcactttgaaactcaagttcttcttgcaaannnnnnnnnnnnnnnnnnnnnnnnnnntttttctagctctggtcaatttctgtatctttaactatttgagcattgtatgaaacttttttttttcttttactattaaatcatctatatgtcacatgaataattctattctctttataacactgggatatattttcacattatactaatatatatgaaaattaattaaacctaccctttttcggtaatatccaccggcttgaaagttgtagtaaggaagttagtaggaaactttttgttgtactcttgatttctaacaactcaaatcgtaaagttagctaagaaactgaagcttgaattttgctatcgacggtgcgaaaccataatggttgtatggattttgataaccacaaggtcccatactacattgtacgtatcactggcctggacttgtatcataacaaaaaatagttttaacagaagaaaaaaaatcggaacgaaaaatagggttgttagtccactgtccaaagtataggatcctttaatgttctgtgtatacgcgacctgtctcagtagaaaaaagttagacccatttatttttgtaaagcctcattttcagtttaattatagctttagctttaaacaaacaaagagtacaaatttgaaatctaatcctaataattgtgaacgcattaaatgtagttggttacatttgccacaattgatcgcaattatgatttttgcgtctgccctatattagtactctgccgtactgatgtgatcacaaattactacacttgatcatgtggcagaaagtggttggctcgtttttaaaacaacatgcgaaaccacattatgtcaattcaattctatatcatgtgttttattcctctttattcgataaaacattctatacttgtgttgccttatttttagtatgaaacaattatgctcgcatattatccatatatgaacatacattataatgcaacatcactttttaattttttattaaatttactgaaaatacaaggcagtaggtttatttatttttaactctttatctaaaataatgttattatcataatatatgaaatgacatatattgtacatatgataatcttattagacataattggtaaaaggaataacaattttatagaatcacgtacgtaattctttgcgcaagcgaaatcttgagctgaacttgctttgatatagatgagtgagatatataaacaaaatatatgattaagaaacaactattgtataatgatacaaacattttcatggaaaacaactatacacaacattttacaaaaatcttattatgatcaagaaactaacacgtcaattttgcaacaaaagaagaaaatctcacataatgcaaactgagacgtacgtggatggt

SEQ ID NO: 37004 - DNA, 1325 bp, Arabidopsis thaliana landsberg
  unsure (1)..(1325): unsure at all n locations
attccaatttccttctcgatttttattcattttttttttttctgggggtttttgaaagatttttaatttcttggtttaacgcaattttgggaattagggttttgaagattcgatgaaagtttgtgttttttttctttctggaattttcaaagtgacgagattgtttctattcctgtgtcgtggtgatgcttactatcttaccatgtgtaattttgaaattctctctagtaattggcttagattttggatttttatgacaatgaaatctatggttcttgaaaatgtatatatacttagttctggttttgtagtttgtgaaagttttggttctggctctggaagaggctaactttcaagtttgatcaacatgtgtctataattttacagattgtgaggaagatgagtatttacaccacaggacgtgttggaagcatattgctgctgccttgagtaagtgtggttcgaaaccgaagcgaaccaaggagttggagatattcaaattgactgctccttgtttctatgacgaatgcacacgccgtgggaggtcagaaagaagaatcaagtgcaagtatttagactccaagctacggaaaaaactgaattccaaagcatttgtaggttacctagagtacgtaagcaatatctctttttactcaaaataacaaggaattgtgtctatttacttacattnttgtctaatgtgaatagggatgtatggaggggcttctcggatgagaaaaagaactcttttgtctacttagattgtctttggttcagtatgtacaaaagtgaaaaccataacattagaagtagtgttttcgattccgtaaagacaaagcagatcttctcgaagaaatacgtttttcttcctatcgtctactggttagttaattttgccatatgtgttcttgaaaatggtttcaaatgtaactatatttgtctatttttttgtttaattcctccaggagccattggactttgttgatcttttgcaattttggggaggatcttgattctgataaaacatgcatgttgtttcttgactcactacaaacaactgactcttcgcagcggcttgaaccagatataagaaagcaagtactctctcttgttctttttcaattatctgtatcgaagaatgatatttttgtttaaaagcttgtgtgatatatctttgtgcttcttctttgatttcaggtttgtgttggacatatacagagctgagggaagaactgaagactcaagtctggttgatgaaatcccgttttatgtgccaatggtaattgagtgcatctaccaagttgtttatgtttcttgattcttac

SEQ ID NO: 37005 - DNA, 8059 bp, Arabidopsis thaliana landsberg
gggttttccggcccattccggccctgtttatttaaaactcgtccctaaatgagccgtaactctttttcagcccttaaaattatggttaggaatgttatattcaagacctttgtatcccttttcacaatttttttaatacttaaagaaatatttttcaacaaaacatttatgagttaatatcactattattaactcctgaactacttgccatctttatagcatcacaatcttcttcatcaaaaagtttttcaaatgtctcctacaatttaatggtataagttagttcaagagaagaagtcacagcagacacttccactcccgcatcgctcttttgcagcccttcgtcctgacctcgatcgtgtgtcaatcttcacagatgccgcttggaagcatgagactaaagatgtgggctttggatgggtaatccgaaattgcccggaactgacagctctccaccaccaatcagcatcccggaatgtcagatcgcctctcatggcggaagctatagcgttgttcctcgctctccaatacgcccaatcgatcggtatcaccaaactctcaatggcctcagattcacaacaattaatcacaaccatcacctctgagtctccttcaaccgagctctatgggatcgtctttgacatcctcaatttatccctaggatttgcagatgttagcttttcctttgttccacgaagtgagaatcgtgtagcagatgaactagcaaaatcaagtcttatctctttttctattgtacccggatcaaccggtttaaacctttgattaatgaaattctccctttgcacaaaaaaaaagagaagaagtcacattagttaattacttaatattgcaattttactttcaagcctacagttctgcatatccacatagccaattgcgagtgcaaagtaatgcttgcacagtttggggaagaaggcgattcctaaaaggatttaacatccgacctccaacgctgaaagccgactctgatgctactgtggtgattgggattctcacactaataaacaaatcaatggattaagatctgctaaacaaaataagaagaggaaatacattctctcaaattccaaatgtatagtaatatcaccgaggtacatgttattcaaaaaaataactaaatattatgtgttcataagaaggacgagatgaaagtaacttggtcctaactaggcattcatggatcaaatgtttactttctgagatgcttggaccaggttcttgtttccaggaaacgacttgcatgagacgtccacaagtgctttgaaactgtaaggttcatgcatagataactcagagaggactttgcggttcagctggatgttctccttcatcagtccatggatgaagttcccgtagttcacctgtttcaagttttagatgttaggattccaatcaaacatgtcatttccatcttattcaaaagaaacagagtattataatagcatatatttagcttgttacaaagctaaaacgaggtaaccaagttagaaaaatatgtttctctacttgaattaggaagtaatcattgtttcagttagatcaaaactattgacatgaaatgtgtttttcctctaatcaatccgaaatgattcacttctttaagcatatttgagtttcaaattaaacattcacatccaaaatctccattggataaatatctcaaactcagatattggaaagctccaaattgatcaaagatacaacagtaaaatctgaagaaaataagctaatctaaaatgcactttaattcaactattcaatctaattctttcgcttctagttataaccaacaagttttaactctatcactaggtagatgcaaacatagagtgccactgcataagaaaaatctctagaatacagcaaaaaagttaagactataatgtaatccatcaagttctgtttgaaacatcaaactagaacttgttatactagcaaccacagactctggagaaatcaagcacccaaatttaacaaaagaaaaccctaaatcccaagctccatcctaaaagaaactcatcatagattgcaaaaataaaccaaccaatatctcagaagttttatttataaactaatcatgatttatcgaatcaatgcaattagcagtgacgggaagcaaataggcaaaaatctaatcaatattggggggaaaacgtacaccgtgctgacgagaaccggcgttgatgcgctcgatccagagacctctcatctcacgtttcttgttgcgcctatctctgtaagagtactgcagagctttctcgactctttccctcgcaattcttatacaattcttagctcttcctctgaaacccttcgctagcttgaagatctccttcttgttcatcttttctctttattcttcttcctcctctatctattcttcgtccttctctcactaatactgtaactccatttccttcttctaacgccgcctctgtgtatcccccttctgtttcaattccgggtcgatcgggtcgggtcgtagacaaatccggtcacacaattattaaaaccaattctccatctactgggcctttattatataacatcacaaactaaacaaagcccactatcccatccagtaactcccgacagaggacacgtgttgccatgtcattaccacgtgtcacaagctttccaactctgcttcattttcccgggaaacaaacaaaaacagaaccattattacttttccggaaacagaatttaagtggctttgctctgttcttcttgacccatcacacagaaaaaaccaaaaaaagaaagaatttcaagttttcaactgtcaaaatcttgtagtagtaatggaaaatcatcaccgaatatccgccacaaaatacaacggcgaagcagtgtcggacgatgtgggccaggggaagctatattctccaaaccacgcgatcaaaatctctccagaatccgacgaaaacgtgggccaagggaacctctactctcctgaccacgcgatcaaaatcgcaacgaaccctgattccgtggattcctcatcagaggaagaagaaggagagaagcagaggaagacgatcatgttggggctgaagaatcttgcggcggttaaggataaagtgttagaaaaactatcggctgcttcggttccatctgagtcgcttgaaaacgctaaacagtttttggaaggagccattaaggatttcgccggagcggcgcagggtatgacgaaagacgcgttgcaccggattaaaactcagctcgctgttattgttccgtctgtttctcctgccgtcaccgaaaaggtttagttttaaaaacaattggtccaccgggtaaactaatttggactcttttttggctgacttgtgaatttacttttgacggagcagatagtggacgatgctgagaaagaagccattgacggagaggaagaagatgagagcaagtcaaaagaaagctccgggaagttgccgtttgtttcccgacatcttcgtttttcggctctctcgccaaacctttctccaagctttgatgggtttgtgtcgtacgccttcatgactatgtgagataaataagacaaagtctgagatcttctgaagtttcaatgtttacttataatgaatgaagatactttttatgtttatcattcaaaatattatgagttttgtgtaatagaaaactgggtttcacaccctttttattatgttggtggccttggattgtttgtattagcacacaaattttaagttgaatataagaaataaatggtaatggacataaaaagaccaaagagattcttgtatgtacaagttatacatgtacgtatgtatatatgcatgtaatgcgtatcagagcttgagatgtgtacaatagacaaaatggaatcaatgattcttcttctcatgtgttcttctcaagtacagataaagccggagtcagatagttgttcgccttgtctggcaaatgagccacctgaaagagacaaacactatcagatgatgtaatgatgtagatgtgactcttattgcaagtgattgtttactcttttaccagctcatagagttctattccttgctcagcaacgtattcatggcaaacctgtaaaaaccaaatggaagaaatttgagagatccatgatgtgatttcttctttatagatcaaagattgaatctttcttagttttggttcttgaaaagggtcaaagattgattctttctcagttgtttctctataaactgcaactcacatcaaagcttttgtttctggcggttgaatcgtgcagtgccttgacacatatatcagccacatccgcgcaactaatgccctgaaattgaaagaaaatagcgcattgggaagttataagtggctccatcagagaacttttgctaggtggcttgagtttgtttttcgtgattgaaataacctgagaaattctgtttccttgatcaaatatcagagctcgttgcccgcctggttcctcctatatcagaaaatatgtattcagagccatatatatacaatatggctggagctcaaagaacattaccttcaagggaccaggacgaatgattgtgtatccaaggcctgatctccttaaagaatcttcaccagcctaacaaatttagcggacatcaagagagaaggagatagagatgtgaaaagatggaacctactggcacaaaagccctgacaatccatagcctcgaaagattcaagagttattatgatgtgtaagacaaaatggacttaccctcttagctttcaacacttgctcccttctgttggcttctactcccgaaccagtacacgataccagaataaagtctgtttcttgacccgcctgcagacaaaaatgcaggaagctgatgatgtatctgttttttttttccgttctttcaggtgataatcttcagtaagtagacattaagttgggagtacttacaggcaaagcttttatgtactcaaatacaaggataaaactactcaaattttgttgcgcaccagcaagtccatcaacaggcctctgaaagaggaaaaaccccaagagattgctaactcagacaccaacgaatgaaagttttcggttaatgatcacacagatcaatccgcaaaaccaactgctgaagctttgaaaagagtaagcaaacctgtcttttaggctcaaagcgtattgtcaatgtgtgaacaagaaatggatctagcggtggatcttctgggttgaccggtcgaaaagctgaaaatggcacccttacctgcccaaggaaccaaagttttagccaaaaaaataacggaaaaggggtcagactaatgagtaagaccgatgatgctttatatacccgacaaaaccctgctttggtactgatcctagcgaaatactgtttgctctgagacatatctgatgatggaccagcttcaaggattacaacataggatcttccattcccaccaacagaaagaactaagccttcgtacctattgatataaaagcataagcatataaaagaagctataaggctaaatgggtttcaggaggtgttagaaatttcatttaatactcctttctctaagtttctatcattgaatcatttcacagaacaagctgagagtaagttgatacgaaatcgcgcaatacctgtcaagagtggtacccaatggaagtgaaagtttcttcgacaactcaacatatcctcctcgggtgaaaacataacctgcatttgaaaactgattaaaccactatacctcaaaatatacatcaaaggaaaaaacttttgcaattgccatattctccggaaagataatgtgtacctgaaaactcagctctctcagtttcagtgaactcaaacttagcatccatcccaccatcatatttggaagcggttgtgtcctgaaagtaagttccttgacgaatttcccaaccatcaagtgactcagctgacttgaacttagctaatagaagcttgcttttgctgcttttacccgcccttaattgcgctagtctgttattgtaatcctgcaaatactcaaaacgacacacatgaataaactactctctgctcaacaaaacaagaaaccaaattaaccacggttgagtcatggacaaatcttactatacctgaaaagccttggtgaggttataaacacccaagtgatcaacccgcgtaaggtctgcagtaatcgtagaccgagcagtcgcacagtagatgatcttgctgcagctttcaacagcggatttgagcgttgacggttcacccacatctccaacaacaatatccactgaccttggcaacatactcatcacttcctcatcttgtttcctcaccagtgcctaaacggtaacctcaaatctcttaaaactctaaagcatttgcataaacacaccaatactactttatattataaaaatcagcattttttgaaccttgacggtgtagccacggagcatgagtttacggacaacgatacgaccgattctactagtagctccgacgactaaaacggtaacgttttgagcgccgggaacagcaaactcacacataggtccttctctaatgagtagactatcaagagtctcttgctcatcgggtcgggttgtcctcgacatctgacctaatccagagaatttccgccacacctcgtcgaagatctgccgcgatcgtcgtcctaatcccacaggattcacatcgtccaacttcagtgtaggcggagacggtggtgattgaggcgaaggcggagcaacgtcgagcttcttcgcaaccgtctcttcgctctccttagtggttgtggttccgggtcgggttttggtcttcttcttgtcggagggtggagatggagacggagaagaagaagattgagccctagggattacgatttgggagcgatcatggaatctgtgaattctggtgttgatgctgaaactgttgccaaaattcgagcttagaaacctcgcatcagtcgcagccatgttactgccaacaatactacccaccatttttgaactctgctacacaaacagagctcaaagacacaattttgaaaataaattttttggataaaattatactaaatgcatacaattgtttgttaaatgaatcttatttgcatgctagactgtcattgagaacactcttggtcgaaattgggaatggataacgaaagtgagatttttcaagtttttttttgtcgttaagagaaaatagagaagaataagaaatggttggatcggaggattttgacatttcggaaagaaggagagaagaagaagaccacagaatctggtttatgtgttttcggacagtgatatgacttatgagccaattaactagccacgtacactctctcttttcctcttcttttttttaaaaaaaaaaatatacttcttcaccttttttttttttggagaaacaaacaagaaaatttcattccaagttccaactatataataattccataaaatttcatatctgtatatttcaagcgttaaggaagctgcgttggcttctccttcctgcacgattctattggtgatgggaattggaagcaactgtgacccttattgcagcaatggtcacaaaggccaatgcaataacaaggattccaaagcaaatattagattatgaattatgacttggagctaacagcctaacaatagcatttgcattacaaaactacacaaatttagaaaaggtagcagtgtcgtgataacgtttaccttattaatccaaaacctagttcaatgaaacgatactaaaatgttaatacaagttcgcccaaaaatgtaagagaaggaaacatccttaaagagacacacttcatctttcttacttatctagcaagttatctatttatatgtatatatattacattcctgccacatcccccaaagggatataagctattttacaaattgtaccagactacaaaaaaaagacggagaggtagaagacagtaatcagtcacagagtaatatatgtatagtcaaagaatcaccagccagatcaagccactgaactaatcgcgaccttacacacagcataagttagcatctacgacgattcttctgcttcaattggca

SEQ ID NO: 37006 - DNA, 2229 bp, Arabidopsis thaliana landsberg
  unsure (1)..(2229): unsure at all n locations
caaatgaaatgctttaaatgtaaaacatttaaggtgaatagaattccacaccctgcggactgttttgccctccatgttgataaggtgatagactccattgcggacgacgtgtgtgattctgtaagggccttcccaaatgattcatagtttgccagctcctttttcttccgttatctgttggatccgacgtaggactagggtcctaacttcgaaagatcggttccaaacgtttgaattataatatcgagctgcggcattgtgatagttctacatgcaaattaaggcttgattacggctctcatcaatggtgtcaatgacatcaaccgtcatctcgttgtttgcagcctcgttctgaggatttctgattcgcctcgcacttgggatttttatttcagcagggatgactgcctccattccgttgagtaaggaaaaaggagtctcgccggtagctctcctcggagttgtacgaattgcccaaagaacattttgtagctctccaaaccaggcacctttatactcgttcaactttttcttaaggttcgagatgattgttttgttcatggcttcagcctgaccatttccttgcggatagcgaggtgtagactggcttaggcgaatttgccactctgcacagaaagcttcgaattgctgtctaatgaactgaggcctgttatcggtttcaatctcgtagggcaaaccatgtctacagattatttccttccaaatgaacttacgaacttggacttgagtcacattggagtaagcgggagcctcgacccctttcgagaaatagtttgttaatacgagtaggaaacgtactctccgaatagaaacatggagaggtccgatgatgtccattgaccacttcatgaaagggtaaggtgctgacaccgaagtaagaagttctgcgggctgcaagatgaaaggtgcatgcttttgacactgctcatacttacgcgcgtatgcctcacagtctgctaccattattggccaataatacatgtacttcttgactttgaaggccaaagagcgacctctggagtgatttccacatgtgccgtcgnnggatttctttcattataattcagggattgttctccgtagacacagacaacatccggtgccgagatgacccngttgtaaagaatgtcattcgctatgcagaagcgggcactagtggctttcaacttctgagctgcccacttatcttcagaaagcaccccgtgaggatataatcccgaattgggtctctctagtctgccccccagtcatgaggtgctgatctagattgggctcattaggactattaacattttcttgatttgtttcgatagcactaggctgaatttcctcgagatcgtccttatttacgttgagatgttcaggttcgggatcgtccaaccgagcttcgagccgtctgcgcattgcctgagttgtgacgaaacttactgtactgtgatgtatgcttggctggcttattgttttgacagggattatccgcgcaacctttacttcggaagtcgttgccagggcggccagtggatcggcagccgatttttcagctcaaggaaccctagacaactcgaacttatcgaacttacttgacaaatcgcgtactaagtctaagtatgcctccatacggttatcttttgcgtcataatctccagaatattgatttgcaacgagctgcgaatcgcaatgagcttgcaaatttcgcactcctactccgattgcgagacgaagtccggccaaaagtgattcatactctgcttcgttgttagatgcgttgaaagcgagcagaaaggattgttccagcacttctctagtgggagaatttaaacaaatactaactccggagccatgtttcgacgaagccccatcgacgtgaaggatccacggttgatccgtattatcctgttcagaagtagcctaagatatctcgataaggaagtctgctagaacttgagactttaagcttgttcgggctcagaattctagatcgaatttgctcagctcgacagcccatttttccacccgtccgaactgcgttggactgtgaaggatggtgcgaagcgttaatgatgtcaagacgacgattggatgagagtggaagtacggccttaatttctgagcggctgttacaatggttagagctaacttctccatcataggatatctggtttctgcatcatagaaagacttgctgatgtaaaagattggatgctcatc

SEQ ID NO: 37007 - DNA, 1876 bp, Arabidopsis thaliana landsberg
tgcaaatcctattctagcttcatttaaacgctgactctgtttttggtgtcttaatcctgaccgttcctcaacttctaatctcatccgtccacgtgtctcacttcattcttcttcccatatcagctgttactgcgcatgacatctctagatcctactaccatggtttatcaagcaggacttaacaaagtcatcaataagcctaatagcgggaagttaatattcaggtatcttaatgaattttatcctactaccatggtgaaggagcagtcaatggcaagttttagtatctcaaattataaaactggaaaaatagaaagaaagaaagaaagaattaataatctgctcagacaataattgtaacatcacttgtatccgtgaaatgaccaagaacgtagtaataaagggcgatggcggatatataacaacaactgccttcagttttggttcaatcacttgtttttttttacatggaagccagaagtcctctcatttcagttaccccaggaacgttttcactcgggtaaactttggctacgagctgcacgaagctctcgtacttgtccagaaactccttctgtttaaggtcacacaacaacgcattgattcaaacactgagctaataatgcactgttatttattactctcctcaacttttcagtttaaatgggtaccttgcatttatcccacaacgatggtagcaactcctctgatgctaaattcttctgcaactttttatacattgctgcaatcgatttgtccacctacacacaaagagaagaattggaaaatgatctactaaaaggtctgtgaacaattaatacactcttaatgaacatttgcttacccctgacaggcttgattttaacatcttccggagttccacttttgataaaccaagctggaatggtatctgaaatatagagataatgtatcagttttattttgtttttaccctagaaacctagagtaacacgccaatacatagtttacacaatgagaaagtgaaacaatggtataactagttaactaacaacaactagcctcttcaggggtgatagtatacatgagatccttaatctttttatcaaacaggaaaagtctttcgaattgctgcagggacgagagaacacatgaagcaaacacaaacgggtgtacccttaacaataaatcgaaaagaatggaaaaaaggggagttatgctattagctgcaaatggggagaaccacttacatagtaaattatcatgctaatgtggcgcgtacaagcttgttcatatgcttccattgcctggtgatagaacttggctaaagtcggcacaacattagccaggtcaaacaggctgcaagaaaaaaaatggttagggaagtatgaacaattgggaagaagaagaacaaccaagagagggagagaataagaaaaggacctacctattctgaaaagcagcatagttttctaacaggagaatatctgcatatttaggatcttgttgggcaattttctcgagggtcacaaacattatgctcacctataaaatagcagtagtcagactctgtcaaccaaagcaggagagaaagaaaagaaacaatctgagatatacttcatttctatttatttgtaagtgaactaagatcagacgcagaggttggttatgtttactgtttgacgtggcaaacattattctttgcttgcatggtttgtgtaacttcactagtcaaatgctataaactcatagaaatagcagtactcacaaattttgtgtatgcctgatcaaccaaatctctagattgcccttgtatgtattgttccatacgagtagcaagtgctgcaaatctatgaaaatgatataataatgttagcatagcctcaagcaatactaa

SEQ ID NO: 37008 - DNA, 1264 bp, Arabidopsis thaliana landsberg
agaaggttagacttccgtaatttgcctccacatgaaatgagggccattctaccgaaaatccaggttctgatttagattattacaatggattcttcaaatgtttcaaagcatcttatagtattcgttataactaatttcaggtgatggctcggtctttgccattggacaaacatacattagtcaacaacttgaggaaaatgggagaggtagttgcagtgactggggatggaacaaatgatgctcctgcattgcatgaggctgacattggacttgccatgggaatagctggaacagaggtagcctttggttctcctctgttactgagttattaaatcattgtaaaatcgatgttctctatgttaaaaactcccgcgtatacaacacacaggttgcgaaagagaatgctgatgttatcataatggacgacaactttgcaacaatagtgaatgtggcaaaatggggacgtgctgtgtatatcaacatccagaagtttgttcagttccagctcactgttaatgtggttgcttcgatcatcaactttgtctctgcttgcatcacaggtacgacagaaaaaccaatcaaacaccatctttcttctagcgtttggtcaaatatagtaaccatttcttttggtttcttttccaggatctgctccactcactgctgtgcaactgctttgggtcaacatgatcatggacacacttggtgcattggctctagcaacagaacctcccaatgaaggtttaatgaaacgtgcaccaatagctagaaccgccagctttatcaccaaaaccatgtggagaaacatcgctggtcaaagcgtttaccagttgattgtcttaggaattctcaatttcgcaggcaaatcacttctcaaactagatggccctgactccacagccgttcttaacacagtcatcttcaactccttcgtcttttgccaggtaccattcgcaaacaaaaaccaacccaactcttatataaaagataagtaacaagagaatcaaacggtgtacaaacaggtgttcaatgagatcaatagccgggaaatagagaagataaatgtgttcaaaggaatgttcaatagctgggtgttcacttgggtaatgactgtgacggtagtgtttcaagtgatcatagtggagtttcttggagcatttgctagcaccgttcctctgagctggcaacattggttactatcaatcttgataggatcattgaacatgattgtagccgttatcctcaaatgcgtacctgtcgagtc

SEQ ID NO: 37009 - DNA, 1965 bp, Arabidopsis thaliana landsberg
  unsure (1)..(1965): unsure at all n locations
agtatcttgtaaagcaactctattttgaaggtatttccgtagggaacatctggtgtgcttacactaacaaatacagcaaactgcttcccgctagctttccggtaaacttgattttctgttgcttttactgctttgaccatcttcgttgcagctctcatgtatgtaacaacccgtgttagacgaggagtatcttcttgcatcattgtccaaggcccttcctgtacatctgatagaccttgaagttcagccaattctttcctaaattgcgaacttggcgtaaaaagaaatttgttaagttcacagggtgagactaaatatttctgatcaacaagaactccccctgtaagattctcaggcatttcttctctttcgctatcactagactgcatcaggtcaagaccttcctcaaagccagtacaagtagcagaggaagaacattggtcagtggcatcctcataatttgagtttacactttgtcctactgaagactcatcatggagtctcttagagatctcctctttcttatgaaaaagcttgtcaatgtggttcacaatattcttcattatgtgcttcccatcatggtgtttacgccgtttcccatctctggaggagatcaaatctttaggcgatccttcgagttctttcacaccttccaagttaataatatcctgcttatcattaagaaccttctcaccagaggtactttcccatttcccttgcaaagacaaactcagaagaattttccctacaatacaaaggtaaagttcatatccaaaacctccatatacacacacacagatacagagcccaattcctaattcactaatgataacacacacacacacacacacacacaattgattcactaactagagacttaaaattctcacctaacaccagaaaacaccatttcaaatgaatctacaagttacttaaccaatgnnnnnnnnnnnnnnnnnnnnnnaagacacaaacatgccatttcttctcatgcttaaacattcatactctatggaatcagttttcctgatagacgaaggtaaagttcatatccatagataaaccaacacctccatatacagagacttaaattctcacctaaacaccagaaaacacaacttcaaatgaatctacaagccactcaattcatgaacacaaacatgacatttcctctaatgctaaacattcgtactctaatagttcttccacaagtgattacagaatcaaaatccaacgaaaaacaaaatcgataacaacaaagttgacagaatcagattactaaccacattcaatgttaacgaacttgccatcactaggtttctcaatgacaaaccaagtcggcaacaaagtttgattctctcagcaagcaacggaagtaagcggaatccgaactttaccaattaaaccggtggaaacaatagactgatgatcntgctgctcatggtgaagaatcgatacaacgacatcatcaccttcgtcgacatcactgattcgaaaaacgaattcctcgttccagatcggtgacgaagtatctctcgcgactctcgttttagacttgtgtctcccaacgtgaagcttagcgaatgtctctttcgctggtaaatctttggcttgtaatatgtagacgtagagcctcatcgatttgagagagaagcgagagagagagagagagagagagatgatgaagaaatcaaaatgtgaattgttgttgaatttgaaaactgaagattgaagaagaagaagaaggagaagttaaaacccataaagggaagagagaagaaacgtgggagaggaagagagtgacacgggaagagatgattgggatgatgggtcggttttctcattacacacacattcggcgatttttgttggttcactctttttagcggtttaattattatattattttgttataatttggggttttgcaaatttgtatttgtttgaaaggtgaacaaaaccgtt

SEQ ID NO: 37010 - DNA, 1497 bp, Arabidopsis thaliana landsberg
tctaaaaataaacacattcttaatctatatttattttgacataattacctcgcctgcattcaccgtaataatatgcggcgtgaaattagcggcggcagaggaaggagaccattcaccttcacaagcacaaaacaacatcaccaaaaatctcttcaataaacatgcaattattattataccgtatatatacatgtatatatgaccgtatatgtacggacaaaaagttgtaataagaggtcccaccacttgaagtagaagctttctttctttgcatgtttcaacttaagacccagaaagatcccaaaaaatctcttttaaacacttttgaagtcacgagaactcaagattcagttctaaacaaaacatagatttagacacaagattagcaaaaaatttaaaaatctatagttacctaaattctcgacctggtactttggcctgatgaatgagcttggagttggagttgctggtttcattttgccacgtttctccgatgtcgtcgagaaatcgatgacgtgagaagtcgttggtgcggctgatgatatcggattcggagatagcgtcaccgctgctccgtcgtgtccgtacttcctagggcgcccacgtctcttctttatcggtccgcttgagaaaccatccatagccgccgacggagtaaaggagttttgcggcggtggaggaggaggaggagcgacggagttgggaggtgtgtttgaagtttctgacctcggagccatgtggaagtctgacggcgcgttggatctcaccaccgtaacgcctccgtcgctcccggtggttgttttaacaacttctccggtagtctccatacctattacgattattaaacaaaataatcgttttgacaaacctaaaaatagatttgggacagaagaagatataattttccaaatccaaaggttaaaaatcagattaaaaatcaaggaggaagaagaaatacatgagataattttttcttgtagatattatttcttagaattaaagctttgaaaattattaggatggaattaggaaatgtttgagaggaaagtgaggaaaattagatttatttatgctgtgtagttttagatgaaataagaaaataaatatttttttgacggcaatgaatatttttgattttgaaatttggaaaataaagcgttttctatatattattttaatatttatttcaggcttttagttcatttccttcctaactttttccttgtctgtccgtttaaatttaatattgaataaattaatacgaaaaagaaaatgtattgttttcgtgaaaaggaaatgtatttaatggggcgttataatacaactcacaataatttatattttaacttggagaaaataatatctttttgtcatattatagaaatgggaattcgtgttattgctggaatccgatggggaaaattaataatttaaaagagaagaataaataataaatagaaagtaaaaaaaaacggaaagtgggtgatactaattttt

SEQ ID NO: 37011 - DNA, 1096 bp, Arabidopsis thaliana landsberg
ggaatggactttagtatctaagtctgatagaaactaagaagttgcacgcagcttgaattagatttccagacccctgttctgccttttaaccggcttgatttcatacacgcctctgttaaaatttagtactgaggaagtctaaatgggataattatagcatgaactccctgcttctcatcataggaaggagttggttgtgctatagtgctgttccaagtcacgatatatcatctgtcgcttttgctctgtggactatgtttctatttgccttaagtttgaggtcaataatgttataaaaagtaactgcaagtaattttcaacaaaatctagttttttggtgctgtaaaaggttaggcaaccagagtaacttcagaatttgtcgcactatcatctccaatagaagatggggtttgtcccattttcactgaactagcttatgccaatagatgttgattatgagaatgaaacggagaggatttgcagcctttttgatgattatctttgatgttattttaacaggttctggacagaggagagaagatcgaacttctggttgacaaaaccgaaaacctacagttccaggcagatagcttccagagacaaggaaggcagttaagaaggaagatgtggctacagagtctgcagatgaagctgatggtggctggtgctgttttctcttttattctcatcgtttgggttgttgcttgtggaggtttcaaatgctcatcatgatgtttcgcttcgtttgtatctgttttaacacttaaattgcatgctcatgtttgtacatggaagaacttataataacatatcatcatatcatcatcatctcccacatgctgtgatgctatatatataaaaaaaatgtttttgttttcaagttgccgtgtctgttctattctatgcgatcagcaattttctttatggtgatctccaagatacatgtgtgtagtgtatgcggttatgtcatttaggcttcgactgatattaagaaaaaagaacaagaaaattgtaggtactgtataaagtttttacagagaaaaaaagaagaagcaaacaatgatgacccaaaagcgaaatagaatgttacggcttt

SEQ ID NO: 37012 - DNA, 1334 bp, Arabidopsis thaliana landsberg
gagaagacggggctatttcggaatacttttgttggtgcaaacgcaaagctgcctcaaagattgaagaaggagaagctaatgggatctctgaaacctcagatcctaactaaaaaaactttgatgcttttgatcgttttaagaaatgtacaagctttgaagaatagatgcatctacttaaccgtacaagtttgacctcgcttggggtcattgtttttctttttatttaattctagatcattttcatgttattgtccattgtttataaatttcagaaacaaaatgattttgattctgactttgatattttattttttacaaagggctcgatatctctttcaagtttcaacccaatgagctctcccacatggttgactagtaaattacttagactaagatattgttttactgttgttccaaaaaaaaaaaaaaaaaaaagatattgtttcactaaattgtaattaactttaaagttatcgttatatttagacatgccattacacatttacactaagagaaatagagcagtagagaattatatctaatatttgtttctatacaaactacatgaaatgaatgataattataattttgttttgattttttcccttttggttattattaattataaaatgtgaatattttttaccattatataattttatttttatgcaataatttaaaagctaagatatgtaactgtgaatatttcataattactcaaattttattatttatcactcaaatgataaaaaatgtgaatatctattattaattactaagatatgcaactttaaaagctaagacaatttcataattactcaaatttctaaccataaaagctaaaaccacaacatgagaaaaaaaacactataaagcaaccattattagttctcagtttattcaaccaaaaagtatttcatattaaacttatataatagaaaaatcatcaaaaagtgatgtcgtcgaaaattaaatttgtagctcttctcatcgtagtaatttctctccttcttaacaatgcgcaatccactcgagagatcctctccgcggaaatttgtggatggaatgaccctgctgtacattgtaagacaaaagaagattgttttgagaaatgtggaggcagacctgctaagaaagttttttgtgtgcgtccaggagaccatagctatgatcgtctgtgttgttgtcgcgcttaacatgtaatttaactgagatcttgttttaataaatttcagtatattttatccagatttcgcctctgttcaatatataatgactgaagctttatttggttggacaataaattattaagtcactaaaatataatacgtttt

SEQ ID NO: 37013 - DNA, 1452 bp, Arabidopsis thaliana landsberg
agaattaataaaacaaatgcaacttggtttactactataccaaaagactcaaattgctaaactgaaccgaaaatcggtttaggtattagcctgcctatagaaaaacccagtggtggatcatcactggaaacttctcgatgaaatgactttcttctacaaacttctttttccctcttctccaagcttacgcttgtctccatgtaaaaaacctccgtcgtcttcttcctcctccttcataaccctaaaccaaaaaccctcatttccttcaatcttcttactcacatggcgctaaggagattatcaaagtctgtttcgtcagccatcaaagctcaatacactctctcgagaccctctcctctcctccgttctcgcgctctctcttcctctcctcaccacacctctattggccggccaacaaattcattcatcggaaaaatcaataactcttctatcactcatgcgactactactcatggtcaactcttccctctttcttctccgcgacgcttttgtactaccacagctcaggttcgtgctcgatttcagtgttagttgctcaattgtgaacttggaattgttaattttatggtttagtgataataggttaatcaaaatgagtttacggagatggcatgggaagggcttatcaacgcctttgacgcggctcgtgaatcgaaacaacagattgtggaatctgaacatttgatgaaagctcttcttgagcaaaaagatggtatggctagaaagattttcactaaagctggaattgacaattcctctgttcttcaagctacagacttgttcatatctaaacaaccaacggtacggtgttgcgcttaatctctctttttctgtgtatcagaacataattttgcaggtcaatttaagttgttgtgatgttgcaggttagtgatgcaagtggtcagagactagggtcatctcttagtgttatattagaaaatgcaaagaggcataagaaagatatgttggatagttatgtatccgtggagcactttttgttggcttattattcagatacaaggtttggacaagagtttttcagggacatgaaacttgatatgcaagtgctaaaggatgctattaaagatgtacgcggtgatcaacgagtaactgatcggagtaagttacttcgaatatagctagtacactgtgtagatgatgttttatatatgctacttgtgacaatcaaagacttgactggaaaaataatgatggttttattcttatgttctacattgaattcgtgaacattggtaagtagatgtaagacgtgtgttggtgacatttgcctactctcatcacgttttgctactacacatgtagatcctgaaagcaaatatcaagcacttgaaaagtatggaaatgatttaactgagatggctagacgagggaagctggatcctgtcattgggcgggagtatgaaattaggc

SEQ ID NO: 37014 - DNA, 1590 bp, Arabidopsis thaliana landsberg
  unsure (1)..(1590): unsure at all n locations
gaggaaattaccaggaagaacgtggaaatgtgaaacaaaagaaagaagggctaagaaaattttggcttatttagatgaacatgctttgcttgtttatgtgggttaaagataaattttaaaacttttataaaagttaccgcaatttttcccaaaatttaagaatttattagcgttgtgtaagggtgtttttgaaatggataaaaagttatctttgctattgcttttgttataaaaattgactttaacagtaagaatatatttgtttatttaacaagtgatgtacactttacttagattggtcatcgacaagtctctctcatttgctcattaaaagaaacactaataagttatgattaaagctatacatatacttgcactgttgcacacatctatccttaccattgtaattagatgtgtcttatattattctccgccaacactgaattttaagtagtgcttagtttgacactaattgtaatttgatgattgcttatggatctttaggtgattatgaaaccgtgcatttagctaaatcatatgaacagaattacctactatgttagttaattagaataaacatatgatttaggaattatgctatatatttgataattagaagaagattactaagctggttgtattttatcgtctacaattcacaacctaatttatgcattttgaaatactattattatatattcatatctaaatcgaatctaataattgatagttttgaaattcaaagtgggaagacgttcactatgatgcatgcatgataatcatacctaagacgtactttcacttcactaaaaccaaagaagaatcaaatgatgaattgacttcaaagtgggggaaaaacgaaagattctttagtaaaaagccaattagtgcaaccctttaacgaaaaaataaaagctaagcaatggattatagtagcagacattaaagactggttgtcttttttttttttgacccgttgatgataatcttaactacacttccatgagttcagtaaattggaatcctatgcaaaatgcaacgtgtgtgtggacacgtaccaacgtacgcttgctctattttagagtctcaatcgtacgtggcagtataagaacgagcgataaaaacaaaaatatattgagtggtagagcaagcaaaaaaaatgtagttagtgttttgaccaaaaaaagtgtagttctaattagtactgcgagacggaacanacagtacaaaaataagcaggatcaaaagttgaatggtaaatatgaaaaatgcgttactgatttttttctttcttacttacattttgaaaacaaatttttaagtataccacccattacaaacaattaaggaaacggtcatcgatcagttgcaatattgttgtttatgacaaaacttcattgcaaaaatcttcttatgggttttgttcgactgctcgaatgtatgtgcgaaannnnnnnnnnnnnnnnnnnnnntaatatatagtgaaatccggatttgtatttaattaaaattaattttgcaacttaatgttaccaagaaaataaattagaattctaaactaattaatgatatataacataattaatattt

SEQ ID NO: 37015 - DNA, 1356 bp, Arabidopsis thaliana landsberg
tcacttccattttttcaaaatctctcttttccctcactcactctcactctctctctccttctctcgcttgaagaacaagcttggtatatttgttacaacgggctaattaatcaatctctttttcacaaataaaaagaagaaagagaggagtcattttttggggttgatatcttgaaaatgggaaagaaagagcagaaggatcatcattcagtagtagagagcgacgacaaagtcgacgctgttcttcatctccttcgtaaacattctcctctaactcttaaacaggttgggtggcatattcattattatatatccgttacttgaacatgttttattttttaatagaaaattttgattcattatattgttattgggttaatgaatgttgcaggagaagttctgtaacagagcttgtgtcggtagattcttgagaataaaaggagacaatgtgaagaaagcagctaaacagttaaggtcttgcctttcatggagatcttctcttggcattggtactttctctctcttgatcattacacattctcaatcactatatactgtatatctttatacaagtttgaaatgtatatgtatgtatatatggataaacgtttatatatttacagtctttattttccaagatatgtatacaaatattttggtatgttgatatactatactaaaatacacgtatatatatttgaacacgcgtacgttacatctttagaggtccgaattgctttacttaaaaaacggtctaaatttttaagataatgaaaacgagaggttgaaaacataaagcttaaagtaaagcatgtagtgtgtgtatagatgatagatttggttagctagtggttttcgtatttgtacttctttagaaaaacagacgtttcgttgcttttttctcgggttttgatatgtcccatgtttgaacatcgagcgttaaagtgaatatccactcattatgacacccacttatttttaacctcttctatttaatttttcaagattctgttttccctttttatgtttaaaattcttatattatcttttattaatatttataataattacagagagtttgatcgccgatgagttcacggcggagcttgctgaaggtcttgcctacgtcgctggtcttgacgacgagtgtagacccgttttggtaacttaatctcacttttgataattttgttttttgatttatttcataatcaaaacctatcgtttaatacccttttctatattcctcttaggttttccgttttaagcatgattatcagaagctgcatacccaaaaacagtaagtttatatattagtgattttaaactgtattgatattcttaaaaacgttcctg

SEQ ID NO: 37016 - DNA, 2170 bp, Arabidopsis thaliana landsberg
aaaattagattagcacagatgtactgagaaactttttttgtagttctcgcatactatctagggtatgtccggttgttaaaaaacaaagatggatttgcagatagagaatttggagaactagattaacttcttattcttgaaacaatttgcagaaagggtatttttaattcaaagagaacctaaggcaacttcttattcttgaaacaacataaagtaaaagttcaagattctatgatgtccctgaatatacctgttcaagctaatgatacacaacaataaaaccaaaagggaagagaaacagcttcagggaacaattcgatgcgtatgctttcacattaataacataagcagaacatgcactagtgacaagaagttaccagcgttgaagtaacaggcttcttatttgcaaggacaatacagcaacccaagtcaactgccttcatcaatatttcaatcgtctccatgctggctgagcaatccaccacagctaagcctatagcaagtacatagattttatctatcagaagctatttaggcccaacaccagatttcaaacgttacaaaatgttgaccacaacagttgtaattcaaccttatatttggtacaaacctgtagatttaccaagaagttttgcaatctcttctgtttccgtgcttaactcggaatcatggacgactcgatatccacctttttctgggattaagaacatatgatcattcggcttatgatccataaagagactcatggtaaatacttacccaaagcacccaacttcgataatgcagaaccagttgatttgataaggcaaacttctgacaagagttcatcattcagttcctctttgagcacatccattggagcaactaaggatttactatcacatactccaatcacccgtatatgaactccctgttaaacggatacaagtgagaaattcataatttgtgagctaagctagacgaatttgccttattcccattacttccaacattttatcaactcgagaaaaacctagatgatggtgaggatgataatgcagatgaagaaattttcctctacaagcatggcaaaatcgaagtaagacgattcagaaaccacatttagtataggattcattcattactgagaaatcgagcaatggagacacaagtaagtgaggagaaagagagtaaggaccattttggcgtgaagcgatcggcaagagacgatgtgttgaagaaggtggcggccaacgcctccgcagcccatgagaagcaccgggatcttcttcatccttcctctcttcttcttcgatttcgttttgtttttttctacaactactagtctactaccgtggttttcttcgttcactgaaaatgtcgcagctaagcaaagcccaacgtttcggaaacgcgtgtaatcgtagccaggcgtttcgggtgtcaaaggctactagattggttcttccgcaattacttaaaacgctatatttgcatacgattagtattattagcgtttgataacaattatactttgataacaattacacaaatcgctttttatcgttataacacaacaaaaccgaaaaaaattgagatgaattccaactaaaattcataaatttaaaataattaaaaacattggaattatatattttgcaagttttcctagttatttataatttatgtaactatgtaagtgtttattcactaatgggataatatactaatactagattttaacccgcggtataccgcgggacgatttattttttaaaagtaatatatattaaaacttgcaaattttatttttataaaatatttatattttacagtttataattgttactaaggtaacactataccacgaattcatgagacaattgttaaaaaactgaagtttttaacccctattaaaacagcatgttaataatattttaaaattttataaatattgattcaaatacatccaccatataacccaattccaaaataaaacacgttctgtaatttctttacccgtcccgtgattttttttttaagtagtaattttttaaaatttaataattatttttcatatataaaagttttacaaattgtatcattctctaacacatccatattttatagtttaattttataaatagtaacattatacataccacataacatttttggttttatataatct

SEQ ID NO: 37017 - DNA, 1293 bp, Arabidopsis thaliana landsberg
atgtcatttggatcgtggcctgccgcgtagaagtcatcaggatcgtcgcacatgctgaaaatctttgcatttttgaggacatccggacggtagacaatgtctcttccacgaggaccggatttcaacataggtccgaggtaccaccaacatttgtcagccattttcttggctatcttcgcaagcaaatcgtcaggaatatttgggtttgtcatatttaggagtaaggtgtttcgagaaaatgaaatttgaacaattaaataagcatcattgaagatatggttgggtaagttatattgcaaaggtattaagtgatgatgtgtattcatattgtcaaatcaaagtaatagtattccatatataatttgttatcgttgttatgagcaacctctttttaataacagcttaaaactagacgtgtacgttttactgacggtttcagtgtacgtccacatttacatttctacatttactcaacaaacagtgtacgtcgtagtgtacgttttagtgtacgtccacatttacatttctacatttgcccaacaaacagtgtacgttgtagtgtacgtccacatttacatttctacatttactcaacaaaaagtgtacgttgtagtgtacgtttcagtgtacgtccacatttacatttctacatttgcccaacaaacagtgtacgttttagtgtacgtccacatttacatttctacatttgcccaacaaacagtgtacactgtagtgtacgtccattcataaatatcaccatttatgagacaaaccaaagacctcatatgtttgcatgtgttattttttagtgtacgttagagttgatatctcatgctagtgtacgtccatatctagttttccgagacaaagaaaaaacctttaagtattatttggtagatgcacgtgtacgtagttgtggacgcttagattttaatatccaaatttacatttactgcgggaactaaatatcatatgcgaatttggctgaaaaatattcaacttgagaaacataacacaccttgcaaatttcttaagcaataatataatttcaacataaacataaacaacatagtagaaaccttatcataatttgaaacatgacatagcggataacataaacaaacatataaagtagaatggaataactatagcatttgactaacacgcctggcacacgacgagaggtaacagcggttgcaaacgttttggaaagctcctgataccatgtaacaatgtaaggcgcaaggaggcatactaattccatggctggtaggataagagaacgtaggacca

SEQ ID NO: 37018 - DNA, 1419 bp, Arabidopsis thaliana landsberg
tacagagttttactatacactttatatatgtcatttatggtcatgattaatgtttctaacaactattttaattatataaatagttagtggtcctataaagattgatacagtaaactcctatgtatcagatatacatctaaaaactctttaaagttttttgtctggatctagacaagattccttcgatgagttatgagaaatctatagagagggaagttagagagagaaagaaagacctggagctacagaactcgaagagttttccggtggaagagaagatgatgagagcgacatcggcgtcgcagagaacggagagttcttcagctttcttgaaaagccctcttcttcgtttcgaaaacgtcacttgtctcgccgttgcgttgtcgatcttcctgatctgaatcttttctctcgccatcacaacgaacaaaaaaaccctagaagcaagagagagagcttaggttttgattttaatggatctttcgagaacgggattgattttgatggatcaagattcaagaatgagagatgattaaagagagagtaaagagaagagatggaggaggaggaagaagaagccagaggaaataaattttgtgagagagagaatttttgctaaaaagggagactttaaagaagagagagagagtgacaagacgactgaaatggaaagtaaatcgtgttctttttgctaaatttagaagaataaatatgatttcaagacagtaaaaaccctagtttttgaaagatttgaaagaaagaacacactcagtcttttgtgagaagaattagatctagtcgatgaatcaacaaggaaattagagaggatcaaaagaaaaaaaactcaagaataagaagaaaactaaaggagaaaaaaagctaagggaatatatttaattttccacctcaaaggtcgaggagagaagaagacatgagaaggttttgattggtgaaggatgagatattttcagggagaggttcattaattctataatactatcaagatgatggggtttcttaaatgattatttttggaaagaaaacgatatatattatattctcagaattagcttttttttaggttcttgaactctgtgagtagctcttatgagagtcattacccattacaaatccatgtggaactggttcactttcgtccagagaaagatgcaactcctgaagactgtcactttttccattctcaatcaaatactttaaaaagacggatgaaatatatgttgcattaacagctttcttatagagagaagactgatcatctgaagcttgaagaagctcttgcaaacaccaggacagatgaatcaatagttttgcaaggtgcctagtgtagccattactttgtgctgaaacaaaaaaagaaaataagatcatcctcctactttcactaggtcatcatcaaca

SEQ ID NO: 37019 - DNA, 3838 bp, Arabidopsis thaliana landsberg
cgggaattcacactgtttagggatctcgatctcgtcaccagtaacacttctgatgaaagagatgagagacatgttgcgtgccatctcttgcttccgtgcttcttcattctgtgtcatcctctcggtttcctgttgcctccaagcttcctcacggcgtattctctccacttccatcttctccatcacattaatcaactgattatgcatcttctcctgccgcttcatcatactccccacaagcttctccaagaaatgctccagctttacccttgtttcccgctttcttttacccgtgacggtcttgcgaacgtctggagatgagtcactatcgctgctatcaacagaggagctgcaaaatcaaaaattggaaagtacttatcaaaaactcaaagcttccaacatggttacactatctaagaactaataatccaaaagttccgcaaaatatatagacaaacactgcttagaagtggtataaaccaacactgtaaaagcttgtaatgacggcacaccaatctgattgatatctgcaaagtttaatgctttaagctgagagtgttcagtgatgcaccagtcaaccaatctagaatcaaatgataccgcaaagctcaaatatatcaagaggaagagaatgtgtttaggaggtctctaccaaacaagcttctaataaacgtgaaaaaaaattagactcttaataatacagaaaaaaagtaacaacttttcacagtaacagatccaaagttgaacaaaaagctcacatttttaatggtgagatttatacctgagagagagaccatcccaagagatgcgatttcgagcttgaaactccatttgaagaggaggaagagaatcatcctcttcctttgaaaacccacgagtcaattgaccactttcctccacgtcagcaatcttcgatcccaaaggagcttcgaagcagccaaaacccatctccggcagcctatctagggttccggcgagaatatcaagaggatgtcgatcctccgacgacgacggaagcttaacgccacaccttataggtttcaatttctgaggaggcgaagccaagtctgcgagcgtagccaaagcgtcgtcgtttccgttagaacccatttgacgggtaccgtacatccacccgcagcggccgtccgaaccatcgaatgggttaatatcttcctcaaagtcgtcgccgactcgtttccgacagtcgccggcgagaagttccatttcgggaaaaggtaaaaaaataaaatggccggcgtgaaatccagaagagactgcccaaagtaaaagcaattcaaagggtaaaaaactctatatttacctttataccctcaaaggagtaacataacctccattttatcctcacttcacttcagtcgttttcttacccgtcgttatatgacccgacccgagcccacctgagctgaatatgttctgtaatttgtatctacaccagttttgtgtaaaggcaaaaaacactttagccccgtgtggctcagcgaaagccgcggagataccgacatattttatatcataatccataatccatattaagattgggaatctgagaaaaattagaagaaaatcattggtaatttctctatcaagcgtaggtgtcacaacacaaacaatccagagaaactattccacgtacgtattaacctttgaccttaaccttcttaaacagaaaatattgaagtttttatgttcttgtgatagaaatatacagtaacagaatattttctttggcctttattgacatattttagaagaaaaatagattacttccttgttttattattatttcactcatcatacgttgtagaaagggaaccgcaaagtgaaaaaacaggttttgtatgctcaaatccttcaaacgagtgatcaatctatttagcaatttaaaaactttcagatttatatagaatttgttttgtctgttacttatttaggacaaatctttagtgtaaattgagttgagagttttgttttttcttctctcgtaatgatgacttgccgtttggccaaaagttatggtttaatcaaattgttgttgtgtaataagaataatggccgtcgtcttcgttttcctccggctgatgggttctctgcgtttcacagttgctccaccacgaggaacagatccatgtctgcttctagttcctccacaaatcccatgtcccgtaaggacgcaacaacactgcttccgtctgttcaagacaagtacggtggcgtgatgaccgagatgactcatcccatggatccttctctcttctccacacttctccgatcctctctatctacctggactcttcaggttctctcttccttcttcctcttgttaaatttgatcttattggattcgatcaaaatgacaaattttgttatccgaatcaagatactggtaccgatttgttgttacatagaagaatcattgtaaaagtttgggtgttaaaagtgttagtgtcactattccgcttgaaaattgttgtattctaatgcgggccagaaactctctttcactttgctgcaaaaaaaattaaattcaacttttccactacagtaatagacggtgaataggactatgaaccgatctactgtgaaatgtttacaaacgtttttatgtacgcagggcaaaaagggagtgtggatcaagttgccaaagcagcttattggtcttgctgaaactgctgttaaggtcttgttttgttacctaatgcgcaatcagatatctttaaacccccttttgcttattgtttggagagtcttcatatcacttactggttgtgtattatgtgtaggagggattctggtttcaccacgcggagaaagactacttgatgcttgtctattggattccaaagaagacgatacgcttcctgccaatgcatctcaccgtgttggcataggtgcctttgtcattaaccacaacaaagaggtttgattactgatgagatgagatttttagtgtgtctttttggaacatctccaagaatggatcacatctcttttcttttctgtatttgacatccaaaggtgctggtggttcaagagaagacagggagatttcaaggtcaaggtatctggaagctccccaccggagttgtgaatgaggtgctggttcttattaaagctcattacatggttaggttcagctctctgattcgcctttttgtgtttgtgttgagtcagggtgaagacattcatgatggctcagtcagagaggtgaaagaagagaccggagtaagccttcttcatgcctcaacttttcactgtcctctttacagtttacatgagaccaagagctaatcccactcttctgcatcgtatgttttcaggtggatacagaattcgaccaaatattggccttcaggtaacaactccaactgcataatcttctatattgcaacataactgattcttgtctgttttaaaattctggcagacaaacacacaaagcgttctttggaaagtcagatttgttcttcgtgtgcatgttaaagcccctttctttggagatcaacgcacaggagtcagagattgaggcagctcaggtaacagtttttgctcctcacttcaacgactctccagtctcatccactaaaacactcgtcgtcctcatctctttctgaaaatgggaatttggtgcagtgtatgccttgggaggaatacctaagtcaaccatttgtacaaaattatgagctattgaggtatatgacagacatttgctctgctaaaaccaactgagactacgaaggcatcagtactctccgcgtctctgcacctgatcaacaaggcaacttgtactacagcatacgcgacttacattcgcgcaatt

SEQ ID NO: 37020 - DNA, 702 bp, Arabidopsis thaliana landsberg
atacctttgagttcaaaacttaaccggaccggtatggtgagcaaggaattgttcttgttgttgagtcatatacttacaccatgatttcttgctaaccgttaaaaattaatcaatctccggtccagttttcaaaacattggtttggtttagctcgaagataatcaagtgtttgaaccgtgtctgaagagtttctgaccggtcctcgagtaaattgactttttgtttgtgcatagaatttgagccgacatgtagtatacagatatttgttgtacttttgtcagaaataggatagtttatgccgacatatacaagtttttgatgtttatgtctatttgctttctaaccaattattcaagggatacaaatcgcctcctattttttgcacatgttatagcttaatgacttgattagtgagttgtgtgctttattcgatactttctgatcaaatttagtggaaagtattgttgtcataagaagtaacgaggcgtatctttgttatatttgtcacttgcgttttgattaggcaaagtgttgtttttgcctttatatatcaatcttgttaataaattaatgaaagttgatattcgtttcattttttattagtataaatatcgtgttatatagaaaatattattttgtgtcggtcggttctttatgttaactaaccgcttgtaaattttggtttgatgttgtagaaagcat

SEQ ID NO: 37021 - DNA, 1643 bp, Arabidopsis thaliana landsberg
taaattacctttttgggtactaaattcaaaattctcattcacttttgttatgttttctttgttgatggttgatagatccaactaatttatccagaattgaaaaagaggaagaacaatttagattaatataaatttaatgtagtaaataacaaagatttctactttatattccaaaattaataaatagaattaagactaattgtcttttaaaagaagaaggcccataatccaagaacaagcccaaatacgacactaaatccgccggcgagcttagcgacaccactagtaggagctacggctggaccgtcgaactcagatggcgaaggacctggagagaaagcagagttacgaggagtgatgacgactaggcgtagcttctgacccttttgacaatgaccctctgttccactgatgaagtagaccggaccagcttggtcaagcttcacctttgtgttcccgtcggtgtagctggctttagggctagtggtgttgcatttctcgtaagcttctcgtgtcacttgcagaaccgagtctttaccggcttcgtacttgaatactgtaataaacatgtgacgatgtcagaaacagagtatattgaagatcacacaaaatgtctaattgaaaaaaaaaagttgaaaattatggatttaccgataaagtcgccgactttgaagcgagccttttgagcccattcgttaaaggagaaagaagaggaaggagggatcttccagtcaccggattttccaccgacggtaacctcatttgcattcacggacgaaaagaagaagacagagatgcagaggaagatggtgaccaaaagagaagaagaagccattgattagaatttaaaaccttaaaagtattagagtgtgtaatgtgttttaaagtgtgttgaggatggagagagtgtggatcttgtgtggtttatataaaggtagaggacttggaaactagccgtttaggaattacgaaaaattaaaaggaaaaaattgtaaatgttaatgtatccgttggagagatgataaaggcaacgtaacggttaggattgagcgacaaaacttgaactctgatagagaaagtgatttcacggtcttctaggaagactggtcaagctaagctgtttctgttttttgtttttgtactttactttttgtttgctagtgggaactgggtttattgggccttgaagttgataaaagatgaataaaagacatatcgcctaaagcccatatgagaagcagaagacaaaaacctccaactttgggcataaattttgattatagttaaaagtccagacccaatttggcacctggcttagttacgattctaaggcatgacacctgcctaatatgtttattacagaaaataaagagaatcagctaggtgtcccttattgaacacattaacaaactccaacgacactacgtgtcttcgtgactcttactatatccaaaaacctatagctaaagctgaattttccatgattagtatagtcccaaccaaaaaaatactgaagaaggcataagcatggccggagaagaagactggagaaaaacagcagatacgacgaagatgagctcggagggagtaaaagctgccggcgttgagtcatcaaagaggccgccaggaagtaatccaggtgg

SEQ ID NO: 37022 - DNA, 1301 bp, Arabidopsis thaliana landsberg
ttttgataaagtatgttaaaaaaaacttcccgctgaatattcacactctttatttatagaaaatagtatatataatgcaaaagtaaagaaatatactataaacttagaatttttggggtccaatggtttgacaaaatgtaagcaaacgtaaaacgagtatgggaaacagaaggagaggcattaaccccaccggctttattaagtgatcttttttgaataacaaacactaaagtctaaagcttacgttcctacttgctacaccatttttcttttcacataacacaaaatagaacaaaagaaaagtctattcttttcgtaaatgcatctgcatccatgggaaatttatttgtagtcaaaaacatatctataacaggatattgaactatttcgaatagatagctactgatgaattttggacgacagaaaaaactaaattctgatattttaatggtcgaaatcaaattctatttgagatattgtctcgtactctcgttagattcaatagctttcacttatcgattgcgaacgcatattcaagaggttaatctcaaggaacgaatatttaatacgaaaaaaaaagtgcatgaatgttgtccaacaaaatggtgggttgtagtaaggacccttttttaacgtactgtgttatcatcacacgaaccagtgaccactacggataccttagacactaaaataaccatctcaatttatcgtcagcaatacgtaagttatgtaacaaaagaatataaaaacacgtaatttacgttacatgcgtcctttttatgtgtgtggcttttgtatattcttttgattattgccaaaaatgttgccagaagagctcgaatgaaaggtatctatctattagtataaaataattcgagtgtgtgtggggactaatcctctggagtaccgtgaaatactaagattattaaagcaattaaccatttaatgaagtgtcggtgttcaagtgtgttcacatatgcgggatgcctcatatccaacagaactaataaaaatttcttgattttggtaactcacatgaccagctaagctatgtgaagttatatttttaaaaatcttatgaaatgtcaataacattttgtttggtttataatggtatcatcaatactttacatcacattgcctaattaagagggaaaagagaaaacaaataacctccttttttacatatattacggataacaatttcctgaactatagatattgtatctctacatttttacatattttgttgttgtttagtgtgatatttgagattccatccatatttctttatgaaatta

SEQ ID NO: 37023 - DNA, 1021 bp, Arabidopsis thaliana landsberg
  unsure (1)..(1021): unsure at all n locations
ttttttttttgtttaagcacgaattaaaaaaccattgaaagtactttccaaaaccaaacacaattttcttctccctgcggttatatatagacacggataagtcaaaagaacagaggaccccgagacccaagaataagatcccaaaatgctcacgacacctccacgaactttagtctctgtccctttcttcttcttcttcctcctcttcctttctctacctctctcatctttctttcaatcgaactctgtatacaactctttcctcaagtgtttctccgacaagacgaaatctccacaatcccaaatcactgacaatgtcttctctcagacaaaccctgctttctcctccgttcttcgtgcttacatccgcaatgcgaggttcaacacttcctctactcttaaacccaccatcataatcactcctcgctccgagagccacgtcagcgccgccgtcacttgctcaaaaaccctaaatttcctcctcaaaatccgaagcggcggccatgactacgatggtctctcttacatttccgacaaaccatttttcatcctcgacatgtcgaatatccgtgacgtctctgtagatatcgcatcggattcggcatggatctccgccggagcgactctcggagaggtttattatcggatttgggagaaaagcagagtccatggattccccgccggagtttgtccgacggttggtgttggtgggcatttaagcggcggtggttacggtaacatggtgaggaagtttggattatctgtggattacgttgaggatgccaagatcgtcgatgtaaacggtcgggttttagatcggaaagcaatgggtgaggatcttttctgggcgattaccggtggaggaggaggtagctacggcgtcgttttgggatannnnnnnnnnnnnnnnnnnnnnnnnnnngtcgttacggtgtttagagtggagcagtatatggattcaggagctgtggatatggtcacaaatggcaatcggttggtccgaaactgatcggggtacgag

SEQ ID NO: 37024 - DNA, 1964 bp, Arabidopsis thaliana landsberg
ggtgcggctttttttggactcctgctggctttaccccatttgggccggctctgaacaaaaaatgagttgagcttcacttttgtctaactgaatcttttcaaccaataacgtgccgccatttgctaaactttctgtagacagaaccgtacatgattattctctcctccttggttggtcgtctccattcaggcaagagtgttgtgttcaaaacccttaaacccaactgatcaaacgcatacatacataactccgtcatcttcgtctttactccaaaattccagacatttgaagcttttaagcatctgggtatttgatcttctatccacagatcatagaaacccaagaggcaaatgtctatttccctaaaaatttcccacatttcaagtttctccaacgatgggttcaatagtgtaaagcaatgcagagtgagtcaaaggtttgaaattagatcggtttgtttccgtagaagccctggtgttgaatctagacggatccatttaaattcggacttgtcttctcggaatttgagaaaccgatgtgtaggatcggatgtggttacgggtgaaatatccggtagatcgataccggattgggcttatagtggcgtaaaagatgagactttaagcgatttggagccggaacttgatgatggtgatggcggcgatgagaatgggaacaacgacggtggtggaaatggtggtaatggagacggaggaggaggaggtggagatggagaaggagatgatggagaggatgaagcagataaagctgaggagaaggagtttggtccgattttgaagattgaagaagttatgaaagatacagaacgtagagggattacgttaccggaggatatgttggaagcggctaaatccgtggggattcggaaactgttccttcttcgttaccttgatctacaggtttttgcttttgagaaaaaatgattctgtttttgtatgatggtgattcatgtttgagtctgaattttttcgtagggttctgtttggccgcttgggtttctgatgagatcatgtgcgatgcttcgaaatagaatgcttgcagatccttcatttctcttcaaagttggaaccgaggtttgtcaatgaataagctaatgctgttcttggactagttatttaggattgaaattgaatgatcttgttctacggatttaatgcaggtagccatagactcttgctgtgcaacttttgcagaagtacagaagagaggggaagatttctggtcagagtttgagttatatgctgctgatcttttagttggtcttgtggttgatgttgccttggttggacttttggctccttatgcacgtatcgggaagccgtctgtggcatcaacaggtttattcaaggatcttaaacgtgcttgtgcatcccttcctagcaggtaatactgttactgtatctctctcgtttttttcacttttgtgttaactgttcccactgatatctatcgagctggtggctgtgtattcgggatgagatgtacttatacatgcttatttttttgtacttctgaagtgtttttgaagcagaaagaccgggttgtaaattctcagttaaccagcggattgcaacattcttctacaaggtatggagaagaactattgctttaatgtcctttgtggatcttgcttacctttggtttgattaattgatgtgattcttgatccagggcctcttgtatgggtcggttggattcggctgcggcctcattggtcagggaattgcaaatctgatcatgacagcaaaacggtattctttcaccatcgactttatcttgctacttttcaatgatgaaatgaaccttctgactgtagaaaaaactgttcttcactgcaatttgacgacacctttgttaatacgcgtgtgaagaaatccgaggccgacgtccctattccacctcttttcgacagcgcggctctctggggcaagcttcacttttga

SEQ ID NO: 37025 - DNA, 2997 bp, Arabidopsis thaliana landsberg
tggttgcctaataatgccacaatcaaagttgatcacatagacatatccgatataagagaaaaatgcctgcactacataaattaagaaaaacttatatatatatatatatatatactttacaatcgactataataacatcgctgttaaacaaatagtaaaatctaacctactaactatagctacattagaaatgctaaaccaccggaacgataatgcaaaattagggtgtccaacgggcttcgacgaatattggcttggaaggaagttaaaaacccacagtagtaaatgccatcttggtgagaaacattcataaaaataaaatacaatttctcggcccgaatcaacgtccttaacctctccttaacaaaaaaaaaaagcattcataaaataaaatgtcaaatatatggtggatcttgggagagttcatatccaacattgagattatgatggatcttcttgcaagtggacggtagctagtgtgatgattcttggaaccgaatgttaaagacgaagtctttcacttttacatacggaaacagaagcgttgatatgaacaatatcgaagtttttgtcacgagagatgtattatcaggaatttaatttagatgtgaattagtcaacttggtaatatctccttgtttagtgttttctccaacatcttaaataagtttcgtgtgcttcgatatatatcattatttttctctttttacttttattgatgtagttaatttatggtaaaattgtttagctcgatcttcaaggatcaaattcaatccaataaattcgtcctttttcaaattgggtaaccactacccaaccaaaaaaaaaaaaaaactttttgaagttcaacgtggtcgataaaaaaaacctatcctattaagtattaatctggtcgacaaagaaaaaaaaaaacaaattcatattattaaaaggagaagaaaaaaaaaacattttatcaacaactccgaatgaaacagaaggttaaagacaacccggttttatctgatccggtacattcaacccggttcttcaagcattctcgaatctaaagatttcaggtttcccattgcttcgttcttcgtatcgtatgtgtctgggttttcttttctgtagatttagtgccaccttgttggcgaattgggtcgacaatttcgataactcgctagaattggaaggtttcaagttttcactttcaaggtacccatatatagcatcgttgttgaaatttccgaatcagaagttcttaaagcttaaatctttttgttttattgtgtgtgaaagaggtgtaatgagcagacattggtgcttgtggaagccgaacaaacgaatcagcacaaaaccgaagacgtgactccaattttttttttaaaaaatcagagctttcaaattcttaacttgagtcatgcggggattgattcagacacgtcttctcgagacaggtactctaagaactgctttattcttgtcttgctatggacgagtcttttctagtgtcagcgctgggaaagggaaagtctcctatagagagagattgagaagtgggattgctgatatcaaggaagatgatgctgttgatctgtttcaagaaatgactaggtctcgtcctcgtcctagtcttattgatttcagtagattgtttagtgttgttgccagaacaaagcaatatgatcttgtgttagatctctgcacgcaaatggaattaaagggaatcgcgcataacctctacactctgagtattatgattaattgcttttgtcgatgtcgtaaactctgtttggctttttctgctatggggaagatcattaaacttgggtatgagcctgatacagtcacattttcaactttgataaacggattatgtctcgagggtagagtttccgaagctctggaattagttgatcgaatggttgaaatgggacataaacccactctcataacgcttaacactctggtcaatggactttgtctcaacggtaaagtctctgatgctgtgcttttgattgatcgaatggttgagactggctttcaacccaatgaagtaacttatggaccggttttaaatgtaatgtgtaagtccggccaaactgcccttgccatggagttgctcagaaagatggaagaaagaaagatcaagctcgatgcagtcaaatacagtatcatcattgatggtctgtgcaaagacgggagcctcgacaatgcattcaaccttttcaatgaaatggaaatcaaagggttcaaagcaaatattattatctacaccactctcattagaggcttttgtaacgctggtaaatgggatgatggtgcaaagatgttgagggagatgattggaaggaatatcattcccgatgttgtcacatttagtgctttgattgatgtttttgtgaaagaggggaagcttctataggctaaagagttgtacaatgagatgatcacaagaggtatatcacctaatattattacttataataccttgatggatgggtattgtatgcagaaccgtcttagtgaggccaacaatatgttggatcttatggttaggaataagtgcagtcctgatatcgtgacttttacaagtctcatcaaaggatattgtatggtgaaaagagttgacgatggtatgaaggtcttccgcaatatttctaagagaggcttggttgccaatgcagttacttatagcattcttgtccaagggttttgtcaatccgggaaaataaagctcgcagaggaacttttccaagaaatggtttcacacggtgttcttcctgatgttatgacgtatggtattttgcttgatggcttgtgtgacaatgggaagcttgaaaaggcattggaaatttttgaggatttacaaaagagtaagatggatcttggtattgttatgtatacaaccatcatcgaggggatgtgcaagggtggaaaagtggaagatgcctggaatttattctgtagcaaacctaataaaggagtgaagcctaatgttatgacatacaccgt

SEQ ID NO: 37026 - DNA, 2844 bp, Arabidopsis thaliana landsberg
cttttttttttttttactacggaaggattctgatttctctcttttttcgaggtgttacttgttagaacgggataagatcgtaatctttttttttattatgaagatgacatttgaccaaaaaagtataaaatctctttttgtatttgttttcttatatagcattagtatattctgacaatattccaacgagcattgatgatttttgtggaaatagacatcaaagtaggaggaagacatgcaaaatcagtattaaatttttaatttgttatgtgaagataaggtcaagaaaatgacgtatttacttgttggaacttaattccaaacaattatgtaccaaacacgaatccatacgcaaattatcacaaatctcaaagtggcaaaacttcacatttaaaattttcccaaaacctaaccaaattgaaatctatctaaccacgtgaagatgtaaatgtgtataaccctttttgtttcgttgtctctcagattctggaatttgagtaaaagcaagaaaaaagtcaaccgttgcaacaaactcttaaaaagaagcaaagtagtagcagaagaagaagaagaagaaaagaaaatggcaggagggtcgtttggtccgaccggtgtggctaaggagagagcagaacaataccaagggaaagtcactagttatgttataatcgcttgcccttgttgcagctattggtggatccatctttggatatgacattggaatctcaggttcttttcttcatcttttgaatccaatttcttaataatcttatcaaacaatggctgaaatggttttttgtttgtatgcaggaggagttacatcgatggatgagtttcttgaggagtttttccacacggtttatgagaagaagaagcaagctcatgaaagtaattactgcaaatatgataatcaaggcttagctgctttcacttcttcactctacttagctggtttggtttcgactctcgtggcttcacccatcactaggaactacggtaggcgtgcgagtattgtttgtggtggaatcagctttcttattggatctggtttgaatgctggagctgtgaacttagctatgcttcttgccggacggatcatgcttggtgttggtattggatttggaaatcaggttagacaattgtttagttggtgtcaccaataataaaccaatctcatctctaatgaaagttaccttgctttggtttttgttttcaggcggttcctttgtatttatcagaagtggcaccaactcatctacgaggtggtttaaacatgatgtttcagctagctacaactatcgggatctttacagcgaacatggttaattacggtactcaacagcttaagccttggggatggagactctctcttggtttagctgcttttccagctctgcttatgacgcttggcgggtatttcttacccgagacaccaaacagtttggtcgaaagaggattaacagagagaggtcgacgagtcttagtgaagctaagaggaacagaaaacgtcaacgccgagcttcaagacatggtagatgcgagtgagcttgcgaattccatcaaacatccattcagaaacatcttgcagaaacgacacaggcctcagctagttatggctatttgcatgccaatgtttcagatactcacagggataaactccattctcttctacgcacctgttctgttccagacaatggggtttggaggaaacgcatctctctattcatcagctttaacaggagctgttcttgtcctatcaacatttatttccataggattagtagacagattgggacgaagagctcttctcataactggaggaatacaaatgataatctgtcaagtcatagtagcagtgatcttaggagtgaaatttggagacaaccaagagctatcaaaagggtactcagtgatcgtagtcatcttcatctgcctctttgttgtagcgttcggatggtcatggggtcctctaggttggaccatacctagcgaaatctttccgttagagactcgttcagcggggcagagtatcacagtagctgtaaatctcctcttcactttcatcatagctcaagctttccttggtctcctctgtgcattcaagtttggaatcttcctcttctttgctggttgggtgacagtaatgactatctttgtgtatttcctgttgcctgaaaccaaaggagttccaatagaagagatgacactcttatggagtaaacattggttctggaaaaaagtattacctgatgcaacaaatcttgaagatgagagcaagaatgtatctggttaaagaagatataaaccgattcaagaaacttatgtttgtattactataaggttttttattgcataaggagagatttgaatcccatgtgaaagtgacaactacaaacttcaaaatccgaaacaaaactaaaaaaagcgattgaaaatagtcacagtgactgttacaccaaaacactcgattacagagtaaagattttggttgcaattggcgttttgtgatcaccttctccatcttcttcttcttctttgagataaacaaagagatttgtttactctctatctcaggatttcttcacacatctgctcttacgagaccatcaaaagacggtttcgattttagggtttttggattccccaaatcagatgatctaaacaaggagaaagttcttagtccctaagaaacatggaattggaacacagcttggaggcggggaaagagagcaattagctccggcgaagctttgcaatcccaaagctctgatcagctatatcagaatctttggatcaggaacaatgctattggtggccgatgcactcagatcaacatcttttatc

SEQ ID NO: 37027 - DNA, 1213 bp, Arabidopsis thaliana landsberg
  unsure (1)..(1213): unsure at all n locations
ggttgacatgttaatgtgtgagacatcagatacgttcaaagttgctggattgaagatgctctgtttttgatgtaagagctaggtggtactttgtaatctgtaatttatttccacccgatttattttacttaatttgagaccaaaataacatgtttgaatgtgtacggtcaaactgaccttggcttacggggttctctttcactgttttttttttctctaaaggggtcgagtagatcacctaaatgaaatagaggggttatttataaattaagtaaaataaaaggtacaaatgctgacctagtcgtgtttaattaaatatataaagtccaaaatcgaaaaacactctccatcgactctcgtgtttaaccctaatttcaaaaacgtcgtctgccgctatgagttctgaagtcgaaccaccgcagaaaaagaagcagccgtggcttccagattatatcgttgagaactgtttagcacacatatcgagatcgtactacccgaaactctccctagtctcaagtcctttcgctctctcgtcgtatccaaagagctcaacaaagcgcgatatcgcctcaacaaccgaagaatacttcttccacgtctgcttacagcttcctaagagtcctcttccaacctggtacacgctctggataaaacctgatcagatcgagaagaagaagaagattaatacgtttactggaaatactcggttggtacaaataccatcttcctatcattatccttttgacctagtgttcatctttaatctttatggtgctatgcgttcatccaaggcaatggtccgtcccccttcatatgggttggtaagcatgttttgaatagaactcgtcgtcgttgtttgattgagattggtaactacggtgggaaactattaatcttatggaataagtttgtgcatcctggtcaatttggagataaacatatttggtgtgaggtgattgctcttgaaagacgtaacggtaatggcgatgattatgaaatttggggaaacgttgagtggactaatgttgtgcttacggttcccggttcatacgtcttcgtgcgtagtttacagaccaatactgtataagcatgtttntcttttgaccattgctaatgacttactttattgtcattttaagaatttccgttcttacattaaaataatttattaggtactatttaatttaaataatgggcattttaaaccgaaaaa

SEQ ID NO: 37028 - DNA, 2296 bp, Arabidopsis thaliana landsberg
tgttctttaagtttctagcgaaagggatcatcgcgaacacgatgtagaaagaaggaattccagctgagatggataagagctggatgttcagcataaatggttttgcaagaaagagtacaattaggatccctacgatgacttcagtcgtagctattaatgtttccatagatagcaacttagtaacaagtgttttcttcggtttaatttccagcttaagaactccattttcctcctgcaacacattaccatatttcaaaaccaaagcctgtttttaaactagctagagaaatatccaaaaatgacatttctcttgaaatggaaatagacttacagtctgattctctctttggtcctcaacgttgaatttgtattgtttgagaagtctcgcaatcccttcctcgaattcattctcttctaattcgccgtcgttgtctccatcaaaatcctcaagaaaagctttagcaagctcattgatgtcatatctcattctcccaaagttggaaagctctatggttaagtcttttagttcagatatttgtatcttcccatctttgttcttatcagttttcttgaacaaactatcgatttaagcaatgatttacgacgtaagaaggctgaaatgaaactattattgcttcaaaaatatagagagaataaaaccttttcaagctctctttgcttagttctccatcttttataaggtgtttcggtgaaaacctctttaagtgcttatgaacttctgacatgagctcaaacctcgcgtgatctaagctcttctcttggttagccgtatcaagatactgcagagttccacaaattgtcatttagataacaaagcgaaaccaaaagggtttacttgtgttttctagagggattataccgagtaaacaaagtagacaacggttgaagaagaagaaattatgagtgtgatcaacacaatgatgtgactccaagaatgtgaatcaaatatagccgaaaatgtcaccatgagaaagggagatagactcaacagcataatccctgcagctttcttattcttaggatccgcttctactcttgcttctgcatatataaacataaaccacaaaatcttcatacagaaaaatgctcaaagagaattaaaaggggacctaaacttaccaacaaagcctttcaatatctttagtctttcgatcaatccatcctgtatgatttttcgatgaacattcagcaaccaatccttaatttactaatagattaaggaaatcctacagaggttgttcttcttactgcttggtcagaacgtggaccagtgatgctaaacacaacacaagctccccattgaattgtgagagaaaacacagtgtgacccacagtaagtccaacgttttcatctataaaggagctagcaacatctctgctcaatgatagtccagtcgctgagatcaaagaatatatacgttttcagatattttcgtagaggaaaccaaagagaaagagaggatccttacagagcataagagcaattcttgggaacattgtaagaagagggaagatgataccaccatagaacccgacctcgaatattacaaagagttttgatcttccttcagataagaaatagtcaccgatgatcaagagactcccaaaggagaaaacttggaagatataaccttcaacattgtctgcacatggaagaaacccgtagacatgaacacacgcggtccttgacaaggtctttggaggatcgagggtgagaaactcgtgattcaaggcgtcatggatcccatcagatagcaagatcgagttattcagagggacatgactgatcaggacacgagagctcacaccagagataatcagagctatagagagaagggagaagaagagagtaacacctgccatggaagtaagatcgaagatctaatggggatttgatcggataattttcctctgtatacaatcggacaagatcttaaatatacaataaacatagaggctttaaggttaattgtagtacgatgaagactgataggattatgttttgataaagcgtattaacaaattattaagatgatgaatggtacgtttttaaaaacatatccccttgtaatccatatacgtaactaagagctttgaccctttcatttggacaagacagtgtgtttgtgattaagagacaccctaatggagagtcgttgctaactctaaagcgtgccatggaagtaatcttgggatgaaggagacatgcaatggacctctcatgttatgtagctatagactagaaagattgtataactaaggtcataaatgctcg

SEQ ID NO: 37029 - DNA, 3666 bp, Arabidopsis thaliana landsberg
  unsure (1)..(3666): unsure at all n locations
tattttaagagatttttcgatgtactgagcggtggtggtaagacttatccaatctttgataagacagaactcgccggtcagaaggccgtgccaccaccggagtatgttttttactttttgatcagtgatggctcctccatctccagtctccaggtaggttatgatgtttgatttcaatacatttttggcgcataagatgttcgatgaaatgccaattagaacttttttaagagtctaactttgtttattcccctctcaggttgttgttgattctgcgttgtcaactgttccagcaactcagcttatggctctagggacttgtattgtagctgaaggtgtgttaagactaccattggctgcttctgcaaaacatgtaattgagcttgaggcagagaagcttcttcatgttggaacagtggatccagagaagtatccactctcgaagaaacagcttcctctgcatatgcttagagacttctctcatttccgtccccgcacaactacggtttaactatattttaacatttttctcagatgatcttaggactctggttttatgttcttctttttttatctaactatgtcatgaaagggcaatgaggttaatatatatttctcttctattgttggtaaaggttgggtcggtgactcgagtccacagtgcgctaaccttagcaagccacacattccttcaataccatgggtttcagtatgttcaagtaccagtcatcacaacaaccactggatttggcgaaatgtttagggtcactactcttttaggtaaaactgatgataaagaggagaagaagcctcctgtccaagaaaaagatggatttagcattgacaccgtaaaggctgtgataaaggaaaagacgaggcttattgatcacctcaagagatccgacagcaaccgagaaaccgtggttgctgctgtacacgacttgaagaaaacgaacgatcttgcatcgcagattgagatgaaacaaaaatccaaaacaggaactttggtcaaacctgagaagcttgatttctcgaaagatttctttggtcgcgacacttatctgactgcttctgggaggtttcatcttgagagctatgcttctgcacttggaaaagtttatacctttggaccaagattcatagctgataaaattgacaatgcaaggcatttggcagagaagtggaatgtggaaaccgaaatggctttcgcggaattggatgtaagattcttataacactgattttcggtagatgctattcaatgatatttaacaaatggtaacttgtttcgtttgactgttacaggatgctatggattgtgctgatgaatacttcaagttcctctgcaaatatgttctggaaaatcgcgatgaagacatgaaattcatatcaaaacgagttgacaagaccatcaccacacgtctcgaagcaacagcatccagctcccttttgagattctcctataccgaagtgattagtcttctgcaaaaggtaaatcactctcaaatcccatatagttcctatatgctggtgtgttgctataccataatgatctgattctctaaaacaggcaaccactacaaaatttgaaaccaagcctgagtggggagttgctttaacaacagagcatctaaggtattgtttttgccaattgagtctttgtttcaagatccgatttaaattctctgtgtatcgttcaatgttgcagttatctgactgatgagatctacaaaggtcctgtaattgtacatacctacccgaaagcaattaaacagttttacgtaaggttgaatgatgataagaagactgtagcagcgtttgatctggtcgtcccaaaggtaagaactgaaccaaacaacacttttatcaaaaattaggtcgttgcagggtgttacaaaagtcttcacgttttttacaggttggtgttgtggtctccgggagccaaaacgaagaacggtttgagattctggatgcgaggatcggggaatccggattcacgagggagaagttcgagtggtacttagatttaaggaggcatgggacagtgaaacattcaggaataagcctaagcatggaacaaatgcttctgtatgcgaccgggcttcctgatatcaaagatgccattcctttcccaagaagttggggcaaagcaaacaattaaagcagcctcaagctatttaatttacgaactttaagttacattgttatgtattctctgtaaccatacttgggtgtgaaataataaggaacccctataccaaattgttcataatcctataccaagttttagtatatttgtattgataacatatctactcaaaattgtactcactgcgagtagatttgatgttctatagttgattcaaaaatagttatccagccacacaatttctgtgtgattccctcactagtcaattttgtgtagtcagatgtataaaactggctggtagcagtttttgactctttctttctttcttttttgataaaggtttttgtaagcttttgaaatatagtttgaattttgaatatggtggttgaaataaatatgaggaaactatggacaacaaaaaatgtagttgagaaatgtatatttttttcttcatttaatagaaacttattttcagaaaattaaatgttatctagcaaattttaagaggattaggtgttttcgaattttagcaaaattaaaaaagcctaaactttggcactaatcaaaatctttaaacgtaattaattaagaatttaatgagtttgtctataggaaaccccgccaatcacgcagcttgtctgtcaccactttaccacttatcaaagcttcttcaaagcttgcaaaaaattctccacagtctcgaagaagtagaagaagatgggtaaggaagatgaccgaggagaagagtacctgttcaagattgtcctaatcggcgattccgctgtcggaaaatcgaacttgctgtctcgattttcgcgggatgagttcgacacgaactcaaaagcgacaatcggagtggaatttcagacgcagctggttgaaatcgaagggaaagaagtgaaagctcagatctgggacactgctggtcaagagaggtttagagctgtcacttctgcttattacagaggtgcttttggtgctctcatcgtttatgacatcactcgaggtgacactttcgaaagcgttaaacgttggctccaggaactcaacagtaagtcttcttcccttctcactcttttctctgaggaaatctgttgatgtcgttgagcaccattgatggattctataaatgactaaggtgctcttattctctctctgttttggaacaatcttttggagtttgtgaatccaaacacttagaattgatcaccattagtggattctgctgctatgaatctgggtcattcttcattgattctatttttagcttgaggcagtgagaggtgattggtttcactgagctgagaagatactctgttttgttcctcaagtttaagattatttgtttgtgaattcaagacaaatccctaacactttgttttgttacctcgcaagctcattgtgacacggcagtggcacaaatgctagttgggaataaatgcgatttggaggatataagagcggtgagtgtggaggaagggaaagctcttgcngaggaagaaggattgttctttatg

SEQ ID NO: 37030 - DNA, 3304 bp, Arabidopsis thaliana landsberg
gaaacaagacgaaatcactgaaaaacatgaaaaatgtgaaatgcacacagagggacctggaatatggcgagaaaacttaaaatcacgaaaaatgagaaatacacactttagtacgtgaaatatggcgaggaaaactgaaaaaggtgtataatttagaaatgtccactgtaggacgtggaatatggcaagaaaactgaaaatcatggaaaaagagaaagatccacttgacgacttgaaaaatgatgaaataactgaaaaacgtgaaaaatgagaaatgcacactttaggacatgaaatatggcgaggaaaactgaaaaaggagggaaatttataaatgtccactgtaggacgtggaatatggcaagaaaactgaaaatcatggaaaaagagaaacatccagttgacgacttgaaaaatgacgcaatcactgagaatcgtgaaaaatgagaaatgtacactgtaggacctggaatatggcttgaaaacttaaaatcatggaaaaagagaaaaagccacttggggacttgaaaaatgacgaaatcactgacaaacgtgaaaaatgagaaatgcacactgaagcacctggaatatgacgagaaaactgaaatcacggaaaatgaataatacacactttaggaagtgaaatatggcgaggaaaactgaaaaaggtggaaaatttagaaatgtccactgtaggacgtggaatatggcaagaaaactgaaaattatggaaaatgagaaacatccacttgacgacttaaaaaatgatgaaatcactgaaaaacgtgaaaaatgagaaatgcacactgtacgacatggaatatggcaagaaaactgaaaatcacggaaaatgagaaatacacactttaggacgtgaaatatggcgaagaaaactgaaaaagatggaaaatttagaaatgtccactgtagcaagtggaatatggcaagaaaactgaaaatcatggaaaatgagaaacatccacttgacgacttgaaaaatgacgaaatcactaaaaaacctaaaaaatgagaaatgcacactgaaggacctggaatatggcgagaaaactgaaaatcacggaaaatgagaaatacacactttaggacgtgaaatatggcgaggaaaactgaaaaaggtggaaaatttagaaatgtccactgtaggacgtggaatatggcaagaaaactgaaaatcatggaaaatgagaaacatccacttgacgacttgaaaaatgacgaaatcactaaaagacgtgaaaaatgagaaatgcacactgaaggacctggaatatggcgagaaaactgaaaataacggaaaatgagaaatacacactttaggacgtgaaatatggcgaggaaaactgaaaaaggtgtaaaatttagaaatgtccattgtatgacgtggaatatggcaagaaaactgaaaatattggaaaatgagaaatatccacttgacgacttgaaaaatgacgaaatcactaaaaaacgtgaaaaatgagaaatgcacactgaaggacctggaatatggcgagaaaactgaaaatcacggaaaatgagaaatacacactttaggacttgtaatatggcgaggaaaactgaaaaaggtggaaaatttagaaatgtccactgtaggacgtggaatatggcaagaaaactgaaattcatggaaaatgagaaacatccacttgacgacttgaaaaatgacgaaatcactaaaaaacgtgaaaaatgaaaaatgcacactgaaggacctggaatatggcgagaaaactgaaaatcacggaaaatgaaaaatacacactttaggatgtgaaatatggcgaggaaaactgaaaaaggtggaaaatttagaaatgtccactgtaggacgtggaatatggaaagaaaactgacaatcatggaaaatgagaaacatcctcttgacgacttgaaaaatgacgaaatcactaaaaaacgtgaaaaatgagaaatgcacactgaaggacctggaatatggcgagaaaactgaaaatcacggaatatgagaaatacacactttaggacgtgaaatatggcgaggaaaactgaaaaaggtggaaaatttagaaatgtccactgtaggacgtggaatatggcaagaaaactgaaaatcatggaaaatgagaaacatccacttgacgacttgaaaaatgacgaaatcactaaaaaacgtgaaaaatgagaaatgcacactgaaggacatggaatatggcgagaaaactgaaaatcaaggaaaatgagaaatacacactttaggacgtgaaatatggcgaggaaacctgaaaaaggtggaaaatttagaaatgtcccctgtaggacgtggaatatgacaagaaaactgaaaatcacggaaaatgagaaatacacactttaggacgtgaaatatggcgaggaaaactgaaaaaggtggaaaatttagaaatgtccactgtaggacgtggaatatggcaagaaaactgaaaatcatggaaaatgagaaacatccacttgacgacttgaaaaatgacgaaatcactaaaaaacgtgaaaaatgagaaatgcacactgaaggacatggaatatggcgagaaaactgaaaatcacggaaaatgagaaatacacactttaggacgtgtattatggcgaggaaaactgaaaaagttggaaaatttagaaatgtgcactgtaggacgtggaatatggcaagaaatctgaaaatcatggaaaatgagaaacatccacttgacgaattgaaaaatgacgaaatcactaaaaaacgtgaaaaatgagatatgcccactgaaggaactggaatatggcgaggaaactgaaatcacggaaaatgagatatacacactttaggacgtgaaatatggtgaggaaaactgaataagggtgaaaatttagaaatgcccactgtaggacgtggaatatggcaagaaaactgaaaatcatggaaaacgagaaacttccacttgacgacttgaaaaatgacgaaatcactgacaaacttgaaaaatgagaaatgcacactgaagcacctggaatatggcgagaaaactgaaatcacggaaaatttgaaatacacactttaggacgtgaaatatggcgaggaaaactgaaaaatgtggaaaatttagaaatgtccactgtaggacgtggaatatggcaagaaaactgaaaatcatggaaaatgagaaaaatccacttgacgacttaaaaaatgacgaaatcacagaaaaacgtgaaaaataagaaatgctcattgtaggacctggaatatggcgagaaaactgagatccgggat

SEQ ID NO: 37031 - DNA, 1732 bp, Arabidopsis thaliana landsberg
  unsure (1)..(1732): unsure at all n locations
cattcaagtatgtcattaagtggggatctagccttacgcatttcattaggggtattagatggcaaatgaattcttcgtcgtggaagattgcgcacattacggacagcactgaatgcagccttgacctatttttgtcacagcacataacatgacaagaaaaacaaaagagtgtaaatatttctctagcatactattcgtagcagtcaccctgtgttcaaacgcacctcaggaagttccacaattgctggtttagtccctacagcatataaaggaagaatgttgtagtgctcatatctatcccttttcctttcaacttcttcggcatatctacgggtctataataacagaagacatatgaaaagtgaggcttcacagagaaatttaatcaaattaccattacaggaatttactacgcatacaaaccgaacctcgtaatccactttaggtgaaggtactacagtcttcagtacatcgtacaataccgatgcaatttggtaaagccttgccatttcctccctgtagcaaataaaaacataagagtacggctcaatatcactacacttagcttattgaaactttggcatgagttaggaaagtggcctcacggttttcttgatgtttctccttctttaatatatttctcatagaagttctggtaatatgcctgaatttctctaggatcgtttttcgccagctgaggcttggtttcctcttcttcctagaacaaatttagacacatcagctcaaaatgatcaagcaaagtggaaatctctgcccacttagagaaaccatttcaccaagaaagtatgtaccttctcaagtctatgtaacagataggtcttaaactgacgaacacctcgtccactggatgtagcatccatcctatgagctttctcaaacgcatgaaaccggcctgatgtcatcaaaaacagaaccatactcattacagaactatgtctatgttaagaacccatctatacaacgtccttaaatagaaactggctaaagcaaacatgactattggaaacaaattcagactcacatagataagccactcgaggattgtccttctcaatttcattagcaacgcgaagaatcggggcaatagaagcgagagaggaaggaacaagctcgctatccatagcactagcatcttcgtttggtctatcaatcatcatagtagtcgcacgcgacggagctctccgagagggaggcggcggcaactccgccgttccactcggactagcttccatatccnccgtgggtcgggncgataattaatactaccaccctctcctcctccacaaaaacccaataatttattcgtgaaatcaaaaatctcactgaaatcaaagtaatctattaacatatttgttaattgatctccttttataccaactttatagagaacgcaaaagaaaagagattgataaagatggctaaagggttttcttcgagagacttgttaattctatatacatatatttctgcttttttacgtctaagctttttcatcttttgatctttcttatctttttggctctcgctttttgcttttttctctgggcatagtacgaagctctctctaaattcttttgcttagcgaggaaggtgacagtggagaagaaagacgaaaagagaagaccacaaatatccaaaaagttctcaaacggttttttaaggattttttttttatatcagatccgtcaattttaggataacatccaacaaa

SEQ ID NO: 37032 - DNA, 1670 bp, Arabidopsis thaliana landsberg
atctctgtccttttttatagtaatcgttgtctgttttaagccgtgatcggtgtcctgtgacttttccagcaccgttacgggatctgtagatcttagtcgtctatttctctgttttatcctgacattttggtttgttccgggttgatatacggaatattctagctttgccgtcacaaccttgccgtcactattccagttttacactggctttgttccgacttatcccattctttggttttgtttgtgaaatcggtctttctcgaaggttttgactgcttcctctccagaatccactggaattcgagtctctgatgctgaaacaaaattccgggattttggatctaatagatcgaatcagcctttgacttgaattgttggaagatgatggttattgaaacaatgtcaaggtcttccttctgtgacatagtgaataaagaaggagtctgtttcttttatctttctcttttttgtttttgttttagttaggtgtttcaactctttcttttgctaaacaaggttttggtgttgagatagtgagcaaaaagcactcataatgcgagcatatatagaagcgataagatcagatgtaaacttttaagtttcatgtttgatcatattgtgatttgttatgagtttcctattaacaaactactgttttactcctttctattttgtgatagacaccgtcgcactttcttttgttcgtctggcttgtaaatttacctgttgtatattgtacttgcctctccaacttggattctctaatgatggatgatatatattaaaaaggacgcttttggaaaaaagaaaaaaaaaaagagcgagaacaaaaaaagatattttatctctattctctcttttacctcctgcatcgtttgttttagtcaccaccgttaacatctacgccgtcccaatttctttaggttttaggacttctccctcagatagtatccttttgggtggagcttctaccagagatttagaagttttatgtccggttaaacaattgatgtttaagattctacacaagttttgtgggtttggatttcttctagatcgtgacctttcattttctcgggttgttatggagtttcagttggataaagttttacaagagatgttgcttgaggaagaggaagatgatattcctgtagttatatttggatatgccagcgtttagttcatcaatttgatataagcggagtgtgttgggacgatttctgaatccagataaccaacgaatgtctaaatagattctagagatgcctcaaatctagcgcatgtacaatagagtcaggggtgtttctttgtcacgagatagctttcagttcatcttcaaaaacgaaaaagatcttatcgaggtgcttaagacatgggtatggacccaagatgattagggtgttgttatggacatgcagattgaagatcctccgccggactatctcaattttcttttttctcttgatacgacttcgcatatacccgttaatcagtatactaggcctacaatttcttcggttgctttgtatgttggtaaggtgattgatttcacctttaaccaacgtgaggcacaaattcaggactttgtgaggatacaaaaactatttgatgtttcgaagcggctaagaaattctagagatactcaagtgtggtgtgggtcaaaaaaaagt

SEQ ID NO: 37033 - DNA, 1460 bp, Arabidopsis thaliana landsberg
cggctaattgaccctttagtgcaatcagaatagtacataaataaagtaattgtttcttaaagaaaaaaaaattcttagatagaaggaaaaggagtattctagaatatagttttgatgaaaaatagttctccatataataggtttatttttaattaataaaatatatatttattgaagaaaaagaaggaaatgatgcttagtaaatttgcttacaaactaagcaaaatctctataaattaatatttttgtgcgtaaaatattttattaatttataaagatattaactgataaaagttaatctaagacttgatccactttataatctgtggatccgcgagattactaagtggattaaattctatgattatatttttctaataacatattaatgtatttgttataatttatgagtgtactctccaaataatagtatatgataaaaaatttttaatacactaaaaaaactatagaattttacttagctcatctcaatctcatctagagtttggttattaatagtactaagtaatagctaatcttttaaataagtagaataaaaactttttaaatacaccaacaaagttagatgtaacttcttatcctttgaacaactcatgtgaagtcacaaatacaaaattcattacaatcaaaacaaaaattagtaaaaaacgtttttgtgaggttggaaagaaaaaaggacagtggttgagaaaaagaagaatgtggtttgggccaagagacagccaatttgccagctgtaaaatctcatacaattgttgtataaatagacaataccatccccacaactattatcatcacaacacaaatcaaaacaagaataacaaaatctttctcttataaattcttatttcaagacatcaaaggagaattaatggaggcaatgaagatgaagatgatggtgtttattatggttgttgcggtggctttctcagctgccacggctgctaccgttgaagctccagctccaagcccaacttctgatgctgccatgtttgtaccagcactgtttgcatctgttgttgctttggcatctggtttcatcttttgatcattctttttttcttcattatttaattgcatttgttaatgagtttgcgtgatttgattctctattgttagaatgttgcattcttatttcttaatgtaaccatctgtttctctatgtatctatgtgtattatcaattcatcactgtttatgagatcgtttatcttaacacttggtgtgcttaatgcccttgttatcttaatccatgaaaaggcattattacataacatggcaagttacaaaatatcagatttcagtgatttgggttcattcacacaaagatcaataagagaggatactttggaattgtgtaaggatcgatggaatcaatggtgtgatgagctgtatttggatggttgtgtcgtggaaactatgatgtgacatcgtcatcat

SEQ ID NO: 37034 - DNA, 3746 bp, Arabidopsis thaliana landsberg
taataaaaaatcaaatgaaaagacaaaaaaaaatttaatcagacgtgaagatcatctccgaagaggtagagaacgcgttcaacggcccagctaggttcgttcttcgtcggccaatcaccacacgacgtcgtattagcagcaagtagcggagttctacaaagaggacacgtacggtgattatcctcctcaccttcgttattctcatcaccaccgcaacattcataatccaaccaccggtcaatacactcacggtgaaacatatggctacagttcctgagttctctaacctcatctccatcttccagatctccgagacacacagcgcaggtgtcgttgatcatcgccggagatctctcagctgcgtcacggaacgtcgtcacggagaggctttctttgatcgcctgtgaggaaatcgaaggacaggcggaagtggaagaagaggtggatctggatctggatcggtagcgtaagatccaagcgaggatccatctcaagacggtgatgagaacagccattttgtagagaagctgagtgactatgagaccagaatcttcgatgaagaagctcattgtgatgactttgctcaagtatgtgcgtttgtgtgtgtgtgtgagagagagagagagagagaaggggaggagaaaatggagaatgagattcgtttttaatagaggaataaagctgcttgttgctgatgaatgatgatgctttgctttatctttattagtggagcctttaaatttttctactattttcattttagtttaatttaaactttaaattaggtttattttgagtttaattattttaattttcaagttgcttggagatgattttatatatattacaaaacaggtgtcaagttttcaattgtgatgatgtacatgactaaaaagctatgttggtttttaaaaattgggaatattctgctttaattattatgtaatgggtgaacaatagtatatgatttttaattagtcgatgatgagacacataattgctgctttacatgattagtttaaacgactcattcaaataatgttgaaatttggagatactcaaaagattccggtccaaatatgagtaatgaaggagaatataggggtcattatgtgaaagttttaaacaaaagattcttacagttttgggccgtgtgtgtaacgagtgagtggggggacaaaactgcaaatttataaaagttaatagactaggacaagaagaaacaagtaaatgacgtgggaacattgcaatttcgtaaaagttatagactatgaattaataatgatgataggaatcaagtaaatgacgtttgcctaagtattttgtgccgttcgtgtcacactttagtttttgccttttttttttctttagcaaagcacccctaaagagaaacattattttatgttttgttatcttgtttttgatgggagatgaccatttgatgaccataaagagagataaatactgtaatatgttaagttgattgcttagaatatattactatgataagctgattgtatatggcgttatttttggcttttggcccatacgcagagacaatttttctatctaccttacgtgattattgaccggccaatatgttaattatattttaatacttacgcttatgtaatacctttttctctaatgaatgatatggacagatttacaaatactccattaatagttgatcaatcccattggtcttgctttcgttgtccatatgactcatactcgacccgaatttcacagtctaggaaaatgaatcgggtatatgataggataacgcaactaactgtttgggaatatagtatattcataaagtccaatgagttattttgtatcctagtcattattagtttgctacaaaagaatcaaataaaagtggtggccttggcaaaaaattgtagtaatcaggagattatcaaaacaagacaaggtatcaacaacaaacgtttaagagatttcttcacaaaggaatatgcattgctctgtcttgatctcccaggaactatagtaaagataaagagtcttgaataacagaatcgtgataaattcttgaaaatcgaacacctttggaagcccaaatttaaacctaggatgacatgtcaaccaatctatcgaaccttgtccctagagtctagactatgaattcatgtcggatcaatattatttgttttattataattttctgaaaatgtatagtttatgcatttccattaaaatttcttgataaactggtgcactttttttgtgggacttttaactgtttggtaaaagaagttgaaatatatgaaactatgaattcaaatcaaatcatatataaaacaacaaaatcgaaaaacaaacaccttttttctggtaagacgattgataaagggtcgctataattaaagtttgcgattgcaaggacccatgttttgatctgctctgctatataatgtggtttggtcggttgaccaaacctttacaacgcaaaactacctcatcgttgtaggtgatgactgatataccttatagatatttatttatatataagatggcctacgattttttcagaaatgggatccttcaagttttcctttggtatccaaataacttacgttttggtacttcgttgttcttttccacacatccgtattatatcagaaccatctcagtgaaaatgccaaaatgggatgcaggtagaaacagaagacacaacgtcacaaccaaacaaattaaaaactttggagctaacacttttttcaaacgtctaaattcaaactcaaaacaagattaaaaggaaacaaaacaaaaagatgagttctaaggaggagcaaaacattaaacatattagaaaagttgtattctgatccaaatcgaaaacacaatcatggaatctctaggctcccaccacgttcatgtgtttgtgttgagtttttcacatcctgtcttctctcctcctaggagcacatgtaatgatttcatccactcgcaatatcatctcagatgcttctgtggctgaaagcagaaccgcttgcttcactttgaatgcttcatagattcctctctcttccatatctcctacctgtaaacaatcaatcatcatcatcacaattcaagtctagccttgcacattcaatggcgaatcctaatgtttataaagtttacttacagctccagtgatgacgtcgatcccagcgttacacccttcagtgtggtgctctgcacgaagctgagcaaccaattcggcactgtctaaaccagcgttgtcagcgattgttgtcggtatagcaactagagcacgtgagaaagcttcaatggcatgagattttttgccagcagttttccttgcaagctcatctacttcctttgccatcaccatctctggccaaccacctccaagcaaaactctagtatcattcactgtttgagagagtacacataaggcatcatggagtgatctttcagcctcatctaggacatggtgactgcaagaaaaaagaacccatacaaaaattgattagtgaattagaaacagaataaagtttagacgaagtctttcaagtaatgggagtgaaaatggatacctggcccctcttaggacaattgaacaagcctggcccatttcacaaccagagaaatgaatcaacttgtcttcaccaatcatgatttcttctataagcttgcaatgcccaagcttaacagattctgggttgtcaaaggtcgaaacaattttaccaccagtaaccaaaccaagacgc

SEQ ID NO: 37035 - DNA, 2754 bp, Arabidopsis thaliana landsberg
aaattacagatttcaaagtctcagggagactttacttgatgaccaacaggttttgtgttatgaatcaagaaggagatgagggaaaggacatctttttcttctttaagaaattgtaagcttccaatgtctatgatttctccacactctcgatgcctcacgtggttgatttcgcttcttagaggttgaaaattctccctgaaatcaccagagtgattttcaatttgtgtccccctgcatattcaaaactcaatgaacgtctggatctttggcaaataaacagcagagagaatcaaagtgacatttcttaccatggatgctgctgttctgtttcatcatcacttcttgttgatgctacttcatctgcaatggtgtgaacaaggattccatactggcaagacgacgaagacaatgcctgaaacctagctaggtcaacacgtacaccatgtcttttcaaagcagggtttccatgagtttcaatccatctcataacagagcgaaacgtggacctcagtttcccttgctgaaccagacgtagctgagcgttcagaccagcgacaaagcggtaccaagtggttggtgggaccaactataaaaggggataaattcattacgttcttgcagtcataggcaataaactatacatgtgaagcagtaaaataccacgcctcattaatcagtctatatgaaacaaaaaacagacctggctcagaagactggtcagaatatcgtcactttggagtgagtaataggccatgtaacttccgtcgcctccaaatattaaaggcattggaagtctttgatgaacctgaggaggaagatcgcttctcttttcatcgccaccaaggaagaaatctagatgagctaacatcaaatcaggagtagcagctacctgcacagcacaaattctcatgattcatatactacaatcctttttcttgccatctgtaaacaatgaaatggagccttgttttcaagaacacaagcaccaacgtcttgactaagatcctattagaactatgatgactgctcgaccaattctcacaaactatgattggccttttgtctttcttgctaaatatttacaatgttctaaaggtagtcagttgagagcataagtcaatagatgaatatgtacctttagcccttcatataatgcccttgaacgacacgagcgtagacaagaatggtcatattctgatctaacaaagtcacggagtttctgaaatttcagcctccggcgtgattgctgccatgaccatgcaagaggatagactagaactgaaagcataatgtaaatcgcaccctcccaccactgatatgcagctataacattgacttcatcaacaaacccattaaacgcagcctcgtacctacagaaaattcaggagaggcctaagtatttcaaaaactacgttcagaacattttatcaccaaaacaatcaacagctaataacttacacaatctcttttatttcctctgggggtgtatgagaaagatgccaaggttcactgaaagtattaggacctaagaaatagatcctatgcatgtggccctgtgactcctccactctgctcgtctccatcacctgatacgattaaacacaaaattaatattacaacaaagacatcaactataaaaggagcaccttaacaattgtttataatctactgaaacaagagcgcaaacacaggataataattatgcatcgcaatctatttcaaaatttctccttctttcttgtgagttccgacgagatatttcagatgtatctgttattaggacgaccatctaatagcaacaacaaaaaagtctggcgctattgttatgtttccattcacatgttatcttatctcccttcaaaaactttcatccagactccgataaaagataaagactaagcaaacctcattcaacgactcgaggaatggaaatgagtgatcaatctgagagccatgctgggtcggggcagacccatgcaattcgtcaccgctcacaaatttcattctggcgacgctgaaaacaagtgctagtaggaggagcacaactactaaaagaacaccaaacagccagggtccaccaaatgtgtatattaactcttcaagcgtagtataacagtgtggcatgtggtatctatccgaaatgcatttatatggacaaggcgtttctgcaacaccacctgtcaagaaacaagtaaaacataacaataattgtgtatcagacacactaaggataatataaacaaagacaggggaacacattacagcaaaaaatcattatccctcaatcagtgttccaaataattacctcgaactgtgacatatacagcacgatggggaatatcattagccggacaaagatgacaaagagctttatcagatccagtaacgttcttataagtgccagatggacattcctgtagaatatttaaatatgtagatagttgaagcatgttttcgtttttaaaaattttggtcgacaattaaagcgtgttaaaccaatgaagttggagagccattgctcgcaaaaaggatgaactacattaatgtaatagatattgaagtatcaatctatcaacaaataatcaaaaaggacactaaatacctctggcctaagcaggtctgacattatgtggttaatatacttgctattgtttggttaaagaaagagattgtaacatcacctgagaccatttgaataaaacctagttgagagaggaaaactagaaccctaatccatccaaacatgttttaatg

SEQ ID NO: 37036 - DNA, 2489 bp, Arabidopsis thaliana landsberg
tttatgtcggattgaattcaaatggtcgctcacaacaacattattaacaaaaattacaagactctgattacttgttttctttataataacattttccgttggaaggattatctacacgtcttatttatgcagttggtcatacttatatttcatacgagtgtcctactttaatttgtcaattattatacacgtgtacgtaaacagacaaattggtcaattccacatatttcacatcaaatatctgattcgtgcattcgttttcgtcagaatttcattccatcagtcgaataatatttgaacaaactttcaagttttatggaattttcaaagacttatttttcccaaaaaagaaaacacacaaagattaacaaaagggaatttgcattatacttgaaattctacaaaaacgagtctgaattcaagagaaggttaatatagactctgtacaacatgtcatgagtcttactagagaacctttctttcttctcccccaaaacaaggaaaaaaaaacgatataatacagtactttccgatgtgtcttgaattacttttggtatccgattaactttggctttgcagagaacttacatcatcagcttttgtgtacctctcacatatgaaatctgcttaagctatgctcgatgttttggggaaaagctaattcagtttgattgataacacatcattagaatattgttgaatcatgttattatgccacaggcattggatcctccggtgtgtgagactctgattcttcgataccgtaattccatagttctttaagctctcctcttaccaaccccagtatgacggccaaacctacagagagaaaacacatcaggttttgtttgagaacgatggagaggagtgttcaaaaacagatggaggaaagggaactcaagcttctggttttaccgagtgtgcagggtacgatgtacaatagtgccggctggccatgtccgtccataagatacagacctaggtatgtcagtaatagacctacaaaacagaacaggaagaaacaatgtttctgttaagttccaagactgtgaatgtgagaagccatctcgattagcaagctatgttattttatagtcggaaaatataaaataattgagatcatttactctgttgtataagctatgtaacgccattaatgttcacagagttagtaatgcgtggacacttacctattccatagccgatagtcaaccagaggaagtacccatttgatattaccctcttttttatcttgtcatatctgagatcaaagagtggagcaagtattaatcgtgggagaggattggatgagagaatcgttgagaaagacactctggagaaagtatgggcaaagatggaattccaagttgttctttgaagctctaagaatgtcactgactaaaagtacctggaagcaaaggaaatgagcaaaccggggaagaggatgtccccaaaaccaatcatgtcataaccaccccaaggatcaaagaaccgaggaatccttagtagcatcggaatggactccccagtgctgctgtctccttgggcaacctacaaagaagggagtttcaaataagaatatactggctgagcttctctgggcccttcaattactcaattatcacaatcgactactattcaaagttattgagttataaagttacttgtgtaagctgttgacaaaacgacaaagatactacagccctaccataacaaatttatgtgtcacaaaacaaacttcaatgataccttccgaaacagcatatttttttggtcagaattgcagaaacgaaacaaatcacataactagcccctttctaagcctaacctggataaactgagtgtagcaatagaaatgataaattttcgactttgtaagagatactcaccacaatcataacactctcgtgaaatatcaatggagatatgaagacccaaaaatgtcatagacaaatgcgcagcaaagaagtacagtcgcaacctggagtacagaccattataagcataacagagaacaatcatattttactacacagcaaactagataaaataccttgatgttaggtaatcgaaccacttgcaaggcagtgatcatcaaacatatgccctgtcaacaagatgacaataaatatttcactaagtgcagcccaaggaaccaaaacttctcaacatgacctcttcctttatggaaagagtggaatatgaaactaaattaacaaaaatagcagaagcggtgataagagaaataatgagaggaaatggtatctagatgcatgtagtgacgaagaaaaagagagctatgggagttaccaaaatgtcttggccaacccaagaatacgatgtgtgacgttttataaaccagaaaacagcaaacgccaaacaaacaatattcaccaaaagcgacaacactgacattgttccaagcaaagggagcttcacagatttccgagcaagatgtctgcattttctgcaggcggaacaaacatata

SEQ ID NO: 37037 - DNA, 1098 bp, Arabidopsis thaliana landsberg
gacactttccgagaactttctttacgcatctttcttcaaggtgtttttacttactgaattcattgtaattttcagtaccggtaaagagaagaaacaagaagaaaactactgggtggttggcttgaatacaagcagtttgtactgtatagcttgcaaatacgcggagatgttcccacaggtatatattatcactcttgatattaaggtgtttacttatctggaaaatattggctcaccactattcttcctgccatttcaggtgacaccaaaaccaatccttaccatactagacctttctctcccgcttgcatcctcagatttaggagcagcatctctagaaaatgagttaatactaaagcagctgcgtttatacgaggtttttctctctccttattacaccattttaatttgctgttatttctccttttctggtcaagttttgttaagcagtatattgtgtcttcaaagttcttaactaccaaaatatatgtgaaatagtcttaagtttgttgtgggtaagcaacagagatgaatatataccaggagatttcgtgttcttgctataagtaacaaaatatgctgaaactagtatcaatatcgatatatgagaccatttccaatatattatttcctcctaatctcagactcaacgaagagtggacgatatggctttggtcggggtagacacaacagcacttgaagatgaagcttttgacctggaagtttctcaagataaatgcatactaaggctcatcagctcgtgttgtagtagtaagttaaatatatatctgcttgtgttgtgtgtgaactcatattctaagaccattactgtccagatttttacaacaagattctttacatctttcaggtgatagttttgcaagggccagtgaacttatggagcttttaactctagaaaaatcaatgagagctgcaataacactggttaccaaactcaagctttcttttttggcagagaaattcagcagcatactcgaggtactctacaagtacttttatttcttatattttgcacaaaagagaagaaaaattagatacagacgtaatgctaaatttttgggtcttcactaacaggaa

SEQ ID NO: 37038 - DNA, 2877 bp, Arabidopsis thaliana landsberg
  unsure (1)..(2877): unsure at all n locations
tacaagagcgtgtaaggcgatttgtccaatataaatggctaacgaatcgtggagtcgacgaaaaagccattctacgggctcaaccattggatcttcgtcgccagatccaacaacatctctgtctagccctcgttcgccgtgtaagccacaccagaataacaccacatttccattacgttccactcaagtaacaaaccctaattttacgttcttttaatttttcaggtgccgttctttgcgcagatggatgaccagctcttggatgcgatatgtgagcgtctagttccgtccttgaacacaaaagacacctatgttatacgcgaaggcgatcctgtaaacgagatgcttttcattattagaggtcagatggagagttcaactacagatggtggacggtcaggattctttaactctatcacacttagaccaggagatttctgcggtgaagagcttttaacctgggctttagtgccaaacattaatcataatctaccattgtccacgagaaccgtaaggactctctccgaagtagaagctttcgctctccgagcagaggacttgaaattcgtagctaaccaattcagacgtcttcacagcaagaaactccaacatgctttcaggtaatcctcgtatggtctcataagcaatataggtttcttgcttcacacgctataaggtttcttgatctttatgttttgactgtaaccagatactattcgcatcaatggagagcatggggaacttgttttatacaagctgcttggaggcgatacatgaagaggaaattagcaatggagttagctaggcaagaggaagaagacgattacttctatgacgatgatggagactatcaattcgaagaggacatgcctgaaagtagtaataacaacggagacgaaaacagcagcaataatcaaaatttgagtgcaacaatattagcgtctaagttcgcagctaatactaagagatgtgttttagggaaccaaagaggatctacaagaattgatcctgatcatccaactttgaagatgcctaaaatgtttaaaccagaggatccaggattcttctgatagttgttgtgacaaatgcatttaggatttttctgacactaacttgatttgctgtaaccaatagtcaggtatacaaagaaacattattacagattggagtaattgtataatgaaataggtcgatattatgtggaattctatacaacgcactcttggctcctacagcatatattggcacacaaagtgggcctagaaactgataaaacaccttgagcacaagactaatgatgttcacacataagntacgtgaattaaaaaattaatgaagcctaaattgaatgagggcaatgaccatatattggtcagaagtaatgagaacgacacttataaaagaaaaatcaatgatataggcatagactcattgcactatgtgcagggacggaaatgataatagattacacacttcaacgagcataattcttgcgggacatgattttgcgcagaccaaacaaaatatgtaatccctttcagtctattgcttgatatttttaatatataatctgattaaatctcgcaatcgtgtcatgaaccatatatttgtcatttatgccataatttaattttaaagatgaatatgtgaatatagaatgaaatctgaaaataatattgtaaaaagcacatagaaaaaaaccacctttttctcaactttaatcattttcttgattagtaaccttttggagcagtagaattttctcattgtattaaaatggtacgaattaaatcttcttattaatagcgcatgattttttttctttatttgtcgaaagatttcaagggacaaacatcacaatccgcaaagtaacctatatttacaagaaaagatgaaaaacataccaaatagatgacacaactaccgcttagaaaacgacttcacaccataactagcaacttttgcatttatatagatatttcctttattttcattataatttttccacattgccacaaaaaatgatatccacaattaattaattttaatttgtagttggatctaaatctaatatgaaagaaaaaagaaaaaacatattgagtctgaatcatatggatacacataccaaaaaatcagagatcacggcaagacaactttttgtcttatcttttagttttttatttgtcaacgttgtttgttgtcttactaatttattttaattattttttcccgaatctcatttttctaagagggaaaaagaaaaacatttcttttttctcttatgcaataaaaatcgcttcttttgtctttgatattaggaaacggacaaatcagtctagtcaaatagagccattcaaagtacggcaacacaaaccaagagagtgtaagttaagcgacatgtgttagagatatccggagatctcaaccgttggattctttctccttcaaatcaaattataaatcccatcaaacagagagagagagagagagaagaggaggagaattcgaagaataaaagataagaactttgacgttttgaagcttaaagcttgaaacttgtttcatccatggcggctcgtagagtgtcttctcttttatctcgatctttgtcagcttcctctcccttactgtttcgttctcaaggtatctcacacacaaacaaacaaaccactgttcgatctctctgctgaatcagtgaattttccactgtatctccatgtttctactttatcactaaacttatgctgaattctacaaaattaacgttatgtccaatgaaatagactgaaagttagattctttgatttgtgggtctatgtcgaatctaggttgtgatgtgtaaagatgataattttcagggagaaattgttacaatgg

SEQ ID NO: 37039 - DNA, 2693 bp, Arabidopsis thaliana landsberg
gatcatttgatggttgtactgatcagatttcgaccattcgctggaacatgtataaattttaagatcgccaattatatatatgaggacaaaatttaataacaccatctattcgttgattattagttgctggtagagatgagaccctcttgcattatattcataataatggatagacacaaaataatatatttataaagtaacaaggaaaatcttgagggaaaagattataaggaccgacaagaaaatgaatggagggaagatatgagaagaatggttggcactgaacaagtgtgtgttggagttgggtacgaaaagaagtacgttgatctgtacattcaatacccacatgcatgtcatcaattaacgaccattttaccattttgctttcttagcctattatctactattaagatcaattattgttatcttcttttaatgggtcaacctaattcaattcttcgtatgtccctactgccatttttcattatcttttttattcgttttagttccattgaataatcttgacgcgtataacatacattttcaagtttgaatttgtacagggtatatattatatatattagatattaaaaatttgttttaaaagtagtatagctattggtttttaaatatactaaattacttatattagatatttaaaatatatcattttagtttattaattaaataatgcataggttatgattaacaataaagctaatatataatttacatatttcacaaattccaactataaatactaaagaaactacaaacagaattgtatttttactaatttactaattttacattatgaaaacatatcttaaaagtttatcaaaagttaaactggaacaagaaagattaataaaacaaaaaagaacatagttttttagttacttaggaaaattaaaaagaaaaataaaacaaggaaatgcaactatttaagcataaagaaggaacaaaaaaatgtaagaaaacaagtaaataaaaggatgtgtcgattgtggcaacaaacaaacaaaaattcaaaaaaaaataagcaaaacaaaaactacagaagggaatcgaactccacaggttaaaaattgtgtggggcacttgttaccaaatgagctagggtaattaaatgtataatgatcaatttgattttttcaaaatttagcatggggcacgtgcccaccctcctcttgtagtacatccgcccctgatgatgagtgacatggaggaacatctggatttatgcatgtggacacttactattatgttatgttgtgtctcgttacgccatcaagtttcaccaaatctttttgtttttttcttgtttttcaccattttttttgtctttctatatgtttgtttatttacatatatctcctatacgattacaaattacagataaacccatatatttctaacagagcactccttcaattctcatgttttacatattctcccgaatcccatatctttatcggctttcttgtataaggaacatcatttggccctatatggaattcagtgtaataaccaagtttccggattagttaagtcggttctcggttatggttcaattggttagtatactcgattgtgacaaacttttccaatcaatgaagcagaactgagcttatacaagaacaatttgacgtttcaagaaaattatcgtacgttgaaattgggaataaaacaccagccatgttacatgagaagagaacacatcatagagacaatgatcgttcatttcattatagagaacgagccaccgttttaaactcagtcaagcaagattgaagaatcttttgacgtttctgaagctgttggcgttcgttttgtagtaccacaatggctccaggagcaacgaacatgtccatgaacttgtcgtcattcactgcaaatagatccaatccaagtgccaccactagtctgtctcggctgcaaaaacaaacagaatatcaaatcaaaatgtttccttcctctactaagaaactaaggacattcatcaatagaaaactcaccaaggagttagaaatcctgagtttagagttgatgttacgcttctttcgacaagcacttcgcgaattctagcaaaatgttgtgcggctgatgaacatatctcagagtaagcagagcttgatttcattccgttatctgcattagcaaacataagcccaccattctgaactctaaatggctctatgttcctgtttccaaccattctcgccattctttttctagctccaacaccatcaggaccatttccaatttctttctttaccaaaccatacactatttcacatggttggtccggtgaaggagtctcagggactgttatgtggctttcccctccttttcctggtgttgtctcttggccattgttcttctcaggaggaatgttttcttggtctttcattggctcatcacggctggtatcagagagctcgaagcaaaacgaattaggtgaggcttggttgaatttgttataagcgccaaaagctcctccttggtggtagttattctcatagcacgccatggaatatggactggtcactgaatcaagatggtgtcttactaattgcttacactgttttgcaagattcttcacaaaacggctgtaacagttccgtacagcggcatgaaaacccacgtatccatccatattttcggttttcttctcatctgcaaagaccatt

SEQ ID NO: 37040 - DNA, 5527 bp, Arabidopsis thaliana landsberg
  unsure (1)..(5527): unsure at all n locations
cataccaaattagaaagatcgcctatacagagttgtgaaagtcctgacttcgaatccaaagcattagctaccttttggattgttcttgatgtaagtgaacaatgttccacattcaagctgtaaagtgctaagaaacaaaaggggacacattaatgtaagctagtgaatggaagaaaatgtttaagattattaaacctaatatcaggtatttcatatatctatctactgggtatataagacaccagtgaaaccaagaaacaaaacataccatcagggcatttagatactgtaaatgaattatcataattaaaaaaaaaaaaaaaaatctataccccggcaatttttcactatagttgagaggtatgatccacaagcatctgtaagtcgattcctggacacattgaggacttcaagtcgagtgaacagaacacggcattcacagatctggtaaagaggagtatattaaataatacgaaaataacatgaatatgtgaaattttctagctttgggcctagtagtgtacctgaaacaaagcagttggtccaaatcgcttgcagggcctatcccaagcttaagcaccatacatctggcttgatgaggcaaaaagttgtttcaatttctccattgttccattccctaacaaccaatgagacgatggaaattaacacttctgaatttcctagtagttccctatgcataaccaactaactcacttaggtcagctcattaaactaagtaagacgtcagaggcaactttcacctagcatattgtgggagagatccaacatagcaatattgtggacatggagggcacacaataatggagcagctgatatgtcttgcagttcacattctgacacattgatatcatcttctacctgataaacatacaacgaaataaccattcagattatacatcaaataaagtaagaatttgtaactagctagctttaagtaggttgaaaagcaaacaaagagaagaaaatatttcatccattaaccgctaaaatttggggtaatactctcacctccgaaatatataatttcttaagcaatttcatactgggtttctctgacaacgactggcaacagtccatgtatagtttcatcaggcgcttgtgaacccagcctgaaaacaaattaatttcatgctgattcagccgtggtgtataaataagagggaagaatcaatgaccataatcttaaaagccaatacagcggttcagccacaatcatgtaaaaagtgagagaacaatttgtgatgaaaacaaatttatagaatgatcagcttgacaatcatacatccaaatatcatgagtagattccaattctatcaaggaaatacttaccatcaacggaagcttcaataacaacattttcagaagagtccctgagaatcgcatatagttccaatggtttcagacctcttccaccatattccaaatgatgaatgatcggcaacagacctaacgcaaattgaatgttcaaagattcaaacttttagagcaaaacttaaaacgtgctaggaaacaaggggaatgatatcgaaaagcaaaagaaatgttattaagcgtgagatgagaattataggactgatccgaactgggatcatgcattatagagactgatccgaactgggatcatcctaaagttttgctaagaaaacaaaagcacatacctttagatttctcatcgtcaggaagctgtaaatagtataggcaagtaagttccaccttcacagactcatcatcgtgagaacaggagtctaaagctatgtgttcattttcaatttcaatttttatttttcgctgcaacaagtaaaacatatagttatcatgaagaagattggacgaagtagaaaaataaatgaaatccaatcccaagaatggtcaatgataactcaaaaaccagatcacagttgctcacatcctcagtttttgagtaagcgtggaagttcacgagagcagctccagttttgcaggacgtgccgttggagtcgccaacatcacattgagatccttttttacgacgaccagttgtttcaacagctatattattactcaaagatctacaattggctgacatttggagccaccttaataggatggagaggcgtatacgagcaagaaccttcttctacattatcttggatggcacgattatccgtataattaatagcaccatcaaaatacatactttcctcagaaacctcttcattctgccttagaactttgtgagaactgtctttagggcatcccagctcatattcggtctcactttcatcatcagagaggattactcgaatacgctttcgaccagcaactgtctgctgagagtctgctactacagagaaatctttcttcgtctgatcagtgtcagcatcttgttttcctgaaacttgtttccttttgaacagacgttttccaggctggagaaatgaaattagtggcacatcatcatttgcttcatccagatctgctaaccgttctgatctaagtgaatttggtgtttgcggtgagctacatgcatttggcctatcattcgatacattcgcatgcccttctgagtcagtttcagagcattcatcttgtgtactacattcggctttctcagcatgttctgactccttcagattttgtattgtttccttcaattcactagacagtagaaataatatatgagtaaaatgaaatacttgaaactgcaaaccttacaccagatttggtgtctatccatattccgtccagtgacaagacagtaattgttacctggctttttgagcattccccaatctcatcatatggatatagtgtatatcttccagtgcaaaaagctggattgaaggaagattagctttcaaagcaattctgcaggatcaaatgaaaatgaatccagaaagaccaatagttaatttattagcatgcagtatgtgtgtataaattcacgtaaatgtatatgcgatgtgtttgaatatagcagaagaaagtcacagaaaaaatattttaagtgattgaaaatgcaaaatgtgctataattatccactatcatgagaagtactgattcaaagtacattgtattatttattcagaagccatagtgcagtaattcgtgaacttagtcgaaagggacaaccaacaagcagttaagtactttatagcacattcacatttgctctgcttcaagtgttctttccattttaagaaaaaaatgaatttcatcgccgtcatattgttcaatggaattatcagttctctcaaggaagattaataagtagatttactaggactgaatcacaaacataaccacataatagctcaaatgcgcagtttgataaagattacttataattggatctacctgtacccctcttcatatgcctgaagtgctcctgtccattccccaatacagtccaaaccattaccaatattaatcttcgctagtgcttgaccctacaagagaccaccataagtgaatattagaatcaggaaagaagaatagctataatattgacaaatccaagaaaaggtataatcagttttccacagaaaatgttcagtagaagcctaatgaattatttctggttttgtgaatcaaattctgatgacagtagtgaacataggtttttataattaatcgtgcaagcaaacaaatctcacctccagattaccaattgcttcatgtccctcataacttcttatgaaccacttcagggactttctgaaatttctgagattttggtaagattctccaacaatcatgaaggcatcactcagcttttccttgtcacagagttcatctgatattttcttcttcctttttgaatattgaagatgctaagacattcaaagaagaaatagcaaccctttagttgcatgcaaacttcaaatggcagcctcctacttaactttcaaaactatatcacaagtcattgaaacagtgatgcagagacttggatcactcagtatccgtatgatacagaataatcatcgttttgccacataataactttactttgcaagttcagaacaaagatattatcccagcattcaaaagataggttttcttgagagaacaagaatcatgtaattctttgataatatagtcttcctgactgatctgaaaagacagtgtcaatagcagaagtttacaaaacttacatcaaatctaagaaaatagcatatttttcctactccatactacctgatgaaatctcacaatgcttattcatcattaaaaacccctacgatggacaactttaacttctggaaacttttcaaataaatgcgaacatggggtggagtgataggactaaaaaggaaggagtgtttaagctataaaactcaccttcagccatgcgaataccatgctagatttatcaataagacttccaagacaagcatttacttggagcatagactttcgttcctccgaagtgcctttggcatcagtcatttctgcagacaacttcttaagcataagctcttcttctctcaattcttccataactttcatggatttcttgactatcttggtattatgctctatctgttcaaccaatgcactctcgtcttgcatagatttcgctagactagaagctntaccataacataaaagagcatcaatgtacttttgggtcttgttgtgtaattcagcgagattgatataccccttcgcttctccttggacatgattaatcttatgacagatattaatatccatctcaatgtgtttctttgcttcatcccaacttctcagcgccataaaaacgtttccaaggttatgatgaagcctactccgagcagcatcatactctctcacctcctcttcatcgcaaatctgcagccctttcttaagaatagtacgggctgcttcaggattatcaagatcaaggtcaagcataccgatgttgttatgtgcgttaatatactcctcaaggaatccgctagattctccaggaggtggtttctccttgagaatctgtgcaagttccatggctttcttaaagtactttttagcactctgaatggcttcacaatcatcctcagacttcaagaacatttcatggtaagtacgtccaagttgagtacatgctctttgcttctccacagtgtcattagcttcttcagctagctgtaaatgcttcttctgcaaccaccagcaaaaaacacaaattcaaaatgaaaaactcaaacaccaaaattattcatggaaaattcaggaagccaacaataaccaagtaggaaaaagcaattgattcaagagggcttacctgataaatcaaggcttcttcgaaattttcgaggcggagatagatctcgccaagagactgacaagtaggtaacaaatctttcccaggtaaatacttgacggagatatcgtaatcaatcctaaaccacttgagagcatcaacgtactctccatgattcttaaggatatcgccgacattgttagcccacctcgcctgtctctccggtcacccacttcttctgctttccggtacgctctcttcgccacagctacatctaa

SEQ ID NO: 37041 - DNA, 2429 bp, Arabidopsis thaliana landsberg
agtgaaaaagcacattaatttatggaaattcagcaaaaacaagaagacacagagctaaaggatcgatcgtacgtagcatctgagccgacagaaaggaaagtctctgcagctttttggatgaattcaataatcttttttaaaagatactactaatattcaaacaaaataaaaccataattatatgctaagaatatacgtatttttgcatatgctacaaaaatacttattttgaagttccccataaattaacttcttggtcttttccaccgcctcatctctctgccttttgtttttttctttcaataacttacccaaacttccaaaaaggaattcacttattcttagctagcagattctatttgtaatcatatgctaattatatatgtaaaccctcaatccttaattacactccctttcatgtaatagaaaccccaagaccattataaacacagaatatgagcaacatatatacataatacatatcataaaataatatcaatatagaaacaaatatatgtataaatagagatatatacctctggttgcgtgtcgcatccgaccgaacatatccagaatttggacggtgcgaccatgaaacctagaaagaaacagacaggaatcacaaaacgcgtcattgtgagaggaagtctacccgctaagactttctagtccacaaagagattgactgcctgagtgctaatccccaagttctgttatggtcccttacctggaggatctttcttgtcgaatccgtggtttgagacaagacttgttgttgaaaggaccgtttcttcgtggccagtttccatttgtcgccgtcgtttctggcgttctcgggctttgtggttttggaaccaatagaaaacgtttttgccttctatcttcccgtaccgtcgtagctgtgcggtgatttgttggatgtggtcggcagaaggagttctagttccttggcggtaaagctcttcaagaacccttaactgatctggggtcggattccaccgtgagctcaccattaccggtggatgttgaggttctgagtttagcatcatcagctccctcttgttctgctccgccgacatcgtcaccactgctgagaaaatcataaccaaagcaagaaaatgagcattagaaacaagagaaagagagactggaaagtttcaccaaaaattgacgagagagaaagaaagagatacccatattaaagcggtggtcggagttggtgtttacggcggcggtggggcaagaagtgagacgtgggatgagaggacgaagctttcttcctccgttgaaggaatctgcgcctccttcgttgtaacccatcgtccacattttggtgtgtacttaatttatatgtatgtttatagaggagaagggagagagacagcgatatagcaagtaaaaatattagggctttgtttgttttatcgaaactgaggagatgtgaatgatatggttgaaggagtaatagacaaatggtagaaagtagttttggctattttggcttatgggtttggagaagagtgataaagttgagagatatctttgtatgtgaatgtgagaatgggagcatgcaaatggggtggttttgtaagcacatatgtgtgtgtgtatatgtagacaatttaacacatccttttatttatttctaaatacagaatattaacattctacatatgaatagaaaagtttattttattttatttccttttattccattcactttaaaaattctcaaccgtcctgcaaaatcataaatatgtttgtatagaaaagaaacataacattatataatccttgattagtaaacgacctatatatatagtactttcccatgatgaaattttatcatatcatacatttgtaggaagctatggaatgtttgtttgcacaatacgattaatgtaacatgtagattcatttaactaaaaaaaacatgtagattcatagacattaagcttagattgcatgataaaagctttcatgtacaatgtgtaccactagaatgctaatcaaaacgtgattactctgcggatgatgtaagtacttttaactactatacatagaaactgacatataaatagatttttaaaaaattaactttcgtcccaaccaaatatatgtcacaaaattttataccctagctaaagcacggtgataaaactatacacctaccctgaacacgtaataaactacagtgatgataattgacaaatcactttaaatttgttaagcgaattcaataaatgcagtgatcagctatatatggaatttcactaagctacataattttggaatgataaataaaagaattgaagctaggaagatgaggttgactagtaaaagaggagagagaggatcggaggggcgtggaattctggggggatatgatatgaatgatatggggagatgcgaaagaatttattacgacg

SEQ ID NO: 37042 - DNA, 2393 bp, Arabidopsis thaliana landsberg
agtcactgttctctgtttttctcgctagtgccatgaagatatgaccttgaaggaaacaaagatctgatggaagcttgagtttcccaccgatcttcaaaatcgaatcttcaattacctccaaggccttgatatgatctccttgttcgtagtaccgttgggcaagtttgcgaggagaagacttcatgattctgttagctttcttgtgttttcttggtctctagggtttgcgaggcgggaaaataaacggaaatgataacgagaagaagaagattttataacgtgtgatccacgtgatagtagatgatgaagcttttatcacgtgagatccacgtgactagagagacgagcagtgagtgggaacccaattcgtggtgtcttcttctcgaacagctctttttacgaagtcccattgaggaattgtgtcgaacaccttgtgggcatcaatgttttaagcaaattacacaatttcttcgattttattgcactttcctggattaaacagatacaaacccagaatttgtgtaaatttatcgaattcgaggatgtagtcttcatgttcggatgatttaaaatggttgatatgtgttgagttttgttatgatccgtcccattggttggtttacgtggcttatgaacaaaaacgatgaaaaattaatattctatgattttaaaatttatattaaaataactgaaaagtgaacttactataggaatttaagagttattatgtattttacaattttacatattattattcgatatgttagttttagcatacttaccataaattcttaataatatactgtaaaataatattaaattttggctagtataaaattaaataaaactcaatagcgataatatttttttagaatctctatataaatatatgatcttattaataaatgtataatattaatacatagttttgtgtttgttttaatgaatcttctttagaactcatcactaatttttcttatatataaaatattatgttattgcgtattagaatgaattgtgagatatttatgaatttctattctataatatgaagttttcagtttttttttgggatgtgaatggattaattagaaaattataattttgcataggcgaacttcgtaagaaataaacgaccgatcccatcgatttcgtagacttggctccatcgttctttttttatttgttccccaattaatagaacatctaattttatcttgtgttgagttacatttattacgagtgttgttgtcgaaaaaaaaaaaactatcaagtatttgctactaaaggagacgatcaattaatcattttctaagttatgaaatgtggtgttttgtttatgatttcttgtcttctcacattccttgttctcagccatgttagaggtaactttcatttttctttattcgcattatcaattgttttatcttaatggttttgtaatttgacacatctttttgtggttgacataactcaatagaggtggaatccaaaacaaaatggggatgcgacatgaacagaccatttccaggaaagtgtggaactaatggaaaagaattcaatgcataagcgacatcaaaaaaatgcctggtgcgccaaaagatcttgtcgtacgttgcgaatgttctgaccgtccaagtttagctaggggtatgcctggcgagcgtgtatgtagatgtgattatgattgttaagtcttataatatttccataactaaaagaacatgtcgtacattttttttaaaaaaaaatttgcttatcatttgtgcttaatacaatatcttctcaatttggatagacaatgtttggatgtgcagggtttcaatctccagtaataattttttcgatgcaaccattactatcattcccctcatagatttgaatttatttagtttgttgtttgaatgccaaaggaaaatagtgtctttagttaactctaattaagaacctagacatctacgactacgatcaaaggttttagacaagaacatagaaatattggattcaatatatacatgatgggaatatatagcgagagtcaaagagatagatgaaagctttggagataggagaagctcagacacattgtgacatggtgagtaaacaagagactaacctaacaaacaaattaaacaaaaaaaagagatcttaaattacggaaattaaggaatatgtagaaattgagatgataaaatgttatgtaagcaaagtacgcatgcagcttttttgttttcaaatctcgtgatggcttgtgttttatttccttaccattgttaagttgttttagttagaagcagggtttggccttatgacgaggaaaagtatttgtacacgttaagaaaaaaatatcaactagtttttttatacacttgagaaaactaatggtacaaaaa

SEQ ID NO: 37043 - DNA, 1574 bp, Arabidopsis thaliana landsberg
gacttatcttctgacctgagtaatattcataaacatcaattacattttttagagcctgacaattacgaacagtggcttgacaaaaaaatagggagtcatcagcaaactacaaatgtgtaacaccaggaacaccatttccaatacgtaagcctctgatgtctccatctgagacccttgattttatcgaatggctcaatatatctgcacaaagtatgaagagatagggagataacggatctccttttcttattccacgttgtggttgaattgtgccatgagggattacatgtactaaaatcgaataagaaactgatcgaaccgttcccattatccaactgatccaatgctcactgaaaccaaacaaacgcattgttgtctccaaaaaattccactcaactctgtcataagctttactaacatccgtcatcatggccatataagattgtgacactcttttccttgcttttagagagtgcatcatttcatgagcaatcataacattgtcattgacaagtcttcccagataaatgcagcccgagcgtccgaaacaatgtcattaagatgggtttttaaacgttcaacaagacattttgaaatgatccttacattgaacattacacaaggcaatgggacggtagtctgaaagtgtttgagggttggttatttttgggatcatgcaaatgtttgtgtgattgagtgaatggctcatgtgcgatgtctgaaaatggtgtttcacttcattgatcacatcctgtcacactatgtcccaacatgatttgtagaatcttgtcgtcaaaccatctggaccaggggctttgtcatctccaatttggcttatggcatctaaaatttttgcatcagtgaagtcccttgtgagatcctcatttatttgtggagttactgttgggttaaaatctgcaaagtcgatggtagaaacaggtctaacaaagcttgcataaacatttgtgaagaattgttgagcatgcctaccaacttccttatcacctttgtagatctctccttctccatcctggatagatgtgattctattcagagcaaataatgtctttgtataggcatggaaaaagcctgtatttctatccccttctttcatccaagtatttcgacttttctgctaccagtatttttcctcatgatgatgagcctttgtaagttctctctgtatttgaggaataagttgtctctccgaacgaataaggcttgccatggatctgtttagagcagcttgtagttgattgattctatcccgggagttcatgttagatttgtgctttagactcgccattgattgtctgcaggttcttagtttatcaataatatgaatcctctgatgtgtgttttttatattccagccattcacaacgtgtgctttgaaatgtggaacatgaagcagtcgtttgtcaaaacgaaatggtatcttcttttgaatttcagatttttttaatgtcagcagcaaaggtcgatgatctaaccctgtgaaatcaaggaattctaagtctgcaaatgggaaagaagcagcaccttcactgttgatgaaagctctatccaagcaa

SEQ ID NO: 37044 - DNA, 2639 bp, Arabidopsis thaliana landsberg
ttcttgaaggctattctgtatgggtgtcccggtcaacagaagtttgctttttatacgatagctgcatcccggggaatggttgttagaaacataatagttagccaacatcattcacttcagacagatgaatatagagatgtaccctgttaataaagtctttgctagagcagattcgtggttcttcagccgatgtccttcatcaacaatcatgtagtaccactcaattttctttaaaaatgctttatctctcatgataagatcataatgggttatcaacacattaaattttccttctcctgcaattttttcccttattgctttcctttcctctaaacgtccatcataaagaaaagctgcaatgctgtcaaaaaaacaaaaaggctgattttcagacataacattcataccagtgcaatttctcagtaccaagagaaatattgcttgcaacataccttggtacccatgttgcaaactcgtttacccactttggtagcacagctcttggagcaactataagataaggcccaggcacacctttattctccagaagatacgcaatcagagaaattggttgaatacgtcttcccaaacccatctcatcagctaaaatgccattatagtcattgttgtatagagagaccatccattgaagtccttctaattgataggatcttagttccccaccttgtagaagggatggctgctttgtcacctgttaaaaaaagcattgatagctgacttaaacaaacttaacagtactcatattaaatacttgtaaaacaatcatagttaccttctcttgtatggaatggatagccaagttaaactgcctctcgccttctagtaagtcattagaatcatcattattgtcagagtcaatgatctcaatatcttgggcaggaagcacatcctcaggagcatcaacatcagataagtcagattctgagcctttcagtaatttggtgttttctgaaagtttggcatctttctgacgctggactgcagcccccaaactaacaaagattttgtttgtctcctctagaaaaagggttagtttttcgttcttactttcctttgctagtttcatgtattcctcttgatcatcagatttaagggccatgatccttagtttttcagctcgggtggcacgttgcctttgctttccatgccaggcctgttagatagatggcaataatttctgtttgtaagactttgtatatctatgacgtttaaggatatacataactcaattatatcatgggttcaatgacaagaaaaatgagcaatgaaaaacataagggcagagatatcatacctggacaccatcatttctttgcttacaccgtctatgagacgcctgaatttgcaactggaattcacgaacagcattgagtacttctgcaaagaatttcctctgtgtcgtttcaatcagattcttctcctcttcttctaaccgtaataacctctgaacaaagagtttaaaaaatcatcaaatagtatcagcatatatgagatgttcctatcatctcaaaacgccatcagtttccattcgaagaaagacttcatcactataggtaaaaatataaaatctgggagcaagcaattttgcgttggattagaaagcaaatgacctcggcatcacgcttgttcctgaactgatcatcagcttccataacaaaaggatctccaaccccatacattcggcgagacaacagcatcatgccccaatcatatagttgtctctccggatctgcacaattcaaacgcagccagtattccgcactcacctcaccccgaaccctgcattgtagttcttgtaactgccataaacaaacgagacagtgtcagtgtcaaggaaatcatattttaaacaatgtctgacaataaaaaagatcagtctagtgtcacacataccttaagaccataaagctcaagtaagcatttttcctgcaaatcttcacctctattggaaggtaatcctgatttttttttttaaaaaacacaagagtaagcattcatctcacaggataattggctccataggctttttcaaaaaattacaagcagcatagtcaaacagcaatcaccttcaagttgagataatcggttgtggatacgattcttataccgagtttcctttaactcggctagtcgagagcctgattcatagtttagtcgctgttgcaaaagtgcatcttcgaactcgctcatcaaatcacctctattgggagtataactatttccctgcaaaatccaagcatataacttcatccaaaaatcacaaaaatcaatgaattcggattcatcgaattcgagaaggaaactccaaggaattggttagagaaggagttgaagaagcacagagccagaaaattcgattcacaaccacaaatcctaacatgcaaatcgaagaaacagcttacacgaagaggcggagaaggagagagatcggagacggaggcatggtaaatagaagaaacggaagcgtaaaggtgagaaggcaagagaaggtcgcgagaaaggtagttaagagcagagatcagagactttgtcttctagacgggatcgttctcctcctgctcttgtagctgcttcaccatggcgggagtttctaattagattatttattttctgggcgt

SEQ ID NO: 37045 - DNA, 1758 bp, Arabidopsis thaliana landsberg
tgctgagtggtccaaagattagttcggctcatgccattcataatatgtggtgaaattaaacaatggattagccgtatatgaatgtcaatcttaccttacggtgcaagaaatacaaccgttattttccattataagaatttgacatggaactgtttagtaaaaagcgacgtgctaagcatttatagattgtgtgtgccatcataccaggagaggctataaacaataacaagcgacatttgcgtaattatttggtttgaagatacgtaaatttcttgccatatactatttttttcacaatatatagttctatacttgtacgttttagctttggttggaaaatggacaagccatagacgttttcttcttctctaaacggctagaattttgaatatttgagttagaatataatttcatcccttaattttaatgtaattattttatccaaggaaaaattaatgtaatttactacgatttttttgactacaattcaattaaaacattagttttcaaagtttccaacagatatatatggtatggaaattatgacgatataaaacgaactttattattaaagttttgctggcaaccttattaaggcttctttaatttaatagtgttaaacattgttataaaagcatgaaggaccaaatgtaacagctcacgatcaaaataaaaaaattgtaacgcagacgttttgagatatcttcaatggcgaagaaagctgtgttgattggaatcaattaccctggaaccaaggcggacgtacggggatgcgtcaacgatgtccggagagtgcacaaatgtctcgtggatcggtttggattctccgagagaaacatcactgagctgattgatactgacgagtcttccaccaaacctacagggaagaatattcgaagggcattgttgaatctagttgaatccgctaaaccgggtgatgttcttgtcgtccattacagtggacacgggacgaggttgccggcggagactggagaagacgatgatactggttatgatgagtgtattgttccttgtgatatgaatcttatcaccggtaagtcataattagatttgacattgacatttttgaactttgtcctgtttttttggttagattattagattcaggggaattatgtttttatgcatttggtcaaaaatcagttgaattatttcatcaattcaagaagatttttttgctattgtttcaaattcactcgttttcatatattctcagatgatgagtttagagatcttgtggagaaagtaccaaaggaagcacacataacaatcatctcagactcttgtcacagtggtggtctcatcgatgaagctaaagagcagatcggagagagcacgaagaagaagccaaagaaagaatctggaggctcttcaggacttggaatcaaaggctttgtgcgtgaagctgtgaaagaagcactggaatctaaagggatggccattcctcaccacaaagatgagaaagacgaaagcgagactaaagagcttaaactagaccatgccccaaaagtccatgtcgtgaacaaatctctgcctctacaaactctaatcgatatcctcaagcaaaatacaggtaacaatgatatcgaagttgggaaaatcagaccaacccttttcaatgtgtttggagaagatgcatccccaaaggttaagaagttcatgaaagtgattctaacaaagctgcaagaaggtaaaactgaaggtgggatattgggaatgattggtaaactccctcac

SEQ ID NO: 37046 - DNA, 2640 bp, Arabidopsis thaliana landsberg
gcgagaattgtcctttcttcaagatggaagaggatcatgagcgtatcgtggaggtcactacccctaatttcaatgggtatgtatttcatcaattctaaacctttactttaggcttctttggtaggaaagtctttgcgttgatgggtactgtttcaaattacttcttttagggtttcataagatttacttagctgtatagtaatggaaagttctcaactttagagtgattttgcgtcaggatgcttcgtggtttctgagatctctttgaacttggattctttgttggattagtgatttagcttttaagagtaatttttagaaagttcagtgttagagcttattagtgggtttgtgttctttttgttagttgatatcttgatattcctagctactgatatcaagattgttttgcagtataatctctgtgatggatccaagtagaagctgggcggctaggtggttaagaatcggtatgttgatcgctttccttaactatcgacttgcttattccatcaatgtgttcttattatcccatcattatactctatttactaaggagattactgttacatttattaacacatctctgtattaaagaacgaccatgagatctccaatgaaagattacattacaagatttgtgtgattctctgtttctagaggcctaaaatctgatataaattggaatgtggctttagatctgaagattttcaagatactttgcctccttgtttggtttattgattgcataatgttgctaaatttgtgcagggaagtttgctcctggttgctacacacttgctgtctcagagccactccctgaggaaatgcaggtaaacgattagcaggacaatattttatcttcgtggtttgaaattgtactcagtaacacattagccttcttcttcaaaattagatcatattttgttcacttgtctgattttgtgtgtttcattcggtggtgatttaatgtagcacttatgccaagaggagcgtgtacaatatgttctgccgaaacgcatgtgaagaacacatatcacgaggaaggctaggagggaagaccaagcattccactatttcattaaaagcttcttgaaacattattaggcgctttatatgaatcttcaatcttgtggaatggtccacgctaatgaaaccagagactgcttaacactcttctatgtaaggcgttagtccgaaaagaaaaaaaaaatctgtgtctgaacaaaaaagtcttctcttatctaaggtttagactttagttaaccaatcggaccctaactaaaaatattaatgagagtaggaagaataaatttgtgtggactctaaagatcaagacaagacaattataattcttcataaagtcatgcaattaataataataataaaaaaataataattttcttgattaattgctcaaagtgaaagtcaatctaaaatttgttcggtttttcaattctacaatttttatttgaaaatatataaaataaaataaaatggttaataaagaattgcttagagtttcctctttttctagaacaaacaaaaatgcttagaccttctcgaaagaatagcacatcacgttatatccaaaagcatattcttttgttagattaatcgtagtcatatggtcataagtcatacataacatgtaacatgttagttcgatcattattaactttcaattaagtattttcgtaagacgtaattttcaacaataaacaacaaatccgcgatatacggtttttgaaagggcaggcaattgtttttttaaattattaatactataaaacaattttcttattggctataaactaatatttaattccacgtggaagttactgttcgtcgatataaaactttcttcgttaccattttgagtctccggcggctttcacactccagaaaaaaaacacagaagctacgtattgaatctgctttgaagtcagcgacagagaaaggactgtgtaaccatggtgatgctgtggtggctctgcaccgtattggagctgcttcggttatcaagatctgtgtggtgaagtgatttttctactaaatatcttgaattttattcttggttaatgtttcttgatgaaataatccaataaagaaccagggaataggttcctgaaagtgttttgtgtggggcatttcttctctttcttttgctgttttagcttataagattatgaatgcactaatgactcttgctcatattattatagtttaattagccaataataacaatttttaaggctcgttttctcatcgtttttgcttagcaacttcaacatttagttaaaaattgtatgtaatttttcgatacaatcaaatgcaacaaaaactttatcagttgatcaaatccaaaaatcttaaatcaaggcaaaggagggaagatacgggaataagctgaaacgacgccgctctgaatatagcgtttgggattctcaggatcaggaatccattggatctcactaatgtttggcgtttcgacaaacgcaaccgtgaactctcccatcttctccatcttcccacgcttcccagctctgagaataagtccactgttacgcacgtatgagaaaatcccattggtgagcttcacgatatctcctgcctcgaacgcgtcgcactcatctcccc

SEQ ID NO: 37047 - DNA, 3069 bp, Arabidopsis thaliana landsberg
  unsure (1)..(3069): unsure at all n locations
tttggaagtgatgtgaaaaaaaggttttgccaaatggcccaaatcccatactgtaatacattatgggtaaaaaatttcgttaaggtatatgacgtatatagcctataagcataataaccccataaatacattatgggtaaaatcatatttctctctctttccaataagaaatcttattgcaattgatgtctagaaaaccggttcgaatccagggagaaagaaaaccggaatcaaaatgatatttctctctctttttattgtggtcaaaccggaatcacaaatcataaataataatcataagaaacgtgaatgggccatagattccgattcaagcccataaaataaggcccagtttttgttattagattaggacaccggtttgatttctggaagagaaaaaaccggaatttcacatcgtctctaccaatctctccatctctctctctctctctgctcgccgtcgccgttattattccgggcgatcaaaattaagacaagccattttgtaagtttttgcagctacttgagtgatacaatgcttgagagtaatgataaattttatgatgtgggtttctctcagaaccacaaaaattgacaaaatttgattttgtttcttcttcagataacttgtggccagtccctgtttatgtgggtttcaatctttaacctcaagtcttctggattgaatcatttttgtacaagaaccaaggcttttcgatatttctggtgtaggaccttttctcttgcttcgttgtctgagaataactcaagattccagactgattctagtaggctaccttactctggatcacggtactatcatagttcaagtaagcattttggtgaagattttgtttcgattctgaagaatattgatgtcccaagggattgtgttgagactattagaaatgtgcttgtgacacacaattggatacagaaattatgagagttgggtttagtactnnnnnnnnnnnnnnnnnnnnnnnnnnnnnnntggatgatttgtttgaggagactttggatgcatctattgttctatacttctttaggtggtcagagatgtgcattggtgttgagcactcgagcaggtctatcagcaggatgattcatattttggtatctggaaatatgaattatagagctgtagatatgcttctctgtctggtgaagaaatgtagtggagaagaaaggtctttgtgtttagttatgaaggatctttttgaaactcgtattgatcgtagggttttagagactgtgtctagcatactgattgattgttgcattagagagagaaaggtaaacatggccctgaagctaacttacaaagtggaccagtttggcatctttccttcacgaggggtttgtatttcgttgcttaaggaaattctacgagttcatggcttggagttagctcgggaatttgttgagcacatgcttagtcgagggaggcatctaaatgctgctgtccttagcctattcataaggaagtattgctcggatggctattttgataaaggttgggaattgcttatgggaatgaaacactacggcatcagacctgatattgtggcatttacagtttttattgataaattgtgtaaggcagggtttctaaaagaagcgacttcggtattgtttaaactcaaactctttggtatctctcaggattctgtatccgtcagttctgttatcgacgggttctgtaaggtggggaaaccagaggaagccattaagctcattcattcttttcgtcttagaccaaacatttttgtgtacagtagctttctgtcaaatatatgttccacaggagacatgctcagagcttctaccatatttcaggagattttcgagttgggactccttcctgattgtgtttgttatactactatgattgatgggtattgtaatctaggcagaactgataaagcttttcaatacttcggggcgctgttgaaaagcgggaacccgccatccttgacaacatctacaatacttattggagcttgcagcaggtttggaagcataagtgatgcagaatctgtgtttcggaatatgaaaactgaaggtctcaaactggatgtcgtaacatataacaatctgatgcatgggtatgggaagacacatcagctgaataaagtttttgagcttattgatgagatgagatctgctggtatctctccagatgttgcaacctacaatattttgatacatagcatggttgttagaggatatatcgatgaagcaaatgaaattatcagtgagcttatccgacgaggctttgttcctagtacattagcattcacagatgtgattggtgggttctcgaagagaggggattttcaggaagcgtttattttgtggttctacatggctgatcttagaatgaaacctgatgttgtaacatgcagtgcattacttcatggctattgcaaagcgcagagaatggagaaagctattgttttgtttaataagttgcttgatgcggggttaaagccagatgttgttttgtataatacgctcatccatggatattgcagtgtaggagatattgagaaagcatgtgagttgattggtttgatggttcaaaggggaatgcttccaaatgagagtacccatcacgcacttgttttggggcttgagggaaagaggtttgtgaactcagaaacgcatgcatccatgctacttgaagaaataattgttgcaaaatggcacctgacatcgggaggatgataacagattacattctgcagcaccaatcctacatacggctgaatgatccacctctgtcagggttggatgaacttctccacataagctcagggagccttggtatatgaccaagatatatgactcaaccctctcacttctatccataagttttgatgctatgtttctgtgccaaaatgcatatgctttgtcacctctagcctataatagacatctttatgtggcctctttatttgctcctgaaataaagggcgttcattatatccagttctcgaatgcagacctaaaccaaggtggctgctgaccatctatcttatggaaatgggcatccatactatgtgc

SEQ ID NO: 37048 - DNA, 1540 bp, Arabidopsis thaliana landsberg
aaccttaattctcttcccagtgtttatcatttatgataaaatcacctttcttaagcagagccttcgtaaactcttcataaaaaacaacaacatggttagcattcagcattcaccaattcatgatgcatgacagaagggcacaaaatacttttaatattcagtaaacacagcaatataatcaagagggagatttaacatttacctcaaatatgtcagttgaccaaaacgaccctcctctaatttgaaagccagcgccacaagaggtccatctggagatccagtcaaggtgacctgaaattcaattctttagaaccagtacattttctccagtaaaacaaaattacaaattgagtaccctctcttcattattattctggtcaagagcatagttattgacttcatttggagaagggagaaaactgacaacaccatctagtagaggttgtactccctgcagattaaaaaaagttgttgaaaactttttaatacagacacaagaggacaaggagaaacgcaagtgaatatgtcatccaaacttgcgcatatatatcatctttggattccaagaatcaattaccttgtttttgaatgcactacccataaatacaggaacaaacgtttgtgctatggtagctctacgaatagcttcctgcacatataaacagcagaccacaaaagttaaagtaacaaaatgctagtaaaagagtaataatatctaaacgtggcaattcttggacgctagaaatgaaagataacactatgaatttaagacaatgactaaggcaagctaaaacccacatgttcaacagtccctcaggattgatatctgttaagtgaaatcaactaacaaaacatcgtaagttgcaggaacagtttcatatgtttcatgcaaagaatttgctttcaaaacaaatgaaaaagaacaaacctcaagctcagaagcagatacaggttcatcattcagaaatttctcggcgagtacatcatcaacttcagagactgtctctatcaattctcgcctcttctccgcaaccaaaccttccatatcagcaggaatatcaccagccacaacattctcactgcaatttatagaaacttaaaatgtcaccacatatacacatacccaactacaacataaagcaaattctaaaaaaatgcatcgtaacacaaacccgcttgatccatgaaagaaataagctttgacatgaataaggtctataagaccctgaaaattttcttctagaccaatgggcacttgcacagctgcactatgatgtcgaagcttagctcttgcctagtgaagtaaaaataaataaataaagaagttataacctataactgatcaaactcattcaatatctatccatggatgatagtacttttacacacttgcgtcaagactttccatggatctgctcccatcctatcaagcttgttaataaacgcaactctcgggacttcatatctcctcatttgcctatcaaccgtaatagactgactctgtacaccaccaacactgcacaggactagaatcgcaccg

SEQ ID NO: 37049 - DNA, 976 bp, Arabidopsis thaliana landsberg
  unsure (1)..(976): unsure at all n locations
tgctctacttcgggtacattatcattatctcttactcgtttttcgtgctgaccggctcaatcggtttctacgcatgtttgtggttcgttagaaagatctactcctcagtgaagattgactgagattagttaaattgacataacttttgatgcctcttgaggttttgttgggtggtttagttgtagttgaaacaaatattttaccaaacctttgtaatgttttgatgaatggataatatattcaaaacgcaacgctgtgtagatcgttataactaatatcaataagaagatgttaaaaaaaatatatatatattcaaaacatttttaatgatacagactgtaactacaatatagtaaagtttatttgaaagatggtttgtttgagccagcttccttaaccattctctttgttgaagaaccacttgagaatcctagcttctgcttcatttcttccagtcttttcccgtttgatagatacaaatacccaatctgattgaacagacgaaaaacgcgttttacgcatggtagaagagtacagatttgtatgagtttcagatttgagcaaacttactagtgtttccaatgatgaggccttgttataaacagcaacaccggcacgtctagttgaccgtgttttaaccgagcctacgttttttccccaccgaagtatatctctgaaaccaacaaacttagcatcagatcgatctatctttgctgtctcaaaaaaaaagcttggaacgtgtgtagcatgtgattcaaatagtcataatatcttcatgcatctttcagataatggagagatgtaaagacaaaaatttgatgctaaaatatgtatgaatttgcccgcaaaataacaagtttttgaaaccgacctttcatctttcgttaagaagtcatcatcaacaagcttttgcagcatagcatactgaagaagaaagacacagttaatagttagctcanacaggaacaatgataac

SEQ ID NO: 37050 - DNA, 2162 bp, Arabidopsis thaliana landsberg
  unsure (1)..(2162): unsure at all n locations
gagaaccatgaagaacaatatctctaaacagagccatttctcacacacagtcttaaaacgactgcgtttttagatatactttaaaagctttcaagtctccatgaagaagaaacagaggatagagaagaagaagagaaccgtattatgtaccgacattagattttttttctttcttttattatgatttctacagaaatttgtttttgtttttttactttaaccgagaaaaaatgatttttatcgttccatcacatcaaattctggcggaaatttacagtggtttcattgagtgctcagacgacagaaatacagagtaagatagagatggagagagaaagagagagagtctttaaagagaggagattgtacaaatgtagggacctgttgtgtaagagagagagatgaagggaagaagaattatttggggaggataaagttaaaaaccccatcatcttttatctctctgccagagttctgaagctttgcagaagagagagatagagtgagtgagagggagtgattttgtttctctctcttgaagggtaaaacggtcataaaatgtanaagaagaaggagaagaagaacatgttaatggcagtggtgaataaaggaggtcgctttcgttgcccaatacttacgagtctttgtctctctgtggcttgtttcacagatgacccatattaataaatccatcttatgggtacttttgtaattatgtatttttatatgattttagtgtaatttttttgtttgcttaacatgttcttcttcatcttcttacttcaattactaatttaaattcaggagtttacaaaaagtttggttcagttttctcttctttaattattagtatagttgttgtgtttttgtcaacgttttttagtatagtgaacgtgtgatttctaagtgtttttgtttattactaaatttagaaatatgcatgccaatgatttttggtttagcatcaacacaaaacttaataaaatatgattggttttaggatgttaaccggtttggttggctccggtcggtttgtcacaaaattaatattttgaagctttgagaacgaagtggactaaaactaaaagggtcacaggcccaacaaaagaaggaagaacttaaaaaataataattccttttcattttaacttctcttttttttttgttaaatcatttatttgtttcaataaaaatacacataatattatcttttctcaaaaagtactctatagttagaaaactacatatttattttaacccaaattattatttttccattccttacacactgtacgttacactttttattatcatttgctgtacaacgttaatatttttaaccatttctgcaattgtttacctctttttcatccgcaaatttctaattaaattatatgttgaatgttcatagccataataataatttgtccaacggagataagacgcctctggtgttatccccaatgtcgtcactccacgctaccgtgagcctcccactgttctccaactcaaaccacaaaaagctaacgtgcgcagctacattatcacctccgccatggaaacagagccggcgagttatctccgtctccttttttctctcccgtctcctcctcctccctaacggtacacgcatctctcttcaaattcaccaatccgattctcaatttcacgaactcgattttcaatatcaccaattcgacttttgttcatttcaaatttggttatttatatgttgatgatgatgatcagatgctatggctggtggcttaatggataaattggataaatacgtcaagaggtaacattaaatcgtctccgatgcttattcctttgaattctgaagttagattttgaaatgtttggtgaattatctaaaacttaaaaccagttattgaataggaagaaacttgatccacttgaagcatatgtaccaccagtgattctagctcagttacaaatccaggatcttggtaaaatttctctgtttttttgttacacatttgttcttaaaactcttgctatataaaacttacactcatgtttatttatgatgttggagagggatttttgaatgtggagaaacctgaatttgaggcgtgtagacgccaattgcgatatgagtcctgctagctctcttcgtgtaaacattcgagctgtaagtg

SEQ ID NO: 37051 - DNA, 2058 bp, Arabidopsis thaliana landsberg
gacagcaaaggacgaacaagacagcgccaaaggggaaggccgagaaaaaaacaccatcaagcacgactctttgtagagatacatgtacaacatattagcaataaacgaaaaactagccatttaatcgccagcaaaaaccgtctaactgccttattaagatctcactcttaatttctttttttctctgatcttcctaatcactctcattacaactctcactttcatatatatacacaaaacaaattaatggtatagtaacaaagaatgttaatattcgtttctatgataccttctcttgttatgtcttcttctctcgaccttcctgttttcttaactttgtcactgttcaatttcaggtggcaaacacattacttcttcaacttcatctgcttggtaatgcatcagtttctccagctgtggtctaagttccttgttgcaaaactcttcatactcttctatatttcctcctttcttcttcacttcaaccaccacaagagatggcgtcagctcaaagatctcgactctaattgtcaacggtcctttagctccttctctacaaccttctagcctcacgctccaatccttcttcctcaccataaatttcacctctttggcaatctcttccaatttcgatatgatctttgtcataggagcagcagatacaaaccttgctccttgtccaccttcttcaaacaaacccgaaagatctgagaacgataagatgtcaaatgcgtttagactcgcgggtctcggcattgaatcaacctctttctagtaaactctgcatctccttctgaagcagtcgatgatcggcctgatgacaatgatgatgaatcgtcatcatcattgtcatcatcctccctacataacttatcgttttcaatatagaatttgacatgtttgaaccctttcttgaaccatctatgcttcatgatctccggtattgtgattcgggtatctggattcgtgtctagcatccgggtcacaagccttgcaagctcaggagaaaaccatttaggacacttaaactgccctttatatatctttgtatacataaccaatatgttcttgtcatcaaatggaagataaccagccatcaatacaaacaagatcactccacaagaccaaatatcggcttttgcaccttcataacctttccttgtcaaaacctcaggcgccaaataagctggtgtcccgcaaaacgtttgacagattccttcttgcttgagctgctccgagacaacgctgagcccaaagtcagagactttcacgttccccttgtcgtccaaaagcagattctcaagcttgagatcgcggtggtaaacaccgcggctgtggcagaaagcaacggatgagatcaactgctggaaatatctcctcgcggttccttctcgaagccgtcctctagccaccgtattataaagctctccgcctcgaacgtactccatcacaatgtaaatctttgtcttcgtagccataacctcgagtaggtgtacaatgtaagggtggcggacacggcggaggattgaaatctcccgtttaatatgaccggccaatccactcttcactatcttctccttgtcaatgactttgatggcaacatcctccccagaatgaatgttccgtgctaaatagaccttagcgaagcttccgtggccaagaagcttcctatttcgtacttgtccatgagaatagagccttgtggagtccgcggactcctcgggctctctggagtactggtctctttgttcgtattttttgtaacgattcgagcaagaagacccgccatgaattgtattggcgttgggccggggatggccaacggtgtagatagtacttgagccatccgtaggctgagacttttatttagttctggttgctctctatgtgtaaatgtaactgttgtttgttgattccgacacggttttaccgggaaacgaaccaaaacaagaaaatgaaatgaagaaacggacaaaaataagatatggtggggttgttgtttcggttgtgatgttgtcttaacttggcctttttcgtgttcgttttataacagttttc

SEQ ID NO: 37052 - DNA, 1564 bp, Arabidopsis thaliana landsberg
gaccgtaatattatagtccggagttttttttttgtcgtatcctattctttgggtgcttgtataattgcagttttgggagtaattaaaacacaccaagtccatatttttcataatggaaatttggaattttatttgagacagtaaacatttcgatagtttattttataacaacctaggattttcttttgttccgccatatttagaaacaaatcttagtccatcacttacagtcttacactgttaaacactattcatctcgatcatttttaatgatttttatagtaatcatctttacaattgatgagacaaatcaattttgagtggttgcaaaatagaaaccttaacttaatcaaaagaggcctgatattaattaagagcttccacaaatttagaatctttcttttcatcatgattaaaagggaaaatatatgataattattttggattattactattttgatgagtagaaagatttgactagcttgagtggacattgttctccttttaccatatttattgagaaaataaaaaagaattcgttatttaaccaacattatttcaaatgtagtaattttcgaaagtaaattttaatggatatttccaagcattcaaatagtcaaatggaccaatgatattactaagaaacatcagaaaaaaaagaaaaacacaagaataagaaaataaaatgccaacgactagttttaaaatctgtacttttttttcctagaaaatttgtacaaaaaataacaaaaacccaaggcgtatattcaaaggtcgaaactttatggtaatgtactaatgtctcagtgaaaaaattcagaaactttttaataccctaaatctttttttttttttttttaataccctaaatctttttaatttaggaaaagaaagaaaaaagaacataatttctattgcatgcttctctcctacaaacggacacttctttattggttttgttcctatcataagcctctgtgttcgtgtctgcaacagatctgtctcctctttcatttctctttttctctttagaagaaaccggaaaacaacaaaaccctctacccgaaagggaggtttttaaagcactgtgccaaaaagccatcgttttctccagaaacccatcagtttcctctgaatcctgcatgtgaaagtttggtgaagaaagaggagagagatctgtgatttcctttaaaacgctgccgtttctctccttttttttgtttctctttctcttgatctctgttgttctgtggctgatgatgtcactaacaacgatgcccacttgcctccatcaatttctcaatctctctcatcttctttaatgcgatacaagttctcatcttcagtgtataagaatcataaattttgatcctttagcttctctgtttcttcttcttcttcttcttcccttgtaacagagagctcgaaagttttcatttttctttctttccccatctgggttttcaatttcactaatttactactcctgatttgtgttttatgaaattttctggacttaaagctattgccatagtttgccacacacaatcctttcaaatttgga

SEQ ID NO: 37053 - DNA, 2035 bp, Arabidopsis thaliana landsberg
aggtttctgggcttggacatataggcttattacctcgcttggatgatttgtcgaaagtgggttaattcttctcatctttaaacttttgatgtgtgtttataattttctcacgatttgtttttttttgtctttctctgttccactgattgctcagcaacagttgctactgtagtttctgtatcgtcttcaaacagttgaatttgtttaggtatatttgtctatagagatgttgagtttaccaatctacagtgtgattgaagtttccccaagtttttatctttaagttactttggagtagcctttctttatgtgcttgaatctcttctctgctcatttgattttgagttgtcagacgtataaagtttagtcttttatcactgtgaaagatagcaacactatctcataatttctgagaagagtgtggagattaacttgtgtagtggtttttaatacaattccaattctgtgaagtgattgttgttgctgctcaatatctcgtgtttttcacggatgctaatgttatacattggattttgatattgcagatttagtctcaagagaattaagcttggtgcttctttggtgagaagcaagatggatatcgggtgtaaagttctcgtctttttcacatgtttcctcactgtgacagcagagatttacattgtcactatggaaggagaaccaatcattagttacaaaggtggtgataatttttttgaagcaactgctgcggaatctgatgagaaaattgatactacaaggtacctgcgttttctcttcttcaagtacagccttattaacatctgactcaccaaaggcttttactacaatttccttagctttaattagccatatatcattgatgcgcattacaatgttttggccaaaacatcttcttagtgttgtgactaacaatatgttacctttttttggcagtgaactggtgacatcatacgcccgtcaccttgagaggaagcatgatatgcttcttggaatgctctttgtggaaggatcttacaaaaagctttacagctataaacacctcattaatggttttgcagctcatgtatcccctgatcaggtgaaatccaattcgagttagtctctacaaattacatttcagtgtttaatctgtagtcccttacagttttcccctatattagtaggcggaaatgcttcgtcgcgcgcctggtgtgaaatctgtggatagagattggaaagttaggaaacttactacacatacaccacagtttttgggattaccaactgatgtttggccaactggtggtggttatgatagagcaggggaagatattgttattggctttattgactcagggatatttccacatcaccccagttttgcctctcaccacacaacagtaccttatggccctcatcctagttacaaagggaaatgtgaagaagatcctcatactaagatcagtttctgcaatgggaagatcataggagcgcagcattttgctgaagccgctaaagcagctggtgctttcaatccggatatcgactttgcttcaccaatggatggcgatggacatggaaggtttgtcttgttaaattttttaaaaaatatctcagaactgcttattcctctgcacattttgatttgtatgcttctttttgttctaacgaaaaaattggcctttcagtcacacagcagctattgcagcggggaataatggtattccagtgaggatgcacggctatgagtttggaaaagcaagcgggatggctcctcgtgcaaggtaaatagataattgatccagaaattggtggctttaaagacatttctattcctgtctttcaaaactaaatcttgtcttgttttaggattgcttgttacaaagctctctaccgactttttggaggctttgtagctgatgtggtggctgccattgatcaggtaagccagaacttagcacactactaaattgttccaaatatatgaaataatgccttctcctgctgaaattggtctagtttcttcatagctctgcttctttgttctggtttg

SEQ ID NO: 37054 - DNA, 1497 bp, Arabidopsis thaliana landsberg
aggcactccattttcatttagttatctctgcacactttaatattattaatatttaaacaataatttctgtatatttttggtagagatttgagttttatgtgaaatattaaatattcagcatctatatatgataaattcgaaaatgcatgttgttatattaaagaaactatttagtgaaataaaattattgtttagtttgaaatttattatattaaagatgtcacactattttctaaaacaatatcaactaaattatatgaaaatcgttttcaatatattttacattcaataatttgtactaaaattgttttgcaaaaaattttcatattttgaagatttaaaattgaaacctaaacctaacaacaatatatatttaaaaaaatttagcactacttgcatgtgtatactgttttatatggatatttattgttgttttttaaactaattcagtatttcatttgctttttatttttaagaaaaaacaagaacatcaaacgttatagtggatgaaatcgatattactgagtaagaggggatctctcgaccctcaattgccataaaatattactgggtaagatatcatgtaccgcctaagcttgtaccagccaacggctgggtgtaccctcaattgccaataaatcctttccatacccgagactgtcttagtatcatatccaccttcagttattagagtcttttcatatcacatgatatctttcccacacatttgatgggggcaatactgtctcagagataaatgcctaggccacacaatgggtcttccagactgcacaagtacactagagtagattatgatggagccatattatggatggcttatagtggactaggtttgtggaatcagagcaacaacaagcagtgactgtagtaaatacgaatgacgagatcataaggtgaatgatggccattatccgtcactcgggctcaaagaaagaaaccttgaagtagaggctgcagctaccaacctggagtaaaggtaaattagatctcaatattcaatacataggggctgaaataattaaaagtgccagtttttcatatgaagaagtgaaagcaaatagatacaaacatgatcatggataaggtcgagaacagatctagagaatgatggcgttggtcgtctcgattcgaaattatatcggagtcacgactttttgggttatctatctatctatatagagagaaaaatataaaaggaaaattactaaaaaaaaacacatataatttccattaacattaataaaggaaacaaacccagaaagtcaaaacgacaatggaacttgtcgttttgagttcatccaatgacactgctaaatcttggtaggcattgatgctgctatgtatgttgacatcattgtagatatcagcaacgttgttccacattcaaaacaagagctgaaaaaatggaaggataaagagtggtgataatgggatgaacatatagaaaattcaccgaaagaagctttcaaggggtcc

SEQ ID NO: 37055 - DNA, 2120 bp, Arabidopsis thaliana landsberg
  unsure (1)..(2120): unsure at all n locations
atttggtatatacctgaagcacagcacggttttcaattttcttgcaaagcaatgcaccaaggaatgaaggaccatcaccagttgtatctactgcatccacatggaagggatcaacagatccacggaagctctgtaatcatatacatacaagaacacaacttaagtaacattaatggtaaagtcaaatccacaagaaagaaaaactcttcgaaaaccattaccttggtgtagtaactacaacccttttcacctagagtgaccaagagaagtttcagattagagtgccacagagacaaagcagtctcatcatcaaccttatcagatccagtcaagaacataagctcttcatcgctgactttgatcacttcagctttgtcccaaatgctcatgatctgtgttttggcttcttcttttgatggccacagaggctccctgaggtttgggtcataggaaagaagagctcctgcttctttcgccacttccatggccttcaaatgagctgacctacacggctccactatcaaacttattgatccatagtgaaacactttcgcctatgtaaaacaaaaataaaacagagcactcattaacctaacttgacatctacgttacgtataccaacaanccgtnntacgttaatggagtggtagncnacccaccngggggttttnnntttttncctcgctaattaaatgtgagacacggacccaaaaaagaatttgcctacgtgtcatatattaattaaaaataaaaataacgtacagatctgatgacatcaagattgagctcgtcgggacggaggagcatatcggcactagggttccggtagaacatgaactcacgttctccatcagatcttagtgtcacgaacgcaagtgcagtcctggctccggtgtcgaaattgataccttcagcagagacaccgttctgtttcaagattccggcgagcatgtgaccgaactcgtcgtcaccgagttttccaacgaaagcggcacgaccgccaagacgggaaatggcgatggcaacgttggcaggtgcaccaccaggggctttgatgaagccaggagcatcggcgagggatacaccggagacggttgggacgaaatcgatgagcatttcaccgaagctcacgatcaagcttttctcgccgttagatgcagccatttttagtcggagtgttttgattggacgattaagattgagcaaaatagagagagttaaagagattttgttttggatataatgagaggtattagagagaatcaagggtttatatagaggtattagggtgagtggtttagtcaaatccacaagacttttaattaatacaaattcaaatttatccatttaaagattgatcagataagatatctaaactgtgtttggtaacttattttttaatcgtaatattctattggttgtttacatacatgttatgatttggtgagatttagagtaaatagtgattaatgtttttgaccagattttatgcttcttcaatgggacctagacgacgtatttcacaaggttatgttattaggggcttatccgttgttaagatagtactattaaggggagtaaaagatattaatcctccacttttgactccgaatattttgtttgttttggataactttctttttcaataaattccatgcatggataatgttttaaggcaaatctacgaaaatcgaaatgtattaatgaatgatttgttataatttaatttcgcaaggttaattacgaggggcttatatccgttgttggataaatatgttaatatcctcctctaatttcgattatcttatttgttaggataacttttatttccgattacacaagatattatctcatgtaaatctactaaatcgagaaatgcaaatctgttacaatttttataaacggggttagctttgacttatatgatcattttatttatcagagactatctaccaagtaccaacactatttggtttcctatttcccaagttatattttatgcatcagttatcactactaactaacgactatccttcttcttagacgttttattcacgtaattatagcgatttattgatttccgataaacagtaaataaaaggtgctgagaatttttaata

SEQ ID NO: 37056 - DNA, 1204 bp, Arabidopsis thaliana landsberg
  unsure (1)..(1204): unsure at all n locations
gttctctatagaccatgttttcccatcaagttgatcatccatgtggataaatacaactatcaaaattataagagaggcatgaagaaaaacaaaatataatgagacataacatggtttaaggccttcattttaacagtcgaaatactcaaatgtatttactatgcacagcaacatctcaagatagttatttttcccttccaaaaaactagaaatttctctgaactttagccaactaaaaaattatttgagagcaatatacgtagatattaaaattataacataccatggttaccactttcatcagccaacttcctaatgagggcagactttccagaccccgagggaccatacagaagaacaggtcgcttttgactaacagccaatgagaccatttcaaaagatttcttcaccctagagtggatttcaaatggttcagagaaagaattgacatccctgaattgaagaggaaggtggaattcaacccaaataagagaacaatcacattaagtacaacggggataaatggtgaaaatgatgggaaggaacacaaagataaccaaccaggtgtccagcctccgaatcttcatctgtggctcatctgcttctaaccctgctgattgtcgcttgttaattccaggtacaagggtattaaattgttgcaaagactttaacgctgtgtatgtaggcaattgaatgtataatccagccttctctatttctatatcctgacaaaattcctcccagctgaatgtatcaaagaaattaaacccttagaaacaaaacttcagacgaaagtgaattagaagtcttgagtatagctaaaagtggattaccgtagcaagcacgaaagtgcttcttcctcttcaaaaccaaaacatcctgctaatctgtcactgcatctcaaaacaacagaaagaatttgaatcccacaccacacagcatctcgatacttttccaagaaatgcctttgttgtctaggacattctgagagccttttcatggagtccaagtaacaagaccaatcccacaacttagagaaaacctcangtctaatgacaagaaaacgatatgatactcgaagacaaagcaagtacgcatctgtagcctgattcagggggaaaaaataatcaatgtaactggccaaagactatgaagtggataggaataataacatatgatgctctgacaccaataaacgtcaaag

SEQ ID NO: 37057 - DNA, 2880 bp, Arabidopsis thaliana landsberg
  unsure (1)..(2880): unsure at all n locations
acaattaatcaagtaatgaagaaaaccaacagtaggaagtttccatgaaatagtagttttcaattttcattaatccaattctttttattattaacaaaattaataataatttcaaatatatccccgtttttttttttttttactttttataaacaaaaaccaacaacgaataaacatttgaagattattttctttccatatacgtaaacagaaattaaaataatccaaagtccactccaatcattttcattacagactcagctaatgatcaaccactagctaatcccgatcggtaaaaaataataataatcacaacaccgactttgtttcttcaccggagagttgactttttccaattgtctcatcactaacttgatcagccggtaaatttaggtcaaacttgtggctattgtcaccgttactgttaccgttaccaccatcatagtgacaacgtttgtgaccacccaatgcttgaccagagggaaacgacttaaaacatatagagcagttatgagtcttcccactttgaccaactaaaccgttactaatatttccgttattagtaacggttccgttactattattaacatcgacactaaccggtttccggtgacttgttttgtgtccacctaacgcttggtaagacgggaaagatttgccacagacggaacacttgtaatctttctgatgatcggacagtggagaaagagagtgatgatctgacggtggagagtgatgatcggaggagccacgagcgagcataaggaggcaaagagcgagatactcttcttcagaaggaggagggtttggttgatctatacggtgacgttttgtacgttttcttttggtccatgattcgaggttttcgggctcggtttcgtcgaggcaacggaggaaaggaggaggagcggtggttgtggtggtggaggtgggagaattgatagtgtcgagagccatatggtggtgatctttgattagaagatgattgagaattgagagagatgattataaaaaaaaagaaaaaaaaaagagaaagagagagtgaagtgagctggtgagggagtgagatgagatgtgagcacgtctttgttttaatttttttgggtgattaagagtgggaacgtgggctctaagtgatcaagtggtgcttcttctcttatttctccatatccattaatatctcatcctattttcatcttttatatatttttctttaacataaattaatttatataattgaactaaattctttccaaatttccaatatatcaaaaatgaacgaaaaaagaatattagagtttgatgcagtcgatgtagaatcaatgaaatagagatgaattttgaatgatcaataatgataaatttgtgaaaatattataaaaataaagtaaatcaaagaaaaactatcttttcagtggcaccttgtccaataatgcgtaatctaagaatgcctatttttaaaattatgtgttgtgggggaagtcatgtaactataaatgtattagagtctaacatcaaactttattgaaaagccgaaaaaagtaacacattcacaaagatggaaaactaaagtacttatcaaagttgtgctaattttgtcgataggtagcagtccaaatcatgagctgatcagcttattcaatatcttcttcttcctctttttttctattggcaacaatttattatccgaattgtcaatttcaatacactttattcaaaaataaacatatatccacacataattttacattagaccttttttttttggttataataatgattgtaaaagtaaaaggaacttttacatttgtagtgtagtctatagtattaatgtattattattattattgagaggataatttagtttactattaaaagcaagaaactaaaaaaacaacaaggcataaaatgcgacaggtgttgatgaagatttgagttgccatatcttcggagttagtttaaaggttaggccaggttagcgaatcttttcatggcgttgggtcataactgagttgtcaatttttcattggttggaagcaggttagattctttcgttggggacacgtggttagttatgtatggtggaaatggtacgatttggtggagaaaaaaaaaagacggtacgagacactttcttaaggctcaggcgacatggttgtgagtgacaccacccacttcataagcaactaatttatttattttcttttgtattttagttacaaccatcaaatttaggatctcatagtttagttgcttaaaaaaacttcgtctatatacttgacattacttgcttatttatttccctaaagtttttttatatatcatgatttattatagatttttataagaaaaaaaaaagctgagtagattaagagatgatatatgaataatggaggaataggtcctatatacaagaagttagttaagttttctttgcacaacaaaattaaaactcaaagtcaaatgagcttattaagatagaaataaactaacaacttgcatagctcatgaagagctttattgtgcanagaaaagtaaaaagaaaagaactttagattgtcaccaaaattagtaagactttgattcaatcataaaatgggaaaaaaggagagtagcctctttgacaactctctgagttaatcacattaattcacactataaatataagagattacttgtttagataacctaattacatgggcttctagacaatgataagcctttgaactataaaccatatgaattaaaccttttttatggaccctctaataattattacgttcaactttactcctttatcccagtcattttccacatccgatccaacttaaaaaaaatggtatcatttttctgaaccaccagtgtataaaggagaaggaa

SEQ ID NO: 37058 - DNA, 1929 bp, Arabidopsis thaliana landsberg
catggctatacaaggcgacaaggaatcatctataccttagctacctcaaattcgaagccataagcgcttacgttgccgaattcagctgggatctcaagtacgctggtgcgcagatcctcatcaccaaggtacataacacatcaaaatttaacttctttttttcaaaaccaatttatgtattaaaatatatgtaaatgcatgcagttgatcttcgaaggccacaaaggacttgatctatacaaacaacaagccgatagttttgtatgctctaacctccctggcagtccttaccaccaagtcttcactaccccaggttttgcctccatgaaataacatatatacatatttgtaaaacttaatgtatacagtatgattgatcatatatagtgtgatcttcttgcttaaaggtggtatgattcacttgagggatggtgccaacagtcaatatgtcaccgccaccgccttcttgttctcggcctacgctgatatactacagaaacacaaccaaaagatctcttgcggtagccaccaattcgattcaacacacctcatggctttcgctaaaaaacaggtattatatatttttccataagaatgcaaaccaaacatacacaaaatatttgtgttccttatttttcacatatgagttaagaagttatatataatgtgttagatatatacctaatgtgttatcattatatgcatgttacagattgactacatactagggcataacccacaaggaagatcgtacatggttgggttcggaccaaacccaccaaagcaagcccatcacagaggagcctcagtgcccatgcatgaagccaacgcgccgctaagctgcccattgagcttcgtgaaatggtacaacaagaacgtacctaacgctaacgagctcaccggagccattttgggaggacctgaccgtcaagacaaattccaggatctccgatggacctccgtgtacacagagccttgtacttacatcaactctatcgccgttggtgttctcgctaagctcgctgcggcttagagccttttgtaccacattcgagactactttgatgaaaagtattcttctagggtttcccttacctactataattgcatacacctttgtggcaatgcaatgtaattctatttttcatttttttttgcctttgtaggtagctttttggaatcatgttttctccaaaatataaaattgcatgggcataataataagctctagtgatttgaaacaataattaagcgaaattaatgaatagccggaacgataattctcatcccgtttcacgtagattgttgttttaaactctatcttttgtttcatgtagaatgatgtgtttttgttgatttccgcgtaatttgcataacattttctaatctatttttcatttcaaatcattgttttcagttctaatatgtgtctttaaaaacactataatattttttgtcaaaggaaaaaacaatattttacgacgaagtgagagtgaataatgaaggaaagaatataatcaggtcttagaagaatcttgcgagcagaaacttgctcagaatatttagaatatatatagcacatattcaacttcccatgtaatagttgactcaacaaaaaattaagtgggtgaaaaatgttacaaggaagaattgggcactccaaaccattttgccactttaaacattttgtatagggtaaaagtttaacttatatattttcttggcactccaaaagagtttgaagacgaaatctttggcttgtatcactttagaaagagcaaaacaggcgtaaccatctccgatgacatcattacacggccattgataaatccatacgttctaggatctcttcactgcaatacctagcatatagataatatgcaagcctttctgaccatttgagtcaaactcaccaaaacaataagcttt

SEQ ID NO: 37059 - DNA, 2356 bp, Arabidopsis thaliana landsberg
  unsure (1)..(2356): unsure at all n locations
gttttcaccattcatgataaacagaggatctttagttcccgtggtccacatgagcaatgtgctttccatgaacaatgtctttctttcatcgcttaaacacattcatggcagttttcaggatccacacttagcatacatgtctatccatggctttcactatatacatccgaagccagtgaatgctttatcatggaaccgtgaattgctttgccaaaactttctgaaggttagtttgcaccagcagagagagcagctggaatactaacaccatcattacagattcctgaaactcccatttgacggaaaatatcaatagccgcactaggattatcgctctgggcacaacgtgtgatcattgaattccacgaaacaatatccctcttggagagtctctcaaaaatctcataagcaagattcattctcccacacttagcatacatgtcgataacagcacatccaatattgcacctattatcgaaacctttcttgatgatgaaaccatgaagttccctcccgagtttcaatgccaacaaaataccaattacaggtaaaatagacaccagagttatctcatttggactgatttttaccttaacaagccacctaaacatctccagagaatcaatgtataagcgatgtatgcaaataaccagagatcatggccgtgaacactacaacatcaactgagttacactgactgaaaatattttgtgccatagaaacacccctacacttaaaataggcatcaataagagcactagttaagaagatatccaacgatatgctatgtctcataatatagcaatgaatttgcttacaatactcaaggttttcaaacttagaaactgatggaagcaaactagaaaatgtgatagcatcaggcaagacacctgaagaaatcatctcatagaaaaaggttaagctttcttccattaatccactctgaacatatccagatatcatgcaattccacgtcacagtatcagcacgagacatcatccgaaacaacttagacgcatcatcaaaacgaccacattttgaatacatagataaaagtgagtttttgatagagccttcaaaatcaaccccagaaacaaccactagaccatgaagctgaactccgagatcaatcaacaacttagatgcacacaccgataaaacgcaatcaaaggtgacagcattaggactaatctgatccatcctcattacactaaacccttttataacactatccaaagctccacactttgcatacccattaagcattacattccatataacacaatctttctgaagaactctatcaaacaatttactcggcacatcgatctttccatactcaagataagctttgatcaaagaactcgccacaaactcattacaatccatcccaagagaagaaaccgtatcagaaagaaagtcaatccctttaaaattcttcaaagcaacacaagctttaacgagacaaggaaacgtagatacatcaggactaactccaaaacagagcatcttgaagtaaaatgccaaagcttgattcaacaaaccatttcgaacaaaactgctgataatcgaattccatggcctgatgctactacgccttaaatctagtctgtaaaacattttaccacaatctgaaaagctaccacacattgcatacatccccaagatcctctcatcggtatagctatcaccggaaatgctgtttacgattagaaaggcgtgaacttgcttaccttgtcgaagaagatttgggttagagcaagcttgtagaagtaaactaagtcgacgagggatagtttcttcgagaaatcgagacgaatttctcaatggaagggattttttgtacggagcgattgctggcgcgaagcgcttagcgactgaggagatactcatagtctttttggtgaaatagagaaatgagaagcaaacattcaaagattagttgatctcttcaccggggactcactaagtcagcgagttgccgacgacggcgacggagaagtaaccgggaaaatggcgcggggaattagggcagacgaagactacaaacacacgtgcaaaacataaacatgggcctctttgagtatttaggcccaatttaagtaaaatcgctgccacatcaaaccaagcttggtttaagtattggttgttttcggttagtctattttctttttgattcggttttgaaccttgtttcaccatggtggagatctccaatataattttttacttaattttcataattcgtattttatgagaatggaattcaatatagtgtagaagtattaaaataaaccaatgagcttncacgaatagatccatttagtttgtctaaagaaacaatgtagcttaaacc

SEQ ID NO: 37060 - DNA, 1775 bp, Arabidopsis thaliana landsberg
atgtcatgagagactgaaacttgaatgctgttggaatgagctgaaagcaccattatcgccattcttatctgcttcctcaattccgttgccttctttttcttttttctcagcctgatcacctcctgaatccttctcaagaggaaaatcagtttggtctgttccttcaacagcgttgttgcaaacgtttgtgtcacatgagaccgtctgagctacttctgtagccgcaacttggacatcagcactctttccacaatgattatcatccttatctttagtcttttcagtctcttccccagcagcatctttgacatcaaccttcttactgtcaacttcatcgccctcctcaatatcacttgctttttgattgtcctcaactactgcttcagctggagccaattttgactcagccagaggtgcatttgttcccacaggggttgaagcaggtgcagtcgtagggaccaactgaattccagcaaatggattggatgctgcaactggagcagcagatggctctttgcgcttaactctgacaattcttctactagccaaaacctcatcactggccttcttgaaagttccactctcaagttcagctgaatcatcatcatcatcaagacctggattatcacgagacagctgcttcaaggcacctctcttttttgaaggttgctgaacgttttccgagtcacccatttgaattgttatgagagaatgtcaacacacttgtcaaatacctaataaaaaaacacagacaaacaaagaaagtccaatgaaacaatacccttcaaagataataacagataaaaatccaatttttgaaaacagagataaaacattacaatgcaaaacaccgttccaaaggtaaaacacacacaccggatcagtttgcagccacagatgatgatgagtaattgtcaatctaagaagacaaaagctttaacatgacaatgcaatggaaagtgaaaactacagaggctgctggttaccttatgcaaatatacagaaagccttaaaatgtattcaaagaagacagctaattatatgttaacactccaaggtaaggaacataagaagtagggctaaacttagatataagaaatgcaaatacagagacttataaatctaaaaccaatgaaaaattcaacatcacagactttgttattatcctcaaatctataaacctagatgaaaagagattttaaatcggaggaaacaaaaacccaaattcgattttaggaacctatcaaatttaagagaaactcctgttagctgcaacaatcgagtaaaccccaaagcatcttcagaaattattcgatgagtgaagaaaaaatctgaaattcgatctcaacacgagttaaataccaaaaaccctaatcatcaaagcaactatcaagaaccaaaataaaagaaatgaccggaaactatttccagaacaaacaaaagcatgacaaaaccctagaatcaaagtagctaaccctgagacaaaccatttccgataaacccgataatgaagaaacctaagattcgaagaaagtgaccggtgacgagaaaatggcaaggacttaccgtagcaggagccggagccgcagcagtagcagagagggaaaaaactaacgccggagccaaagtggtcagagacgaagagagaaagcaaaagaggtttatagaggaaaaaccatccaactctgtatctctctctcaaacaaagcttttttatttttatcgacatttgtgtgtgacttcaattattttattttattatgcacaaaaggtca

SEQ ID NO: 37061 - DNA, 1015 bp, Arabidopsis thaliana landsberg
cggcttttgctgtgtttttttttctgtaactttatttaagcgtttggggatgggtattgatttaatattattagaaacctaaaattaaattaaaaaatggactatatacttaaataaaaaaagaaaattcctttttatttttactgtaaatcctgaacaaaaaaaaaagaaaagtaaatctgcaataaatggctcagttaacaattttgactcagttagagatcctctctctcccgtatctattacagaacctgttaaactgagagactgtttaaagaagatttacataaatctaaactccacgtggcacgtatctatccgaatcagtattaatcccatcgaagaagaaaacaattcttcatacaaaaaaaactctcttctcaagtctctccttcttctccgtccttcccaattcttccgttcaaacaaatttctccaaacccaaaccctaatttcctccgtctgtgaaatcaagggttttctctgatctgggttttgatcagaaatcagatctaggtttaattttcgaaatcaaattatgaggaagagagaaagagagaacccttgttcgatttgtgggcattaccataagtacgaggaaggagaagtatgtggagtctgtggtcactgtatgcctgtttcttccgatacggtggcgccgcaacaagtccacgtcagtgcttttccgtcggagattctccctgagtttctttacctcggtagttacgacaacgcttctcgctctgagcttcttaagactcaaggaatctctcgtgttcttaatgtgagtttctttgctttgattttgaattcatgaattgcttttgttttaaacattgatgatgacccttaagaaaaagataagatctttgaatctttgaatcggtttgtttagttagggttttgccttgtagatgaatctttcttatacttatacgttttgttcccttatggtttctgttaaagttcctgttatgagaaatagaaaggaatgtgttgtttaccatttgttcgt

SEQ ID NO: 37062 - DNA, 788 bp, Arabidopsis thaliana landsberg
cggctacgctttctaaacgctcctaccgctcatatagtatcacacccctgaaattcgaagattcattttaaggttacttgtatcctcatttataatggaatacattataccaaaacgaaggattagtttggttgtatatataaatatacctccagaggttgtgttcaatgttcacgacgtgccctgcccacctttgcaacaccctgagtttagagtaacaagagttatttgaattgattaccaacatcaccattgatatagttaaagattatatgacacacctcgcatagtcagatccatttaaatgtgttgctgccaatgttgcagaatccgtccagcaaccagcatcttgtaactgcactgacccacacattaagaaatcttgggatctgaaaccccattaagattttctccaaaaaaatttaagcaaaacctaacctgcgagcaagcttcttggtatcttcctaccgaacatagaagatgagttccagaaagtgacctgtctgaccttaccatgttggctgcaactaccttcatatggaaacaatgtcaaggaaaaaagtcaggttttgtgattccccatgcagagatgaaatatggttaccttattttaccttcaccgctagctcaacgagggattttgacaccgtggaagataaagcaacagcacgtaaggcatttggatagaaataagagctatctggagaagtggagagtaacaaactcacagcaccttccaagttcccaactgatacaagtctgctcatcaaaagcaaacagtatgttag

SEQ ID NO: 37063 - DNA, 1984 bp, Arabidopsis thaliana landsberg
attctgttggtgaatgaatttgttgcacttgtatttagtaacaacccacacagtaacttaaagttgtattgaaatcaaattaacgaagaaaacaaatgctgaaaataagagaaggtgaattcaagaaggtgtgacgccctgtttggccttgaggacaagctcctccgtggtagtccctataatctcgttggctcgcttcagccccatgcagtagtaccttccaatagtgtcccgagcaactatccccaacttctctagcttctggactgcatcttctacatcaaagttacacctcgcaccaaactcttcctttatcagttcctcgcacctcaaatccagatcctatttaccacacattcaaaccaactcaagttagcactcattgatgatgatacaccatataaagagtaaatttaggtgtatgtacctccaaggtagctttcccctgctccattagtatgtagaagcaaatcattacctcttttacctgtgcattacaatccaagtaagctttttgtttctattgtattacaatgtattcatgcgggaacttacttcttgctgaatcacatcatcacacaaatgtagtagcgttcccctcccgctgtctagttgtttatcatacattgactgagttatcaagttctgatacgtagccatgttctgctggaacctgaaggaatacaattttcgaataagccgctgttcgcttaacaaagaagaatgaaaacaaggaaaggcaaaaagaaaagcacttaacgtgaagtatgttttcgcacaataaccatgcactgtttagagaatggcaataattacccatggatctgatttaggcatctcaaccgaagtaagcaccgctacctgtacaaaaagtcatatgataaccaagaaagacatgtaaacatgaactgcaacaaaagaaaagaatctgccaagaagaccaaccagaccaactactgcagatattagaaatttgacccaatccattggagtcagtccagggtttcttttctcaggctgcacaagacattaatgttattgcagctagtttgcaattttcgctacaaaatccagcgatgcaaaaggaaagaagacaagaacagaaacttacaagcacaatctccatgtcagccataggaatgtttttgaaatgcttaacgtagattcctcgttctagatttgttttagagctagctcgtctgcaacatcataaaccacaagcttgaaccacaagttcacaaagttacaaacaaatagctgaaacaagacatacatataccttacctataaacaacaatcattctatcgaatgtaggctcctgtattgtgagcttgctcaaaaaactcttaaagctgaatccatcaacacaaatcccattaccatcatatatatgtacagaatggcaaaaaattggaatgaaagcaaatcataacatgcgagggatactgatgataacctcagctttgaattctcaaggcgaatacgctccacatacaattcatcattatctgtgtcagggtttggctcatcatcttttttgggatctttcttgttaagactgcttgaccttttggcgcgtaatttctctaacctgtgatctaaatgtgttaagacccaacatgtaatcaaatgcctaactttttttacttgtattgaactttaagaaagactagactgggaaacgtgttctaacctggtgattctcatgagaaaggaccaaaaacgtgaaatgatcacatccaatttctccatgaaaaaataatctgtggttttatccaatccaataccacgtctgaagatgacatactatataagaaaaagggtaaatactatatcaacacatgtcgctacatgaccatcaagaaagtctttaggaaactataatcttgaaatgctcatctacagacaaactaaaaactgtaccttatcagaaaaatctggaatattttcatgtggatgctcctcaaaatacctcttgagcag

SEQ ID NO: 37064 - DNA, 2913 bp, Arabidopsis thaliana landsberg
gagcatcttctggctgctgcctcagtacatcctcttgggaatctcagatatattcacagtcgttgggatgcaagagtttttctacagtgaggttcctgtaagaatgagaacaatgggatttgctctctacacaagtgtttttggtgttggaagctttgtgagcgccgcactgatctcaattgtcgaggcttactcgagctcaacaggtgaccgacaaaactggtttgcagatgatatgtcggaagctcggcttgacaaatactactggcttcttgctcttacaagtacaataagctttgtagtctacatatttctatgcaagtttttcaagagtagcagtgatcaaggcgatgaaaaagaagaagcccctaaatgaaagaagaaaaactttgattcctttgacacagtcgacttagataaccgtttgccataagattccacgaatgatctaactgtagtagtagctttagaactaactagcaaaccaaaagagatagacaactgtaagatttttattcataagaaacagtatcttataatatcaaatgcaaaagattcaacattattattatctcgtgtgtttgattacatatcatcattaatcctcccattgaccaacaacatttctaaaatggacagattcaaaacagacaaaaaaaaaaaagtctgaaactttgatttatacctttaatcatgtgagctgtttccattgagaccaacttctttagctacgttgctctcttctcgaacctagtcttcttcatcagagtcaagtgtgaaagtacttaaattctccaactcagctccgagaggtcgatatttagaatgatcttgacggagataaccattcttgttagcaatgacagagaacaaaccagtagccacaactaccattagagccaaatgacagttaaattgaagagtagctatagcttttgctcggtgataatcaccgtgtcctttgcacttgatcgtgaaattgcctctgctcttctcgtgaaacgtacagttattagtgatcaaaccggtaaaaaacgatacacccatttgcagaaaccatgttccttgcagaatcagaccgatcccacgacctaatttcgcaaaccgatgcgtgctagagtcggatttgagctcaaaaaccgtggagaagacgcagatggcaatgggcacgagcatgagatcgtaataacgattctcgattccagaaacatctttcttttgcaggtagaacattaagaactcctcaatgaagccaaagagaagcaataaagttgtaatcgaagacggaagtgcaacaaagacagcgtttttggagttgaccagatatgttagaatggcgtaatataggaatagtactgccactgccacgatctgtaactggatcattgacccgacccgatcgcgagatccgattgagctgaagaaggagaaaaacgagttcgcaataaacagagacgaaagcaaagctacggggatggaagatgatccaacagattttggcggcgaagctctgatctgagccataggggaagatgaatcagcagtaccagaagatgaattcggatccaggttcgatgagtccagtgactcccacgcgccgattactgcaaatccaccgccggcgacggcgtaacttaatatacccatgactccaatcttcacaatctctgcgaatcaggttatacttctttcgaggaaatttggatttttccgccattaaagcttaacagaatcgagcttctgatctggtaaaccggaaagatccgacccgacccgaataacccaaaatgggataggctagtagcccaataactcaatatgggcctactggggccttcaaatagttcatgtttaaatattctaaccatcacgtgacaatcatgtgacctctatggatatgctgctgctgcatatagctccgcttgcgtaatccagtttgcttggagaaatgttgcttccactgtttcaccagcaaccattgatacttgccaaaacctttcccgaccgaattttcccgccattccttgttcccaacaccctagtttcgcgacgcaatgtcagtcgagcgaactccggcatcttctgtagttctgcttccggtcgaaagactcttccccaatcggctatccagagaatcgctgagaagcttcgtagccttggattcgtggaagagaagcatgattcaccgactaggagaatcacgggagaagaatctggtaagaattccccaggagagatattcgttccgttgcctaagcagcttccgattcaccgggtcgggcacacgattgacacaagctggagcacgcctagttacccggttccgaagcccgggtcgggtactgccatttcaaggtaccatgagttgaagagagtgtggaagaaggaaacggagatggagaggaagaaggaggagaaggttccgtcgttggcggaattgacattgccgccggcggagctgaggcggttgaggacggtggggattaggttgacgaagaagctgaagattggcaaggctgggattacggaagggattgtgaatgggattcacgagagatggaggacgacggaggttgtgaagattttctgcgaagatatttccagaatgaacatgaaacggacccatgacgtcttggaggtttgtttgcctctctacttttgatttcatgatagggatttgatagtaacatttgactctcaatgaaagatctatgaacatgtcaacaaatggcacagacggaaattcatacttgtcctggttgattttacagacaaaaactggaggcttagtcatttggaggtctggaagcaaaatattgttgtatagaggggtaaattataggaacccttattttgtatctgatcgggatttggcacatgaagctgcttgaggagcatcatcaaaggatcaag

SEQ ID NO: 37065 - DNA, 2764 bp, Arabidopsis thaliana landsberg
taattttcgggcatgctacatatgtgtctatatgttcctatatttagtctctggtgcttgtcccaaataaaagatagttttcaagaatgaaacctgcaacgtgtttctcaaaagttaataatttttttaggactgtggcatacacaaaccatacagtcttgcctgaggcactggagaagtggagtttagaactcatggagaaattgcttcctcgtcatgtggagattatcgaaaagattgatgaggaggtcatccctgaacaacatattaaatgtttcttctatttttttcatatcgggtctaatttgtactttcatgtattgcagctagttcgcacaattgtttcagagtatggcaccgcggatcctgacttacttgaagaaaaactgaaggcaatgaggatcttggaaaatgtcgagttgccttctgcctttgcagatgtgatcgtgaagccggtgaacaaaccagttactgcaaaagatgctcaaaatggcgtgaaagcggaacaagaagaggaaaaaactgctggagaggaagaggaagacgaagttatcccagaaccaacagtagaaccccccaagatggtccgtatggccaaccttgctgttgtgggtggtcatgctgtaaatggcgttgcagagatacacagtgaaatagtgaagcaggacgtgtttaatgatttcgtacaggtaaacattctaactagtgaagcatgatgctataaaatgctctacagggaagaacacaactctcatcgttcaatattctatattttttgcagttgtggccagaaaaatttcagaacaaaacaaatggagtaacaccaaggcgatggattcgtttttgcaacccatatttaagtgatattataactaactggataggcacagaagactgggtcttaaataccgaaaagcttgcggaactaagaaaggtatgtactttatcagattcaatgttgtttcacatgctgttatctttattgggcgacattggttatcattgtttggtctttctccagtttgcagataatgaagatctccaatctgagtggagggcagcaaagaagaagaacaagttgaaggttgtatcacttatcaaggaaagaactggatatactgtcagccccgatgcaatgttcgacattcaggtcagttccaatggatcttggttacttttagattgatgagttgtttgcttgggtttttcggtttgagaagtcctttacgcaagtctgagtagcttatgtagattcttttctttttgcattgaaaactttttgcagatcaagcgtatacatgagtacaagcgacaactgctaaatatcttgggaattgtttaccgctacaaaaagatgaaggaaatgagtgctagtgagagagagaaagcatttgttccaagagtttgcatatttgggggaaaagcatttgccacatatgtgcaagctaagagaattgttaaatttatcacagatgttgcgtctacaattaaccatgatccagaaataggtgacctccttaaggtatatatctacttacgttattgtattagtcgtattctcaagcgtataacggaaaatctgcaataattatctggtttttgcatctgtggagattggcacttactaattagaagtgttaactaaacatgtaggttatctttgttcctgattacaatgtcagtgttgttgaattgctcattccagcaagtgagctttctcagcacatcaggtaaaaacttctttggcttagtcacattatagtttttggtcacaactccatgaagttaaaatattgaaattgagataaccggtaaaccatgaactggactagtttctctttttttcataagaactttagaaacaaatcctgacacaaggaacaatatgtttcggttacatttatgaaaggttataatcaatggcactcatactttttgctggagactaagagtttctctctgcagtactgctgggatggaagctagtgggacaagcaacatgaaattttcgatgaacggttgcgttttgattggaaccttggatggggcgaatgtcgagattagagaagaagttggagaagaaaatttcttcctctttggtgccaaagctgatcagattgtgaacctcaggaaggagagagcagagggaaaggtatatactatttgaagagttaaccttaccatgcttctgttttagcatcaacaagaatttgatttttgacctggctcttggcattccagtttgttcccgatcctacttttgaagaagtcaagaagttcgttggaagcggcgtctttggctcaaatagctatgatgaactaatcggctctttggaaggaaacgaaggctttggacgagcggattacttcctagttggcaaagactttcctagttacatcgaatgccaagaaaaagtcgacgaggcataccgagaccagaaagtaagtactaatgcattttctttgaacatcaagctaataatgttgactaaaatatgaaacttactcaaatatcaaaccttgaaattgctgttaaatgattacagagatggacgagaatgtcaataatgaacacagcaggttcattcaagtttagcagtgaccggacgatccacgaatacgccaaagacatatggaatattaagcaagtggaacttccatgagccttgagacaagtctaccttaagaactcttttgtacgtcccatgtttctaatgtaatcaaggtaataaggaaatcatgtaatgatgcaatacaatgaacg

SEQ ID NO: 37066 - DNA, 1374 bp, Arabidopsis thaliana landsberg
caatcttctccacaacatcccctttgaacttcaagccatacatgtgacccatcttggtccgctttgtctccagatatctcttattctccttcgtgataagactcaatagagggactctcccaacaatggctaatccatatcccttcaaaccaacatactttgcgggattatttgtcatcagcttcattgtcctaacacctaaatcccttattatctgcagattcaagaagatttagtaaaatacccggaaaaaaaattgttgtcttttttggatgataatgtgatcttggttaatacctgtgcaccaattccatactctctagaatcaacaggaagtcctaattcctcattagcttcaaccgtgtctcgaccagcatcttgcagattgtaagctcgaagcttgtgtcctaaaccgatccctcttccttcatgtccacgtaggtaaaccagcacaccgcgaccagtagcctcgatctgctgcatcgagagtgctagctggttcccgcaatcacaccttgcagacccaaatatgtcccctgttagacattcagaatgaaccctcacgagaatgtcttgaccgtcaccaatctcaccctgccacaatttcagacaaatgggtttagcttaagtccttggatgttctgaagacaaatcaacaagatatatttctttagcattgctctaaccttaaccattgctatgtgctctattccgtctaatatggacctatagcagtaagcagtgaaaggtccccacattgttgggatccgagccgcagaagcacgttccactaatttatctctctttcttctatacctgtcatttttcaaaccagaaaatttagctttttaacttcaagattagatacgaaaagagaaacaaaaacttcaaattttaagcgcatacctgatcaaatctgcgatggaaacaactttcaggttgttctcggcggcaaattcacgaagttttggtaatctagccatggaaccatcatcatcaacaatttcacaaagtactccaacaggatccagtccagctaaaacagtgagatcaacagatgcttcagtgtgtccagcccttttcagaaccccaccttcccgatacttcagtgggaagatatgacctggacgattgaaatcctcaggctttgaatctcttgatgcaagagacaatatggttgttgccctgtcacgagctgatactcccgttgttgtaccatgttttgcatcctacgaaggcgaaagaatagaacaaacaaaatttaataaaaaccacaaggcccaagatcaaaatctttattagagaaaaagacataccacagtcactgtaaatgcagtagagagcttttcttcgttttccttctgattcaccatt

SEQ ID NO: 37067 - DNA, 3327 bp, Arabidopsis thaliana landsberg
cttcgtcaaagctgctggtactaaaatggaaggtggtgtcagacgaagtacaaggattaagtcgagaccgctcgaatactggagaggtgaaagattcttgtacggacgcatccatgagagtaagtcacatattcgttttacgacatcgatttcaatacggatgtttttcaattcataatttatctactatttccataggtttgactactgttatcggcataaagtatgcatcccctggagaaggtaaaagagattcgcgcgcatctaaggtgaaatcattcgtctccgatgagtacaaaaagctggttgattttgccgccttgcattgatatgaagaatgataagcctaggaaggaaatgatgaaccatcctattgtgatcattattgttagtatcttgtgtcaatgaccttcacttaggtccaaacttgtcactgtctttctttaaaactgcaacacttttaagactttgcaaatgtaacggaggttttcaactttcagtttagtctcttccatgagactttgtcaacttgcatttgtcactttagtctttgcctctttgatatttctttagggcacttgttgttatcacctttctcgcttaaatgctgcctttgactattttattataaaactataatctcttaataaaagtcaaatataatttatttagggttgctactttgatttaaactgaattaaccagatcaaactcaaatcgtgggtcattgtcgaattaaagtatctctttagaagaaaaacggtatacaattttcttgattctttttttcgccattttcttgaaaattaactctatgatacaatgattatatcaatagttattaaatacttttttcttcataagtttccaaaacagaaacgaaatgtccactcttaacttagctgtttagactttttcacttgaactcaatattcgtaacccctccatgatccacttttcttggatcgtgtcgtggaaatgaaagttgaatagcaatatcgctattgatacatatggtcctaatcttttaaaagaagtagcaacttgattttggtacaaacagtttactttttaggtaaaatgccaatattggcaagaacccacaaatttggaagagcacaattaaacctgacgttattacttcttttgatacgcttcaattttctttgcgaataaaagtatatgaatttcgacttcgagtaaaatccgcctctgtctttagtgacctttctcgaattttgccacccgctttttacgctttacttcaggacaagcttacagaaacaaggagatacatacaagtaaaaacaaacaaagactcgagactcaagagtcaagactcaagactgaagccttttattattatctagttttgaaaatcaaattactaatttatctccgctatagtttagtttagtttttggtaaacatgtaaagaaagaaccgctatagttttactggtaaacaaaagacaaataatacacctcagcaaattggataacgatcatacaagttgatgaaaaaccacgggctcgttacaacatttgattagacgtcgaccgtacaaaacaagaatagagtccttcttttgtcacgtagtaaatatataaatgttactatgtgttaatctgaccaaagatatatttgacaagttcaaaataaaaccgattgtatggatttggcaaatggcctattctagatcttaatacgtaattcagtatcattcgtagtacccagtcgagttaaaatactactcgcaatcgttcttacatcatcaataaaaatattgatctgattcatttggtgtttcataataactcgacttttttttgttgtacttgtttattttcttatctatgtacgtatgattgagtttttctatgtatgtttattgcgttgacctaaagaatcagccgactatgcttgcctttgagatattgataccttatcgtttgttattttccaattattgtcaccagacgccgtgtcgtttttccaacgattaccagctagaatgccgtgccatttttgctttcctttgtttgatctgactactccaagagttatatgcctacatgcttacaaatcaaaatatatgaaaagtaatgggaattgtgaaactgttgcgcgacttgtgacttgtgagtctcaatggtttggtttagtggtgaaaaacgttttttaggctataccaaattttcaagattggtttagaaatgggaatttggagagtggacaatccaatttgttttcctatattatttcatttgaatggaaataaagatatcagttgcgtaaatgacacgatctggatttggggatgttgtggaccctagaacgagtccaagttgcatgggacatgcagtttcccaaactttgtaatagtatcatttcatgttttttgtttgtcattttcttatcaaaaaataaaaagtttatggttagaaccatgttttgactcctaccatagagagtaaaggatggcttaataaacccgcgcatggaacgttacgcatgctaaaaaaatgtttggcaaaagagatgatcggtccgaaaaatgagattgtcgacattcggataagggcgtaatggtaaatgttttgtggattactcatcaggtacagatcagtattcacttgtctttagagctaattatgttgattgtaatgtagacataccgtttcactcgttggtctcatctagtattgattcttttaacatgtcatttaactgccataggttgattggcaaccagaagaattatcttcgtatatagtatatttaagtcaactttacagaaactattataatttcggaggggccaaacttaggattggatacgtcattcttgttaatataatacatatacgatcattaatattttgctatgataatattgtatttgtatgaaactaactagctttaataaaaatcgttgttcttctggatggtttagctaatctctctaatacaattattcaatggccgacaaacaatagagaaaggatacacaaaaaaaaaattaaaataagaggatggaaggaaccacaaatattgaacttttcaatttttaggctgtttcttttctaattcctttttcacgttttcttttgcgcttaaacaatattgaattgttaattatgagtattgtatagtacactggtcactttttggataagccgttcacatggaatcaaatgaaactaaaatatcaaattgattagaaagatgtttaaaatatgacagtggccttagaacaatctcatgctgatagaataaacacactgaatattataaaacggaaataaatttatccattttgcccct

SEQ ID NO: 37068 - DNA, 2663 bp, Arabidopsis thaliana landsberg
tctcagaatttaaaagtgaaaagatatccaagaatcattttagatctttgtatacgtacttaaaagttgatcgaattcgataaaattaaggaatcaacgaatccaaaaatttgctttagacttgatttaaatgcaaaagcaatacatgcgacgcactccagacacaggccaatggattttgtctcagaatatatgacagttgttgtattgtgaaattattctttcaactattgatcaattatttcttataaaaagttccccactatcatattaatttgtttactttaatacatttttatatatatataatgaagaattttgatacgtacgtgcatagaaacggtccatatgttcaagttgaaacttgaaagcatccaagtcaactttacaatatcttcgagaaacgtgttgcatgtattttttgtgtagataactagatatattttctatatacgtttcacataatatatctctgcatgaatttttgtaatattggatgcgacaactgttttctcttgaccggcctagttgatccagttaatcattcttctacgacgtaagtggacatgtaactttatatgtacatacttgattattgtaaagataggttctacatatctggtcaaataaattttaggttaataatgtattttatgtacattgtaaaacgaacgttcttgccataatttgaaaaatcgttctattcaaatctaaagatttgtggtcaggcaaaggtcgttctctattaacaataatctgactgtttactgtatgtgcaagcattggtctgatcatgagctttctttattagctttcggcctttcgccatctcatttcatacgcgaatatggattctcattgacttttcaaattataaagactacttaaactcaatcaactccaggatcttgcatactttctcatgaaatttcaattttagttgggcaaactgaatttttaaacatggtttgtgagttgacttagaaacccatttaggatgtagaattctttctataattcaaacgtttaaacattaattagattttaatttacccaaaaaagcattagtattttgaaatttggtcaaaataacaaagcttacttccgcatttactattttatcatttgtatttatagattgaaaatacttcaaaatttcttagaatctaatataaatcaaatcctactttaaattttatatgaaattagcaccggatttaacctagtatttaaaacccaaaaaaaattaaaaaaaattggaaccatcttaaaatgtggtttgataaaaaacaaaataatgaaagatgagacaatattatctcattaacgtgaaacaatattattttgttatttactagtgaagaaaattaacggtgagtaataaatcagaagtctaaaatggatttctaggttacgacaaaagaaaataaaaaaaaatggatttctaggttagctttcttgggtagagaaataagtttacttttcactttcagttttcattatccattgaatgggtcatgaagaggcctgatatggcgaataatgggcttaaataggcccaataaaagtacttagtccaccggtaatgaatttcccgccatagaagaaagtcatcaacttccgaagatcttccgttttaagtgatttacctaaatatcccccaagaaaggttgaccaaaagttaagacagaggataacgattaagggtaacaaagtaaatggcaattataagggcaaaatagtaattaaaaggaataaaagatcccccgaaacacaagccctacgaatctagtcgaaagagcgagtgtgttcacgcgacctcaacgagactcaacgcttttacagttaaatccggtaggtgagagagagagagagaagggaagcttatggaggcagagatcgtgagacgatcggaggtaacgggattaagaagggaggtggaagaatcgtcaattggtagaggagattgcgatggtgatggcggcgatgtgggagaagatgcggcggggttcgttgggacgagcgggagaggaagaagagatcgagttaaagggccgtggtcgaaggaggaggatgatgtgttgagtgagctcgttaagaggttgggagcgaggaattggagttttatcgctcggagtattcctggtcgttcaggcaagtcttgtcgtcttcgttggtgtaatcagctcaatccaaatcttatacgcaattcatttactggtattttctctcttttgaaagtattcaatttcaattggtgattccatttttcctgtgatcttctctttttttttgagttttgattcatctgtgttgaattgaggaatctagggttcttatgctgtctttcggagtgtggctgttgagcaaccttgtgtttttttgtgaagtggatgtgaaatgtgaacttggctgagagattgttagtccatttctagttttatatttttagtttgtatcgaaatgttttaaagtttgagacttgcaagtttttttggattttgatctactccttgaatcccaaaagaacaacaaagttaggttggataccatttgactacctctagttgtattgttatagctgatcgaaacacagttttatttaaggggacattagtagattattgcgttcttgttctgtaacatatcatcagtaacactaa

SEQ ID NO: 37069 - DNA, 926 bp, Arabidopsis thaliana landsberg
cgtttcatgagtctttcctcaaggcttccgttgtgcatatactcgtaaactaagcttccgcgttcaggacacgcgcctaggaggagaagcaagtgtggatgacgaatcttgctaagaatctcaagctgaacaagtatcaaagagaacgccatcgttttaggagaacagtaattttgcttggaggtttaagaagtgaagaatgtttatttacctcttggtgaaactgtttggttaaactacttttgtctgaatgaagaaccttgacagctactgtcgtgtgatgcaagttacacctatatacgcttccgtaaccaccgactccgatcttaagttcatccaagaaagatgacgtcgcctcgacgatctcttcccactcaaatttcatgtattgttggcgttgaagcggtccaccttcaagtgcatcctctaacctctgcttctcttttctaacctcttccgctcttgcttccgcctcaagtctctcttcggtttctctctcaatgcattctctcacgagctcagcttcgttttccgcatcctcttgtctctccctctccatttccaccacttcatccgcttcttcttctcttatcgttaagttcttgagccttgtagcttcctctgatcgccgctggttcagatcttgcatctaataaaaagaaaacagaggatacaaatcattcccaatatctaaataaagcaactttctaaattattgtaacaaaaataaacctttttagaagcatcgatgacttcgctttgagcaactgcatacattcctttaatgtgacggagttcaatcttcagcttctctaactcaaagtctttatgtatctgcttgttatgaatcccacattagtaaaacagaatgtgtaacttcactcattatcaactggttttgagaaggaaaataaacctggctacta

SEQ ID NO: 37070 - DNA, 1892 bp, Arabidopsis thaliana landsberg
ctgtcttgaatctaataagggtcggaagaaattgtccgtaatagaattgtctacgtaacagttctcataatttataataaataataaatttaagacggcaaaaaaaaaaaggtgtgattaggtatcatatgctctaaataccttaaaggtccacaaaatagtttgtgagaagggtcactacatgcatcgtcctgttctgaccaataatccacatcgttacatccatagtagaagtcaacaaactcctcgacgaatggccgaacaaacttgtattcaacatctagaatcaatcgtctggtttaaaaaaaaaaaagagttgaggcagtttttataaaagagtcaaatgtctatttataaaaaatttaaattccgtttttcacatataaggaccgtcaacaaacttccatatgcctgcaggcattcttagaaaaattgttagccatgtagctgaaggtgggattggtgagttaaggaattggattatctccgggagggagggaatggtagctgtattttcactagacagcctgaaattgataaggttggacaaatctagagattttgtatactggtccagccttgatagtctctacaatcctttttttggaaatgtctaaaggcaaaaaatctttatgtattgtatggagaaattcttataacttaaaccttaaaccctaaaccctaaaccttaaaccctaaaccctaaacccctaaaccctaaaccataaagactaaacccttaacaatatacatataccatatcacgtaccctaaaccctaaatcctaagctcttaactttaaaccttcttgttgttgtccataaatattaaacataagtctcctaaatataaacaaatttaaatagaaaattcatatgatccaatccatatggataacaatggaatatataatctcaaacgagaaacatgtaaccataaaccctaaatcattgtagacaaccatgattattcaacccaaaacccaaaatcatctaaattaaacgctaaatcctagacaataaagcctaaatcctaaaatgtaaaccctagatactaaaccctaaacccttgacataaaccctagcccttgactttaaagcctaaaccctaaatcctaagttttatatgtacataatctataaccatcaattctggtccatgataatctaaagcattcttcttaatctgaaaacgtaaaatactattgagatcgatgtgttcataaccaatcatacaatatacactcgtatttattatttgttaatatataatcgtggataaataaatattaacattttcgtaaataaacttttgtggatatgaccaacagctctttttcaccatattttatcaacatctttttcataacgtaacacttgttttatggatagtattatcaaaacgtaatcattttgaattatcgaccatcaacacacatccaccgaactctgaccacgtggtctgcatacaaataagaatgacaaaatagtaatttgtatacatatcatcctttccttgaaaccctagccgtctatcactctgatatcatcttcttcctccaccattaacctattcaaccaccatgtcttctttgattcatcaaaaccataaccattattaccaccatcatcatcatccctcttccacctctcacatttcacctctccatcaactatcacaaaaacaaattaaagtctttaccttattcatcaaaattaggtcaaattaaacaaagaaaagtaaaaaaagattgaaaatatttgagtttatcaccggatcttaacaattttgactaatcaagttgaatcaaacaaattggtttataaaatctataaaatttgatttctatttgattcaaacaagttgaaatttgctataaaatttgagttagt

SEQ ID NO: 37071 - DNA, 1195 bp, Arabidopsis thaliana landsberg
aatctgtgaggaaaaccctataaacttactgtccttctcgttctccatcaaccaaaaagtttatgagatttttaaaagaggcgtagcactctctaaccgcacaagtcatgtaactgtcgacactcaatctcttggtcagttcacgatcttttccattgctatcttttgccatatccaaagctattgggatctaccacatttagcaataaataattaaaataacaccaaaaagccaacctatcatagttaagacaaagataaaaatactcaccttactagccagcagaaaaggtggccagcggataagatccagatcacggtcagcccaatatggcacaagcaggagttccatttccctgcatagtaatgaatgttttcactgaactcttctccgattaaaaggatttcaaaatcatctaaattaaaataaagatgaatattcaaaggcacactcaacctatcacttatcaagtcctcttctcggaaactactgattattttgttccacatctgagcaaaccgcgctgcttccttgtctttactagatgggagctggatttacaaaaaagagcagaacagaaccttaaatagagttctaataaagaaaaaggatagtggaaatagctctttagcttaaacaggagtaaccagacctgatcaaacttgcgagagaaggtcgccctaaatctctttttctttgtatcatcgctgttatcttgtggtaccaagcaatcattaaaggcccctggtatggactgaaatctcgacctcaacattccaagtgttcggatctgaagtgaaacaaagttcttttaagaaactatccacttggaaactaaagaagtgagtgtatgccactccgtaatgtaaaagtaatcatatttgcttctgatggaaaaggaagacaacaataaacctctccaagacggcggaaagctccatttaaacctccgaccagagttgaaactatagcataccatatttgagtgtccatgaaataaacctgcatatagaaattagcataccacaggggaaaccataaaaacaaaggaagatatggaaatgaacagtatgtgcaaactcacgagaataactggtgaccagagcgcgatgacgactcctaaattattcttggctgcaaaaaccaaagaaacaatggcagagttatttaataaaacagcagaatgcaataagc

SEQ ID NO: 37072 - DNA, 1668 bp, Arabidopsis thaliana landsberg
  unsure (1)..(1668): unsure at all n locations
atcccatggtcagaagaggatcggtgcatccaagaagaataggatccatagttgaggtctagattcagaatctgttccataggttgtgtctgtcgttccttgatgcaatccagacgagtggttagctccatgatagcaccagatgatgcaggaggatgataatgtcttcagtagtccttttcttacaagaccgtttactctcactttatacgcatgtaaatcttgtgagatgggtttatccttggctatcannnnnnnnnnnnnnnnnnnnnnnnnnnnnnnnnnnggatgtagcattcaagcttggtgaggtaggtacttgtctgttgtttcctcagccattcctccagtctgctattaggctagttttatcctagagtattcgatagcagagaatggtactgacagataatagaatcgttttttataagataatagaggttcctcggttacataataagatatgtaccgccctctgatttctttcgtgattaacgaatgcgagaatggaatcaaagtcctgttgaaaagacttcctgcgaatttgaaaaaaaatagattgttatttctcttagcgagtttacattcgagtaatatctcgtttgaactattgaataagagctagaaccaggcatcgagtgtaaactcacagttgagtattgtgattatggagaaactggtgatggctttgagcatctgggagtgaacttaagtgatgctgtcgctgctgacttagctgatgatgtaattcggcgactttctgcttcaaccttgcgacatcagcttcagcaagagcaatctcctcaagctctgcccttgtctttgcattatattgtgatgttagaactaaggaaagcaagagatagaaccaaaaaaaaaaaactgctttctctagctaaagtgtatactgactttggaatccgcagcttgtgagctaaattgtccacaagaaatgcttagaccaacttcaagagcagatcgtaggtctctctcagcttgcagttgctcttgtaatctacccacctgacaatttcatggcaagcttggtcagcaaaatggaagtttatttcccctcaaaattataccccaaaaaaaatagaggatagaaacgtaaaatctcaagagaaggtttatacatcttgttcaagtgccaaccgtcgttcgtgcaaagcctgcttccttctctccaagctagcttgtagagccgcatttcctttagcctgtagtggtctaatcaatcaatacaacaacattatggtatcagcacataatacttctagtgcaagaacaagtacctccttagcgattcgttgtcgcagttcatctttcatgtgctcgagcctctgtataagaagcctacaagtagcaaacgcattgcatcaggatacatcaagctcattttagaacaaagaaaaaattattttctcaattcaaaagcgaaatagaatgttgcttcagtaaatacctttttgacctatttaacctatttaaccatacataatatctcatatgggtttcgccaatagaatatatataaaaaggtttcataggagtgttaaagaaccacaatgtatacattcaggatgagttacttactcgtcatttcctgaggaacaaatgatcctttagcaggtgttttcttgcctgcacacagtaacaaagaaaaga

SEQ ID NO: 37073 - DNA, 2054 bp, Arabidopsis thaliana landsberg
  unsure (1)..(2054): unsure at all n locations
ttaaacaagaacccattttatcaaactactactacgcttcgatcacatctcatcgatctttagagtctgctttagctcacatcctctccgtaaagctcagcaatttaaacctaccaagcaacacactcttcgaactgttcataagcgttttagaagaaagccctgagatcatcgaatccacgaagcaagatctgatagcagttaaagaaagagacccagcttgtataagctacgttcattgcttcttaggcttcaaaggcttcctcgcttgtcaagctcatcggatagctcataccctctggaaacagaacagaaaaatcgtagctttattgatccaaaacagagtatcggaatctttcgccgtcgatattcatcccggagcgaagatcggaaaagggattcttttagaccatgcgacgggggtggtgatcggagagacggcggtggttggagacaatgtttcgattctacacggcgtgacgttgggaggaacagggaaacagagtggtgatcggcatccgaagattggtgatggagtgttgattggagctgggagttgtatattggggaatataacaatcggtgagggagctaagattggatcagggtcggtggtggttaaggatgtgccgccgcgtacgacggcggttggaaatccggcgaggttgattggtgggaaagagaatccgagaaaacatgataagattccttgtctgactatggaccagacatcgtatttaaccgagtggtctgattatgtgatttganaaagtctttgtttttggttgttgttgttgtttatggcttttcattgttctctcggcttcttctgttattgaagctggtgaagtatatgatatgcgatgatgctgtttccataatcagatcatttgtctctccataagataacactgattaagatgggattggaaagtaaactcggaaactctgaactctgtttagtggagtttcctgtggttggtttctgattagcagagacttaagatatgtttagtatgtaagtgcttatttggttaaaccatgatttctgtgatcagattgttgggaagaaactgaagattcatcattattgtcttgagttttgttttgcttactacagctttctaggaaattataacaagactagtcaggatccaggattgcttgctacaatcaactagaactctacctattcttctgtaagtgtcatctgtttctgttaaaacttgttgtagaaaaagtggtggggttagataggagtggtattttccatgaaatcgtctcgatctttttggattgttgcggagaaactttttaaaatattatgttttctcaaagaaatttcatttgaatttctgggaattgaggtttgaagcattaaaaaagctaagggaagacgttgagacgtcaaggaattataaattattccccactcaagagtttgtcttcgaaataatatatttattgacgacttctctatatatactgtccatcgtgatagtcttgaacaatattctcgtatccattgcctaatgaaacagagttacgcgatggacaatcctatcgtttttttcctccttgagtccaattattttccaatgttctccattttctttaatcttcttttgttgctagttatgtttggttcctgtgtttacaagaaaaggttgggttgggaaaatagtgatgctttcacgaatgagaggtttaaggatatgtctttaacatacaataaactggtcgttatatgttgtgagactttgtctgccttgaattctgtgttgttgctgttaagttgcttcaacctgcataaaaatggttgggatcgcagcgaactgatgattctcttagatcttttatttacagccctttcttggggtgccatctctttctacatacgtagtcaatttacctattctcatgatcaaaagtttcctattttgcttagagtctggtgggttttgtattttatgttttcttgctaccgtcttttggtagacattgctctatacaagaagcaagaactggtgtcagttcaccttttattgtcttat

SEQ ID NO: 37074 - DNA, 2096 bp, Arabidopsis thaliana landsberg
  unsure (1)..(2096): unsure at all n locations
atagttacgagaaatagcttagcatgaataaatagtaatttataactaagcattattatttttttaatcggtataaacattctataaaatcaaacttttttatatgaagggagaatcattttataagttaaaacaagcttgtgctaacttataaaatgacaccataggatattattatgtaataatatcctatgatatcctattcaatattatatgttattaaaatataaaagtaatttaagtagaataacatgttacattaggtaaacaacgtttcaatattttcaaaaaaaaaatctgttatcagtccaaaaattaacaaaatagtttaaatttaaactctaagttccgatcataaaccttaaactagaaaagactattgtacttttcttttgcaactaacaattacattttttttttgtcatcacactatagaaaagcttttaaaaagatagttgtctcctttcgaaaaaacacgaaaccaatgtaaattagaagatagttcgcatattgatttggaaaactcagtcctaagattgatgaagcaaattagagtgagtgtttcatgcagacagtttttggaagcttttctttggattgaataaatccccacgcgatgatatgttatctctctgcatgaaagtaatgaataaaccttttcaacaatctattaacaatgcaaagacttctaagcaagaaaagtcgtataagttttttctttttggtaaagtttagtttaaaatcgtgtccgttgtttatttgccagatgacattttctattagatttaaaatatgtcagcaatctatttaactntaatgcgaacggataaaatgagattttagcggttaacttgatcaaaatctaataaaaagttacaattttaaatgaatgataaatgaaggttacatgcatggagaaattttttactttgtaaatgacttgctgcctaataaaaattagttatttttaatatttaaaagaaaacataatatgtaagttaataagtatgaattgtaaggaagcaaacattcttacgttttgaaaaaagaaaacaaaaagattcctacgtaagtatgtattctctttgcttctccacaaagatattctttgtataggacacaatttactttaaacacacaatacaatatgtatatatactaatcaatgatcgttatatatattctttgtataggacacaatttactttaaacacttttcatgcaatacaatatgtatatatactaatcaatgatcgttatatatgtccatcgtactcaacctcaaacatcttaaataatgactctaataaatcgctcaaaaccatttgtacttctcgtaggcttctcaattatctcaagtttgctattatgggtctcacaagcttccgttgtttcatcaggagattttaacaaagacttctttgtgacatggtctcctacccacgttaacacctccaatgatggtcgatcaagaaccctgaaactcgatcaagaatctggtattttcatatatacgtgacgtccaaatgtcctcgttttatttttctgcatcaagaacttatgttttgataatattaggagcttctttttcttccatccagacgttcttgttcggccaaatagatatgaagatcaaacttatccctagaagttctcaaggtaccgtggttgcttattatgtaagaaactgtctctatctcttcatcttaacgggttgatgtgaatgaatctcataatttccaagatttatcagatgtcctcagatcagccaaaccgggatgagattgactttgaattcctcggaaacgttaatgggcagccttacattctccagacaaatgtctatgccgatggaattgataaccgcgaagaaaggatccatctctggttcgacccaaccaaggactttcacacttactctatcttgtggaacattcaccaaattgtgtaagattcttcaaccaaaaatctcttccattacatactccaagatgtataagaatgatattttggtggtttcagatttatggtggatcagattccaataacattgtatagaaaccacgcggatttaggcgtagcccacacaccattgc

SEQ ID NO: 37075 - DNA, 1743 bp, Arabidopsis thaliana landsberg
cttgcaattagaagatcattttctttcaacttggcaaacttgcatgtaaatacctcgtttctgttcatttatatgaacagttttttaatcagggacttctggaatctatgggagctaatggatcgacgggacctgaagctgttgcatatgcagagaagaatgctgctctattaacggctagagctggtgcaagagatccatcggcaataccatctatatgtcgcatttctgctgcccttcaatatcctgcaggtaagatttttttcttcgtttttttttcaaaaatccaaggacgtatagttcatctctctggacaaaaattatttgcattgaaccatccaagtttcaaggagctttttaatgaaactattgctcactgcttcatgaatgacaatctttctcaatgcagtgcaaaatcataaaacaaacattttaaaaataaaaaaaagttcctagcattgttagttcatctacctattacgtcgattgaggaatgctataataaccaaaaggtttaatgatggccactagttgcatatcattaccacgctttggatctgctgttgttttcaaccataaaaagtggaacaccttttatataaaatacttagaaatcttcatagatcaaaattcttagtggcttcttagtaggacttgcttatcatctatattctgctgcttgaataggtcttgagggttcagatgcaagtttggcctcagtgttagagtctcttgagttctgcttaagagttcgtggttctgaagcatgtgttttagaagacttagcaaaggcaatcgatttggtccatattcggcaggatctagttgaaagtggccattctctgttagatcatgctttccgtgcccagcaaaaatatgaaaggtaaagcgtgttcctcagtgctctggtctacacaggccacaattatcttatttattgccccacactatcttatgtaaacttccactatactgtgtatcttgtatgcagaacaactaactactgcctagatctagcttctgaacaagagaatacaatatcggaccagtggttacctgaacttaggactgcagttcagaatgcgcaagcttcctcggaacactgcaaatacgttaggggtttggtatggaactactttctagtattattcttcttttttaattgttaatatgctaaaccccagctcagtgctgtatggacatggtcatatcataagcacattccattctaatttccgtggagtaaaaaagtgtgttctagcaacggtcatgcttttacgttatgtttagaagctagtcctattaacttatggtgactgtcttaatgtgtcttcacgtggacgttcttaagtcatatcactcccagagtatggcttaatagtgcttgcgtgtttttgggatttagaatcctcttatgatggctactcaaccttttatttagtctcctttaggacttgttaagcttgcgtatgaaaaaaatcaggttttcatttgacagttgcttacaaaattgcaaataaagtttacggttatagttctttttctattcttcactacctttccttacttcaagcttaccattttttgtttgtttgtgtttcgaatgcagcttgatgaatggtgggaacaacctgcatcaacagttgtggattgggtccctgtacacggtcaaagtgttgcagcttggcaaaaaaaaatcaaacagcttcttgccttctatgataaagaatcattgcgaacgta

SEQ ID NO: 37076 - DNA, 2140 bp, Arabidopsis thaliana landsberg
catgttctgttgttgttgttattgtgtctgtaacataagagtcatgaatctgggcatcgttgatgtttaacatctgattcaccattcgatcatcctcatcatcaatctcattaccaaagatagttgtctgataatcatgaggggaaagcaaaatgtctgggaaagtgttgcgaaaactttcaatgtcctcaaacttgaaaccaaaatcatcatcacattctccaaacaaattcccttcctccacattaagatgttcatcaatggcattgttattgaccttaagagactcctctaactccaaacgccgcctttttcgtgtagtgtagcaatgagttctgactggtactgaatcaaagagactttgtggaaggaattgagctccgtattggagctcaaatccgactgatgaagatagagatgtaaccttgggattgtaaagaagacaatgccatcgctctgtttgttctgaatttgtaaattttcgagagaatctcaccgctcctttagctaacgtctctagagaagttccatcctattattatacaaggaattaaactccacaaatcattagaaattttgcaaatcttggattcaaatatcgactatttgaatcatagattctgaaaaatttaacaattgattgtaagaattaacaaacagggaaactcgtaagaactaagaaccgatataatcaagttttgatcaaggcagagtattatgacttgggacacaagtatgttaattatcaaacagagaaaagcttttaaacgctgcaataatttagggtttcagtacgagattcagtaacatcatactcgtacgggaacgcaagatacgaaaaaaaaaaagataacagaaaaatcgaaatccgaaaggtttatgaaattaaaaaatcaagattagggtttcgtgaaaaaactaaacctcgagtgattgtctgagaagataatcatcttcaggtaaccactgaaacgccatcagagacgcagatttaagcttttcaccgattaacgaaagaagaagcttctattaagtcgagtaaataaaatagatttagaaaggaaatatttaccagagaatcggccacagaatctttacttctctaaaattagcgtttttttagccaattaaaatctcttagtcttctcctattacggtttaattaagtcaaatttcttttgaaagttaatgggcttcaatcttggtccattatgatatttattaccactgacgcacaaaattgggctgtcgcaggccgagtccgtaatggatttcaaacaattattgtatgtactattgatgcaaaataataatttagtgtttaagaacaactactaattaaatttctatagatcaaatatgccaacccacttatttattctgaaactagagtgtagtgctaaagattcttgaatagtgtaccactaataataaaagctatcgcaagtttagaaaataaacgtatttatacatgtgagctatattatatgaagatatataaataagaatggtggtggtcacgtgacaaggagtctttgtaaccttcgtggagaccacaacgctgtcttttcttcggccggtcttctccttaaaaggcatatataggcctattatattatacgtttatatatacatacttaaatgcttattgaacattagtatttatatatacacatttgatacttagctagagcttaatgtgaagcatgtgcatggatgtgagttcggaccccacgggctttatgaggcccataaagctaatggagggggaccacgtggcaaggggctagtgcctacaagtggagggatcctaagaaagtaaagtacgtataagtttgatctcgtgatcgtacgtactgtttctactattggcatgcagtgttcgtcgcctagggtttcagaattagacttccttattatacctaacttgtcatgtattccaccacagttacaatcactgaatcacatcaccttatgtttttttaattttttttattgtttcatacacatatacgatggggaaaatcaaataaagttggtgaatgcacgcgatttcaatatgtaacgtgttcgtagtcggaggatagtacaaccattgtaaatcccataaattagtatgtccaatgtattggtcgtgtgt

SEQ ID NO: 37077 - DNA, 924 bp, Arabidopsis thaliana landsberg
ctaacaccttccaattagaaaaaggcatacattaactacaatgctcaaattaacccagatatcttatgtgtccggttttaacaactaccacatgggacataattcttgaggtgtttcaacactctaaaacgagaccattggatataataaaatgatgtatcgagaaatatataaaactcggaggtaaataatattagatggaccgacaaagggttcaaagggtgccattaatggaggcgacaacacttggattcccactgattctttcagcttccatgtctcatctctctactctctctccatactttacagttgaagttgcacccaacatgagttttgagcaaacctacgcacctttacaccttaaatataatgcccctcaagcccaaactcttcaaacacacttctctcatctctctaatctctctttctctctctatctctaagaatatataaaggtatggactaccagccaaacacatccctacgtctaagcctaccaagttacaagaaccaccaactaaacctagaacttgttctcgagccttcttccatgtcttcttcttcatcttcttccacgaactcatcatcatgtttggagcagcctagggtattctcatgtaactattgtcaaagaaagttttacagctctcaagctcttggtggtcatcaaaacgctcacaagaaagagcgtcaacttcttaaacgtgcacagatgttagccactcgtggtttgccacgtcatcataatttccaccctcataccaatccgcttctcatccccttaggccgctgcctcacctcctctctcagccgcatcctccgccgcatatgatgctctctccttcttcttcgagttctaagtggctttacggtgaacacatgtcgtcacaaaacgccgtagggtactttcatggtggaagg

SEQ ID NO: 37078 - DNA, 2625 bp, Arabidopsis thaliana landsberg
ttagttaattagatttcaccttgcccaacatgaaagaagcttttatcatgtgtatgttaaccttttctttctgcgattcataattaatggtctcaaatctgcccatgttttcatgttaaatttctgatttgtcgcatatctgggtaccttctaatcctcgtggtgctgaaatgttgccaccgggtatggctgctgctgaatcagacttctatatgcgcagattatggtgtttaccgcatgaggtttgtgctcatagcatacatttctgatatacaaaagtaatgtaaatttcttatacattattttcttcctcaggatttgaaaagtgaaccaagatacctcgcaacatttacatgtgggtattaatcagaaagcaaatatcgatgcttgtgtcaagaaggttggttcattccctttgtttgatgttttgacttcacgtcataaattatttatcatcttctcaacagttttcagaaaacttcactattgtcctgtttcactatgacggccgggtaactgagtgggatgagtttgaatggtcaaagactgctatacacattagcgtacgaaagcagacaaaatggtaccaaacgctctttattctttatggtagaaaatagtttggtgtgtttatgactactgactcccttggcacctggaaatatattaggtggtatgcaaagaggtttttgcaccctgatattgtagcaagatatgattatatcttcgtctgggatgaagacctgggtgtcgagcattttaacgcagaagagtaagttgtaataaacctttgcatggattctttccttttttcttgttttcatttgatctgttgtaatcatcttggttatctgtttccaggtacgtaaagatggtgaagaagcacggcctggagatttcccaacctggcttggaaccaaaccagggactaacgtggcaaatgacaaagagacgaggagatatggaagttcacaagtatgttggataaaatccctcagattatggccatgtttagttttctgtataatgatctttatgaagtaatgggctttgaatcttatcaggataacagaagaaagacctggatggtgctcagatcctcatctccctccatgtgctgcgtatgtagaagcctttctttttacccgttttgagttggtttttccctataacaggaactaaccagtatcgaacttttgtgtcattcaaaaatgcagattcgtagagatcatggctcctgtattttcaagaaatgcctggcgatgcgtgtggcatgtgatccaggttccttgcttcatcatctgtttcattcttcattcatcttccctaactctctcttcttgcctgccttacttatacgctttaccttaaactgttaacagaatgatttggtacacggttggggtcttgactttgcactcagaagatgtgttgaggtaagaaaaagacacttaagttcgttgtttgtcacgcaaaagacagagtttctaattatatcgtctgttatatgacgaatctgaatatattttacaccgaaatgcagcctgcacatgagaagataggagtagttgattctcaatgggtcgttcatcaatcttttccttcccttggcaaccaagtaaatcccatagaactctccatgtccattttaacttcttctctcagaaatctgattctttttcgcttgatgtagggtgaggcgacagacgggaaagcaccatggcaaggggtaacaaagctttttatctctctctcgtgctgagaattatgtgttgtgaggaagacgcataacttgtgcaacaagcgacgtcaatttgttttgttatgtggttttgcaggtgagggatagatgcaaaaaggaatggacaatgttccagagtagaatggctaacgcagagaaggattatttcaaatccttacaagtagaaggctcctcaaattcaacagccacaaccatttaataggagagttcttaaagtagctagacgctgacagattcagttttactagtgcgttcttgcatttacatatagagtctgtatatgttaatgtagtagatattacccatcactacaaaatcatcaccaaccttccatcgaataaacaaaaaaagatgaatgttttgaaccgcacttgtgtatatcaaacctgtgcatctagtggtatgtgaagtatcaatgttaaagattgttgtcggtctacttaatctacaagtaaattctgaaatggtgtggcgtgttggttttatggatcagtggagtcacacgtgtcagtttcttggcgaacaggaacttgagaagctttccacaaagcacttgcttagaaccacgtgtcagagactttcgtgacacagtcacaatcatgtgttggtctagtaccttacgcgtgataccacgcgttttgacctataaagacagaggattagacattagtggctggatcaacaacgttaagaaacttcctctgttttattaaagcttcctcctgaagagggcgaaagactctagaaacagaaacagtatctataggaagaagaatgggtatttctcattacccgacagcgtctgaaggagtgatgccaatgctagtaatgaacacagttgtttcagtgtctctagtaaagaa

SEQ ID NO: 37079 - DNA, 3195 bp, Arabidopsis thaliana landsberg
  unsure (1)..(3195): unsure at all n locations
agcccactttgccactgtaatatctggcacgcatccaatatacctcaccacaccacatcacaacaacgaagaagaagaagaagaagagcttcaagaagacaaatacactattttttatcgtctgcaatgcccttaccctttgaagagtttcaagggaaggggatttcttgtttctcttctttctcgtcttccttcccccaaccaccgtcgtctccgcttttgagccaccgcaaagcaagaggcggcgaagaagaagaggaagaagttcccgcggcggagcctacctctgttctggactccctcataagcccaacctcttcctccacggtgtcttcctctcacggcggaaacagcgccgtcggaggcggcggcgacgccaccaccgatgagcaatgcggagccattgggttgggtgattgggaggagcaagttcctcatgaccacgaacagagcattctcggactcatcatgggagattccacagatccctctcttgaactcaacagcattctccaaacatctcccaccttccacgactctgactactcatcacccggtttcggagtcgtcgacaccggcttcggtttagactaccactctgttccgccgtcacatgtttccggtcttctgatcaaccaaagtcaaacccactacacacagaatcctgcggctatcttctacggccaccaccaccatacacctccgccggcaaagcggctcaaccctggtcccgtggggataacagagcagctggttaaggcagcagaggtcatagagagcgacacgtgtctagctcaggggatattggcgcggctcaatcaacagctctcttctcccgtcgggaagccattagaaagagcagctttttacttcaaagaagctctcaataatctccttcacaacgtctcccaaaccctaaacccttattccctcatcttcaagatcgctgcttacaaatccttctcagagatctctcccgttcttcagttcgccaactttacctccaaccaagccctcttagagtccttccatggcttccaccgtctccacatcatcgacttcgatatcggctacggtggccaatgggcttccctcatgcaagagcttgttctccgcgacaacgccgctcctctctccctnnnnnnnnnnnnnnnnnnnnntccggcgaaccacgaccagctcgaacttggcttcactcaagacaacctcaagcacttcgcctctgagatcaacatctcccttgacatccaagttttgagcttagacctcctcggctccatctcgtggcctaactcgtcggagaaagaagctgtcgccgttaacatctccgccgcgtccttctcgcacctccctttggtcctccgtttcgtgaagcatctatctccgacgatcatcgtctgctccgacagaggatgcgagaggacggatctgcccttctctcaacagctcgcccactcgctgcactcacacaccgctctcttcgaatccctcgacgccgtcaacgccaacctcgacgcaatgcagaagatcgagaggtttcttatacagccggagatagagaagctggtgttggatcgtagccgtccgatagaaaggccgatgatgacgtggcaagcgatgtttctacagatgggtttctcaccggtgacgcacagtaacttcacggagtctcaagccgagtgtttagtccaacggacgccagtgagaggctttcacgtcgagaagaaacataactcacttctcctatgttggcaaaggacagaactcgtcggagtttcagcatggagatgtcgctcctcctgatttccaccggagtttcaattattaaaaaaatattttccttaattcaatttatcttaaatgacaaacttttagtttctgattttattttgctcagtgcgatggatttttaaattaaagtttcacacacatatataaatttgtgtgagaagttaattaattgtctgattatcaaacacttattgtataacacattcaatatatattaattgtggggattatttttgatcgactaaataacgtgatagaataatgcttggattagctcaatactatatttttctaattaaaaatgaatggggtgttgattttgatgcgaggcagaaagctactgctcattattgtgattatatgattatataatggttagagtttgttgtggtttgtgtctttgcgaggggtctatttttaatttataaacatatgtctccatgatgtcacatgggtcttgtattattttatttatttggaccacaatacatttttgtgtgcgccgtttctaacctttttttttctccgacgaaacaaaggtttgcgttttctcctttaaatggtccatacgcattacatatataatgcgcccatttgctttacgcattaactgcatttctctatagaaatatttcagaaacaaaccaagtgtatacaatacatcaacatgttttttttggggttttaatgtgaagatttcatttcaataaaaagattacaagctaatctaagtaatacaaaccaacatattttggtttactctttatattaaaacatcatttaggataattatttaaaatatatattcaaacatctaaggtcctaattaagcattacaaaagatttccgttttagaaacatatcaagagttgattaaatggagaaagacgactaaaatttgtgagtgaaaaatgacaatatgccgcaagttattgtctcttgtgcaataaacgttggttggatacagacacatttgattgaatgtgaatagtttagttttgacagatcataagccgtgtcctcaagcagaagaccggtcgtgatcggtcaatctacacgtgtacggcagaaacacatgtgtcgtttccctgtgagagatgatcaaccaaatcaacggtcagtttttgtcaactaatgtgtgtattgatttgtaacatgcctacgtgaacataagctagtcacgcaacaagcaaggcctgggtcacgcgcgctcggctccactaagacgcgccgacgtagtcactcatcatatatcacatgtgtggaagtattgcctaaagtgttataaagactctaatccaaagagaaggtctcagcttgtgaaagaaacgaagtcacgagaggcgcacgtgctttgtcatacagctcatcaaggctagagacgtacctaacctcttgccaatg

SEQ ID NO: 37080 - DNA, 1786 bp, Arabidopsis thaliana landsberg
ttttccatttaattgacacgtgtaacaacaatgggcccgacactatcttattccgaccaatctcaaacaacattaaaatcctcttaagatacgcttcgaagataaaccgataagcctgtatctcctctcaaaccaatctcatccgtcaaatcaaccacgtcatctaatccaacggtagatactcagccatcaaaccacagccacaaaaactcgtttcaagaaacgaataaacttacaaaatcccctccaagtcttatttcttcacaaccatctctgaactcatctttcaatctctcttgattccaatccattcttcttcaagtgccgggttctcgggtcggatcttctaagtctagctagggataatggctactgtcactactcatgcctcggcctcgattttccgaccttgtacttcaaagccaagattcctcaccggttcttccggtaggttgaaccgcgacttgtcgtttacatcgatcggttcatcggccaaaacgtcgtcgttcaaggttgaagctaagaaaggagaatggttgcccggtttggcatcgcctgattatctcaccggcaggtaatgttttgcaaactacattcaatttcggtttaacacaaccggaaccaacatggttatcgatttggttagcttaggtcagtccgataccggtttagttataagtgtataggaatttgtttgaacacaaccgtgaataatcaatttggatgggttaggttagaccggacttgcttgataccggtttagttaataatggtcactcgctcactcttatacatattgcagtcttgccggtgacaatgggtttgacccgttgggtctagcagaggatccagagaactcgaaaaggatcgtccaggcagagctggtcaacagacgatgggctatgctcggtgtcgctgggatgcttttgccggaagttttcaccaagatcggtgagttaccattaacatgaccttaaaacaatttgtaacttctttcaagaacctaacacattgtcaaaactgttgtggtaggaatcataaatgttcctgagtggtacgatgctgggaaagagcagtattttgcatcgtcgtcgacattgtttgtgatcgaattcatattgtttcattacgttgagatcagacggtggcaagacatcaagaacccgggaagtgtgaaccaagaccctatctttaagcaatacagcttacctaagggtgaagttggttaccctggtggaatctttaacccgcttaactttgctcctacgcaagaggccaaggagaaagagctagcaaacggtaagcttagactaatccgctattcttgtgatgcaagaaactgctagttgtagttaaaagacttaaaagacatttttgttgttgttgcagggaggttggcgatgttggcattcttagggtttgtggttcaacacaatgtgactggaaaaggaccatttgagaatctgttgcagcacttgtctgacccatggcacaacactattgtccaaaccttcaactaaagagtgaagacagacttatgatctcatacctatctatcttccatcactttcatgtctgtctgtgagtgtgtttcatcttagagttcttggtttttgagcttgaattattgttgaaccgttgtagctccatgaacaaatttggaatcttcaatgtacagaggaactaagttaatcaacattgttgtactctttaatatctattattcatgtggcaacagttatatataagcacaccataacttagattcacaatctcttaatacatt

SEQ ID NO: 37081 - DNA, 2446 bp, Arabidopsis thaliana landsberg
atccaacttatatatgactttttgtattctccaggagactgcacccaggtatctacttgcttacactagcatatcgtactcttgagcttgaagatgaaaagagaaggaaacggtcaatattggagatcctcgaggcacggttatctaaaacattggattggtgtaaagaattggttagaagaaagggccttggaacttaatatggtaaaccttctccctttccggatgaagatccaaagatgattggatttacaatttccgcatggatgctagcacttccatttagacttatgaggttgtggctaacaaaatgctcaccaaagatgggagtgcttagttgtttaaggggatcttgcagaccagaaggtggttttaaaacccagaatggacgggaccagaaggaacacaagaaatggtgaaacatatactgtgctggggtgtttgatcaaaaaaaagaagagaaattctgtgttggggaatgaatcatgtgtactaaagaattaaaccacagaattatatatctaaggaaattaaacttctcggaagaaaatgacttcttacaagatatgcagtgtttgggaatgaatcatgctaaaggactaggtttcaaagcgactcattagacttgttcaaaataccattatctaatgaaactagacttgattttcagaaggaaaatgaaactaggcttggttcttcagcttcttcgtcttcttaaagggtcctaactcctaagcagattcagttccggtcaacaaagctttggccggagggatcaaagccacagcgaagcgttcgtccttggagtatttctttcgtaaagctctcttagtactgctctcactcccttggtcttggggcttccattgctgatacgccaacagctttgcacagtccctttttcatcattacaacaagaatgaatatccaaccacaaatgcaaaacgcatatgatgcaaatgaaaaaagaaaggaactttcttacatgagctgagtctcagaatagccagtgtgatgcttgagagtgctggtccatatgggaacttggcggagagaagatcttgctgcgtagattgcagaagcagctaccattgatggactgaacattatcatcgtatcgtaatgcattacgcctaactcagccaaatagtgcaccatattctccatctgcaaaccaaaacacaactgaatgttcaatatgatgtaatgtataaccatggaagaaactaaaaaaacgctctcttaccttttcgtctgcaatggaagctttgatgaaacgagctaggaagacataatgagtcggaactgtcaagtaccactcaagtgtagacagtattgtcttctccatcaccagaatctgtttgtgactgtatgcatggtctgcaatatcaactagatcctccacctgcaaaagaattatcttttcatttagccgaagacaaaaaagaatcaaaaccagaagattcaaaagttctctgtttttatcacctgtggtggccaaatttcttcatacttggccgacatgagaagagcactgagaccaacaagctgcagttcttttcgaggcactggcttaaccgacaagaaccgatccagaatgttaacagtgaggtaaaatgtttccgggtttagctcgaatcggacatgcacatcaatcaaccactccaccaggatcagtctcatcttttcattaatatcaggctgagatgccatgtaatctcgtggcctccattcactctgccaatccaaatgataatttaagtaaacaagttaatactacaacaaagctgcaaggaaagattcatgaatagtatagtatacaaacctcaacagacttgtaaaaactgtaaatatcttccacatattccacagctgcgaggtcattctcaacatcagcagaatcgatatcaacaatcttttctttctgtttcttctctaaaccacaagcagcctgaaaagcaaaagaggtttattgggaacagaccaaaacattttcttacttcacactaaagaatcatcatttcacaaggtaaaaaattaccttgcttctagcagtaagaacagatgtgtaagtggtcgctttcttcttagtagccttcttctctcgagcagcaactaaaccaagttcttcatcactgtctgaacttatctcaatcacgtctactacctttggtttcccagccactttcttcggctttggtactgcgtttctcttgactacaggtttctgcagatcaaagacatatacacatatgacatgagtttaacaaatctaacgaagaaacctaatttgttcaccaaaatacaggggaaaaggaacaaactttgagattatcctccacaagaagcgtgggattttgagatcgtgtacgaggacgatgatcgatcttttcccgttcgttgttctttgggtcattttctcgaacaacattacctatatcaccaa

SEQ ID NO: 37082 - DNA, 2809 bp, Arabidopsis thaliana landsberg
  unsure (1)..(2809): unsure at all n locations
cgtgaagacggatgaaccctagacgttgtattgtggctcaagttagggctttttgttttctaagagattattaagtgggttaaagggatgactatcaaactttgaacagaaaccttagcgagatatagaagatggagagagaatctcatctttcgactcctgatcccagctcctatgatatttctgattntgcctcattatcaacaattgatgtctctatatgattttatttgaggataatgcgtaacagtgtaacacataagttatctatgttgtatattattaggagagacttcataatttctttactggatcggaacagagccaagggtatgtatctcagatcctgaacttgaaaaacatatcttgtcgaacaagttaggtttctttgtaaaatctaagacatgacttgaggccgttaaacttgtcggccccaaagaacaagttaggtttctttatcgaatcttgaaccctgctttctccatcgataggctcaatgtctttaatacttcttccttaaactcgatttgagatattattaacccttagagaaagcagatatacattaagctacatttggttgtaatttaattttgttgatcatatcaagaccactgtgatattagaggagtggagaaaagagaagagtaaggaagaaacaaagcaaccgaagattaaattggaaatgaacagatagatttccaaagactaacaaaagatataatataaaaccccaaattcagaaactttctcccaactagaactggtaatgtttttaatattttcaaaagggtttcttcttagacaatgtttcttgcagttgaagacacatgtttctttcttgaagatagacatgcagtcgcttcgactttacagaccagtgtcagctttgggcaacttaatgttctaaaaatcccagaagctagtgaaagagtgaaaggacggattgataaacacacagttgagctgtagaaagtataacaatctgaatcaaagtttatggttattccttcttatggattctaagtatgtttaatttgtatataatgtaaaaagttttgtatgaatatatacgcatattatatttaaacaaatgaatgactatttatacatcttaaaattttctaaaagtttgccctaaatgaatacacacagtcttgcggtcagaacatgtcacgttcgatgttgttgttgttgaactactaaaaccgataccttagaccttagatctctagccgccagcaaataaccaatgacacctaactctggtagttcgacccattccattagtcctgataagtcttgtgatgtcatatcatgatctctcccgaccaccattagatcgtactcttctgcaagcaattggacagctttgactacctcaacgacactagtcacaatcctctctgtataaagaatatcttcattgtattcagtactctttaaatccttcaggccctcgttatcaagaatatagtcccactctgactctatttcatggtcgaagatgagtcggatcacggttacacggacccgcgggttatatttcatcctcttcaccaatgatagtgcctccctatcgtctttgcctccaatgaagagcacaccaacatcaatgttgtacctattcttgctcgttacatagcttttccgcgagaattgtccacgatctactagtatgcctatcgaacaaggcgcacgatcgagtaatgactggtttagttgtcttgcagcaaggtcgtcagactcgaacatcccatctacggtccatttcctccccgatgggacgacaatcatcgatgttgttcgatcaagtgcaagtgtacatatgtcttcgtgcatcaagttttcatgcgagaacgcggtgaacgtagtcacggttacagactctaagctttcttgcatgaactgtctaaaggcaagatttgcggtatggatgtaggagtttttgtgaagccgcttcaacttcttgtcgtgtgacactatgatagggttgatctgaccaactagcttcacaaggtggagaactgtgaccgcgatagggaagtcatgtatcggtgaggaaaacaattggaggaatgctatggtctccgagacgttttctggtttgtgcaaacaagttagaattcgaagacctgagtttggttctagatgcaatatgtcccttttctgataattaacgtactttcgtttcggatcgtacatgctccttacgaccatagggacaatccctgcacttagtagcgaatataggattaagaacgcgtaagtggcctgtgatatgaactgcaaaatcaaaccataaaaacatgtttagatttacggcaaaatcaataataacaataatagactcgtttgtgggttaggaggttaccttttcttctaatacagcttcatagagaacgaattcaacaaaacttttgtagcttaagatgagggaaacagccaaggattcactgcgaggtaacttgtagtacaagcaaagtgtaaggcaagcaaccagttttatgacaagtataagcaatgttaggaagatgttgaagtagatgtcagtgaactggctaaggatccttagtccatcacatctcatcgcgctgaatgtgattgaaattggtaagaacacgttcatcgtgagcctctcaaacttagcctccagagcggatcctaacggtggaccctctggtatgatgatgccgataattaatggtcctaagacgtatttcatgttgaaaaacacaaaataagccgcggaagcaaatgctgtcagaatcacggcatgaatgtatatatcctccacgggcttgtcttc

SEQ ID NO: 37083 - DNA, 2990 bp, Arabidopsis thaliana landsberg
  unsure (1)..(2990): unsure at all n locations
tggaaactttatttcgctatcttctttttctttttctgaatccagtgcttattattggccacgtgtcgtttgatgaacacgtgctgattcctttccttttctgtctacattctcgtcactattacaaaacaaatgtcttctccttttaaagaaatcactggtaagaagaatgcatgcatcataaaacttttatcaaagaaatagaaatagtgcatgcacctttgccacttaagccaatatatatgcaaatcaaaacagatgtacacagaatcatttttactttttttgcatgagaccacatacatatacagtataatcttttgtctgtaaaggcaatccagtacaagactagctaatgtttgatagacgtttcatttatacagcaagagcgggactgattgtttatatacggaaattcatcaaatattcaaattgatttaaaaaaatggtgatttgaattacttttatagtcagatgatttgatcaatacatttacatcttctttccggtgacattataaaaacgtttaatacttcttttaaaatttagtatttttcatgtatataaaacatgtaaccttgatctttcattcttctctcgttttttgggaccaactttctgtttaggtacgtcttccttagaatatacgagattctcttgagtcttgaatatgaactgttatcgagagtacgtttcaggaaatctccatttgtttcccactaattaataacgaaatcaaactttcacctatctgtggatcagacgacagctttaaaaattcactgtcttgtttattcttcgacccttggctgttaatgtatagtagctttttaatcggtttaatcaaatgtttgaacactaaacagcccaacaactaaagccttagtaaaccggatgatgttatactataccaagataaaccgaactcacactcgcaaaacaactactacaccaacttatcttgtaaaacatttaatgtgataattttgcaaaactaagtaagagaaagatttcaaaacaaaacatgttttctatatatacttgttttacttagttaccaaaaaatatatttttacgttttcttttgtcgcccaatggatgctattatagcattgctatatatagatttagcaatcgattttctaattttttttgtcacctatacaaagacatattgatatgaacgcatgtacaattctttaagaaaaatatttataaaagaaatcaaattacacggcgatcttagctagtgtcttcaacattacacagtatacgaaacaatacactatatatattagttattaattcatggttacaaggacataacaacatcaaacccaacatacatactgcataaagatggtaatgttaaataaaaataaaatatgctatttgtcaatatgatcggcatacaattaaaaagattcaaatatttatgtatttgtgtgatagacctaatattaagagaccgttaatttggccatgcaaacggctgattcgatgacggtgctggctggtagtaaaacggagctgccggatgctgccacttcttaaaaatacgcggcttctccgcctctttaccccaccgttgctcctccctcttcattaccgccggtggtttctgtggcggcgattccgtaggtgatagaagaggaatagccactttccaagttcgtcgcaagggtttatcttaagagcaggtggagcccgccgctgcagcctactcgactttcggnnnnnnnnnnnnnnnnnnnnnnnnnccgtggacgacatagcaggatcttgttgtattaattttttgtttatatttatgagtgagctagtatgcgtgtatatatagagaatggcgtgttcaagagtgtgtgcttggcttgtgttttggtctaaacggtcgaatctttttattatttgcttcgttttttttttcttttcttgttcaagtgtttttccttttgactagtatagactaaactactaaattataagtttgactatattctcttttatgaggactataataagtacgtatctttttcatttttttgtttatgaagaaactactttcttttagtgctgaaaaagattatcaagaaatgtaaaagctcgttgaaagaaacacttgtattcaatttcaaccagcagttactctggtaactacagttcagaacttcagataataatagaaatccaaaatttaccaaagaatattcaaaaaatcaattaccaacatagaaaattacaaaatatcgaaaatttcttaactcttgtccttttatctatttggtcttcaaaaatcaaaattctgttggtggcagtttttttcccaaacaaatcattgttgcagtcagttgtatgtttggcattgttcgtaacttttgttaatatttcaataaatattaattgtgttataaaaagcaaaagaatgataaagacgatatgaactttagaccaaggagataatataacttttttttccctataccaactttagactaaccaacaccttgattacctatttattttcttgagagattttgtgtgccacatataatggaaagaatcatatttctagtttaaaacaaaaagcaatatgtctttgaataattaattaatctcctattataattatcacaaaaataattagcggtttaggttctctagaaataacctttattcaaaactgaagtcagatacgacaaatttattgatgtgatatcatattattttacgcatattaaccttgtccgttggatttgtaaagttgtaacggttggaacggatttgcaagacaatttttaaccatgtatatgattttttttacaaatagtaattgcatgtttgaggtatccgataagcttattggacagcataaacctgaatattaaaaaataggtttgaagtacaataattatatctattccacaacaagaaaaaaatgaaacttaacgaataaaactaacggttataagtcataaccccagaaaaacctt

SEQ ID NO: 37084 - DNA, 3056 bp, Arabidopsis thaliana landsberg
tattaaaagttgtgcaagaaagtactaataaaaatgagaaatgttgagaaaataaatctttttaatcattactagactgtagacatttttctttcaattccattaaaaatggaaaaattggtcatcatttattcaatgttatttactcacatagttatactaaaaacaaatttttattgcgtttgcattaagtttccaaccaataatgaataatcacgtcaaagttagaaccaaagcaaaaaaaactaaaaagctcaagaagaaaaggatagagacgacaaaactccattgaagaacttattagagaagaagaacaacaaggaagataacgaaagtcactaaaatctttcaagacccatgaactctcaaatcactcttttcttcttcttcttctcaatcctctccctctcccaaatctcaaattcatcatcactactaaaaccacacccatgtccaattttacccctcccatcctcccaacagctccaatggcaactcggatccatggccatgttcctccattttggacccaacactttcaccgactccgaatggggcaccggaaaagccaacccatccattttcaacccgacccatctcaacgcaagtcaatgggtccaaatcgctaaagactcaggcttttcccgcgttatcctcacagctaagcaccatgatggattctgtctctggcctagcgaatacactgattactccgtcaaatctagccaatggagaaacggagccggcgatgtagtggctgaactagcttctgcggcaaaggaagctggaattggacttggtctttacctttctccatgggatcgacatgaacagtgttatggcaagacattggagtataacgagttctatctgagtcaaatgaccgagttactaacaaagtaagctcctttttctcatatcagtcaaatgggtttgtgattccagttccaagtttttaaaaaggttgaatctttattaggtatggagagattaaggaagtttggttagatggagctaaaggagacggagagaaagatatggaatatttctttgatacttggtttagtttgatccatcagcttcagcctaaagccgttatattctctgacgctggtcctgatgtcaggtggattggtgatgaagctggtctagctggctctacttgctggtcactctttaacagaaccaatgcaaagattggtgacactgagccttcgtgagtcactctctaatgttgaaactttctatagatgttagggatgatagagatcatagcttgaagttgtttgtttgatcttgtaggtattctcaagaaggtgatggctatgggcaagattgggtaccagcggaatgtgatgtatcgattcgacccggttggttttggcatgcgtcggagtcgcctaaaccggctgttcagcttttggatatatactataactcagttggaagaaactgtctcttcttgcttaatgtacctcctaattcttcaggattgatatctgagcaagacattaaggttcttgaagagttcagcgaaatgaagaactccattttctcgaacaatctcgcccgtaaagcattcgttaactcgagcagtattcgtggcgatcaaagttcacagtttggtcctaagaatgttttggaagaaggattggacaagtactgggcgccagaagagaatcaaaacgaatgggtgttatacttagagtttaaagatttggttagtttcaatgtgttggagattcgagaaccaatccatatgggtcaaaggatcgcatctttccatctcgagacacggaagactggaagcggtgagtgggagagagttgtgagcggcacgacggttggtaacaaaaggcttttacggtttctgaatgttgttgagtcgcggtctctaaagcttgtggtggacaaagcgaggaccgacccacttatatcgtacctcggactctacatggataagttttcgggttctagtagaaacacaacaaagataacaatcacaaggacactaaaggaagagcagcaactacatgatttgtaagaaataactctcaaggattcatcacataagtgttaggtattcttgagaatatctatgtgtatcaagtcatatatgtgacactatcaattcttgtatgttaaggctctaacttttactctattgctttaaaagaaatatgactttttttcttcaatgacataaatttgaggatttgggtcttcttttgtaactcggcccaaatgttttaaagaatttcttatggattggagaaaacttttgtggaaaaacagagaaagccctaaagttaagagacatggaagccactgaaacggttctttgcacgttgcttgccgtcgacctcacagattattgctatagagtttgttctcgctgccagagagttcttccttcagataacaatggctttgcttcttcttcattttgcaaattctgcaaatcaaaagaaccaaaacttctctatcggattctcgtaagaacccttataatcttcttcttccttctaggtttttgttttctggtggaataatctgtaaattttgagatgaattacggttttaggtttaacagctgctatttataaatgggctttgacctatgtacacattcagttttggtgaatccgacaatctcttgtaagaactgtggaattgagtaattatataacttcaaagttctcacctttctgaacctaacagatgtctatagtgttagaaatggactttgtccaatttagttctatgcatagacaagaatgagttttggtgaatctgttaatgtcttgtggaattgagtaattgtgtaacttcaaagttttcaccttttttggagctaacagatgtcaatagcaacagatgcatcagtgaaaactgtgatatgctttgatagagctgcaactgttctctttggttgttcagctgatgagttcttccacttcactaagctcaatccattagccggtaaatatcatcaaatcgctgtactataaaagctctgagtaagtttgagatgattcctcttagatattttgttt

SEQ ID NO: 37085 - DNA, 2001 bp, Arabidopsis thaliana landsberg
  unsure (1)..(2001): unsure at all n locations
gatgcactaagccaattgatggtaaatagaaatgttaaacactgaaggtgtctacttcaaaaagggcagtatccaagcaaataaagagctagcatggagtatatctctagaatcctagacaaaagagtgttccactacagattattgtgatcaacagaaataaagaatagaccacctagcatcatcaagctagaagtttccttctacttcaagtacattcagtagaagtagtatttctctatttctgtttcagtaatcatcatatcctgacttatgggggaaacaattgcacaaccagacctctatcatatctgacaattgatttttggatgnnnnnnnnnnnnnnnnnnnnnnnnnnnnnnaactaaaaccatggttacaaaatttctatccagtgtgaatttgataaagaaaactcctttgatgcaagaaagggaaacccaaaaaaccccacataaaacaaaacacagagcacaaaaataccaaagagttgcaaaatgacattttgtatgtttaaagaaagagataagccttgatacagccaataacacaaaattcatataaaaaccttttgcataagagacgtatttttgtcaattaggatctctgcaacaacgcctttaatatccattcctgcaccatttataaatggtcactctaaaaccttcccatggcattaactaagaccaaatgttttctataagataagataagatcagatgcaacatactttcaacaaatttatcctacaatcttagaaaccagaatccactatataagcacactcaagaaaagtttattttacctgcacaaaaggcccgagatgtgcttccttcgacgacaacacatttgactccaggatcatattcccattcatcaagcaagcttttgtacttcaaatccatttctgtaaaaaaaaattcttcaataattgaacttgggttgtgaaaaagcttaattctttataaaaacggacctagattcatggcgttgagagctttaggtcgatcaagagtaatgagagcaacgccatttggataaacatttcctttcacgaactcgtcgcttccactggccattactgagaatttccgacgatgagatacagagagctttgagaagggaataagaaaagatggagaggttctagagaagaagatgcgagcagaagccagagataaactcttgatcatcactgtgattcctaattccacgcttgtcggagaaaccaaacataagtcactttgtctagttccaactaccaaaagtacactgtgtcagtttaagggtccactaatctggagatatgtcgttcggcccaatacaaaaaggcccaatagtgaccaataacagagttttgtttaattgatgattgaaaagaaaacggcacaaaccaaacctcaatctttgttttttccttcaagaattcaacctcaatgtgagtattattattagcatcacatcttctatggaaagataccaaagaatgaaaaaaaatatatatacaaaatcatataagtgtatcatatatagatcgtagttcaatagagttaaaacatttcctcaaatctttacagttaaaaagaagaattcaaaaaaaaaaaaacatgtaatttcttgcatctttagccataaccttgaccaagtcttctattattatccgtcgccttttcccgtgtggtctgaccgtcagtgctcgaccaggacgggtacaaatcatattcactaattgggttactatataaatcttgagtctcaagtcccgctttcctaaacttgttcatgccttcattgtcttggctcgagtcataatctgtgcttcctccagatgagccatacacattgctgtgtcccggtgtgattccttggtttagatctgatggtgatatgtttccttctagcacacgtgcaacctgctcgttatttttacaccaatcactcattcgattagcattagtaacattttaaaatgactactatttagcaaattgaaaaaagtgt

SEQ ID NO: 37086 - DNA, 4567 bp, Arabidopsis thaliana landsberg
gctgatccggagatacaggtattgactttttgccaaaatctcctcctatatattaaaaatgccactttgttattaacaattgaacataacctgcattggatttcaatagttagctacttggtaaaagagtgactgttttgtgttacttgatacaatcattacccacattttagactagtttctagaatggcactttacaaaacttccttcgttcactcattagcataaatggaaaatttcaggaggaaaaagttgatagctctctcgagtttctcattcttgcaagtgatggtctctgggacgttgtatctaacgaggtaggaagtgtcatttgatttctaaacttccctgttaaacttcctctttttaacattcccaatcctcggactcgaaaactgatctctgttcaaatctttatttcaggaagccgtaggcatgatcaaggcgatagaagatcccgaggaaggtgcaaagagactgatgatggaagcttaccaaagaggaagtgcagacaacataacttgtgtcgtcgtacgtttcttagagagcaagtcagctaacaacaacggttccagctcatccgaggaagcaaatcaagtgccagccgctgttagaaatgactcagaccacaagatctcagccaaagaaaccaatcaagaccataccgcagtacatagggatttggaccgcaacgctgacagtgaaagctcgaaccaaaagccgattgaagctagaagtaaggataattcgaaccaaaaaccaatcgcggttacagcagcagaacgcagagtttcttcagaacagagtggtttagccggggaaaagactcaaatgccaataaaaaatcgcagcggctcagagcctaagagttcagccaaggtacctaatcaagtgcaaagcacagtacacaacgacttggacagtagcaccgcgaagaagccggctgcaacagaacagagcggatcaacgggtgaaaggaatcgaaaaccaatcgaagttcatagtgattccgccgcaagaaagacaagtagcactccctctatctttaactaaaacgtccactaccttcttttgataaatgaatgtatcatcttcatttaactttgaactatttagtgtccaaagattttgccttgaaactgatttatctcgttcatgtaagtttcttctctttgtcacccttttttctgaggtctttaacttcaacaatgtaatttctttttgcagggtaccaaattttgtaaattgctgattctaaatagtttgagtacataacataaacacgaacatattcaaaatcacgatatatacaaaacaagttacttataaacagttaaacaccacccactcacttctcttcctcttcatcgcccacaacaactaaaaaaactcatcaacaaaaaacaaacaaactcgtttaaagtaaacgttcgtcaaaaaccttattactaaaacaaagaccaaaccacccaccatcttccattttagagtctctccctctctcaatatctaaaatgtaggtacaagtccgaacccactaaagataccaccatgaccaaccacatcattgctctcatttgtatccgtccgcttcgcaaaccgtcccttgattctcggtctcatttccgcatacgctttccttgaagcataccttatagtcttctcaaacttcctgttcttcctcttctctctgtacctcattaccctcgcttctctctcagctgaagtcagcggaacagcccgctgtgtccccggatcagctccactggttgcaggaccaccgtaaggatacgataaatcagccaccgaaccaccatctggcaccactcccacttccatcgacgatgatgacacctaaattacaccaaccattggatcaagccattataataagtacaatcaaactgacaaatactatagattataacttataagtgaatatgattagatctacacttgattaaacaaaacaaatgaaaaagaagagaccaaaattctttgattaatacataattagatacttaaattaaggattatcataatatttcttctaattacagattaatttacacatgttgctcgcataaccctaaattttagtcagccaatcattacttcccaataaattaataattttaagtatcatcaacagtctaaaccctaaagatcaaaacttctttcgttataaaattggataaataattgtttaatcaaacataatcaattaaagtaatcactgtgattaaagaaaaattaagcttacgctgtgactgatgcaattgtaaccacctccataagcaaagcctttagatcctccggtaaaatccatttcaaagcaattctcgttcaccgtcgggattctaaccgtccgattctccaccggaacaacaccatcagtaccggagctattctgctctaacgattccaccttcggatcaacatttccataatccagatccagatacggatccggatccgagaacaaatactgttgaccagtgttcatctccggactatctgccggaacttcctcagctgaagtaacagcaacgatccccgccgtcgccgtcgttgtagtctttggattgggaagtaacagccacgaagcagcttcttcctcctcttcttcacggcttccgttaccatctatatcggagaagtaacagtcgtcaaggaaattaacggcggtgtgtttaacggaaccgtcactagagacggaatcgtaaaacggagtaacgggaacgcgttcgtgactgccagctaacggattagccgagtggatatcacggtcgcacgtgacgcataacgcggccgcgtctgctttgcacgtgacgtgtgccggtgcttgctcgcacacttcacacatccacacgcgcgcgtgtcgtgacgcgagtttgttcgccgcgtggacttttgaatcgcagcttaagcatagaaacgctgcgtctggtcggcagtataacgccgccgtcgctgatttgcacgaatcgcagagctttgacgccatttttctctctctaaacctcttctttttcttctctctatatttcagtgtctctctgtctctttcttttgtggttggtgttactattggcttcacatgagcgtgtcaatgagtctatccatgtggggtccatgggtatccatctagatcgaatgaaaagttgacacgtggtaaaatcttagccaaacaacgtaattttatttctgatgaaattacttggcattatagttctgtgtgttctttatttctttatataattgtaatcgtatgatgatgatacttgtaatcataattctggatcgtcgacatttggcaacaggtgttttattttagcaaatgatgcgtagcgaatctgtctaggaccttttttatataatttataggttatgaatggaggcagcggacaaatcggtctaatttgtctgcggtttagtccttctcattttttggacaaacaataaaccgttgcgtaccaagtttatttgtatgaaaaaacggttcacaaatggtccgctgcggttttcttctacttttttttgtccggaccactgcggactatagtttatgaatggtaaataaaaagcggtccagtccgtagacggtttttgtccgcctcaaccgttgtaaccattcaaacccacaaataagtatttcatctatatcataatattttatttatccataaaatgtttccaaattcccccactaaactaattgtactcgaaagggcattaattactctcatttttttttccacagtaaatgcaatggatgcgcctgatgtattgtataccctagatatgaagatgtccaaaaaactaatagatgagaagctgctaattgcctaattgcatatgctggagtattctttaacgaacgccgtgaggcataaatgcaagcgttgacaaaaaagactaacttaattaaatgcaagtaagcttccattatttgcataatgtctaccatttaaaaaaaattctgaatcgaattttaaaattctgaaaacgatatttccgggaagactttgtatataagttatttcccttgttttaaatcacgattacttgtgacgtcttttacaaatatacatatatatttttgcaggagtttttggtcacactgttttaattttgatcgttaaatattctcggatcttttaaatctatataaatttttgcagcagtttttggtcacaaatattttaaatttggtcgctaatgttttagtgttatttggccgaatttttgacctggtttaattatattcggatcataaataagttttatgtatccaatcattgatccggttttattgtgtttagatcctcgataactataattagaaaatctataacaaaacgatattaattcttaaaaacattaattaaaaaaacaaaaacaatttagaaagtttctatttctaccaaaaatattaattaaaaattaactatttaattaccaaataaatcggaaacaaatatatgatatctctaaactaggtatttcctaaaacctatctacctaatttaaacataccttagtccatataacatgaggcaaagct

SEQ ID NO: 37087 - DNA, 1552 bp, Arabidopsis thaliana landsberg
atattacatgggttacaggggagcaatcgatatcccagagtgtaggcttcagcattacactggtgtttgtccttcgtgtttttcagttatgtatgtatttgaggtcagaacgctttgttagttatcgttgttgtaatttaagtaagcaatctataaacaactttgaatgttccttttacttcccgtatggccaaatacagtatggatacatatatcatgcccatttcgtcatgtaagatagcaataaaatgacaaccaaaccagcaactataagatttccaagctcctttgatatcactgctttcttcttcccaatttcgttttttaataaagcgacagtagtttgatgttgtgtgtgaagttcaaaaagttgctctatctcctccttgtgagcctctattctttcacgcattttttccattttacttcttcgcatcgtctctgtttcgtcctccatttcacaccttaacattgttgcctcctccatcattgcctcatcccaccatttcctgatgtgtacctctccatcttactttaaaagtttggtttctatatacatacatacaatttttctaaatatttttatacaactagctctttaatattctttacctccaccaactcgcatgcataatatcttcttcctgagtaatttcttcccgatgaatgtttgataatcgctggtgctccacagtagcattttttttggaattccatactcactgttattacggccgaagtttggcctatccacagatctagaagaactactgtcagacatttttcttactcttttgtcccttaaccgaactagtcaaaactacttatactgatttataaatcataattccgttaaagtgttgttgataattcttgtccatcatgatatgctttcataattaatatatattttaaccacatgttcgccatcatggatcgtttgtataagtgtcattttgttagtactcgttgctacaatataatattattcaagcgtacctcttgggaagagagttaatcatttcacttgggaatatatactccctttcacatcaatttgaattttaagaagaagcgggcatgcagtaataatataaacgaagtaaaattacccctacacataggtttatcatttgatatctactgctgttgtctactggttgtgttatacgcaaccttgacgtacaatggaaccaccacttgacgatatagtaatttaattttgctggctaattatcaccacattaaattacttggcgagatatggaaagttatataatataatcaaattgtagtttaacatatgtatccatatggatcatgttaattattttagatgaaggggacataaattgatccatcgaaaccatttctttttccaaattcgtaaaaccagcatagttaaagttgtggatcaagtctgtactgagagatacataacaaaaaaaattaaaatagccgaatcacaaacattcacttcatagtcttaagtagttcattgtaagacttcaaaaaacttgcccaatcttcactccttaatcttcactccaca

SEQ ID NO: 37088 - DNA, 3026 bp, Arabidopsis thaliana landsberg
attgccaattactgctttgaacttctttatccgtaactaagagttgcaagacaatttcttataacatgtttttaattagtcggaagtattttgtctactcttatatacctacgaatatctaagagccagtctagactgagtggttttctttgctttgttctgtatgtttagtattcctaagcaataaaccttatatctatatcatgcaagacatttaaatcaatttataggtcaattaaactgtatttaattagactagttaatcgtttttgaactgttttagttaagcatttgtccaattagtgtgaactcttctcatgtttcttcttactagctagtagataaagatagatatagtatatacaatattttttatttgttatgtaaagacgaatatatgtggaaatgatgagggtctgcaagactgcaagagtctgccttgcgtacgaaaacccataacattgtcacattgcaattgcaccagccacggccagagtcattgtcatatcatcatgttatttatatttatgctctattattccatatttttcagtggtcaaataaatcaacaatttccactttttcattttatatgtgaaaaagcttttggttccccccgggtaaagcgggggagttcttctatttactccacatcacactgattctttgcatgactgacatctcatttttcttttccacaaactttttttttcgggtcttaaaataagggttattggaaaagaaagatctttagatttgttcaaagattcgtattcgatcaaattggtaaattggcgtgcgattcacagtactgtcccatgaatgaattacgaaaataattctcaaaatttatacaaaataaaatactatgcaacaaagagaaacacataattgaaaaagtatgctacagtttttgtttttataaaaaacttgaaaaaacacacgttttggtttcatgctcaaccatttttttttaaatccaccacgcaactgattctagttagatacttttcattttaaaaacatatgttacatagatgattattttgttcaggattccattctgtttaaccaatataagatcatttttctatgttgcagttaaaaggaatcgaacgtgaaaaaagtgatagttttagacttcttaagtcttatgaattactacaagttgagaaaaagaacattgtaattggcagatacatcatacaactccatctccgtccagatatgaattctcaagctggaaacagaatgagaattgaagaatcaattatgtacgctaaagtgaagaatcgcaaatgaaaaaacagttttggcagcaaaagaaagtgaaaacaaaggtaaatagagaaatagctgaatcatactgtttaagaaaggctaagtcactctttgtcataattgcaaaaactaaagtatggcacaattaaagcaagtgttagattttgtagctcattgttttttagtgatcaccggttttctaagaatatatagaatggatctaataatgtaagataagttacttcgataataaaacagagaaatttcaaattctaatctaaagaaatacctaagatggatccgaaaattgcataaagtccatttttcatcaacatcatcagggactatataacatatgtacttaacacaaaatattcaaagatcacataattaatctttaatctattatgagtccaatatctctaaccactggcaaattggttgagtgaaaacataatgcatcagaaatttatatgacatattacatcagaaactttaaactcgacttgagaatcctcgaagcaaaaacaatatgtaaccgagcattggtggcacttttgcaaatattatggactttatttagaaattttcgtacaaaaccccgatacttttaaattgtaataataaaccctaatttcgggtaaaattttaaattatttacctttagggacctataatgatactgaaccctaattaacaaaacccccttttggtctctgtaatcgtaagctttcaatcaaaaacccaaatctctctgttcgcagagaggatcaattcgtgattcagagaatcaaacttactgtgagagagagataacgaagatggacgctatgaggaagcaactcgatgtgctcatgggagctaacagaaacggcgatgtcactgaggtcaatcgcaaatactacgaccgcgatgtttgccgtctttacctctctggtctctgccctcacgagcttttccaattgacggttcgtatttatattcatcttcttcgatacccaattcttttcttcttcttttgctcaatggctttctcattagtatcttggaaaaaaacttaatttcctcatcctttgtgagctttgattcataaagttttagtattggtatgtgttaattgatgtagttattttggataatgttaaaaatcctagcttgatttgggggaggttgttgatttaggtaacaatgtggctaatttggtttatgagtagtctttgacatgtttgttattattatcagaaaatggatatgggtccttgcccaaaggtgcactctttgcagctgaggaaagagtatcctttttttaatgaatgtaaagtctttttcttcttcgtgtgttgttatttctaaagtccacactagttattcagtaggatgttatttcgctcctctactgttttgctttaactcgtctttagatataaagatgcaaaggcaaaaggtgttgacaactatgatagggaattggaagatgcgatagataggcttattgttgagtgtgataggaagattggtagggctcttaatcgtcttcaagaagaggatgccaaagctgccattgcaatttctgtcacagaatttactcaggtgatgatctaagtttcaattcgttgagtttttttttgcgttttttttttcaactcaagcttttttttcatcatcatatcatcgctgtatcgcagtcacctgaaattcttgaattatcgaagcaaatcaaagaaaagatgaaggaagcagacctg

SEQ ID NO: 37089 - DNA, 2816 bp, Arabidopsis thaliana landsberg
  unsure (1)..(2816): unsure at all n locations
cagattgatagggaatggtatcagatcatgacagtgtggttgagtagagtaatctaggcatggtgcagttttacttcaatttcattgactacgcaacagataactagcaacgaggacactgagtttacccggtgaaccaaaacgcttacaaggctatcttatcattattccctatgcatatgcaacagtcctaaatgaaacactctaaactcaatcctaaatgtaatgcaactacatgaacactctgtttttctgaaatcattttctgaaaattttcaaattttattcgtttttctatgccttagatgaatgcagactcaagagtatatacaatgcaacacacacttcctgatccctcccccaaacttaaatcacacagtccactgtgtgactaaacttggaagagagtcctcaagacaaatcaaatcacagaaacaaaataaaaaaacaaatcacaagagatggtataatacaatggtgaagtgaggtgcttacctcagtcgaataatgaacgaagttggtcgtcaatagctgcctgtgattgctccgaggccatcgaagaatctccctgttgtgtatcagcttccctctaggggtactcgacctctgctccttcgtcacggccagcaccgctcttatgatactcgacctctcttcttctgttgcggccagcaccgcggtcgagtgaattactgacatggagacgttgtgattgcatcattcgttatactcgatcacatcgtcattcggtccctgtagagtgtggtcgagtgatttcatggggtggagaagccagaacaatgtcgagtgtccttgattgctttgtggtcgagtgtattgctgttctctcaaagctagaatccgtttccctcaaatcttcatacttatctcctgaaaacactaacaaaatgcatcaaaaaacaagggaaattaaggatatgtacaaagataggcatgggacttcctcccaagtgagcttgttctaggtctctagcttgactcctcatactcattaagaagaaaatgggtgatagagacgattgacatagtcctctcggaatctcatcttcgaagaatatgtttcctatttttgcacattccctttgttctttgattctttccacttggtgcattggaaaaaagtttatcaaaacctctcgatggaaaaatatagtgttggaaatttcatggaagtaacacaactttattaccatgtgttatgctaatgcagcgtgggaagacttgtccacatcgactttggtttcattttggaaacttcgcctggtgggaacatgcgattcgagagtgctcatttcaaactgagccacgaaatgactcagttgctagatccctcgggtgttatgaaaagcaaaacatggcatcagtttgtgagcttgtgcgtcaaggggtacttagctgctcggcggcagatggatggaatcatcagcacggtgcaaatgatgctagaaagtgggttgccttgctttagcagaggagatccaattggtaatcttaggaaaagatttcacccagaaatgagcgaacgtgaagctgcacacttcatgattcatgtatgtacggacgcatataacaagtggactactgctggatacgacttgattcagtatttgcaacaaggcatcgagaagtaagaagaagaagagggaacttaatgatatccgaaaccagagttatataatttgcaggtaaaaaaagtttaagccatcgagtattccgatttgataattgttatctcctctcggttgggacattctgactaattgattacttaagaggaacttgaggattattatttttatgtttttgtcgtaggattttgctatgcacaaaaaaaaaagtaacaaaagagagaggtnggagtgttgtggtgtgggaattttcgataacttgagatgtaagctactattatatatgatctctgattattcttgggtggaaatggtcacgtgtttctttataactccatgcgttgtataaaacaatttatttgatttaatgccggatgatatactcattacaagtatatcatcccgcatacaccagaacccaatttagttctttcagttcctctgcatcagaaatgaacaaaaatgtattctattaacatgtagaggtatttgtattcagtggatgaacactttctggttgctcattccgcttttctggttactcattccgcttcccggatactctcgtttggcttttctgaaatagaggaattctgaagctgccctaacaggtatccatcagtctgtgagcttgttcatctctctgagattccttctcgaggtatccatctaacttggccaatgataaattcgttattcagtggctcgtaaactgaaccaaggaaacgagttagtattcggatcatggaacttatgcactccatcgcaatattgttgatcattcaacaactttggaatctctcctgaatggcaattgactcgggagtctgtagtgcatacttaaattcaaattgatttttagaacaataataacaattttttaagaaaataaaatttaaaatttcgaaaaaacttaccattcagtgtagaaaatgtctgtaagtcaactaatgactatgagtgacggagttaaaagaaaaaaaaaaaaaagagatagagtacagagacaatatagaacgacagaacaaacagatctatcagtttactgactacagagaggatttgaactgagaatcgaagaaagtctctgagggttcatctatggaaccggttataatcggtgcgctgattttggatgttcacgccaagccttcgaccacaccaatc

SEQ ID NO: 37090 - DNA, 2303 bp, Arabidopsis thaliana landsberg
tcagaaaatttgactgcacaaattgcaagaaatacaagaactggcatgcatctatataaaacaagattatacacaacacaacacgtatttttccgtgtttagttttgaataagtctagtcttacaattgcaatttgattcggttcgttctaattaagttggatctaagtatcagcaaattttttggcaatgaaatctgtatacattaaagttcagaacatttaggagtaatatatacgtacaaaatgcaaataagaaaatcagtgctgttttggcggacagaaaaaacaatacgcactgcaagaaagaggcttcaagcatgatgaaaaaagcccacaatgttagaggggttgagactggctagatgaaaactccctaagaagtaattcaacttcttcaacaacaccaagcttcttaaaccactgagccaacacagcagaagcttctttccctaacattatagagtctttctcaagctctaccaagaatcctaacgcttcatttagcttttcttccttctcatatgcagccaatacaagagccacacacttatcagtagctttgattcccgcttttctcatattctcaaacgccaaacgagcattctggctttgacccgagacactgtatgcgtttatgagcagtccacatagctttacatcaggagtaatacctgcaatttgaactgcatcaaaaacccgcttagctccttccgcgtctccgcccatagagtaatctctcaacaatgccttgtaaacctctcttcccgcacatatctcttgggagtccatttctctaagtagagactctcctttctcggggacaccagctctgatgtaggccataatcattgaaccataggatcggtagtctagtggttccccaagcaatttgatctcgttgaaagtttcttcagccaatttatgacagcctgccttgctgtacaactgaaccattgcagtaagggtcacctgatcaataagaaagcctcgatttttcatggaaagaagagttctttcagcgtcttctacttggtttagcttcccataataatggatgatcttggtataatcacgggcattcgcttcaaaggaatcttggagcagcgaaaattcagccacctaaggagatgcaggtaacacgactgaatgatttaaacgtaatcaagaaggtgacaatagataaactcggatagcaaattagcatgagttagatacatatgaaagatcaatcgagcatggaaggaggaaagcaagtaccttgatataaaacggagagtcaagattcttcaactctttaagaatagaaagccagtcagctctaatggggttcatcctcctaagccaagcacccaacaaatcgcaaaagcttcccttttcgggggagaagcaaataatttgccgcataagcgcttgacaacgttttgacatcttaataggaatccgagtgattgcctcgtcttgttcttctgtcagattcagaccaacatcagcccaattaaaactacggctttgctctgcatcttccttctccacaacttcgccaatggccagactcgcattacatttgcaactacagagcctattaagatgggattctacaagtaatgggtttcgtctaaacatgcgatggtaaagcctatgccttgcaataactaatggacatttcaagccgaagctcaacactgcgctgcagctataaattcccattgtatacctcaagaactaaaagagaaaaacctaaatttggcggccgtatgatttcacatgaacctaatctctagaaaacaagtcatgaattcaaaggcctaattgaggatcatacaagtacagaattgagcttctctgatgattacttacaaaaagcagagctcaggagaaactggagataaaggagatgagccaagcaaagttcatagacagagctggtgtggatagattagaatttagagcggtggagatgactctgttagctttctttgctctgctctacttctgtctggcggattagacaacactagagaccacttcactatgggccttttattaatattgggcctccgttacaattatggcccattattccgcaaatgaaattcaatggcgataatgaaattcaaaaactattgttgaaggtgtttttctctttactcgcaaaacaaatttacatatttgttgggaattaatcatgggtgtttttcgatatcaccactattaccaaaaccaatctctttaggataaataagctagaaagatcatgacaaaggggagtccaccgggacggtccccagatacagaagtcgtc

SEQ ID NO: 37091 - DNA, 2355 bp, Arabidopsis thaliana landsberg
agaaacaagatacgaggattctaccagtacactactcagacaactatttctcactagttccaggtgaatcaatgtcttttaagatctcatttgcagctcctacaggcatgaagaagtctcctcgtgttatgcttcagggctggaactaccctgataggtttagtgtttttggttgagactattcatgtttcatgtttgttacataactgcctgtaatctcgaacctttcaataaatgaaacttgcacaggttttagcaatttgtagcgcacttaaatatgcacccgacactcacattacacacatctaataccttcaacaaccagttcagaatcatatattcagaccaaacctcgtgtctacttttcatcacagcaagataagagttacagatatatatactagttgagcaatcaaaaatcaaaaagccggagcctttctgtgcaagtcattttcctggttgatgcaaacctcgacttctctctttgtcggctcatgcctttgtctcttgggaatgatcccaaccctgctgggcgcattatttctgcaataacataaaccacaagtcaacttaccaagcttacaaaaagtggatgctacaatgtcatgtttctcaacattacatgattgcatgttacagttggtcaatgcaaagcgccgaattctaaattctaaatatgtaaaacttaaagagaatctttgacatttttttgctagattaataagagtgacataccttgtcgctttctttccagttcttgatcaagctcttccttccacttcttctctatctctgacaaagcaacactgcaaagccaaaaccagccaattcaagcagattcaggaatgaaacaagaagcctagactaagtgacagatttaaatcgttgctggtcaatagctaggctgaatttaaactctacacgtttggagttgggtgatcatagcttaagataagcatgaatgggacttatttctgtcttcttgattcctaccgagtttctaaaagaggaaattaaggaaatgtctaaatccttaaaacttaaatcccaattatcgcagccactaaccactggcttaattcctgctcagtgtcaacaacgagacccctccagtctgtgacccgtgctgatacaccatcctgtgaagcttcatcacctccattgttaatattcaattcacgactacctccacttcctgggctcttggaacaactagttgcgtctgttgctcttgaaggtgaaccaccaagagggccccgactcggtgacctgctttttggaggcagtttcaggaaaccacgagcagtgtcctctcttttactgttacttaaattactctccatacaactgggagagaatgtgatcaaactattgtagaattcttcatagagaggagtctgtaacttctttagatctgcagcatgagacaaatacatattcactgccatgttagtgatttacgtagaaaatgcagtgaggacaatgaataatgtagtataatgtgcatgagggaccttctcatctaagaaagctttaatttttgactcggtcagctcatcatgatgctctgggtatgaaggtagggcacactccatgctcattgtcgactcttatctctccattaccaggactttcgtaaaatctggacttcaaagcattggacatctcactgatgtgatcacacctctgttcacatagattagataagtaatgctgacaaaacaaattgaaacatgatccaaacaagagttgagacttgatcagccattggaattctaaatgagaaatcatatgtatgctaccttcttcagatgacaatctttttcaagggtagaactcatttctccgtcaaatgtcaagaaattctcatcatctatcaaacacatatcgtcttcatcacctccattatcattttgttgccataaatttttgttttggattgatttcacaggatctacaagtgaataattcaaactgccaaagttacacatgtcacctacatcgtcgcaagtagaatctggactgaaacaaaggaaacagacaataaaccatcaaaatctttcataaacccacaaaataatcttagaaattttggtttcagccagatattcagaacttacgtgctcttggtgttatttatctgtaacggtagtggagtgctaagattgttctggaaaataacaaaaataattttatcaagatggcttcaagaaaaagttatatgatattcataagacggttaacatccacccaccaggacagaaccaagatcagtagaagcagactccttgtgttttcccataacaaaaggatgctgcgaataaaacaaaatcaggaattttactcaaaactttc

SEQ ID NO: 37092 - DNA, 1709 bp, Arabidopsis thaliana landsberg
tcttcaagcacgggtgtacctgcgtatatgtaatctttgcccatctctccaatgtactcgaagaggaaggagagagatttcagaacaccattttggacgtttagctctggaacacggtactcattcatcaaagcaggtaagacggtgaagggagagcatgtttcagcgactatggcgattgcaactgtggtgcaaacacggttctgacgttcttggactttgagattgttaagcaacgtggctagaacgtcttgtggcccaatggctttggcaatgtacccaaaagtgttgacagtagcacgacgaatacctttcttatgagctttaagcatttcaagaagctcgaaacagattctcatccattctcttgctggaacaaactcggcaccacgatcagcaatcctaccaacaagatcgatacaattctcttgcactttctcatgcctattcttcaaaatcggggtcagccttggtagaagatccttaataggaggagtcatcttcgtcataccaatcacattgactatagcttttaaagccccaagaatcgatcccaagacttctgggtactcttctccaagatattcatacaaaacaacacctagatgtcccatcaactgttcctctccgcattgcttcataacaactgcaattcgagaaatcagatcagcagcttgctgtcttacctttgcactcttgttgttcaatcgccacttgatggtaccacagatctggggaagataaggctttactcgctgaccaagagcatttactacagcaccgaatccattaagcatcacattagcatcgtcactagtctgttcttgaaaagcataaagaatgccatctatgagcagttcctccaacctcgcatcaatatcagatgctcctaagtttgtgacaaccttatcaatggtttccataaccatacgtcgatactgttcactctcgtccttgagatcttcaacaactcttcccacaatatctgcaacaccaaccttgttcgcaacctccacagtagtttcaacaagctgcttatagtttctcctctccagagccattttccttgtccagaaattcctgaaaaactcgggcagaatatcactacgaatgtattccggttcaacaccctctgtacttacacactgtttcaccaccttgaggacgatcttcttcatctcttcatcaggcgactggaactcacgaatcaagataaccatgacttcttttgtatagtagctcgcatatatagcatccatcaagggaatgataaaaccgatcgccttcaagaaagcagctaaaactttaccacggtgcgacctaatacctttccacaaaggcttcagaacagaatcaaagctctcaataccatatggagcagcagcttcagcaagagcagccagtgacaaagcggtaatagtcctaaccttctggttttcatcactaagaccatgttcgataatctctaccaaagaccttaagtgaggcaggacagcacaaccaattagtatcgcaatctgctgaacaatcttgattccagtatgccgtgcctgccatgaccttttactctggcacacagctttcaggaaaggcaagagtgcagggattccaagagctgaagccaccacactgaaagctctcgctgttgtgttcctcacatattcatcgatgttgtcaatatcaggacgcatagctgcaatcatagaggc

SEQ ID NO: 37093 - DNA, 1053 bp, Arabidopsis thaliana landsberg
actgatgctgcaagagtcgctgagctctctggagaaaattgttgactcgagctttcaattgtctgcatgaccaaaacctttcatcaagaatgcaaaaagggggaaaaaaaaaagatatgaaagtgagtaccagtcggagaatctgatgagatctggagctaatctcatttaaagatgtctctccaatcttcctctgagctgcaaaaaaatccacaaattcaatatatacctagttgttggtaataactaaattatgaagaaagaaagaagaaataagttttgctcaagtactctcgcatatagaaagaagttcctcaagatgactcctgtctctgagagtctcctctctaagtttctcaacgaccgttcctctctatcaaagttgcaaatagtaatatcagtaatcaatttagtagctaatgatgattagagtgttattaatggcgtgataaagaagttaagctgacctctggatcatctaaaagcctaagtggagtgctactatcttcacaaaggagatcccttacagcttcattgtagatttccatggctgagaattttagagtgaattttctttcttgtttatgctaaaggaaacaacagaggatctctcagagacagaaatttagatacatggcagaaaacaaaaagttaggttcatgtatgtaaccttgtcaatgtaagcaaatatatcgtccattgcaaattcagtgattccactcatggtgtacgttttcccactacttgtctgtccatacgcgaaaatgctcgctgcaacacaagaatagtatttatcaaaatgattgatcataaggagagatgcaacaaacctacctatttcttacagttaattccggagaggacacaaagtgcaacttcttttgctccatcatcgtaaacttgcttcgtggggcattcgaatccaaataccttgtctataacacatttttaaatgattcatataatagtatacctcaaatcaaaatggttagaaagagatgcaattcaaattcttaccatatgtgtaggaagacttatcaggcaaattatgga

SEQ ID NO: 37094 - DNA, 1920 bp, Arabidopsis thaliana landsberg
  unsure (1)..(1920): unsure at all n locations
acgaatgtttttgaaaagaggaaagagagtttgttttggttctttcataccgcatccataagattcttgatttctgattccatcagttcagatccgactctcttcaaacccgctttgagctcttcaaaagtaatcgttccgctgttgtctgtgtctatcatcttgaacaattcctttagacctccaatttcttcctctgaaagtctctcagcaattacctgtgggaaaatatcacttgtgttcagataaacaagaaaatggagtgggtataaggaaaagacaatgtagattactcgaactcatacccgtaaggccattttcttaatcttattcatttgagaaaactgctttagacgagataagactgctggatcaagaggcttgtctggtgctgcttgttcatcgacaatccatgggtgacctataacattcagaggaaactcaatactcattatttaccataaaaacaattaaaacagttgctgactcccaatgaacatcatagaatgaacatacacaaggcttcatgtgcagaaatgcgtttcttggggctcctttcgagcattttatagatcaaatctttagcagcttctgagatagtaggccacgggtcagacttgaaaactaacttcccttgcaatatctgtctaaagattccagactcactctctgcaatgcccaagagaaaagaatgcatcattcaaacaaaaacgcgaaacttgtaaatagaaaatactctactttttagtagactaacctgcccagaagggaggaacaccgctgagtaaaatgtagaggataacaccagcactccacacatctatttcgggtccataacatttctttagcacctctggtgcaacatagtacggacttccaactacgtcatataaatattgtcctgaagtagcaaccaaaaaaactaattagcagataaaccgacattgagcatacccatctggatctaaagaaatcacagatccaagccagacacacaaatgcagaataatttcgatctacacattaagtttcagagactcctcaatgaagaacatctataaaacaatgttccctctaacaaagaaacaatgctcaaacagcaaaatttgaatccaaccaaacatatcattaaacctacacataccaataacttatttcaattttcaattaagggccaatgggagactcctcaatgaagaacaactatacaaagcaagctccctaactacatcttatagacattgtcctgaagagtaaacaaaaaccaattagccatacctaattaggtttcaaagagtcacagatacaagccacaatgcacaaatgcagaattattccaatcaacacatcaagcaataaagaacacctatatatacaatgaaacaatgctcaagcagcaaactttgaattcaacaaaacaaatcatcaagtaactaaacaaacgaatgatttgatcaaatgcaaattattcccaatcagagactcctcaatgaagaacatctccctaactacatcttacagataattgtcctgaagagtaaacaaaaaccaattagacgatgaaccaccaacaataaggtttcaaagaatcacagatacaagccacaatgctcaaatgcagaatcattccaatcaacacataaagtttcaagactcaatgaagatacaaaacaaagttcccttaagcaacaaactttgaatcataatcaaaccaaaacaccaattgcaagattaatcaatcaaccaaaagagaaaaaatcaaacctggcttatagaagacagacaaaccaaaatcggtagccttaagcttagcatcatctttaggactatcaaacaagacattctcaggtttgagatctctatgcataacacccagagaatgacaagcnnctcacacaccaagaatcgtcttaataagct

SEQ ID NO: 37095 - DNA, 2336 bp, Arabidopsis thaliana landsberg
  unsure (1)..(2336): unsure at all n locations
gcggctcaaaattttgagtttccaactttgcctacaatttttttacaaaattcgactgttgagtgaaacgctcaaggttaacctgcagaaacaacaaaacagatggttgggcagattagtaaatcacattgtacttattgttcaaaccttttgtttgttcacactgctatgttcatcaggtgtgcaagctctgatatcgctgaccatagcttgtagatcattgatttctctgcaggagaatggcgagaagactcatcagggtatggggaaaatgagaactcatttggccatataccaggaaaaacccaagaatcatcaaatcagatttgctaacctactaagctttgcattctcttccaggcaagaaccaaggttacttctgcatttctcaagctcgtaacaggtcttttttaactgcaatggaaaagacgttaagaaaatgaaattgaaaatacgtgatgcacaagaaacaagagaaagaaagtgactcgacctcctcctgtagagaacaattttctttgctcatacgtgatgcaccctgtgccatacgaaatacaacaagatattattgacaagcaaccaatgaagcacaatcctgctggatattaagagatattaacatatagaaagaggtaaatagatgtaacctgtggctctattccatcatcaacatgtttttgccagtcagagttttcatcaagaaactggaagagctgcatgagcaatagctaaggttaaggatggtattgcaatcgaaaagaagaatgaatcgataccaggatgttgtgctaactagaggtacctggtttcgcagatttgagacttcgcccagtagaatttctctctcaccttcctcataaaactcttgaaatctgcaagtaccataataacaaaactttttatatataaaaaagcacacattatctttaacgtcggcatcacatgtttttgaagatttatcaccttctaagttgatccagtagccttatgttttccagggcaaagcgagtcagttcaggatttttatcaattttagcttgaagcagctgaatctcttctgacaacacgttattctcttccagcaaaaaagaatctgcagatatatggttgccaagaagtgattctagcctctgtatcttgtcttctcgaaacctgagcatcatttttgtgctcctagtatcttcctccctttgtcgaacctaaagttaaatgatcataaatggattcaggcgatatctgaaacataagtgggaatgggaacagtgtaggtgaaaaagaattaccaaacggtttagatgctctatctccgcttcaagcttcttaattgaagcatcagccacatgttctcgtcttaatgagccagcaagtgttatctccaaagatttcaactgatatataaacatatacagatttttagtggaatcccaagacagaggcatatgaatcctcagtaaagcctaacatactttctcaagttgatatacctgctttctagacatccttacacagcctccagattcatacacaagcaagttaccagcctgctgttgtcctgtctcatgcattacacttgatggcgaatcgacttgtgattctgcgaagttggctgttgctgatccaaatgacaacgccctggatatgttctggcgcttgaggagggaaagctcttcctgttccgcagacacaaaaaattgtcttagcgttattacagcttcacataacgagcacctaacggcagtttaaaatgttacacgcctttaaaagtcggatttgacggcgtaattccaggacatcctcgnnnnnnnnnnnnnnnnnnnnnnnnnnaataatttgatacataatagttatccaaaggttattcatgatttatctccctcaaaacttacaatatggattacagtgcaaacttacattgttctggattagctttgctctctgagcaaatttaagagtgttgagcgtctctgctgcacaactgtcagtgataaacgagagaagcgataagttttttactaactatacgagttaatgtaacactagatcaaattagctttgaaagaatacctgacggaaggactggcattagcaataatcattgttttagaattgccacccagtgagtcctgtagataaaataattaccgttataatgctataaaacgatagatatcaacttcagtgaagaaagccaatgaatttagatttaacctgaagaagaaatgtcagcctggaatcacgatatggaatatgccttggtttaccatttgccacatccacaagaaccatattacatgtctgncatcaataataacgaatagtcaaattaacataacagc

SEQ ID NO: 37096 - DNA, 1694 bp, Arabidopsis thaliana landsberg
ccacgtctctttgcttgttcttcatctccaccatcactagttcatttgttagccggcgaactttaacgacgacattagctactccatgtggaccttcaagctttatcgctctctccttcttcttcgcgattctcaaatttaactgcttcgcaacttcctcgaccttcctcataataacggccgtactctcatcggatacaaactggtcgcaatgatccggcgtcacgaaatttccaaacaaaccggagagattcgagctcgacgccgaagaaatcaaatcgaacgcgtttagaattttaccgttttcttccagatcgtaatcatcggcttggattccgatgatttcgcttggatctactccatgattgaaccacggatcctttagaatctcctccacggtgattcgcagttccggatttggctccaagagacggcggaggagtttccgcagatctgaagatgtccaatccggtaacttgtattgagccttgtggattttccggtagagtcccatgatgtttggatcacgaaacggcaagtagcctgcgttgagaagaaacaaaacgacgccgcatgaccaaatatcagctttagaaccgtcgtagcctttcttcaaaagaagctccggtgctacgtaagccggagttccacagagcgtatgtagcattccgtcggggtggatctgctccttcatcgcactgagaccgaagtctgaaaccttcagatctcgattctcgtcgaggaggagattctccggcttcaaatcacggtggaaaactcctcttgcgtggcagtatctcacggcggagatcaattgccggaaatatttccggctaagactctctgtgaaacggttgctggtgactcttgagaagagctcaccacctttggctagctccatgacgaagtagatcttcgtctttgtggcgaggacttcggagaggagcacgatatgaggatgacggaggcggcgcatgacagatatttctctcttaacgtgcgccgttaaaccgtctttcaaacgttttttttgtacgactttgatcgcaacgctttcgccgccgttttgaagatcctccgcttggtagactttggcaaacgcgccgctaccgaggagcttaccgagatcgtacttaccgaacaaagccgacttattatcatctccggtgacgttaacaatgattgattcggaagaattagagtcttcggccattaacaaacaaacaaaaaaaacagagcaaaaaaacagagtaaagagaaacagtctaggaattgtaaaagacatgcgcgcggtgcctcttcttattgaaattcctcaacttgccacgtaagtaagctattattttaaacaaagattttaaaatagtttgactttattataaaatgcattaaacaaataaatgaaagaaacaatcttcacaaaagacaatttcaaaatgcgataacattttcgatttttactaatttgaattagttgcgatatatcaaccaggttagagatagagtcattttctcctgaaagtaatttacgattcaaggaattttcatgattctttccccaatgtgtggttcatgttgttgttaccaaacatctgccttgtcaggtaaaccaaaaccttttaattccaggggggaattaaagtcttaattatttggttttggaggagcctgggaaaactcgacatatatttatt

SEQ ID NO: 37097 - DNA, 2329 bp, Arabidopsis thaliana landsberg
acacacacatccctcgtcggtacagaattaaacacttcacgggacttttcaagatttccgcatttcgaatacatatgaagcagtgcgcttgtaacatgaaaattcatcctaataccgtgcttttcgatgtagctatggatccatctacctaattccagtgcccctacctgagcacaagctgataaagtacttaccagtgtgatctggttcagcttcatgttcttctgaagttgcagctcatggaacactattaatgcctcattaggtttaccattctgctcataagcagatataagagcattccaagcaacaatatctttctgaggcatagaattaagaacctctctagctgcttcgtagtcttctgaaattgcatacccatcaagcattgttgtccatgtaacgttatctttcttctccattgcatcaaacagtcttttagcatcctctatgcttccacactttgtgtacatatcaagcatcgcattagccaatgtcaagttcacgttaaccctgttttcttcgatataagaacaaacctgcctcccaaactctaaattccgtatctttgcacaagcagacaagacaccaaccattgtcacatgacttgccttaacgtcctctgactccatcttcttaaaaagctccaaagctttatctggagaacccttttgcacaaacccattaatcatcgaattccatgaaacaacatccttttctttgatcgtagtaaacactttacaagctgaatctaaatccccacaagagaaataacaatgtatcaaagaattagcaacgaaaacatcacttccaactgctgacttaacagccatcccatgaagagattgacccaaagacaaagatgaaacttctgcagctgccttaatgaggaaagggaaagtgtacttatttggataacactgactctccgaaaccatatccaagaaagcccagatgctaagaacagggtctggtccagaagcgtaagcacggataagagtattccaagcgaaagaatttggtttaggaatttcatcaaacaccttgcgtgcatactcgagactagcgaaggaagagagcgcagccattgcgaatagcttgctagctgagtaaggatcggaaaacgtaccggtacggatcatgtgaccatgggtttgctttagttgtcggagagacacacatcggtcgatcagagaaatgtggcgggagcgttcgttattggtagttggttgattcggattgaagaagtttggatgacgtggcagagagagaggttgtgctgtggagaagctagccatatgagtatttttgcgactctgtcttgctacttttttttccctacaaaactatatagtagatattcttatgaataagttattatatgacataagctcactaaaccaaaaaaaaaagttttgattaaaattcatctatatctcaaattaaatggaattcactaactcataattttgctagaatgatttagaggcaaactttgtttcatttgtagtgttaatttagcggtagacacattgttatacatatccttttgctttcaatcaaatcttttaaaagtaggaaaacatatataattgcatcacatctcttcataattagaatcaacgagttggtgttgtgtcgcaatcatattatgtatcaattattcgatttttgttgtgaattttcattatattgcatttggtcaacttgggggatccatcaaccttggtaaccacaaagactaatatatttcgatcgtatatttataggtgtttagaatctttattatcgtgttttacttatcatatctcttatacctaattaaattttagtatgtgacacttttaattgctggatacctttctgtttttatttttgatccttaaaataggtgaagatatacaagatggaagcaactatgggaattgggatcatggtttcctacaaaacatggaatttggagagttttatgaagactcagtccacgactaaaaaagaaaaacaggtaaagcattcctagccgaaccatggtcgccacacacccaattacatggaacgacaatgtttctatcaggtgacctatgaaatatccaccgggacaaacgaatatccaccgtccgtcatattggaatgtgtaaagagtcatatggtttgactatccctcagaggcagatgcagcaagaaaatatgatccgaaggtgtagagttttgttcatccttccctgacattcattgtaataatatctcgaactgtaatatgttcatccccaaagctatagaaaaatgtaaatcctcattttgttaccctatgaccacgtcttagtagatc

SEQ ID NO: 37098 - DNA, 1983 bp, Arabidopsis thaliana landsberg
cttgaagaatttcaaatctatcattcatcacagcaaaggaagagcgttatggccattcacactcacatcttgaatacatacagggcaatacttgagacactctgctacaagatttacgtctcctctaatcgctaagagatggaaaggtgtgattccttctctccctttaacgcgaacaagtccgggatcacgccaaagcagccatgttataaactctctatgatctttttccacagcaagatgcaatggactgtagccacttgtgttcagctttctggcaaacgatggcttaagattcagcatctccatggcaaatggaatgttgtcagaagctgcagctacatggagcggagtgttaacaaatggcacggcattgatgttatcaagaatgtaaggattctcctcaatcagagcataaaagtcattgatgcttccggtttcagcagcatgttgtagtctcggatccatggtgagagagagagggagcttttgatcagaaaaactctgaattcaagaaaaatgtttgtgatctaaattcagcaagaggacaacaaagaaattgtctttacctagaaccatcaaacaaatgtaagaaagaataaagaaacagagttcaaagaccgaagaacccacatgtacatgtgaagaagagacaatttaaaaacaagtgggactcttttatatggcagctggatatttcttcatggtatcacactcatttgatttgacattcacaacacaaatttcaaaggctcacgcttgatgaagcatattgaacgtactaacatgtatatagaaacaaactacctataattacaacattattatgatacaagaagaagaagtcagaagggacataacatatttttaatgtttgcacctctgcattctcaaagtccgctgagttgttgtatcaaactgtcaccactgcttacgaaagcttccatcaagatatggagaggaaaaagcaggtacaagggaaagcaaacagagagaaccagtaaggcatgcatactcggtagagagagcctctctttgcctcatttacgggatcatcggtaaggacttggacaagtcaaatctattttcatatccagagcatctgaccattaacactcacattttggatacattaaagttactcgacactctacctcaagattgacagtaagcacggattctctcattaatcaaagcataaaagtcaccgatgctaccagattcagcagcctgttgaggccttggatccatagaaaatgagcttctggcagaaacgtacttattctaaactctaaagtaatgagtgggtttattaaagtttgttgctttgaaaggcccatcgagtatattcccaaaaggattagactagtcgtctttatacatacagtacatctcatatataccaaccaaacctctctctgcatctttattaacacaaaattccaaaagattaaatgttgtcgaagctccctacacagcgacacttgcacctctctccctcctctccctccatggaaaccgtcgggcgtccacgtggcagacctcgaggttccaaaaacaaacctaaagctccaatctttgtcaccattgaccctcctatgagtccttacatcctcgaagtgccatccggaaacgatgtcgttgaagccctaaaccgtttctgccgcggtaaagccatcggcttttgcgtcctcagtggctcaggctccgttgctgatgtcactttgcgtcagccttctccggcagctcctggctcaaccattactttccacggaaagttcgatcttctctctgtctccgccactttcctccctcctctacctcctacctccttgtcccctcccgtctccaatttcttcaccgtctctctcgccggacctcaggggaaagtcatcggtggattcgtcgctggtcctctcgttgccgccggaactgtttacttcgtcgccactagtttcaagaacccttcctatcaccgttacc

SEQ ID NO: 37099 - DNA, 1755 bp, Arabidopsis thaliana landsberg
aaatttcttatctgttggccccgagaagttaaaatcccatattttcgactcagtcaatatatattgaaaacattgaaagggctactgtttcatcttactcttcaaacctttggcatgctgtattaaagataattcaaccaaacaagacatatctccacaaaaagtgtttggtctcggtaggaattccaaccattcatgttttcaaatacagagctcttgtacttattcatggtcctctatattttaagtgacgctttgaacttgtatttggaactagcagatccgacacatttaaatttgagaatctgtctttcccgtttcaaccaccaattattccaattcctctatagattttccatcatattacatcataagaaaaaaagaaacagtgttttgactttgatatagatcagaaacctttattttaaagcctttcattgcaactactctcacttagttttgacagcataactccaaaaacgagagacaaggaggcatagatcttatatacataaaccgcaaaataaaattaaaaaaacacaaacggattcaagttaaagccctaagaggaccagagtctgaaacagccgaataataaaaataaaaaaaagcattcatcatccacacattatataaatcatttcaatcttcaagttatgatcctgatgacgcatattgagctttggtcatcatccaagctcactcaaaataccaccaccaatgctttctctgcctataccttcttttctcttttggttacctttttttttttaacttaattctttttttttttttgaatttttcaaatgtcattttttaactttttttttacttttttcttttttccatattaaaaattcacttaccaaaagcttctggactctctcgtctgtccaacgcaacaatttgagttgaaataccccgttttcttcacgtcaatagcctagaggacgttcacacagtggactttaagcttaacctgcttgtgctataaaagcaccaatgaaaccaaatacacaacaagaataacataaagaaatcatgactttgcataacacacatgccttatctgtgacttctggaaagattctgacctagctctgtcttccgacttctccatcccgctcaccaaagagtttgactaagacaagacaagattacgagcaacaacataagttagttttattccttacaaaacttaatcaaagagagaaaagtctaattcaataagtttcaagcggagttgctttgcagtgcaggacctgccaatcatatatatgcactagttaggcggtatgcagcagaaatcacacaaggcaagttataacacagcagaaacattgacctcttaagtagtactgtttatggacaaccatcaaatttcaaacttagctccatcctatgtttcttgacactatgaaaccagtatgagattccctgttgtgaggagaattgatgctcgcatatcatgggacattcatttggaaaccagctgttaaatatactcaacagagctcatcctacgataactactgtgacgtacctcaataacccgcatgactcacgacatgccgctgtgagagtacaagctagtcttttccataagacctgaatttgcagcctgcacccctagaccctgataaaactcatgattactatgcgcggtatgttcaaacaattattgccagtacttgatgacactccccacccccccgacttttacaaaaagaactatagaacttacctcatactcac

SEQ ID NO: 37100 - DNA, 999 bp, Arabidopsis thaliana landsberg
gcacattaagccttaaaatgtgtatagtccttgtacgagcttgtgtgactgtctaataaagaaggaggatcatagatttcatcagaaaacagcgaataacaagcactcaaaagtcaaagcgcgcgcgcgcacacacacacaaaaaacaatccaaagctaattgattcatcaatggcgatgtcggaaacatacgtgacggatgtgcctcttaagggatcgcggagaaacactataagaggtggaggagcgagaaccacctcgtccctgaagctatcggccacctcatccaaggtgtcaccgtccatgacggcgattgggactctcacggcaccatcaaaatctggaactacactcgtggttcgtatttatactctttttctctttatataatgatacaaatgacttaaagggtacacctagctatatgtgatattcatgagtttcccttacaagttatttgttttaacatggaaaagtagggtttggttatggttagatataaatgtgtatgttgattagtatacaatcttgtggtgtttgcgtgtgtggtgaagatgggaaagaggaagtattgaaggagaggatagagatggacgacgagaatatggcggtgacgatcaatggactcgatggtcacgtcatggaggtcctcaaggtttatgtcacgacgttacatttcatccccgagtccaaagatggctgcgtctgcaaaattactatggtctgggagaaacgcaccgaagactccccagagcccatcgaattcatgaagttcgtggaacagatgattgctcacatggacgaccacatcctccaaaaccaggaatgatggatcgatgcttaatcatcatcacatcctccttttatttatcttaattaatgtgtgtccatctcgtacatgatattaatatcatcatggtgttgtatgtccaacgtttatttataaaagtattgttgttcgttttttttttgtctttctttttagtcaccatgatgttc

SEQ ID NO: 37101 - DNA, 2563 bp, Arabidopsis thaliana landsberg
ttaaaacgacgtcgtttcctcaatacgagttaaacgacgttgtttttaaaatgcccaaatgtcatgccatcgacctgttgtcgctgactcacatctgttaaagatcaactaacaccgttaaaatttatattgaaattggctaatttaataaaggttatgttttcaattttaattttatttcggttcaggttgaaatagactggggggtctgaatattaggtttttcccagcaaaaagtctgggttaataaaggttatttttcccaaaagctttgtgaagccagaggaaggttggttagagttttggagtcaaatatgactaattgtagtgtgtatgattgagtataagaaccaataatttttaaactaagtttaattctaaaatcttgtggtctttgcaattgatccctggcaacggcggcaaaaatttgttaccggtaaaattcctataacaagtttaccctaaattaaactgtaaatccacatgaaatcatagtagtatttagggatcaaatccacaaaaattaagaaaacacaaaaaaagacttacaaagaatgaaactaagcttgtataaaaaggagtaataagaactcaaaggcgttttgcaaaaggaaaagaatacataatataagaaatagagttttagagaacacatcatagatatatagtaaagccatgctagaatagattaagatcatgtatgattctagatttctattacaaattaccctatggttaagtgatattatcatatgaaggatttcttcacatcataagtgaagaacgactacttactttatgagaggaaataaatcaaacattaagatcacattttaatagattctaacaaaacaaataattgtcctcaagatttgcctttaactagattgatccacctcatccaatatccttttgagactagaggtgattttggttttaacataattgtagtgtttcagcctaagctttaaaacacaatcttagagttagtaaacaatagaaacatagcaaataacctgcactctaggtatcaaaacacatctttgttggggttcttcaactgtcgtaattgaaacggtaccaatcctaccgatcggtatactccataataaagctactcattcatgatcaaggtacatcttatctttgtagagagaggatcatgagtactaaaggagttttcctcgagagatcaacaaattaaagcaataaaataaattaaagaagattaaggaaggaaagaacactttacaactaaataaaacgtaaaagtaaaaaccttctatgcggctacaaataaaggagtatatatcaaagggacgtatgcctaaaagagatagaggctattaataataaaagctcatagattggtggacagacccaactgattggcagaacagttgattcttcactagttggcgcaaaacctttgccgaatgggcctgaccttctcttcataagctatatttcagcctattttgttcttataatgctcattttagttttacagaattcctaaaaagccttatctacacgaagaatggtttgttctttgataaaagactaaataaaacaagtaaaacctatcacttagcagtggttggttcaaggaaatgatcaaagggtctttcttggtgcaaagtgtcttcggaggtgtccctcctccctacactcggagatgaaagttttaatttgggttatgaagaatatcctttcaagaaggattgattgtaaggcttttgaaacagattgttagaagttagtcttcgatggtgtctcttgaagaatgacccactttatccaatctactagatgagtttagaatgcttcgtgtgttattttccggcttctcgatttcttatatttctcgtttatataattgtaaggtggattgtttagctcgctcttctagtttactgctttcggaaatttattctatagactatttctctccaaattaggcaatcaatcatgaagttatctgctaaataatatgtgattgataaaaaaaaaaagatttatctcaaaaaccgttgatttatacaaagatccgctgtaacacaatggataaaacagctgtctaaacatctgatttccgagttcaaagctcggcagcggaaaaatgtttttcttttaaattttttatattagaatgaaattgaaaacgcctcacttttaatgcagtcaagacgaaactagtctctcgatatctgttttaatgagagagatagaaaaaggtttctaaactttagtttgagagctcgttgacgaataataacatcgttttcacttttcactacagagtaggatttagtgattggtgaatctttattctctatgatcaagagttattagattatccaaaagaatggagaacattaatcagataaactgttagcaatttgactatacaactcaagatcctaaatcctaaacctttcttctaaaccatacaagtctaacaaacaaaaaaaagcaagtatgatgaagaaccatcatcagatttttagccaaaaagtttgtttattggtgcactactctctctaagaaactcattttgaat

SEQ ID NO: 37102 - DNA, 1657 bp, Arabidopsis thaliana landsberg
caatacatattacaacttcttgctttgttctagtgatctgaaagaggagcttacaggagttagtaatcatattactaggttaatcaaagacaaaaagtatatacataccttcagaccaaacaataaagataccaaagggtttctcaaaaatcctgatataagagaacagagtcatgtcaccagacaaaataaactccgttcatctgtcaagcagatcggctatattttcaccataaacacacaaattctctattcagtaaagtcaaagaaacacaacagatatgaaattacaaatataattctctttaagaagacaaaagatgaagaagctattatgtaagactcaaaaaccatttaagcaggattttccaacaaaaggctgaaaatggtttcttacaacaagatataactattacggtaaaataaaattaaaagcttgtctgttgtcgtcataatccacttttgcttaaaattaaaaacctttcaacacacaaaactttacacactctgttatagagaagacatgtaagcaaatgtggtttctgggtatccctgccatcattcctcaccaacttcgtcttcttcgtcatcatcttcatcagagtcaccttctttctcctagagacagatatggttttgaaaaacttatcaggcacaacttataatggaatctccagaatttaaatggtttcaggcattaataataacacaaatgttctgtcttaagatatctctatctaatctttcatctcattatgcacattaattagcatatcatagatgcagtaatttttaagtagaaaactcaaccaaacaaaggaaataagatgaggcttttacctcttcatctccatcatcgtctccatcaaagtcctcttcatcagcgtcctacaaagttacatttaacaatttaccaaaatctccaagtaacttaagcgctctaaaccaagtcaagactgaaaaatgatatggtgagtagcttacattgttgaagtaggtgagagggttgggccacaaatcttccttgatgatatctgcaacctgctacaagacgaatttccgagttcaagttgggccatacatggagttactcttacaatcaagtcataaaaaaaatataggatcattacctcgtcttgcatctcatcctcaacatcctccttgtgttgagcatcactaaaccaggtaaagaagctgaaaaaagacaggtaaaagatagagagtccttagacgtgtaatggctaataagaatggtgccaagagtttaactggatctatgatgggttgcagtgaattgggggacatgagaaatacctctcttgggtcgtgcacgtgagtgtccattcgtctgatgatacactcgcattcgccaggccacttgataattgaaacatatagttaacaataatctctaaaccagcgacagcttaagacaaggaacttactttatgcaataaagatccattttactgtgccctctttccatttgataggcgtcgctgcgattatggtcgtcccttcttcgagaaacgtaaaagtctttgtcagctttacatcttcaaagaatggattgaccttgaaagactgctgttcacgatgtaacaacaattcagtaacgaatacactgaacatcttggctttcttagatcaatccgag

SEQ ID NO: 37103 - DNA, 1605 bp, Arabidopsis thaliana landsberg
  unsure (1)..(1605): unsure at all n locations
ttttgattggtagtcttgctcttgttatcttgcctagaaatcagatgtttccttgccccaaacttctaatatcggagatcacacaaattctaccactgtgtcccgcctggttcaccagccagttgactggaagccagttgtgatcaaagcttcagatgctgattcatcaggcttgctggttgttcacccccatgtgaatgctaatgatgaagaagctactgtgagtaatcgttttgaaagccactctgaaggaaatataagtaatggcactgttaaaggagctatagatggtactggtccctctcaatttgattcgtcaatatctcctatgaggtactgaaatataaactaccactcttgcatgtgctgagtgtacttgtaaatcttatggcttagatgaatttccatgaacaaaatgcgtataattttcaagattgatatctgctagaatgcgattggagggagagcatgacgcacacgtcagttcgtctactcatggatctatgccagttggtgaagtaaatcattcaggcaatgcatggacgcaggtctttatcatacttactctacgtcttggttttattggtgtaaatgaaaaactgtttacctgactatgtacctattcaggacctcattcacaaggtccaggagcaggaacaagaaatatcgcagttgagaaaatatcttactgattattctaccaaggtaaatcgctagttntaatctctagtgttttatgcatacttggttgatttacactacattgtctgaataaccttttggcctgtttttttaggaagtccaaatacgcaatgaaaaatatgttttggaaaagcgtattgcgcacatgcgttcggttagcttttctttttatctattacaaaatatgtgtaactttatcttgtgacgaattatagttacttattctgttaaccacttagggggtaatttatctttcttgttgtgacaggcatttgaccaacaacaacaagaccttgttgatgctgcatcaaaagctctttcttacagacaagagatcattgaggaaaatatacgcctaacatatgccttacaggtttatcatctgtatctatgtgactataattttctatcttttggcatgtgtattttaaatcttcgtttctactttatattgtaatcctttatggttggactccagttatcaatctttgtttccatcatttttagtggttcaattggcaaaaaatcggatttgtctttgagacctccctttcattgtatgaatctaaaatggatgatactattttggttctatcaggctgcagagcaagagaggtctctgtttgtatcgatcttgttacctcttctatcagaatattcgctgcatccacagatctcggattctcagtctattgttagcagtgtgaaggttagaattaaaatcttaagtttgttatctttcttagtttatttgttttgatcttcacatctccttggctgtctatcttcaaaaactatttactgtgtgctcgtagtttggatggttgctctgcattttggctggaaaagttcaactttgccctccttgaaattcataacagtaaaacattattcaaaaaaagt

SEQ ID NO: 37104 - DNA, 1285 bp, Arabidopsis thaliana landsberg
cgactgatgatgctgttgggtttctcttttacgttgttttgtgcatatgagtgtaaaatttcaacatctagatttcagtaatatcgatatttttcatgattattcatacaacagttttaacagaactttatatatacacgtcacttgtaagctgcgaaaaaaaactaaataggagaatttaaaacggaggacagtgtaaaaagattcatgtaatgatccaacatttcttcataaaattctaacgtaaaaaacaatcatattgtgagatggttttagagaaagaaacaaagttccaaaagacacattcgttctcaaatcaaaggtactatgtaaccttaaataagaccaaaaagaaacaagaaagtccttttcaaggaagatcagatccagcagcaccaccaccgaaaccaccagctccacgaccaaacccttgcctaactgcaccagctccaccctgtacataaccaaaacatttaattacacaccaacataattgcattgcattctagcaatcatgaaaccaccattactcatgatagaaagacctagtggcagagcatcgaatatttagggaagccaagtgcacaacagattaaagcaaagcaatttacacaaggtgcttatcagacatagagttcataaaatgatttagggaacctaagaacacaacatgttgttgaaagatagtggcttcagaagtttcctcaaaattaagcatgatactaatgcgtaacatataaaagtgttcacaagagtttgacaagaaaggagagatttggtaccctgaagccaggctggtaatcagcaggtgctccagccttgtcaccatactctccacctgatttaggacctccacggtatccatctctgtcaccaaacctcctctctccatcaccacgaggagggccactgtataaaaccaaatcaacaccgtcacatatcaacacttaacaagtaaccatgatacaataacaagactgagaattgaagattcaaattgattaccggggacggtcaccaccacctccaaaaggtcgaccaagaggcttctgttgcttcttcaaagtagcaggaacaatctcagatgggagattaaggtaagtcctgagaaagtcaataccttcatttgtgaggaaccagtagtaatgcatccaagcaaaggtctctctcacatattccttagatttgaaactctgcatcaacttgataacctgcagatttggaacactctcaatcaaaggatgatgtggtaagttgaaatcctttttagcaaacaaaacaccct

SEQ ID NO: 37105 - DNA, 2513 bp, Arabidopsis thaliana landsberg
tgtgatatgagttgacacctatgtgagtgatatcccatgaatcttcgtacggaataggtaccggaaactccggtgcacggcgatagtttactgatattgctaagcagttagcggccgcgacggtggatgtgaggaaagtgtggtagggtggagaaaaagctgtttctatgatgaaaccaccaccgtggaagttgatgaggattgggagctttttaacagtgactttttccggtaggtaaatgcggagagagaggtttttctccggtgaatagacggcatctttagatacgacgacgttttcgggatttagtgacggtgggacgaatgtttcgggtacgaggcgttcgatgccaccgttcttgaatatacgaaacctcggagaatagtcgaatgcgatttcggaatccattagagattaatgatgattaggaaagaattaagagttgattttggtgtttatgcgatttatttatatgaatgatctctacgagactacgactactctgaactctctatagttttggtttggtttagatgtcacgttgttctttagttgttgacatgttgttaaacctacctactaactcataattcacgggtttgaatttgaatcataaaatatgagattagtaggtaacaagtaaacaaatgaaaacaaaacacacctacttacctgataggtagatttatcaagatataatttagagtatttgatagtatggttcgtcaacaaaaattattgttcttacaaaattagttacatacgaaactaattttgagataacccatagcaaggggatttagacaggcgacaataactagtagaaaaacagactaagacgaatactaacaataattgatcactaatcaatacatacaaatatatgaagtttcctaatcattgagtagtttgtatcttaaatcaaaaagcatgaagataggagcttttatatcttgtcttgaagcaacgtcgtcaaaagaaattcttggtacggcttgagggtggttagcattcatatttcagctgctaaaccgagccacgacaagttgcctgtggtttgagggtttgaagacgctttggctggatcgcataattggtatggtgcctttgacgtaactctgtcctttctcttctccaagaaccggtgaagtgaagctcttctagcaataggaagttctgtcaatggtgttggggaggattggattggctcttgtgttgtggtttttcttggatgaggaacttggtttgcgatagtagcgatgttgcttctgatatcggtttgattcttggctaagctattagcggtgcctttgctcgccaagttgatcacttctttggctttctcagcagaaaagtcattgaatacaatcacttgcccggcgtagaatatagtcaatggtgcagtttgagactctggtttcacagatctggtagtctgtgtcattttcaaaacatcttcctttggaagagaggaagatgaggaagaaaagcttggttgcctaggaaacagattcgtcggtttaacatcttgaaccatggaatccatgttagaagcttcacaagggaataaactcatggttgttgtcggctgacgtgagttgcctaaagttcctgcaaatatatatgatccaaaagttagaactctctccaatcattttctatgtcaaaatttagcaaactaactctccctaatttctttgaaatcgattcaaaattttcttgaaaagttttcaagatcaagattcaagaaataaaaaacagagaaaacgaaaaaagaagtggatctaggagaaagagaaggtttcttaccattgacatcaggcttgcatgccattcctaagctcagatctccaaagctaccgttctcttttatatactgactcaatcgactacacgtctgtgagaagctaggcttcttcccagtaaatctccggctaccgacgaactcagaacattccatagaactcgacatctttaacaattaaaactttcaaacggcaagagtttctcgaatagctaaatcgatacaaagtaatctcaaatctttttcttcttcttattgttgttgttgttgcttctctgcaaattgcgtttgtcacgagagggagaaatggaaggtctctataaaactttgtttggctttggggttggttggttaggttgcagagttcttcttcctaccttcaatataacaaagctatatattaatagtttaataaatactactactttacttatggtataaaaaacacgtgttttattctgtttctttaaaaaaatcaggaatgtgtctcggttcactgttctccacgttctgacgctttccgtttctttaaaaattacgagttttgcccctccttcaccaagccataatttaatcccattggttcgtttgttggttaagacataaagtcaaaatttaaacacaacaatgccttgtaatgaatggaaaagagaaaaaaaggctacattttaatctctaatcctttaattaacaaccgtaacgtaggca

SEQ ID NO: 37106 - DNA, 2682 bp, Arabidopsis thaliana landsberg
aaggtccaaacgccgaacacatagacgatttatgcgccgctattgataaccgaagggcacgttgtgatgatctatgaaggcgcttaggcaagctgggagtagccgcatctttctcagacgaagccaacgaaactgctttaaagttattggaggaaaccgtgaagcattgtgttagtatggataattcttccaagtttccttcagagccagacaagttaatgacaggtggatctattggcttagaaaacgaaggtgtgttggactgtgcatcaaaattgtccaagaaaaagaaaattcagaagaaaagaaaggtgatttttagattcttcaatcttatgagattatttgtagtttgctagccctggcggaaagatctgattgattatcttgtgtttaaaggtatactgtgggccagaggatgcaacaaacaggtcagaagaacttcgccaagaaaccgttagtaatctgattttgccatgctattatatctgaaatctcccattttcttagcagtgttattattcatggcaaattattttcatccaaatacttgaaattagtccatgcaccctgatactattaggcttatttttcatgtgcaggaacaagttagctccagagctcctacgtttgagaattgttacattcctcaagcaaatatggaggagcccgaactaggctcccgtgcaacaactcttggggtctattattcaacacaacaaactaatcaaggagtgggtgcacattattactctgtcattttgttgtctaacaatttttatattactgtttcattgaaattgatacactgttcttgttattctggcagttcccatcgatttcttccatccagaatggttactatggacatccgccaaccatacaagctatggtgaaatgctttatctatctcatttttagtttcaaagcttttgttataacatatgcaaatccatatccgtaaccaatatccaatcgcttgacatagtctgatgaagtttttggtagttaagataaagctcgagactgatatttcatatactgggtgatttagggaaacttgcattctattcatgaacgaatgagtcaatacgagacacaaccaagcatgcaaggagctgtgagttgatgttctatgctatttaagtatttttcgggagatatatatatcttattgttctcctcctcccgagtcaagttgttctaagaaagaaggatctatttcattttgtggattgtctagtttcagggacagacggggtttaggggaagcgctatccgtggctgctatgacatcgaagaaactctgcacgacatggtatgtaatcttgtgacgttagtaaaaacgctctaatgttacaaaagaaagaaagagaaaacgaacccaattcctcaaaatgttttcttttgacaatgtcaacttcttccttctcgggtttttatcagtttgattgaagcgagactgcgaaattcctctgtttacagtagaaaatgtgatcagccctatttataaccgttgtatgttttccggtgtttgtttgtgcagacaatggggtcctcacagtttcagggatctgattcgagccatcctagtgatcaccgcttatccaattaacagaacagaacaagctcaagagttgctactttcatatctttaaaatagtggaatgttttgtatgtacagaaataggaaaggtctaaagtgtggagctggctttgaggtaaactcttactctgattgaatttgcttgtatttataccggaatcataatagaaatatatgattaaagtattcacattctctaatcttcttttagacttgtagttaccattcaaaagtcatggacccccctcgttaaccttgagggccactgagagacaaccatggacttggtcactggctcattatttttgcctcgccaaagttaatctatcgactgatattggttaatttttcaacaaaaaccaagagagaaagaagtcaactaaaaagcaatattcagttattcactctgttgtatatagctcaccaattaaattcaaacaactaattcaaaacattatactatagcttttcattaaaaaatttccaaaacattcatttaattatataaaccaaagaacagcttttaagacttaaaatatttcccaagtatccaacaagtcaatacagattttttaagaaaactaaaccattttttcaactttacaacaaaaacaccaactgttacaaaaaaactctcgaatttcctatttctccagccttatgacaaagatatcagattaatataatttagaattcattactttttcttcattttaaaattatctacatactatttatttctctccattttattcagtgagaaaataaaattacaaatgcctgaacacaaaaataaataaaattagaataatcagtttcctctagaggatattcttcgtcataaaattaaaaaaaaaaagagtaggagaagagggaagcgactagcaccttttgtagttttccgtttattttctgtataaggcgggtgatctcggctccttcatcggaaattatgagcaacgttatcggcgatcgcactgaagacggcctttccaccgccgctgcggcctctggctctacggctgtccagagttctcctcccactgatcgtcctgtccgcgtctacgccgatggga

SEQ ID NO: 37107 - DNA, 1541 bp, Arabidopsis thaliana landsberg
ggaaatccggagttcagaatttttccctaagatggcatttcagtcaacattcatatatggtattatatataatgaaaataaataactttcttaatttcacgaaatggaaaagtttagtatagaaacaaatctttagtctcttaatttactggtgtttgcaataaaagggatattaatatctctatctacttctctcaactgtaactgcccatatatgtaccactccctcgagagtatcacacaacataaacccaatctctcactcagactaagacagagtcagaaacaatggcgaaatctccagaaacagagcatccgaacaaagtctttggttggggtgctagagacaaatccggtgttctctctccttttcacttctctagaaggtttccttacttctcatcacttcttcttgtttctttaccacctttttcttttcctgtttatgttaaagaaatctaaatttggtccgagatctgttacaaagttttgctgttcgtttctctgttgtctctgatgattggtctaatttttactctgcagagacaatggtgaaaatgatgtgacagtgaagatcttgttctgtggagtttgccacactgatttacacaccatcaaaaacgactggggatactcgtattacccagtagttccagggtaatctcgaaacaaaatttcaaacagagatatcgtatttaacaagttttctattatataacaaaaccttgtatattaattaggcatgaaatcgttgggatcgctacaaaagttggtaagaacgtgactaaattcaaagaaggagatcgtgtcggagtaggagtgatcagtggctcgtgccaatcttgcgaatcttgtgaccaagatcttgaaaactactgtcctcaaatgtctttcacatacaatgcgattggatccgatggaaccaagaattacggtggctattcggagaacattgtggttgatcaacggtttgttttgcggtttccggagaatttaccgagcgattcgggtgcgccgttgctgtgtgctggaatcactgtgtatagtccaatgaagtattatggtatgactgaggcagggaagcatttaggggttgctggacttggtgggcttggtcatgttgctgttaagattggtaaagcttttggtttgaaagttactgtcattagttcttcttctacgaaagcagaggaagccattaatcatcttggtgctgattcgtttcttgtcacaactgatcctcagaaaatgaaggtaacgagagtgattttaaacttggtccaatccggttcagttcagaaagtaaagagagtgactttaacttggttttgttttgtatggaaaacttaggctgcaattggaacaatggactacattatcgatacgatatcagcagtacatgctctgtatccgttgctcggtttactcaaagtcaacggaaagctcatcgctttaggcttacctgagaagcctctcgagctaccaatgttccctcttgttctcggtaaagaaaaaaggaacatcagaaggtaccgagctcg

SEQ ID NO: 37108 - DNA, 1337 bp, Arabidopsis thaliana landsberg
ccgagttagtcttttacggtaatctttgtttagcaatctcttcacaaaatctacagcttcgggtgatagagaaggccaaggagcttcttcaaaattcggttctgcctttagtacagctcgaaagattccggattcagtacgggcccaaaagggtcgactgccacagagaagaatataagcaatcactcctatactccacatgtcagcttctgttccatatgtacggtgtaaaacttccggggccacatagtaagcactccctacaatatcattcaacctctcgtctgcagaattgcaaaacaccctcaaattttctatttaacatgaagatgagtttgatatgagaaatcttgagtcaatttcaacatctctaacctggcttgacatagtcagaaagaccaaaatcaattgctttcagaggagaagtctcatccttggtagagaaaagaaagttctgtgaaaggtaaacaaacaaatagaaagaaacataaccgtcattatcactctgcataagtaagtggaactcatttctatgtgtacaaagactgcttaatgtgatgggacctagaaagtgaagtgtcaacaaaagccaaaatgatttacattattaaacaatgagagaacaatctagaaattaaacatcaccatggattataaagtacctcgggtttaaggtcacggtgaaccacaccttgtagatgacagtaagccacaacactgagaatctgaaccataacttttttagcatcatcttcggagtattttccacccctaattagatcaagctcaaccagtcaaagcacgattcagaagagaaaatcaatcagatacagagccatgtgtgattagcaattacctttgaagtattttgtccaagagtccaccacctttgcataatctggtaaaaggagattacaatatatttattgcaatcctggaattgaaaatcaaatgatcttaagacatctcactgagaaatgtattcttactccatgacaatgtaaacattttcatcatcttcgaaggcgtcatagaactggactaggttcttgtgaccagttaaagcccgcaatatcttcacttctcttctaacatcctcaattgcaattgccgtagtcatctaccgaaaatagcatccacaatattagaaaagacaaacggttaaatcaagaagagacaattggtttatcaacatcactcaagaaactctattctgacaacgtactcagtctcatacgttcaaaatccaaccaacagataacaattgacagaataagacttctatagtggataaatgcagacaacttaatcatctagcattctactattcaatgatg

SEQ ID NO: 37109 - DNA, 2198 bp, Arabidopsis thaliana landsberg
gttgtgcttggtctcgctaccgtagttatgggagaagaagaagaagtcgttgtcgttgtcatgtccctaccggtttctcctaagattcttcggggcttctgtgattcaagacattgtaggagttgctcgagctctctcacaaactctattgctcctcctatgattgacgcttggtctccctattttatacaattaatatttggtgtagacagtataattagttgtacatatacatataaaaaaacattcacgaaaattctttctttaagatataatttatgaatatcataccctttgaacgtaggagccaggcatgagagatctaaggacacgaagatgctcattcatttgcttcctacggtttctttcgaccgcgatatgagtcatccgttggctttccacttcttcgctggtcttgctcgttctagctctcttcctcttgctcttcacctcctttttcgtaacattcttgttctccctatcttcttcttctcctccaataaaacgtagttgcacggagttgttgtcggtgtcatcgtcttgatcttctttttcttcagaaacacattgcctatgtttcctccacactcacctttttcttgagacgtctgatgagaaggcatgagatgttgggtttggttatggtcctctatcttgtcgttcaagacagggaacttcaagaaataaacggggtcaatcccggtttcttgatcgtcttggtttctggtctggttcaacgcaagtttcgaaccgaagtccgcaaactgcatcacatcagagaagttcattttatcaaaaggtgttgctccaaatccggaaggagagagttgatgttgctgctgttgtggcatcgattgcttttgttgttgttgaaggtttctattgaacatatagtctatcataccagagctgttatcatcgttaccgcctgaggattcacctaagaagtttggtgcctaataaaaaccagaattggagaatgaagttaatatcataagcaggaagatttgaatcttatacatagatatctatcaatttgtataagaaaagagattaaggatcttgaaatactgaaaaaaaacgtacgtaccgagtaatctttatccattgctattcgtggtagttgattataaactgcttaagtctaatgaaggtcaagcttcttgacctgatgacaacaatccatgagcttcacagtcagttttaaaaacatatacatgaaacaaaaacacacgtagaacaagttaaaaccaaacctaggcagattacatgtttcaccatatacatatacatgtattttatatgtacaaaacaagttttcaaattgaattttgacaattaaaaaaaatgattaacaccaaatatattagagctttgtttagtaaggagttaacaaaataaaagggactgaccttgtatgatttgctagggtttacgagagatgtatataaaagacgcaagacatgcaagatagtagaagaagacggattagagaagacaaaacttaaaaaagtgaggggagctttttgtattgagaagtcataaatgagtaagcatcaccaagctcccatatttatagagagagatacattatacatgtgtacacaaggtatagcaagggggcattaaatttcttaagtatgtatattcgtaatcatttgtttctctaattactaattagggtgtgaatggtacacattcgtgacccaataaaaacaaattaaacgacttaaaaaaagatacgtaaacatgtttcaaaaaaaaaacaaacaattttctaaagaataaagataaatgaaaatctacataagttaatctaaaatattgaggattagtagtaagtagtttgattgcagtggctgttttattctactatcatattcccattaattatcgagacatcattgtttttcgcaattttctatgcattctcttttagttactaaaagtagagaaatatcaaccatcacataaaatgttttagaaaatctaaaaactacaaccaaaagatatcaatcgtgggaaaaatgaattttcgttactattgtccttttttattgctttgtaagaaagaaaaagggatgttattattgccctcttataactgttagagatacttaatgcttagtaaaaaaagcttccaattgtagcaggataaagccgtgcagtcggaagttctcaatgtcgccccgaatgct

SEQ ID NO: 37110 - DNA, 1736 bp, Arabidopsis thaliana landsberg
  unsure (1)..(1736): unsure at all n locations
tgaatggtaatttttccttagaatatcaatttttaatacataatatgatatacggcactagatatagtgatttaaagttaatccttttcaaataactcactaaattaaaaaaaaaaaaatcatttgcataattcaaagtccaatactttcattttgtttcctctttttcttttgtctactaaattattgttttttacgcaaccccaccactaccagatctttaaaaggcacacgacacgatcaagaaataagactttaggaccaaccggagttaaacgtagtcaaccgcagacgattcagaggagagtttcatttccgccggaatatttcaactccggtaagttaaattttcaccttactctacggccctccggtcactgaaccatgtttgcgtttccacttcatcttttgttgatcatatatatataaagtcaatattttggtgtaaacgatcgagacaaagatctctcaagcatgcttatttcagtcagaggccaatttttgagaaactaacgtttgcaaattgtgaaattcgtttaatctggtcatttgtatttcagtcttgatacaaaaaagctatgcaaggacgagttaggggaagtggggaagacaggataagcatattacctgaaccattgctatgtcatatacttagctttcttaggactaaagattctgttaggacaagtgttctgtcttctagatggagagatctctggctatgggttcctagattagacttggacaaatccgacttctctgatgacaatccatctgccagtttcgtcgataagtttctgaattttcgaggtgaatcttacttgcgtggattcaagttaaacacnnnnnnnnnnnnnnnnnnnnnntctacactcgacgcctgtctgatgagacttgataagtgtaagattcagcattttgaaatcgagaattgttttggcttttgtatcctcctgatgcctttgataattccaatgtgtcacactttggtaagcttgaaactcagtttcgtaattctgagtaaattcgggtctctttctttaccctgtctcgagataatgcactttgaaaaggttatatttcccagtgacaagtctgcagaggtgctaattgcatgctctccggttcttagagatttgagaataagccagagtggagatgatgctgttgaagttttacgcgtctgctctgcctcactgaagagcttcactctgaaacggacggatcatgattatgttggaaatggtgaatatacagttgtgatcgatactccgagacttgagtatctgaatctcaaagattatcaatgccaaggcttcaagatagtcagtatgagtgaatatgtcagggttcatgttgatgtcgtatttgaagtgataggtggtactgtattgtcgaaaagaaatatcatttgtgattttctatcctgtgtctcaaacgtcagatatatgaccatctcaaggaggagtcttgaggtatatatactaagtactaacacacactgatccgtaaacttttccctgagaatatttacttaatttactttaccttgcagttcatctatcgtcacctggaattgaagccacgattcaaatttcatgacttggctcgtttgcgtgctactatgttctcaaactcctctccggaaatgttgccagtcattcttgagacatgcccgaatctgaaacacctcaccttggtgattcgttgcttgacttacacttctacaaagggat

SEQ ID NO: 37111 - DNA, 1500 bp, Arabidopsis thaliana landsberg
accatcaactctttatcttcatcactttccacactccaatcatcattctcattccctttcttccttcttctctttttccctaatcccttccttcccttcttatctccatcttcatcatcatcgctatttccattagtggaatcctctaaaaaccattcccattgctttatgtcacgcaccctactctttggatactgatcaaattctttcccaatcacaagaaatccaaactctgcaaccacaccacacagtacacaaactacacattcagcctcattcttactaaaaagaaaaaatcctctcaagagcataattctagacattataaaagaaaagcaatgcagaacaaccaaaatgttgtttattgggacacaaatccagaaacacatcaagttgcaaaattgattacctttaacaggatcagtattcaattcgatttcaccatgatccaatgctcgctcctccataagttcatcgcgtctcttcagagtgaaccaaatggggtgattacccgatacacaaaattgatcgccggtggcgatttctccagtctcgggtttcctccaagtttgaatctttttgcccttttcaacggcccttatccagactggattcctcccgagaacctcgaaggaaaccatatcggacggttcggttccggcggcggcgggtttgaatacgagtgaaacatggcggcgtgacactgttaggtcttcggtgttgaatcccgctcctcttccgaatacatccttaactccggtcttcaggaagagcttggtgccggctccgccgtcgatttccatggcgttcaatttctttttctcatatacttttttaaataataatagtatatagtagtagtttgtattaatttgttttgtgagatttatttttggttctctcttggtccttgggtcgccaagtaaaagcatcccagaaaagggaagatatttccaagaaatatactacttgacaaaacaacaaacaaaaaataaataaactaatttttactagtttccaaccaaaatgacggtaaggtccttgggcggggatagcgcgcgagtggccaacatgtgacacacagacagttttctcacttcacttgctaactcggggagtaaagtggtctggtccgaaagtggggacacatccgtcatttctacctgctactgtttcttaactgctctctcaactttctctgaccgagtctgactcgactcgactcgccttcaatcaatgccatcacatttcttcgtttccgcttcccatttgtcggcgccacaaaaaccttctgttgttcacgaagccctctagtaccatatataggcccatttatatagctaagtcggcccaattatgttgatagtgtgcgcgggccaaattttatattcgaaaaccgtaccgttagagctgctactttagtttgctcttcttgtcaacaaattgacactgccggctagacagcgaaaatccaaacaaaaaaattaaagaatggcgttt

SEQ ID NO: 37112 - DNA, 1544 bp, Arabidopsis thaliana landsberg
agatcataaaggttaaatgtagtatgacacattcagtagtagtttcgctagacgtgctgtaaaagaaggacgtggtctagtcgttatcgttaacaaaatggatcgtctaagaggtagagagaactctgagatgtacaagaagatcaaagaagctgttcccattgaaattcagacagttattcctcaggtaataataaaaattgcatcttttattaattctcatttcttcttttgccattcttcgtatttcccggtgatggaaacataatatttgcttgcagataactggaataccagttgtgtttatctctgcattagagggaagaggacgtatggaagtaatgaaagaagtcactgatacatacaagagatggtgttcaagactttccacaggccggctcaatcgctggttgcgtaaggtttgtactttaaatgttacagactatagtatatacaacaaaacatatgacatcattatttgcttaatcgttttttgtgtgtgttggcgtaggttatgagccggcattcatggaaagacacggcttcacagccaaagatcaagttctttactcaagtgaaagctcgaccgccgacttttgtagcgtttgtgagcggtaaaacgcagttattggaaagcgacataaggtttctgactagatcattgaaggaagattttgatttaggtgggactcctattcgaatcatacagcgggttattcctcgtgcaccaccctccggtacaggtggtggtggaagcggaaacagctcgagtcgagtagtgcaaagaaccacctcagacaaacggactctctcggcctaagaacccattacaagtgaagaaattgtccctacattaactattttttgtcccgttttgtatgatcatacttaaatacatctttttcacctatacacattcgaaaatctaaaatagttggatggagtttaaccttaaacttcattagtgtccattgggtacaattaatggcagtaatataaagaatctataatatcgtatagtacaccaaaaatatgtcatcctatgcaaaatatttggtcataaaaaaacaaaattttaactaagaaaaatgtatatagattcactttttatcacgtagatcattgaaatagtcttcgtaagctttgataggaatacgagcatccatccacgaaatcttcaacatcttacgttgtgagtccaaactcatccacgagactagactcggtaaggttacaatggctccaatcatggctatgactttcgttgcgatatcgtaaacaatgtccagttctcatctttgttatctttctcctggtcgttgctcatactgattacaaagatctaacttcttctgctctcctttttttttttttttggttgtgtatgtgttttgatttataatttcaaggttgctaatgtgacgcgacctttactattatttattgggatctctgaagacagtcccgaaaaggaaataatataatttcacaatatcaaaaaaggaaacatttaacaaagaatctttcattaattaatttcgagc

SEQ ID NO: 37113 - DNA, 1677 bp, Arabidopsis thaliana landsberg
  unsure (1)..(1677): unsure at all n locations
gctaatccagctgatcagaaacaaaaacctaactttcttgttgaggtaaagcttgtttcttttgcttaaagaatcttactgtttctgtagatgaacacacaattgaatgatgttttttattctcaggttaataacattgagaaacagctatggacattaatccattcaaagactatattgcataccgatgtttcagaattatacgcgaaagctggttcgacctacgagcaaatctttaaaagcaatctccaacacgaagagcttcaagaagtagagttctgtctctggaaactccactataaacacatcgatgagtttcgtaaaggccttaaaacaaatgatcatgccaagcatatgaaagcattcaannnnnnnnnnnnnnnnnnnnnnnnnnnnnnnnnnaatctgatttccaaagtcagaggatattaccacagactctccgaggaatcaggagagcaaaaaagcagattcttatgccatcgtttctacatttgtcttggagatcttcaaaggtatcaagaacaatatctgaaagcacatgaacatcctaattggtcaactgcagctacttactatcttgaagctgcaaaatcttggctctgatagtggaaatcctcataaccaggtaactaattcttcttccattactttcttttgtcatttgccgtttctgagtggttttcttacatttgtgtagctagctgtattggccacatatgttagtgatgagttattggctctgtatcactgcgtaagaagcttagctgtgaaagagccttttcctggtgcttcgaacaatcttcttttgttgtttgagaaggtgattgatccactgatacttctctgttatctgcaatgagattgtctttgccttacattgctcaaaatgcttgtttcaactactacagaacaggtcatctccattgcagtctctgtctactgatgcagagtttaactacttaaacccatcagagaaaaaagtttctgtgaaggaacgagatttgtcaaaagcaaaaggagaactagttgccggaattgatttatggcccctggttgttcgaacaactagcttctttttccttaaatccaggtcagtttggactatgagtaacatttgactgaagtacaacattatctcctcttttagctcaagctcttgatgagcctttctccaaaactgttcttctcttcacttctctctggtttgtttcagttttgatgagtttggtcgggcatttgcatcaactataagagaactggatgcagcgtttgcagcatatgatagaaatctagaagccatgttggagtcttatcaatttatggacacagcgagacaggggccttataaaatcctccaaattgttgcggtttttatcgacatcttccacaatttagcagaggttaatggatccgacatcgtgaaagaggaagttaagctaacaaatttagcattaactatggtgtttatcgtcatggggcgagttgttgagagatgtttgaagacaactcccttggattcttgccctctcttacctgctctacttgtatttctagactacttaccgtttctgcttgacaaggtagaagaagaagaagaagaatgcaggtttgatgagaagagcaagagtgcaatatcttacttctttggcaaactcgttgatatcttgaaccagt

SEQ ID NO: 37114 - DNA, 1104 bp, Arabidopsis thaliana landsberg
cttatttttttcctatacatatgagtaaattgtgattttgattttacaactgcatactattattattgtgttcttgtttttagattattttgattgttctttgttttgggtggaattagactatttctttcttttaatttttgtcaacaagcatactatttcttatttcaaaggctaattaatttggtggaaatgtgtcaaactatcaaagaaaataaatacttaatttgactaatgaaattagacgctccattttaagtgacatttagcctacccatctttcaattatcatgaagattttataaaaatccaaaaaaaaaaaaaatatatctacacctattatatgtaatatacatttgaccatattgataattttttaaacgaaataaaactgaggatggatttgccaacaaagaagcataaaagatgccgagaatgtaaaaagaaaagatttacagaagagatcgtttattaactttctaaaaaataatctcaatgtctccttcgtttcctatttgagagagacttggagagtctaaagttacttccatatgtcactatcaatctgcccgttgaggtatttttattcattctttatttttatatttacacagtatgggaacctcaaaatcttattaattggatttatgtaatgaggatgtcactcgtcattttcccgttaccactttttaaaatgataagaaaagtaacttccaccatttttttcaatctttaccgttggtagaaagtacacaaaagatgcattcttattaaacttcaggtaagaaaataaaggggcatcatttcctttttctctcattaatcaaactctgaatagtttcacctaaatagattgagaaattattagctttctttctttcttatcgtatgaaaatatctacaccaatgcaaacacttgaccaatggatgtatcctaaaataagtaacgccaatttaaaatgagcaaaccagtataacaggcaatgctgagaatatggaccaagtttaacgtgtgagaaaaaaaaggctcattgcaaccacttagattagatctaccttattttattaactactccaaattgtagcagacatcacgattaaaca

SEQ ID NO: 37115 - DNA, 2768 bp, Arabidopsis thaliana landsberg
atgctcgactatgtgctctaaagcccatcaatttgttttctttgggagcttcttctagttcatacaacagacccaatatgtatatcgacaaaagtttctcgtagcgatactaacctcaccaaagtagtttggatggcgtgaatacttccatacaccaacatcacaccattttcctttgttttctggacacttcttgaacgaaagcttttgttgatcagctgtagcttcaatcaagagccctgcaacccacattgtccaaccgataacatctgcgggctgaaacaatcttccaccgttgtttgcattaacaaaggtaacaggtaaactaacagtccaaacccacacggcctgatagggaaaaaaagcacaagaccccacatggtgttagatcccaacaatccaacttagctgagctacttccttctctctcttctaaagatgaaaatataaagtttgtagctaacctgaaaaatccaaaagactactagtttacccaatattttcacgcatgtcatcaaagcgtcgatcttcaccccattgcaagatcctactcaaagttaggatgcaaaaaatacatcagacatgaccagaaaatcattaacttttgcaaatgcatatcgatttgaagcggtgtcatggtgcaaacctcataaggaggaacagtcccagacgaagtccccatacgactactagcacagtcaagactatctgggaggttaaagagctgagtcaattatacagaatcacacagagaaactcattgagagagagagatcttattacctgacgataatgccatgtccctttgagaagcagagtcaatacagcaagtatcacgaaatttgtacttcctgccaacatttttagtcacatgcatgttagcagaaatgaaaagtctataacatttgtgatcgcaatcgaaagaagaataacgaatcactcaaaaggattaacattagcatttccaaattagatagatcaacgtaccggcaaagtcagtaacttgatcaaatttgaaaagagctgtgattacgaagaatatgaattgataacccacctacacacacaaaaaaaaacgctaaatcagaaaagacccaactcgtgatttttcgagaaacacaaaacgaaacgattgcaccagaaaagacagacttacggtgacaatggcggtgatggctaggtaatgggaatcgattactttcaccattctctccggccaatcaattctctctacagcaaccaacaattcgcttccgccggaaaaaaagaataaacaatgttaattgacaagtgtcgtgatcctttcctcgttcacagagagatccagcgaataaaataattatcttcgcaattttggctaagacttcatcgaagtcgtaaatagtaaatacagtacgtataaccacagaaatacatttacgtaattttatatctatttaaataaataaataaatcaaaccgaagattttgatccggtttatctcggttcaatcacatcgaccccaaaagaaacaaaaatttacactttgttttccactcatacttatacaaccaaatatttgaaggatttgggaatgaaaccaaagctgtacgtacaacaactcaagctggtgcaattgagactctatcaatctcaactatatattccaacgaagcattaggaggaatctgcaaacccgattccaattcagcaccgtctacaccaaatcctaacgatggtggaacaatcactctgcgtttacctccagccttcatggaccttagtacataatctatgccttcacataatcctttgctatatggttttgaacccaccacaagtgccaatggcttcatcttcttcttgtctttggttccaaatgtatccacgaatacttgtccggttccttgcacttgcccctttagatcaatcactaccaagtctcctgctcttggtgttgctcctcctccaacgcgttgatcatagtacctgcacggtccgattccatgcatcagttactgatgcaagagctgtctgttttgttatcaatgtcggatattctttcttcagtacatcataggaaaggagacacattgctacatcaatagtttcaatggcttaataagctcatatactaaaaatggccacagagaaaacatacgtggtaattaactaattattatggatgaagcaggctcatatctcatttttcagtaacagagctttgtttaaagaactagtaagcaggtaattaaactttatccacggatgaaatcattcaacatttgtgctctagtgttaatggggaaattgtaccttatgccgttgggcaacacaatctctttctcttcttctacatctctgcaaacccaacaaaataatcaactctagtcttcagataacttatgattatgaaatccaaaaactatttctttgtaatcgcctattcggtattgaaagttcttcaaaaatgcgaaattttgtaacgacatgtgaaatattaaaacctggggttagctacttcctgagaaacctcaatccgagtcttgatctgctcggagattacaccgaaagccagaaagcccgcccaggcaagacccgcgccgattccaaaccgccgggtcaaggaagaagcgacccaatccgtcgtctcaacgttcttcttcctcttctgttgcgatgccagcggttgaggcggaggcggaggaggaggaggagaagaagactcaggctccggcggattggaagaagaggcgtaacactggtcctacgatgccgttttggtgaa

SEQ ID NO: 37116 - DNA, 2894 bp, Arabidopsis thaliana landsberg
ttatgtgcaactataaggaagtctagaaggatcttttctaacaccacgccggatatcattttgaaattccgccatcatgaatagaaatcctgtagccatcttgataatatcagttagcaacaagtctatatccagatattaatcattcggctagaaaagcacattactatagactatagaggatttttaatcaagtattgcactggcaaagattaacgccatgacagtatgacactatgcaagcaaggacaaaaaaggcaaacgtttaaaaagagacatgtaaatcatgcttcggagcatctgaaactttagaatagcttatgaaacacacatattaactcatgcagccagcaaaaaagtgagaaaacacatagaaactattttttccacataatgcaaatttatagacatgaaaagcgacaattgccaagaaagcctctcttacctgaaagtaagcatttaggtcatccggttttgttacaatagtcagacccagcacaaacacatccaaaccaattgagaaatccattatagcttcgctaaaggaataaacattctctctgcaataaatcgcagttctctcagtattgtattgaattgcataaaatgtaagtggtacaatagtaagtctcctttctatgatatagtgtcaccggagttaggaaacatcttatggacatacactaactagttcaacgaagtacctaagctcagtcctataatttgggaaggatatgcagctgagaatcaattttcagcgataaattatgggggcgaacagttcgcatatgacattagaaccaaaacatgtatcaagcagcgagacaaagacaatgtttagcttagtataacacatgtagcaatataaggcaataaattccataccttaaggaggaaaagcagatagttacgggtctcactacaaaaacttgactccagttctttactgccattttgcagaaagaacaatcaaaaccagaaaaccttaggtgtgaggacagggaattccatccttgagaaacatatttttcataacttggaatcaccgtatcacttagccccagctcctgaagcaaaggcctatctgttcttatgttatcaggcccttgaaacatccttgatgacaccacgtcagatttataagtcggccagataacaaactcaaaatcatggaaatcaaataatagaatatctttcttcccaattaaagtattcacttcttcagccttctcaactaacaatttgatctgggggccaccaagaagtatgccaacctgaatctgtctctctggatgaactctatgcaaagacagttcaatactgcgcctgtagatcccatattcgtcataactagccatttcaggatcaaccccgcctgttaccaaagaacttgaatgcacctctccagtataatcgtctacaagtaacttctgagcccattctatctgccaaattagcaaagccaatgaaaacaacgatgaatattcaaaaacaatatccaactttcccaacaccatgctgcatttccagaactcggaatcttggttaccaacaacctcatatgccatacagcttttaatatcaaccagtaaacaaggcttatcagaaattgtaaaagtacttttatctaacttcatgcaattgctgttccagttcaaccacatttctctcaaaagattttgtagatgcagcataccttcatgttgatcactgccatgattgttaactgttttggaaattcgctgtgctgggtccatgtctagaatagttttcacatcttcacgcatgtgcttcttatttccttcagaagaactactgggatcttttgtagatttcatgaaacgactggtattcttaaaactagaagactcaaccttcagtttcccacaggaagcagacagatactgagtaagacagccaacagtatacaacaccaaaaactcatcaaccgaaaggcaaagcatgacaatgtttgagtccacgtgtccagtactgtcttacgatgtcataaaacttgaaattattttctctggataacatgtgacagaaagtttcccaagatttacaactgcatgaagctcaagagatacacactcggaatcatcttcattattcctatcggtttgtagttcttgggtcaacagtttgtttaaccacagaagcaagctatagaccagaatgttctacttataagtctccagatataagctaaaacccaggtggtcttagacaaatacttgaagtggccgtaaagggaagattcgtcataatcatcatcagcatcctgagaatgtcagacaagctctgtatctggctagtcaccgtgcccgtgcaatagcttcggcagggagctctttctcaatattacatatcatctcccatttacgtcttgcagttacaaaatgccttttgttttctgaaaatttccaaagtaatgatttctctggcagttttcctggagtacccagctaaagatagcaaatactcgtacgcatttacgtatcgcagccagaggataacaacactaactaaattctggaatgaaacactgtgaggtgaaatcatcaagccagttctgcgagcagcaactttccaaagataacgtccattcctgacataattgctatctttggatgataaattcgccaatcccattaaaaccggaagatcagtgggtctaaacgagaagctcaactctggaacgcggacgaccagatcaacaagttgaagattatgcagcgtaatcaacatgactaggctgtcaaatccacaaaggtcaactatttcattatccctcttatatccaatgttaaaaccaaagcaactcagcgtaaacgaactacgcctcaaagggaataaaactgcagcagccgaactcctaactaaactaagat

SEQ ID NO: 37117 - DNA, 3558 bp, Arabidopsis thaliana landsberg
  unsure (1)..(3558): unsure at all n locations
taggagttatctaaatacattcctagttgattttggatttggtcaagagttttcttatataaggagatatcaaggtgtgatttctcttatgagttttgtgagagatttgagagactaaggagagttttcgtttttgagttagttttctagagtttaataagagagttattcttaatctttgagtgttcttaattctcgtcattacaagatagaccaaatctgatttatttatttttgcttttatgttgccgcaggagctaatactcagtgaaacagaacagattaatattcagcaggttggtttggttattaaaaatattatgtttagcttccaaagtctcttagctttttataaatgattttgattagtgttcctctattcacttaatcgaaacatgacttcttcttttttcaaacagggccaagccagttatatgcaaacattgaagagacaagctaaagtagatagcggcaaacgcatgtcaaccaattttgtaattcgaagagaccctacaggtcagtgcatctttcgacctattccttttaaaggaatgagaaaggttcgaaagcatgttgatgatgatgaaggttggtctggtggttccaaacaagtcaaagttagaggacttacttcttcttctggtgatggagatagtctatcttacccatttgaaaatgaaactaccattcgtaacagagaaaaagatcgtttaatgcttgaaatttttgggcctgaaagcacggatgatagtgatgaaagtggcactgaagaagaattcatggagaccaacttaatgtccttggtgagtctgcaatggggaaaacgtgggaaacgcagcatgcgtaagggcacatggaaaagacacatactcgaaaatcatgttggacaacacaaaaatactcaagatgaggtaaaaaactgtctatattgtgaaacattagttcatagtttttccattttgatcggtgttgtttccatgatgcagatgggcattcaagtcttgcttgtttcaatggatgcgtcagtgataccaaatttgcagaatcctcaagtcagctgcaaacctaacgtgacattgaagtcattatgtgaggtatgtttaattttaacctaatccaaaacaaaaacaatgcatgcttatcgatttcatgagtctaattaaaacttttccataatacagatgtacgttgctccttacgttgaggcacaagctgaaaagattgagatgatgtggttaagagttggtggcagagttgacaatgattgatccccacagagacagagtagagattgtgaacaaggaagacagtgttggtggattgagaatgtataacttcaacaatgatatgtggtgagtcttttgatcttcttgaacccttttatatatcgaagttacaatatagtatatttttcttactaggaatactgtttttgctacagattattggatatatgaagacaccttaagataatcaagagtgggagcaactaaatttggtggtggaggtggagacatcaaaccatttaccaataagaaaccacccagactttatttttcaaatatttttatcgactatanaatgaacactttggtattttatcgagactggattgtttcatattttttcattgtagaacttaaatttctctctttatttgactatttcttcgacaaatgtgtttgttctttaggttattcaaggatttaacaaacttttcgcatcagtactgaacaagtatgcaagctttacattttaggatagacctacttccatttttctggttttccaaattttcctataatagtattaatagtttttaaagagctttttaattttaagaaattattttctaagattctttttctgctaaaatctttgattagtagtaatacacactagatcgtgttcatcgtgattactctttctgagttacgtagtttttaagctaggatccatatatagaaccaaagacctctatcgatcaaactcaacatgtagctccatctgtttttctaagtcttcgagattaaattattagcattagcttaataagaaaaaaattaacatggctataacaaaacaattgtctcaactctcaagtctcaacaacgcacgtcactcaagctccgcaagaattcttcatacgatattgtacaagaaaactagcaaatgtgaactgatgcaatggtacctagcaaaagtatgcttatttatttaacattaaagcaaaagcatcaaccatcatcaaaatccaacaagatagtgaaagatccaaccgccacttgcaactacactacacaactctgaaatacaaaaacttgcaaaacacagcccaaaacagaaactaacacacattgcttaggtgggaagacagttttttgtacaaaagaaaaacattccccgtcactttatccactctgataaagtacacaaaaacaaaataaaaaaaacaaagtaaggtggcggaagatcaggtcaccatatttacatcacccgcatgtcacactccatcggaccatccctaacggtgctgactccttgagtcaccgctgtacaacctgcaaacaccccacgtgcggtcaattagtgaaccaacaactcgtgatctgaaccatccgatcaacaatctcaaatctcaatactcagaagaaaaaaacaacggctgtgattagcactctaaaactttggccatgaaggttaaagagttaatgatattataccatatgcacaaaaaggaaggttgatttggtcaaatcagaataaaactattcacttaatccacgcgcccactaaacacagtgccacatgttccttcctttgagcttcattatcaacgctgacacataccaaaatattcgataattgttaacaaaaatcaataaccggactaaaccaacctatccgttcgtagaataatccggttctttgtttcataagtcataaatcttaaaggttaagtcgatcaaataacttgtttctctctatactacaacatctaagagtctaagactatgttataatcatgtactatatgaaataaaataacagaaaaattgtagttaccagtcgtagacggagggagaatttggatgggtgggtttatcaaagatgttggagccgatggctctagtggcgaggttgcttcccggattaaagacgctcctccacacgttatccttacgtggcgtcgtcggagtggttggagtcgttggagttccagggctcactgccgccggcatggtcaacgacctatgcatcaccaccttactgctgctcccttctcctatatctttccatattcacaaaacacactaattattatatttaagtctagtttttgattgagctaaagtgttttgagtcaaaatatagatagttacctcggatattaatgggttgggtggtgatcttacggaggcggccaaggccacggtcaggctgaggtccagccacaacatcatcccaaagcttctctagcagaacaatctctttttttttttttttgggtagatcttcaatgattttgtagacagtaaacactttggtggtggcata

SEQ ID NO: 37118 - DNA, 1813 bp, Arabidopsis thaliana landsberg
cctgtaatgactgctctatcttatagatcatatccggtgctattcaatatcacgtttaactcgtttttgttattcaatggttactccttgtagtagattagaacctttgtcactggatgtttttggttcacatctaaatctgcctttgattctgaatgtagtggaccttgtgtgtcatacttacttcggagaagagcactttataatgacatgtcaaggtattgaagcctaccatatgtagaattgaacaatgagatttgtttcttctgtttctcataaacaatgttattgtgtttcgttttgtgaaggcacacttgttgtggtggttacatgccttgtagtggcaagtgtggagaaagcaaatgccctcaattttgtcttgccaccgaggtacaaaataaagcctttgatgttcatgtcgataaacaaaatgagataacttgtgatagaatctttctcctaaaaatctttatttgattttgttaagatttcactttttttatgatcttgtggttttgacatttctttaggtgtgtctctgtttcgggaactctgtggcatctactcgttttatgttgcaagatgaattcaacatccatacaacaaaatgcgacaattgcataattgtactccctactttccctctttgttatcacttattcactttcgtcttatacatgtttgtgtgcgtcaacattttcccatcttctttcgttgttttgtagggatttatgttctgcctcaaccaaatcgcttgcattttctctcttgtcgcttgcattgttggaagtgatgaactctctgaagcgtctcagcttctttcttgcttggcggatatggtctattgcacgtatgtattatccctttctcaatttccatgtcgctgacatgctttcactacatcaaatttagccaaatggctcataccaaatgtttattattgctgattctgtattttcctcttgattttcagggtttgtgcgtgtatgcagacacaacacaagattgagatggacaaaagagatggtttgattagtcctcaaccaatgtcagtgccaccagctcagcaaatgtctcgcattgatcaaccggtccctccctatgccggttaccctccagccactggttatccccagcattactatccacagcctggccatggttaccctcctgctccaggctatccacctcccggtcacggttaccctcctgcaccgggctatccgccagctccgggctatccatcgggatatccaccagcaccaggatatccttcaaagtaataagaacgttaaccaaaatctcaatcttcgaatcaaagttgtaatatcatccttggtatgttctaattactttgcaagtatattatccggtttgttgtctcatctattttctgttttttctcttagatatgaaccattaactctagaataccatataatgtatattagttgtgaccttggtgtatgatatctatctatgtttaaatttatacgttccagttatgattctctatttccaaagatttgttggtctaccaaaccggttaaggtattaccgattgtcaacttgtgcaaacaatggtacgttccaccgtggatccattggaggatgagctcttgattaatcaaaaatatataatgacaatttgtgacactaaaaatatagttagtgctaagtattcgagcatctttttttcttggctttagcctttctagtcaaagagggtcagatccccaccatatattagttaatttttccggatatattaaaacttgaaacagagatttcctatttttgtttgaaatacatc

SEQ ID NO: 37119 - DNA, 1968 bp, Arabidopsis thaliana landsberg
  unsure (1)..(1968): unsure at all n locations
gtctagcttaaacttgcctcaagcatccccttatcgttatgcccgtcaatcaccaaagcctaaaggaaaagagccatgactccaaaatagatattaatttagttcttcatgtctgaccaaggtttactgatttgagctgtatgttcagctttctgtttcatcgatcctttccgactcaagaggggggctgcagccttttactcagatcaaaaagatnnnnnnnnnnnnnnnnnnnnnnnnnnagtttggaacgtttcggatcctggtttgtgttctttgagttgaaaaaatatctttggtcctgaaggtcttatgattttgatcttatgatgattttaatgtgtagaagatgtaaagtttgagagtgtaaagtttccataaatgataaaaaccagttgtctgtaaaaccttatgtaatatatgttctgatatgtattgatttttcatctttaacttgtttaaattataactaacccctatagtaaataaaaatcaaaggtggaaaaatccttttaatggatacatagtagaaacatttcaatattttagctataaaacttttattaacataagcaaatgtagcatcactagattttaacccgcggcacaccgcgggaacaatttattttttaaagttagtatacataaaagtttgcaaattgtatctatctataaaatatttttattttataatttataattgttattaagtaacgtcccgccaaacccgtcccgccaaacccgtcccgtcaacccgtcccgtaaaaaaaacatttattttattaatattgatcttatttatgatatgttgatgaattattgtctaaatattttgtaattttgtagtaattaaatgctatcaaatatctctgcggtttgatgattataatcgaattgttatagttatggagaaaagcaatatcaaaaatgataattttgtagtaattaaatgatattaaatattttgaaagttttattttattaactaattgtgtagttaatgtggagagatttagggaagattgttaaatgtcaaatatttaattcgaagatttttttttctaattatcaaaaacaaacattaaaatccagtggcagccattgtaaataagtcccaactacaggatttatttcaccaaatggctgcaaaaatgtatatgtagattttaaaatgttaatttcattgaccaagttttttttttttttctcatatgttattaaagaaaccaaaagttggttataaggccacaaagcccacactgaatttgcagaaaataagaaagtgaagcccaacaagagtccaccacaaattacatcgaaacaaaggagatttagcatttggattctatcaaaacacgtgtcaacttgaaagtacaaccgtaacacatgttgatgagttaacagaagtctatcgacatcaactttcgtcaccgacgaacaccgaatctggtaaggaaaacatagccgaaaaatcgcacgaagaatccttgtttaccaccgaaatataactgaacgaagctcaatttaaagagacgacataaagatcttgtaataagcatctgaatgttcttcgatcctttgagcaagacataatctcttgattaagttcctgcaaatcaaggtttctaaagacacaaatcggaaacattaatcttaagcaatcaacacctaaaaactaattctcaactgagatctatagttgttattgaaaaacacaaaagaaaagataaagtcaatcggcaaaaaaacaaatcgacgacgaaaaagagaaaagtcagtaaaaactgttattgaaaagcagattagtaaagttatgtaattattttaaataattatttacatttggttttgcatagtgtatcaatttgtgtaactaacaaatatttggggtcttttattaagttcataaaagttagaggtgccttttcgtaaatagtaaaaaacaatgtaaaagaagaaggaaggata

SEQ ID NO: 37120 - DNA, 1117 bp, Arabidopsis thaliana landsberg
aagaatacaatagaatgtaaataaaaagcagatacaaggagagggagagacagagacagattcatgttaatgagcataaacagaaactcaagactcttacgtattttctaatgtgacagttctgaaattttgcttaaaagcaggtcggatgtcaggtggaccatcatcaaactgttcagctggaggttgtatatatgcattttccatcagcagctgaatcaaacgtgcgccaacctagaagcacaagagccaatattattaaatcacagagaagagaaaaaacagagaaggaaaataagaactattacaaagctctgtgcattgacaagggtggaactataaacaaaccttcacttgagcctcttgaccccatggcttgaatgagtcatgtttcctcactaatgcttttacttgcctcaacttatttttttccatcagtacagtaacttgtttcctcgccttttctgtttctttggccacaatttcttctgaagcatgcacagcttctgtattgatcgtcttgtcagttgcattttttttattctttttctgcaaaaaactgttgatcctgacctgatccagtaacaaaatacacaaatcatcaaaccaatatacacttcataccccatggggccaaggcaatatgtatcaatgacacattcctagattcactctcaacctctatcatgaaatagcatcaaaagaaacaagagaaattaaaacccacctcctgctcaacagcttccccgatctgagtagcagcattcactaacttaacaatgccaacgccttccgcattagtcatcaacaatcccatcatcttatgcatagtgataacagccatcttatcagccggtaactgctccataaaaggcgcatacggaatcttccctttcttgattttgaaagtatcaagatcatcttgaatagcattacgcacaggctcaaaccagcctagaaacaaagacttcatataaggtaaattcggtgcaagcttctgctcacacatatcagctagaatctctctacactctctcgctgctctttcccattcttcagtctccattttcacctgtctctgcttcagcatatagaacttctgtgctcccattcccgc

SEQ ID NO: 37121 - DNA, 4650 bp, Arabidopsis thaliana landsberg
  unsure (1)..(4650): unsure at all n locations
cgtcggctttaactgcgtcctgcaacattggagaagaaggagacataagtagtgagaatttagagatcagtattaagaatttataccccttcaacgtgaggaggttgttcggtggacttgtagatcccggcgctacttatgaacaagaattgcttgacgccggagcttttagcccaatccaccactggcctatgtccgaaaaatccaaaaggatataagatcatcatcaattctcatccatggagattctaaaagaaagaaaccatggctctctaagttaaataagcagacctaacagtatccaaatccttgccattgttgtcaaggacaacgtcaaatgtttcacctccgaccacattggcaacattggccgggttcccccacaccgtctttcctccgccgctaacaatttcctgtcgacagatacaaaggttcggtctgaatcggattcaaaaactcaaaacccgggtggaaatttgtaaatcttacggagaatcggttgaaaggaggtttcttcatcttgtcggaagattcatcgccgacggtcaagatggtgacggcatggccggcggagagaagctctttggcgaagtaaaacccgatcacggcgtgaccgcctactgttggtgttgactataagtacattcttcttctcaccgacggagctggccttaacggtaaatttttgaggagataaccttcgagaagtcctcagagagaatgtcaagagagaagaagaagaagaagaagaagaagaagagagagaggaaaaggaggaagatgaagagggtagagagaagcggtggagagatggcgggatcaggagattgctgatcggagaagttgtcttggaagagaaaaacagagaggaggatgataaagccgccattttttgttggtaatgattacctcactctgttctgacttgtggtggtttgatcctcagagaaccagaagaattttgtaaggctcttgtacaagataacaacatccaacggtcgccttttatttacgtgatcttcgtttcactaccattttctagattggcccaaatttattaaaatgggcccatttatgctaatacatgagtctgttttttccccgtcgtttaatttaattctcatgaagatttggatttgtctacatctaagcccatttgtgtcttcttcataaagatctgtggttgatcccaaaaaaaggaaagaactatgatttttttgttcttgataaaatggtatatcatcaatgaaaaaagaaacaaagaataagaaaggttcctcgaagatgagaaaaaaatccaacccacacacataataattgtatctaaaaactccaaaattcaggtgtgacggagcggagatttgaagccatcaacgagggttacctttattctatacaaagcagatgaatcgctaaagaaaaacatcaagtgttttattactaagttttttttgggggcaaaaagcttcaagcattgttactggacgaataagccctgcaagctgctaatccggcagaacccaacacgctgtacccactgcaatttaatagtaaagctttggatgatttaatggaattgctcaagaaaaaaggaaatgcatagatcttgtgaagaagaagaaagaccctgagacaaatagaagtgagctattcacgagttggcggatattcctgcttcttcttcctgactctgtctctggaatgctcatgtgagggttctctgctgtactcacgattcttgagaaaagactatttggctccccaagtttcatgcttaatgacacagggatgtctatccccaattccatgcaaacctgttgtcatccgataatagaatcatcaatcataccaagagcagcatctcatcaaatcatattaggcttaagtgatgcatttaccctatcagactcctgcactgacattggatatggatccaaatcatctttggccgcaaccagaagacaaggggtcccgtaacctctctcttctcccctccttgctacctccatcagtatttccctcgcctttctccatgagtatacgtccgaactggaaaacatcattttttcttgctaagtctgtcatcttattatccacacataccaggtgcaaataatttctgagctaacctgtcatagacaaccacagcaacatcacatgctgccaacgattccttgtttgtcagaaactttttaactctgtcctctggtatttcccgcaatatgagggttttcttagaaccctgaaaaatgcgtccaacaattaggaaaacaaaacaaaaaaacccacataaaccatatccacatgtgacaaagaacataagagttcagacttttgctactaaccccaggctgatcaatgacatttgctgcatatcgttcacccattgttgccttatagctgtttgaaaatttcctggagttgaaacacagattataaaatataacacgagtagaccacagaaacaatcaaagcactgaagatgacacagaatatggatacttcgaaatgttaaaactagcataccttcctaagaaagaatcgaggagtgcagactttccagattttttagggccaaatacaaagcactgaaacacattcctttctgttcgctgtttcttacgatccactgatcttttcctagtaacagaaaatgttgaagctgggtcgtgaccataaccgatatatgtcaggtttgccaaactttttcgaggatctagaagtgtcattagagcccactgcatcaacacatataacagagcaaaattaacaatggtaaaaaatattgaatttgataagatcatgatgacaatgaaagcttgattctaattcagcgtcaacataacatcaagaatacaaacctcagacagaaacccattgattgtcaaacttccgcctggcgttttctctgcagcttctttataaggatcctcaagccaaggactgaaatcgtaaagcagattgtacgtgtaaagaaacatattccggaaataataaacgtattcatgtacaagagcattgaagaaattggcaagaaaattcaaaagaaagaaggttaactcactaaacaatcattggaagaacatatgataaccactgattacagaggaaagaatagcaatgaattaaaaaaaaaaaaaaaatcaccagcaaattacctatctggagctgtttgaaataaatcatctagctcagctggctgtaacgctccatcctaaatagtagcaaaacgaagagcattagagaactactactgctccttgaaggtgaaataagcttttaggtgatagagaacaacagaatcattgttggataattgaagaaacgaacctacacacattatcaaggtcatataactggaagaccccacccagaaaggccacagcccncgccgcnagcccgacgccccgcaagcgaaacacaggaacagagcgcaaacannannnaaaagcaaccagccagnnncncanancccccaanaacataacaattaagagatatgtcgtagtttaagtacactatctaaaacaacacacacctgatcaggagactggcttagctggaacgggtagtaactcagcgtggagttctaaagaatcattgtaaccacatttccgtaggatagcccatgctgtctcagggcgacctctctcgatgaatagagagaaaagaaaaaggaaacccggaagtgtaagaccaaggtcagttactccatctggttgcctttcttgtaccactttcttaactcccataagttcaacagggtcaagtggggcaccaaaacaatttacctgttaaccaaatttgcagcatcatatttatagaaggattaggaatgcaataatcagtgtctagcagagaaagcgaacctggaaatcattcaactctgcgtcattaagggcaccatccaaatcatgatcacaaaggttgaatattctttgaactgccctgcggaggcggggtttcaaacattgtttttcttgatcaaacaagggaaatgttggatgaaggaccgcttttgatgcaaaatagaaaacatcagggacctgaaagaaaagaatccagatattttagtggcatacaataaggatcactctaggcatggttcagttttgcttggtctttcagcattatctgttctaaaggttcctagtatctatacggaacattttctctcttagccaaaagataatctttaaactgtagcagaagatatttcggtcagagaacaaaagcaagaagatacctgtataagggtcaatgcagaacactcaatgcaggtttctatctctcggtactccttcatgattggtgacataatatcctctagtctggcgggagatcgttcatcacgtaaatcaagcttgcagcccaccacaatcacaggtgctttgatctagatacattacatacatatataattataacttgaaaacatacttgtaggagaatgcgaagatacgatatttcagcaataaataaataagaaacctctaaacgccggagctcagggagccaataagaactcaagcgatcaagagttgaaggctgatcacaagcataagtgagaaggaccacatcagccttcctgaattcttcaatgagcttaatccgattgtcaatactaatagcatataaacatgacatata

SEQ ID NO: 37122 - DNA, 1203 bp, Arabidopsis thaliana landsberg
gtattcccttagacccatttggatttgaaattggaatttttcccccttatttgaaaactttagtctgttaaaacaaaaattcaaattacaagttacattcgaatcacatgggtaaaaatgatctatttgtttaattaatatgactctaattattagtcaattaccgagtttagtgtgatttccggtttgttttctaaaccggtgtattattaatcctccaattattggctaccataattttaattcactccctcaaatttcttgtattctgttttttctatccagaatcaataggaactttcctaatatgaatagttgtagtgttttattgatttgcatatgaaatagtactacgtacaagtgctaaattagagagaactagagttaatctctaaaatagaacatgtgattgtagatatgtctattgaataaacaaattgctatatgaggggaatagtgtggtattatttaaaagattgatacaatatacataggaaacaaactttgtaaataattagttctacgaagaagaaagaccagacattctttaaaccaattatattcctcgtggttcatagtttctcactaactaaatgccatctattttggcaatccatatcggtgtctgattacatcaaattctcatagctcctctgtatactctccgtaaatgatgaaaatactctttctgaccatgcctcaagtgccagtccaatcaacaatcacagaagaaagcaacagtcagaggttttcggaatcgatgaaaacgtttctgaaaagagctgaggaagagatcatcagagtacaagctcaagagagcgtagcgttatcacttgtaaaagaaatcacagagtatttccatggaaactcggctaaagaagaagcgcatccgtttagaatattcttggtggttagagacttcctcggagtagtagacagagtctgcaaagaagtagggatgataaacgaaagaacaatggttagttctgctcataagtttcctgttccagtgaatccaatgatgccacaacctcttcctggactcgttggacgaagacagtcttcttcttcgtcgtcttcttcttcctcttcgtctgatgacgacgaacataactcaatctcattagtttcttaaggtgagatctcagcttttgtatgtgcatgttgttgctaaaaaggtatttccagtaaaattgggggggg

SEQ ID NO: 37123 - DNA, 2049 bp, Arabidopsis thaliana landsberg
  unsure (1)..(2049): unsure at all n locations
atctcaatattcctcgggttgtctctaatcggaccctaaaccaatgaactcttctccagtcacaggtaccttgcgctacgtcgatgacggcaacatacggcgagannnnnnnnnnnnnnnnnnnnaacttcttcgacaagattcgtctctcggcgaggcgagatgcgaaggaagactaaggagacgaattaccgacggagctgaatacgatcaatagcgccggcggatttcttgtggtttctcctgataagctttccgtgaagtacacgaatacgaatctacatggtcacgatgttggtgttgttcaagctaataaacctgctccgatcaagtgtcttacttactactttgagatttttgttaaagattctggtattaaaggacaaattgctattggttttactaaggaaagcttcaaaatgcgtagacaacctgggtattgttttctttatctttggattttggatccaatctttgttgatcattgtgtgttgaagttgtttagggaagaatctgaatttgaaggatttagttcaagaagtatagttttagcttgtagcttgatcattgttgtgtttaaggtatggtttattttagaaattgaggtttgtggtatggttttgggatccaagttgtggtttagttattatagagatttagcttcttggattaggttgtgtgtgttctttctggtgagttcagttgtgtagaagtggtttagggaagaatctgaaattcgaaggacattgctttgtggtttatttgaaagctaggttcttgagtttacaaatatggatgatagtgcctttgaaagaagctttatctgcctaatacttgaatttgaggttatagttttcttttgtaatggtagatgggaagtgaacagctgtggatatcatggggatgatggatacctatatcgtggacagggaaaaggtgaaccttttggtccaaagtttacaaaagatgatgcagttggcggtggtataaactacgcttctcaggagttctttttcacgtaagaaagaaactgtttcatgttttttggtacttaaataagttcattactactgtgagttgaattcatgattcattcattttcctgttactctttgtctgttaaagctgatgacatttttgattatttttgttggtgccagtaaaaacggaactattgttgggaaaatccccaaggacataagaggtcatctattccctactgtagctgtacatagccaaaatgaggagtatgttctcactctctctttaaagatcaataccattgccatcatgtatctcactctctcttacacaaagcatatttttctgaaattttggcagggtattagtcaattttgggaagaagaaatttgctttcgatattaaggtaagaggaaaaatcctttcaaacgtggttaattaggtctcatagctttatactaaagtaaggatggtgtaaccaggactactgctattgaaatcacataataggtatgcctcatgtccgttcttggtactggggttaccgaatctatagcagtggttctctttgtagacattgctctcacatttgctattttactgttcctgtgtaatcaaacctcaaactcttgggcactcaagttataatctttaaacactgaagtagggcataaaaattctttccattacatatatgtttgaaattaagtaattgacgagggctgtttccctctttctgtattattagggatatgaagcatcagagaggaataagcaacaattggctattgaaaaaatatccatacctccaaacattggttatgggtgagtacactccttcccagcagtaacagatcatgtacttttttaactttgaattgcaatacttggtttcccttctggactagctttctgctttatctataattttgttttctttatcattaggcttgtcaagacctacctgctacactatgggtatgaggagacactcgatgctttcaaccttgctactaaaaatacagttcctccaattcatatagatcaagaaaatgctattgacgagga

SEQ ID NO: 37124 - DNA, 6124 bp, Arabidopsis thaliana landsberg
ggaataatggcctaaataaataaataacccaagaacgccgggcgtggaaacaacaaaacctgttgagaaagtttataacggtaaaaagattcaaagtatagcccccttggaagaaaagagtcctcgtaagttaaatcacatctgttcttatttcacaaagcttgtttatcatctgagtgaatgaattgaaatgatgttgttgcagcttctatggacaagaactgggtttttcctcgtggagcatcagagactgcaaatggactgtcaaatgcaacaattggaggaagatggactcaaagtcaaaggcaacaacaaccagcaatgaaggcagggtgggtgggagaaagtggtgacatgttcctcaggcctacacagccttccaatccctactctaggaaagttgccggttaaaccccaaggctcttacttatataagttacaagccatcatcataaccaccgttgttatacttttgataaccatcatcatctacccaagagtccaagttatctgaagactacttatgttcattttctcccgtcttttgtttatttaaagctctcttgttcgttcgatagagcttccggtttcaccacgtgactattttgtatggtattatatttcaaatcacaataaagctattgacattgcagaaattttcggatgttttggaatcagatgattatattggttttgggtattattttcaagtggtgaaggattcctcattttcaattgatgtctgttgatttggcttgctagtgctgttgtttgtgaacagttgaataaatgagtctggggtgtatggagttgaataatctttagtgattaactgagaagctctgcaatgtctacatttacaagtacatgggaactctgataaagtgcagatacaagggaagaagatttacaaggaatatctctctgttcttcccagttacaactttttcagcactaaactgttgacagcactgccaaaagcctcaaaacttttttagcactaaactgttattccggttatcataacacacaatcagatacttcttccacatcagatgcaagtgaattgcatagagcacagcagactgctccttctctttcgttgtctctcaatcaaatcttccagcttgatgcgtatttgcagcttttcctacaacttttctatggatggatttgaacatggaatcttcaaatccaaaaccattcaagatcctcttaaacacaaatttgtagaaatattttgaagcactttgacatcaattcaagaatacccactgatgcaaagcaaaatacttcttttcagtaaaaatgttaaatttattaatgtttgactagtcaatacaacaaacacacaaattcaataatatttgttacaacttacaaccatagcaatgaccatcaagctactttggcacctctatcagctgaatcacggatacaagatgctctgatctatttttctctcacattcttcacaccaatgtgtcttggtacttatcttctccccataagaaagagtgagcatatgtttatcatgctcataccttaccttttaggtaaagtggcgcatccaaaacacaaagcaaagtagtcacactcaatgcaattgaatgtttcgtttgttgaaaactgttctaactttttgcaaacggaacatcttctttgctctcctggtttggatgttaggaataaagaatgttcatgacttttatggactaatggctcagacattgtggcgcactgcacatgtagcttgaaaagatattcatctttatcctgttgttcacactcatagaagaaaccggctttgcacttccaaggacaagctgaacatggatcaacactctgttccacaagacaccgagatcctactttgagagtgagcatatgtggatgtatcggatgatgcattttgcgagagagatttgcacatttttcgtggagaataaaaccacattccaaacatgaatagaagttaccggaatagattggcctgatgcatgcttcacactccttattctcgtcgtaatctctgcccgtgttctcgtcaagtttcatatgatgttgctgatgactaaaatgttgtatgattccatcacttatctccaaaaacggaggaagcacttcttcttcaatatcttctggctctccctcaagttctataccatcccacacattgctctgagtggcacattttgaatgagccgcatacgaacaacctttggtacaaacatagcctccgtaatcattgtcgatcttcttgtgacaaacactacaagaccaatctctttgatcaaaagaaggggtaaaagtaatgcgatgttcatgacctgatatgtttattatacgtggtaagctggtacacgtttgatggaccgcaaagccacaaggggaacaaatatagaaaggacagcttgaatcggccaagccacaaagatcgcaagttaatgaagtgtgtattggaaacagggcaagtgtatgctcatggcactttggatggtcgatcgataagactggtgctttctccacacaggcaagattaatagccaaatcgcaagccgagcaataataaaatatcttgttgagatctttatcgcaacaataacattccctggttgtgtccccattcaacaagacaagttggagggaatgttttggatgaagagtatgtttgatcacaactggagccttttcatattctccatggttctcgccattgcaagtttggcagcgaatatgactaacgccttcttcagatatccagattttcttccagttaaaagggagacacttccacttgccattgctgctccacgagacttcttcgtcaatcacttgaaattttccttttttcaattttacttgtacttgagggtaaaggaaaataagccttttccactctgaatacatagagacgacgagtgagaatatttgatagatgagtgatatgagctccggctgtggctcgagactcaatgtttcaccaacgagggaaatgaggtaggaatcgagactcactcttttaaaatagcggaaaaagaggtcgggatctgcctccaggtcgaactctatgtccaggtctgaatctagctccgaaagctttatgtacacatatgtgttcgagttcgaatccatctccaaatgctctatgttcgaatatgtgcccgagtttgaatcctgcttcaataactttgtcccgggatctatttcgggatggcaatttcgatataagcctcgtgggactcttagtaaacttccagcagaatgacgcaattccgggtcttgctcccgctttaaaacgctgacagatttgacatgagagatttctccagaaatgagagatatgagcttccttagcggatccggctgggaacccaaatccatagagttgaagagcgagactgcttgagtagtgagtgacatcatttccgtctccggctgcgcatccaaatcaattttactgaccatagatattatttgaggaatgagagatgtcttaatggataaagatattggttgggagattagttgagtaatgagagatatgattttcaacccaagattaatctccggctccggctccggctccggctctggctccaaatcacgaactaactctggctgtggcttccaacagacgacttcgtcaattatttgactgatgagtgatataagctctggcggctccggtgttggactacataattctcgaatgagtaacacgaaaaactccaagtctggctgtgaattcgtgtcctgctccgaaataaattccgtagagttgacgagagagagcttgtgtgaaaagagagctatgagcttccttaacgaatctggctgggaatcaaaatccatagagttgaagacatagattgcttgattagtgagtgacatgagcttcgaccccggttgcgaatcgaaatccattgagctgaccagagagattgtttgagtaatgagtggtatcatcttagaaatagaatcccagtccggatcaaaatatgaatccggattcaaacccacgctcagactatatatttgaaagatgagtgatttgagctttgactcgggattcgagttcgactccatagagatgctgagagatttttttgagcaacgagagatatgagaatgagatgattattttgactatgtttctaattgctaatttgttaacgagacattgacaaacttaggggctgtcgcgactacaaagtcaacgatcaatttggagtattacaagagtttagtatacgagtttatgcactacacgttctcttcataaacaaaattgttgaaataatctttccaatatttcagttatttaccaaaagcattgaacggtcgacttttaatttaatggcgccatggactttgtagttggcggatcttccctcattatattatatagatttgaaaaagtttacagccgtacaattttaaaatgtataggtcatctgaaggcaaagtcaataatcagtttagatataaaagatgggctatatgatcgacagtcataccaagtataacccgtcatatggttacgtatcccaactaggcaactcaaataatgtatttttacttattctaaaaaaaattgcttggtgagataccaacatagtagtaaccatcaatctgattactatattgatgaagtttttatggaggggagattgcttggggaagctgaaaatgataaatcagaagaagagagaggcggcaatttcaaataaataaaggcaatgattagttttgacgtagtaccaaccactttcgtataattgaagaatattttagtgacccttaatttaggaaatgggtacagaataaccttgaagctaaaaatacttaagtaaatactgaaaatcaaaagcaaattcttctactaatagaagaagatgtgtccacgtaagccaaaacaaaaatactcaaagcaattaagccctaaaccctaaaccctaaaccctaaatcatgtcatttgttcacatcagtttacagtaaaattttataaattaataatgttgaaaccataaaattttattaatatataaaaatattaatttatagaattttattaatatataaaaatattaatttatagatagttgaggctaattctattagcttgtatactcatcgatatatttgtaatctttttttttaatttaataaaagacgtttaaaaaattattatttttgtcgggtttggatagttagggtcgggttgggtaatcgggtaattatagttcccttttgtaattggttccgaaaaaccccgaattaaatatcgtgtcggatcggttcggttactcactcaagatgccggaatcatttacacaatgaaaacttttctttctccggcgatatgcttcgatcatggtcgatcgcgaaactacaaatcagtaaagtttattcatccgattctcgcttttgcacacacgttctcttcaatggagttgtcagacgacaattcacgagcactagcggcgaaagaagaacagtgatgagcttcggtgacggaaaccttggcgctcttggtctttcatcatcgtcgattccaggcatgggaatggaagcttacgaacccaccgtagtttctaatttgccttccgatatttcttccatatccgctggtcattaccattctctcgccgttacatgtagcggtgagatttgggcttggggtcgcaacgacgaaggccagctcggtcgaatcgtaattgattctaggtaaaatctctacctgagaacccaattttgaattgatttcatcagagtaaagtagtgattgaacttgaatttgataggtcaattagtgagaatactttacgaatcattaacatgaatttgctagtcatgatgttatttaggatttggtgggtctcttatgctagtaatgctactatacctgatgttttcatgatgtgattagtagagattcaaggagtgaacctaagagagtggaaggtctagagaatgtgaatgtccaggcagcgtttgcgtctggagttgtttcagctgctattggagatgatggctctttgtgggtttggggaagatctaaaagaggacagcttgatcagaaaaatggtatcattgaagctcgagttccttcgagagttg

SEQ ID NO: 37125 - DNA, 1576 bp, Arabidopsis thaliana landsberg
ttttcccatggccaaggtttaaaaatgttctttttttaaggttttatagactatagtaataaactatatctaatcaatagccatcccaaaatgttttctctctacgaagataaacaccattttatgttaaagtttattgatgtaaaaattttggtagcgttgcgatgggtttaatttgattgtgtcggttagattattcatttacccaccacgttagctcttttatcttgtgttggaacgatttaattaatccgccacaaaaaaaatctctaaatcgactgtcctaaactactaatcatttgacacattgattttaacatgtctgtctccttttcaccatgaacaaaacttgacaaaagcattgcatagtgaagaacgaaatactacttagaaaacttgatgaatacgtaacaagccgtccaaggttaaaagaacacaagattaattcatactactgcattagcagaatatcaactagaccaacaaattgaaaactcaataaaaccaaactaagaaccaacatagagacataaaagtcccaccttacgatttaaagtcttgtaccaaagttcaaggcagagctaattaagagttgaggttaccttcaatcacctccaaacgcaaaaacagtgctctagatctctcatctctcatagtttctccaaattctttcccagtccgatcatgaacaatgcattcgcctcgtgctccagttatgaatgaacagcctcttgatttcatctgctgaacactcaacacgtttctattgagcccgggaacaaaaatcacattgttgatcgtcttctgcttcccttccttcatcttgatcttcacatctcctattccttctaccatgataattgttccgtcaaccaaaccaaccttagctttgtatgttctgtctagagtggtgaaaagcttctcatatggagtcatgtgattcgtggcatggccgtatatcatccacatattctcatcatatgtgaattcattcaaattcaacgctgctaacagtagaaaatcaacttcgatttctttttcctcaactatctcaatctgatcttctgtcaccgctggttggtgaatctttttgttgcaatctttggctttatgtcctcgttctccacattgaaagcatttgccttttttcggcttagattgcctggctccacttgacttccctgccttagggattgaagaagaacaatcttcttgtttgtgattgttcttgttgcacaacacacaagactcctcctcagccatcgatctaagcctattagccttcaacattagatggatagattcttctgttatcgaatcatacacataaaacaactcgacaaaactcttaagactcatattcttcagatccacgagatcccccaacactggagctacatcatcatatgatcctgagagcgtggctaacaccttttcgataacttgataatcggattttgcaattttgaaacggcgcaactgttcaacgatttcgataaccctatctatgtagggattgatcggttctccttcattcatactaagttcttcgaattgcttctctaacctacgtagt

SEQ ID NO: 37126 - DNA, 1684 bp, Arabidopsis thaliana landsberg
  unsure (1)..(1684): unsure at all n locations
gcgcatacggcacagctcgactgcccccttgttgaccaccgaaagttgattgactaaaaccagaacccccaaatgtaggggttgaagcctgcgcacctgcaaaacaaatcatgcaaacatatttcgtcacccctttattcaaatgagcaacacaccaattagcagttataatattgtacagaatgggaaatgctaaaggaagaaccttgacctccaaagggagatggtgtagagccaaaggcgctgctaccaaaggctgatgtagactggccaaaagctggagacgagccaaaactaaaggatgaggtatttgacgcaccaaaagaaggagtactagatcccccaaaggcaggagtactggatgccccaaaggcaggagtactggatgccccaaaggcaggagtacttgatgcaccgaaggcaggagtgcctgatgcaccaaaagccggagtgcctgatgcaccaaaagcaggggtgtttgaagctccaaaagcacctccagaaccaaagccagtgttaccaaacgtggtgccagtgctaccaaaannnnnnnnnnnnnnnnnnnnnaatgcaggtgtgtttgtggcgccaaaggagggagagtttgaggcaccaaaagcaggcgtgtttgtggagccaaaggcaggcgtgcttgatgccccaaacccaggtgtgctactgccaccaaaccctgttgtgtttgtggcaccaaatccgggtgtgtttgtggctccaaacccggaagtgtttgagacaccaaaggcaggcgtgctagaggcaccaaaggcaggcgtggttgaggcaccaaaaggtgtagatgaaccaaaagtgctgtttccaaaggcaggctgtgattgttgtgtggtgcttccaaaaggacttgactgaggtgttgagaggccaaaagacttctgaccaaacgtagaggtgcctgtaagaaaagattgatcagtcttcgttagaaaaagtgcacaaaggagatacatcaaaagactaatgagaaattgtagcctaaagaaaacaaacaaactagaccaaatcaggagctgctagtactgtcacaaagaaaacccaaaagactactaattttggaagtagtaacaaatcttttgaacaccaaaaaacttggatattgctaccctccaagtcctactgagagaaagtagatcctattccatgaagcctatcaatgtatctctcacatgatataaacacatagtatattccaaccctggtatagttaatgcagtaacataaataaaaggtacttaccaccaaaaggtgaatttgaactgccaaatgaaggggtagaagatgctccaaaagcctgagtagagctcccaaacgcttgtggtgaagcaccaaaaggtgaagaagtttgaggtgcaccaaacacaccagttgaagtgcccccaaacatagaactccctgtctgtgcgccaaaaggagtagaagtaccaaaaggtttcgtagcaaaaggattattgctcgcgttattattggtctgtccgaacaaagaatgagtttgggtcccaaaaggactgcttatagatgactgtccaaaagctgtaaaacatattaaaacgggtgagtttagcattgcaaaagctacaaaaatcaaatttgattaagaaacaaaggaaagatttcaagttaaacaggccactacaaacaaagataaaaa

SEQ ID NO: 37127 - DNA, 1043 bp, Arabidopsis thaliana landsberg
  unsure (1)..(1043): unsure at all n locations
ctcagagggagcagagttgtcacttggatgtgaagagtttgttcatgaagctttcaccagatgttttctgcttagccgtgactcctggtaatttgaacagcattggtgcgacggctcaacagagttataacataggctatgatctcgaagcaatggaggtttcttttgagagaattgattgtggtgttctctttgattactaattaatatttatttttttggcaactatattcaattaattatttgtttaaatcacgaaaatatcgtgcaaaatcttatagatttaatttttcataactgtcaatatatatctacaagaaaattcttgattgcctgaaaataagatacaattgttagtagttacattttcattgttacttggacagttcgatagtttcaaagaaatgatgtagcacgaatcataagtaaaaatgcttggaacaacgttgaatgaataatccaaaaaaacgataacaaacgatctcaagtatcatatagattttgaaaccttagcagaacatctgcttgcgatgcaaaagaaaaccctagaagataaatcggtaacaaagaaagacaaacaaagaagaaggagaagtacatcaatcctccatagccattcggtgccgaatatgtttagacgcttagtatgcaagtaagcatggtatgcggatttggtattctgattgattaggtcaacataatacgctgctgatttagcattctcgttggttggctcgacatattcttcaatttggttatgatttatttggnnnnnnnnnnnnnnnnnnattggctgacgatagagatagcgagcctttgaagctcccacaaaaagcaggacgaggaaggcgatgatgaagaagaaactgagttttcccaatcgagtggacatttttggcgtcttattggataaggttaattagggcttcattaatatatagattttttttttctttttagaaatatattagattttgtattgaagatattgtaagattttaaaacggaatatgcaaagtcatagaagtcagggtttgtgtggt

SEQ ID NO: 37128 - DNA, 1292 bp, Arabidopsis thaliana landsberg
ttctattcacatatatttaagaaaatcgtaagaagaaaaagagaaattcaaagttaacgaaaattttaggaggatgacattagtcaaccgattacaatttaagagaaatttcgttgtggagtactaaaggttggctactctttttctctcaaagttattattttagttacgaaagtaagaagaacaatatgaaaaatgaagattctattggacagaatttgtcaaaggtcaattttaagcaaaagaaaacaaacacctttcaatcccatagcttttggagagtattatcctttgccgacaagaactaatcaacaagtaccaaggattatataatcagacggtcacagatataaatctagaagcagaggaaaattgtgaaagtcgtttcatctcaaaagtaaacgatctcatatgatcaaacttagtcagtatcttatgtcctttcttaagtttaggcctccacctaaaactaagtgaattcttaataactctacacgaccacaaactctttccatcataaaaatctacggtcaaatgaattttgatcttagtaagatttgcataattcccatgagagatgaatatgtcttagagcagattctgtttgcaagaagcgattagaaatatagttttacatgttttaattagtttttctaggggatttagtgtgtactaaatgaactaaacatcttcaacaattctatatctcagatttatttcatggacatttaaactaatgagacagttaatatgaatgaaactaagcagaagaaactttggtctgaaaaccagccaagtaatcctgcatacaagctttataagtatccatacctgtaaccttatcagcgatttccaacccgatgctcagccattttttagcggtctcaaactgtcctagcctcacgggcaacgctgctcggttccaagctgtcattgcgagccatttcccttcttcagtcgggtattccccttccttcaacccaaccatgattctgtatgcttgtttgtacatctttaagattgcttcttcatcgtctgtatcgcctttgtggacgctggctatggagatcagcttcctgattataagagctatggttgggtactctggtgaagcagatgcgatcagagcggataggcattcgttaagagcaaatgttgacacgtccgggttggactgagggctttgagaggcgaaaattccaagttggagaagatagttgtaatgacaagacttggaaccagcaaacgtctttaccacaagtaactggaatgccgaattgttgagccttcca

SEQ ID NO: 37129 - DNA, 1630 bp, Arabidopsis thaliana landsberg
ttaaacatcaacattagttccggtacggatcagaggggttaatcaggggttggtacaaatcagacaaatgtatcacagaccggtcggtacgtatccggtttcataatgtttacctggaccacaacgaatggaacacttgcgatcgcatcgggacgtctttctcgctgaagaaaagagaagatcgacaaggagttattatacaaatggagacagaaacctttggggaaaactaagaaagaagagagtactcacggtcacgttggacgcaggcggtggagcaaccgtcgtagcagtctccggggcctaattgagcctcggccaccatattcaagctggaacataaagccatcataatcagaagagccgccactatcgtcacttgcttcttcatcattctctttatctctttagatcttctttggttttgttttttcctacttcttcaaaagtgatattttgtgggtatttaaagaaatgtcccagttgccaggtttgaccgatactccatgttcacgtgtcatgattcctctcgtaaacgttatctgtctatccctttaattttacttcaagaattgtctactgctttttgtttttttccttcgacggtggactaataatttttttttttgtgactaatattaatggttatgccaattaagtcatgcactaagttttttttttttttgagaaacttaattacatcatttacatttgatgaaagttaaaatctacggaatacatcgcaccgagagcacatatgaatccattgataatatgatagttacttagcacaagcaatatatatgtaacattcaaacattttgttgagttccaaacctcgagccaaaaaaagagagtaataaacggtaaatgaaaaccacatatgtgaagatgaattaatcacttcaaaactataaaatgtgagatgaaatgttgtggcggtcataatttttttacaacaaatttaccacttagtcacttagacaataacaaaatagcattttagaggtaaaattaagtagcaagttgtaattgtgttttaatattgaagtaacgttaaaaattgaaaaagatatacttcaaaggctacttaacaccaattgaggcatacagctggatcttaattcacttaccgaccctattttatattctgcttctatggtagactcaaactatatttgatcatgtaacccatatggggattcaggggacatctctatttactgatgaaagattgccaaggtccagttctttgttattcttatttgtttcaatatggtccgaagtcgtagacgcactctttttttccttcattttacaccataccactaggtatactcctcccaccattatcatggcaccgattatactgcaagtttcgccaaaaaaaaaaaaaaaaaaaacaaatatgattcacacagatcacccataaaaatcatgatagagtttgatataccttcccaaatgcaggggttcctctaaagcaaatgatcctataagggcaacgaccaccagccttaaagggctaaagacagtaacaaaaaagggtcccttcggggcgatgcaccaagcaacaagaggcacgaccattcccgaaaccacgaacccccacacaaaacggacaagagaa

SEQ ID NO: 37130 - DNA, 2185 bp, Arabidopsis thaliana landsberg
ctgtacttttattttatggatcaaaagtgagttgttctatgatttactttttgtttcacaaacagataccgttttgtttctttaatacaagtttaaaaaaaaaaatgtaatcgtcattatgatttaagtttattatttccataactgtatactgtatagtgtgttgagaaaaacatatgatataaattttagatgttttcttaaaacgagggaatttaaatcatttaatagcatatcgtaagtttaaagtcaactagaggagtgaatggcaggctaattattcttcttcttctcatcccaactcgaggaaatttagctgaattagcataaacaatacgtaaggaggaacatgatccattgattaggcaaaaagtttaggttacaaattcatacatttgcatcttacttaaaaggagcaatagaattcctagttccaaggtcaagagtcaatttacatttccattttttaaaaataattttgtttgatgttataagttataacttaagtaatagatacaaatcatggggacataaacatagatgagcttttcttatggttgaaagaaataaaaatccaaatggccaacgatcaaatggccgactagcattgattgaattgctaaaacgaaactttaccttttacattataaatcatttgatttgacctcatttgtgacttaagttatctaatagcgattttttctctatgtttttttttataataagtttttggttgaagattaacatgtagatcataattcagggaaaagatcatctaatgaaaattcatggtccaccacaagactaacaaggctgggtttgtggcttttactattggactcattatagttgatgaactttattgaatctttttcaacccaaattttgtattttataaagaagtgggtagagatcacctccaacctttacaaaagaaactgtttaacagttataaagaatgcaaaaagggaataataagagactaaaatgatgagttatggagtatggaccatgtgtgcactcgtatatctaattattgaaaacctttacacttttttttccagggatgccttaaatacaatttacccacctcatgaatcatgcttatccaaactcaaacatatccaaaaccatgtaactgatcttcaatgtgttaccattttataacctcgaagtaaatgcgtatttttttgcttataacattgacaatttcaatttccttacatataatcattcatataaagaatgtgaagctcttttaaactcatggagtgttatattattttccctccaattaatcatatgtagcttgaagacaaattattatttcgtacagaattgaatgcattattttccggacgactgaaatagctctacttattacaaaaaaaattgtaatcaaacgaataaaaacaaatgataataagcagcacatggaaaccatttacagagtaaaatacttgtaaagcatccataaacaaaaaaaaaaaatccccaaaaaatggaaaacagcagagacattcgaaactatattctaaaaacaaaaaccaagaacatgcccttatttttctaaaattcaaaaacatccattatattcgatttagattccttcgagctatattggttgtgtgaaccaaaaacagaagaatatcatgtaaaagtcaaatttacaactttagctatagatgatataaatgtcttgtagcttactgattctaagaatctatctactcgtttcttcggctcactaaagaaagagagagagagagagaaaaaaagaaagtacaatttcataataataaatgaagaagaccgtaacaagaagtgtgtagtcgtattgattatagaattaaagaaactctgcaatatttttgcagagagacagagacacaaagaaagagagagagagagcatttagggagcaggaagtggagtgtttggttacgtgagctgttttctctttctctatctttaactcccttcacacctctccctctctcttcttcatatctctctctgtcacaatagtgtgatgatgcaatgagaatggagttgatttcagtgattttcttcttcttttgctctgttttgagttcctctgcctctcaactctgatgggttggttttgatgaagtttaaatcctctgttcttgttgatcctctgtctttattacagacatgggat

SEQ ID NO: 37131 - DNA, 1627 bp, Arabidopsis thaliana landsberg
  unsure (1)..(1627): unsure at all n locations
ataaacattggatctgattttgaaagatatccattaaatccaagatcataccgatcagtttttccaatgttcagaatatgatgcaactgtttcgtgtcattaataagcatcctcaaattcttgtgggtttcttcaagttgtactctagcttgtgatgcttcttcttctttctctattgcatatctttttgtttcaggaagcttagcctccaacttgagtttctcccttgtcagcactgaattctcttcaactagtttaagccattgttcataaaacatcttttagttgacagtttctatctcgctacaaccttctgtcacaggttctgatgcagtaacaattgcaggttttgatgcaggttctgttgtaggttttgttgcatgttctgatgcaagttctaatggagattctattgtagttgtagattttgtaacagtttaagtctctattgcagttgtaatctctgtgatagttgcggtctttgtagcagatgcaatctttgtagcagttgtaatcatattgcgagaatacctactttctgatttatttcttgacgtactttatgcaccatgatacaaattagatttctttacccatatttgacttcggaatccatttcagaaacatttcccttgatgtttgaggctacttactctttctctgaatttgtagcaatatgctttaatgtgccagtctttccacaaaaataacatctagtttgtttggttgcattactttcatatttgctttgatttggtagagaaacaccttcagctacaaaccttatttgccctttttgagatctttcatgtctagtatatcccaaacctctgttagattttcctgctcttgtagaaacagttagcttatccttcattaatgttaaattttcttgatcaaactttttttatccttcagctcattctgcagttattcaacaagtgtttcaagactatgcttctcttttactaaggcttaatcttcttgcccaatcttgattagtatctcacgtacctctttataacatgtagcaaagtcaacttcatgatcttcctcagactcataccctgacacttcttcaccatcattaaattcagcttttaccaaaaatgtaacgaaataattcacttcttcttcagcatcacttttttcctttgaatcatcttctattttctaattactaacacattcatgctaagtatatcctatatcttttcaccctaaacattttactttctttttcttaaatgtaggaaatttgtatttgaagtgtctagtagtggatctagaaacatatttagtatatggcacaatatatttaacatatacaaattttaatctaaaaattgtattgatttatgaaaagacatgtgaatgaagattcatttactgtgttaatccgccattgatgttagtatagtactctatgctaacataattcttttatactataaactaaaaataggtaagagaagaaaaatatattaatataaaaaacattttattacctgaaataaataaaatgaaagaagataatagctaattgactaaaacaattagtaaagaatatggngcacaatacactaattatttcatctttacttattggacanatttcaaaattatc

SEQ ID NO: 37132 - DNA, 2662 bp, Arabidopsis thaliana landsberg
tctccctctcctccgcttcttcacattccgatcattagtgttttcggagaaatggcgagatcaaatcagatccaagacttcagagcgtataataggcaatggtgaagttactccgattcaagtcgccttcctcgtcgatcgatacctctgcgataatcgcttttcaaaaaccagatcacttttcagatctgaagcttcttctctcatctctaattctccagttcgcgaagtaagcacctagagaaattcccaattttccaattccaaaattcgattcatctatttgtgagagtcttatagttttctgatttcgcaggttccgaatagtttgttacctttgaatgagattttaaacgaatacattcgtctcaagaaggagaagattgtgatggatcaggagaaatcgaaactggatcaagagaaaactcgagttcagaatctattgaatgggatgcaagatgtgatgaatgcttataacgctagcctcaccgctcctcctccggcttcagctccaacttctcaacagaaaaatcacagtatctcttcttcaggtttggagattttgttggttttaagctgttctaaattggaatgattaggttggttctccccattattaattgaagtagctctagctcttgtttgcttcatagatcttagtgcacatattaggcttattagaatccaaatctgtcacttgagaactaaaagagcagtgctcttatttttcaggcttatctcagtacaacacactaaatggtatgtcagtatcattgcttggtaacaaaagagtagattttggtaatttttccacaccttcgacgagtcagtctataactgggaaacgaaaaggtcctgaagtttctgtaacagctcctccggtatctaggaaatcaaggatcactagagcaactggtatgtttctgtgcctacatgtttattacatttgatgtagctcttaaactaatattgtgacttttttttttccttggaccagggactaataagttgccacaagctgataaagcagctaacaatttcacatctgaaacactagcagtggctaaaaactctgcaagtaatgaattgattggtaatgggtcaagtgtggtgaagtgtttgttcaataaggctgattcgtctgttcctactagttcaacatgctttaggacaccacaaaaacatgcttcttctgggagtgataagtccaacagttcccagaaagaagttactcctacaaatacaaactgcacaattgttacaaaggagagattcacaatcagccctctcaagcaaattacttcttattcagtggaaagaagccatcttatttctttttcttcaccggtcaagtctaacctgaagatgtcaaataagagagaccatgtgaaaggaaagctcaactttgatgacactgacacagaaacgtgcttagaggcacctgccactgcagatttagtttcaacttctccatctgggtctgagccagaagttgatttgtttgacatggacttttctaatctggatttctcggagctactagttgatttcgatattggttgtgaaggaagtgcaaatcattgcttgtcactgaccccaaatcaacccactcaaactgtttcagggtatgtactttagttttgtaggatcagtttttgtaaatagctattattacctcttgatgtctgatcatacgctatactaaatcacaggtcgtctcctgaatcaggggattgtaatctcgagtctgaccagccctttttggaatatacatcaaccgtgactgatgtgattcaagtgagtattttctgttctgcatttgattatagatatacattttcccctttcactcattctcattcttgatgcttcatttgtgtatcatattctagatttcaaaatgtattgatcctctctctaactcgagccattcttctcttaacacagacaagatttgaaagcaaagagtgacatgacagacaattgactgattttgaagactatgattgactccaagaccaccaatgcaagatcctctgttttttcctaactatgctgctagtgcttattcttgtaatgatctgtgaaatatgaaaaggctatcccataacgtagctcataattaactagtattacatgtaggtgtataaattaaacttggttttttggtctatagtcttaattaaacttggtttcttggtctatagttttaacagctgatttcttctctatattgatattgacaacaaaataggactttcaccattatgcatctatttgcatataccatgtagtcagaaactggcttacaatagaaattaaatgccttatgtttggtacatgagtcaagccaagtacttctccaacttctctacttcctctgtgcttccaatgtatagaggaaccctctgatgtatctgtgtcaagtattccaaacataagaattagtctgatgacaccaattttagatgtaaacttagcaggagacagtgaaactagtctaatttttagtttgagttacctcagtcggttggatatctagtactctcgaatgtccatcagaacctttccctccagcttgttcaacaatgaaactcattggtgcacactcatacaaaagcctaagctttccatttttgctctttgcgtcacgagggtaccc

SEQ ID NO: 37133 - DNA, 1135 bp, Arabidopsis thaliana landsberg
cggcgtgatccaacaagaccgtgtcatgagaaaccgacatagcccagcctgatacgcggttctccttctccaatcattaatatccctcttcttccctgcaattactctttattgtacttaccttttctcataaatctacaaaaatacaagtacgatttaaaacgttatgatcgttgtaaacttccatgaatggccaaaacaaaaataccaaaatctaccattggtcaatagactaatttttctttatttcattgcaattatgaagaaattacattgtctttatttcactgaaattagatatttacgaaaccaacggttcatatttttttttaacttatgaataaaataataataataataataatcaagtactgccaaaaagaataaatccgatagaaattcattataagatgagaaaaaagatctgttgagagaattcgaaagaaaaactcaaatgcaaagccatcagaatcgaagcaggctgagcttgattctacggtctagattcatcccttccttctcttcaccactctccctcttcgtcgtcctcgctgctgttcctcttccgatctacttttccggtctactctccggcagaaacaacaagccgctttcagttatggttcgtcgtcgctcttcctccactttccttctttattttgtttgttctgagatttgattcgccgattgtgtaatttgttagtgcagagactcaactccaacttagcttcttcaaggggggaagggaatatttcttgtaccactttcaatatcttggctccgatttataaacgcgttgatcaaaaggtttgcttctattcttctgatttcttcactctttaccttgttgattctggaatcgacgacattggttgattgtgttgggtgttattaacagaatcatagcactcgagagagcgatttccgcacgctttggttagctcgtaaccagaggattttagatttgttactccatcaacgctcttcagttatctgtctccaggtacacactttgtctcttagaaagagtcaaattttgacttttttttttttttgttaagctgactcttagcaattgtgactgttcgtaggaagtttgggttgggaatgaggaattagtgaacatgtaccacca

SEQ ID NO: 37134 - DNA, 1959 bp, Arabidopsis thaliana landsberg
tatctaggagctcagctactgcggaagctttgcctacaacacctgcttattcttcagataatgtagaacagacagaactacagaaaattagggtggtcattggagcttctctgaaactacctccaagcaatcagatagttgaagatcctttggttcctatgttctcgtctgttgattcgaaaaccggttttccaaaggaaggaatcaacctaggattttttcaagaggacaagtttgtccgtcctgaaggtttggaagacttgtatatattctgcactagtgatttcgctactgtagctaaggaagttgaggtcagaacacggagggtgagactactcgggcttgaggtacttccatttcttgcttgattgggataacatttcttgctttcatacattgcatgtaattgtaaagtctggctcatttgtctgcgtagggtgctggtaaaacctctctattccgcgctatactgggccaaagcatgctaagttcgatgactcatgtggaaaatcttcagatacaatctgatgttcaagaatgtattattggtggtgtttgctactcggacactgtgggcgtaaacctgcaggttgatttcttcacattctggttccacgtgttttaagttacatttttttcacataactgtgaaattctttttggtatcctgatgcaggagctgcacttagaggcatctcgcttcagagaagaactatggaaaggagttcgtaatctaagtaaaaagatagatttaattattcttgtgcacaatctctctcacagaataccacgttaccaaaactcaacaacactactgcagcaacagcaaccagcacttgctcttctgttagatgaggttaaatctcttggtatcccttgggtcctcgccataacaaacaagttctcagtcagtgcccatcagcagaaatccgctatcgaagctgtacttcaggcataccaagcgtctccaaacacaaccggaattgtcaactctatcccttatattatttctggctctggaacttcctcattgccttgggcagctgtgaatgcgggaaatgacggatcagtaggcgtaccgaagatgatattctctccactcgaccttgttaaaaagccgtttcattgatatagacactgtttttccagtggatggtgtgaattctctttgcgagcttgtccatcgtgtccttcaaactcaagaagaagcttgctttgaggtattattactctcttacctgattcagtgcttaatgaaaataatgatattgatgtcgttgtaatgcccaagtcacttcaattttatatctctccattaaactttcaggaacttgctagagacagactgctggtggaactagccaaagaccgtgtcgtagatggttcacaggccaagtcatcatcaatgtcagcagcagctgtaggtgcttcacttggagctggtcttggccttgtcttggcagtagtaatgggtgctggttccgctttacgaaaaccctgattgtacttgatcaaccattccatctgttaatgttatatatttttctatgtacataactcccactaaagttcatgttttcgccattttctctattcggtcaggtcatttttgtttaatccctcggccagaaccaatgtgtagtatcaagacaaaacagattgcaagtatcttattataagtctgacttcataaatgataattataaccttataaagctttctctggtaaaaacaagattgattgaaatcatcgggagcaacaagacggattccgccaagagctctcggagccatcttggttgttgacaaggctgacccggttaacggaaagctctgctttgtaagcatcagagttgagaagtttgcggctgacattgttgaagatctctctgataacgatctcaaaggctttgtctacatttgtggcgtccagagccgatgtttccataaagaacaatc

SEQ ID NO: 37135 - DNA, 3900 bp, Arabidopsis thaliana landsberg
aataataaattggtgccatttccatacgttgaatccaactcaaaatcataagtaacttatttagtactgtgtttcttagaaaaaatattaagagagtaaatggtcaatgtgtacatcagaaaagccgataacacttaacattgcaagatttatgcgtcttactaagacggtcttagtaatgacatttgctatatagtcaaattgactatcctaactaagtaacgagtccgtcgcaaatctaagtcaaatgtctcacaatttatgatggatatgagacgacttacagaacaacagatttactagacaatttacagaccggttttgcatgaaaaaaatttggaaaatacatttctttttttttcttttttttttcagggtgaattgttaaaatgactcttttggaagacgaaataaataatatagcaccataaaatctataatgtattgaataatacttaggtgtggtaaaaagaccacaaactccttccaacgaaaaagatggtaaatgtgtgaagcatgagaagaattgaatacggctgggttacgtggcgttgttttcacccaagcaattttcagtagcatcagcaaaaaaaaagtcctgcaaacagaacataatagaacagtatggatgagggtgaaaatagtttggtagttaatacgacgattcaaagtgtaaaggtacatatatttcgctttcgagcttcactttgtttggagaaatagcacattgtttataagtataagaaaactaaactctaaggatgatagggaacacaaataacaagttgtatgaatatatgagatgaaacttgtaaatagaatagtcattgaaagtctcaatctcatattgttttgctgcacgtactggaaattgatgtaactccaaaaaaatctgaactcttgcctctgtaaattgaaacccccaattcattttaatcacaaaccctagacgtcatttccgaaaattaacagcattgcttccgtcgccaatacacctccgctgattgttggcgaaatcagaagcttcagaaaaggtggactgtaacttaatagggatcaattattgataaagcacaaaaaaccttgtgtcatttgctcccataccatttttcaatattctcataagattaggtacttctctcatttgagtgaccattttaccccttttctctctcctttgcctccactgtcaccattgttatagataagatgcaacaatctaagcaagccatgatcttcattctccctcaaagaaatcaataatgcaattcgtcggtggtcgaatttgattttgcaattatgggtcttatgaaattatgatcagcttttaagtgtagtttccaaaataatcccaaattagttgttactagagataagagtctgggtgagaaggaagaggccgtcttgttgataagatgttgtcatctttaagggattcaaagaactccatggattaagtttatccaagtaactctctatccaaagttctcaaaataatttagattcttaattgaaattcataattgattctatatgtgtctttgattgaagcatttgggttccctatactcttatagggtttagatttcactaatcaaaacaaatttaatggggattcattgagtttaattattttgtttgggttccttttgtactatccgttaggatatagattttattattattaggtgtgtgattaaaaacaaaaagaaataaaaaacgaaactgaaattttttgggaatattaagatgagaaagaagcgatgaagaaagaaaaaagaaggaaagaagaataaaaaagaagaagatgaagaaaaagaagaagaatgagggcaaaaccgttatttcttacagcagaatgtgtccatctccattagcccaacaaaaagtactctttttagagtttttggacttaaatgtaccccaaatacgtaaaagccctaacttattagagccaaaactctgtttgaaagttaagagttggtgagagagaagaatttgtttcatgcgaaaaggagaagacaaagagcgtgtgtctcaaacaggaataacgttgtcattattacagaaaatacaaacaatatcaaattactttttttggaatgttagttttttaaatatataatatttttgtaggttataagcccaaatttctcttttttataattagaacaatcaatttctaattagacataccttctaattttgcattaataaacagacctttacaagaaaagtaattatctttccctttaacctagaaaacaacaatataatatgtctactaagaaatagttaatattaaaaacatacaaaaacttcacatgtaaaatcagacaacattttttttttacgttttgcctaagattgtaaagaatgaaacgacttgtattattattattatttttatttttgcggtctggttctgcacttcaaattgaattaagacatgatttatttattttctgaatttgatggcccatcccgttttccacctctaaatagtaaatagaaaccagataagtaactaatttactaattcacaaaaatatttattttccttgcatttatttattttgattattgttgaaagacctgatctcatcacgtatacgtgaaattcatggagaataaaagctagaatactaataggaatttaaccagtagtttattcaagttcaactgaatttcactgtttgtcggtgcacgtgtacggtcgaccaagtcgtcaagatacgtttcccactaatagcattaaaacagtaacactattcatatataataactttatcataataaccaaaaatgaggttttagcaaaaagcagaaaaagagaatataactgataatatatatatagaagggatttattagaactcaagatcgaaacctgaaaactgaacattgcttttatcgccagcaccatctccatctacatgcatgggtacagaaatatcaggatcttgggatccaacccggttttcctcgggtcgggtgtctagatctctggctgacgtggccgtggtggcggtggtggcggtggtccctgttgggggttggctgtataaagctgtgagttggtgaaaataaggacaagtccttgagtcaagtggtctcttcttgttaacatcttttgtcttcctaaaatacttgttgatgttttcccatttctctttgcatcttttggcacttctcttgtacccaatctccaacattttcttggatattctttcccataatggaacagcttttgaagatgttgataatgagttctcatctttatgatcatcatcattcatgttactgatacttcttctaatgttgatcagagccaacacttcatcctttggccatctcttgccaagatcacttttatcatcgctttttggaggttttgggttttggttttttggttttagggttttagtagaaaaaggttcaagtgatttgtcaatggttaaaaggttatgtggagttagggtttgaggtaatagtgatgatgaagtttgaaactttcttctgccttgggtttttcgtagagctaaagaagatgagtcttgagaagggcttgttgggttttggacaacatcaagatcatggtctgtaaacttggatatgaacttgatgatgttggtgtttctatcactagccatggcttgttcttgtgctctaatctctacctctttgttaactctctcaatctcttgcttcttccaagcttcctctctcgctatcttctcttcttccttcttcaccatatcttccaggagtttcatatgcatctcctcttgttgagctatcatgttcctcactagaccctcacaaaacccttttaacacaccaaacctctctttctctttcgtcctcttcttcctcttcttctccttcatgatcatcatc

SEQ ID NO: 37136 - DNA, 7189 bp, Arabidopsis thaliana landsberg
gaaaacgaaaataagtttgagagaatgtgaagaaagacttggaagttgaaaagtatatatagactcggtttaaagattccggttcaattgcggtttaaagatttaatattttttactttttaaattttgtcaaattaaattaaaccggttcaatttcggtttaaaaaccactccggcgataattgtgacatcctaacattgaattatcaccgccggactgatgagtgtcgccggcgtccaccgttttagtcttcctctcccgccggtactcttattttctcttgctctcacgaacccctgatgtttgagctgaattactaatcttgctgctctgtttccacttttcagaagtgttctctccgtacttttagcgtcctcgccaatggcaagcgcactcaatctctgctaccacatcacttctccgtattcaaccaaagtcaccgacttgttacctccttgagtcacaatgttggtcttttttctcctcttaatggttgctttgattgagaattggtcctgtgatcagtttgttttgaattagaaatgtgctcttacctctttatctgtacttgtctttcacatcaattcttaggtttccaacaaatctgatgcagaggcagagcgttcctgtgatgaaggtatacctatttcaacttctttagtcctctagttgacacattcattccttaacttgagatttcacactgtgttctcttctttctaggagaaatgttggataagaataggataagcaagaaaaacccgtttgtttcggaagagtatgtgatatactaaatctttcttttggtagattttttctatgactctatgctggtgcttgtgagtttgaatatggagtttactagttgtttgtttcttacgttttgtttaagaatcaagaggaaccaatatcaccgattatgttatctcttctttcaatactcaatttcaaacatgttttctgcctcttgtttatgtgtggaatgttttggttcaaatatttgccttagctacttatttttccacttctttggtaattatgacaatgtcatttgtatttcggatatggttctgtccaaatattagctaagatgctttcggttcacattgtatttctggaaggatttggggaatcaatatgattttaacattaacaatatgctttccttttcataaatttgcctgccttgatatgctaccaaaattgtaggcttctcaagaagttgaagagatatggactctctggaatattatcctatgggttacttaatacagtctattactccacagctttcctcttggtctggtgagtagaatcgaattttgaccgtatatgctctgtgtaaagctacaagaacattgttctccatcataacatacttgagccagaacaatgacgattatctatattgttgtatataggttttatgtggctccagcaccgggaaaaatgggttatcttgctgcggctgagaggtatggaatatttttcagtatttcttagagttaaagggacgtgatagattcgtgtagcatacagatttcttaaagtgatggccatggtctgggctggaagccaagttactaagctcatcagaatcggagggtaagtagcgaatataagtttcttactcagttagttctctatagcttaagaacatcagtgtgctctcattatagtttcatggaggaagctgtttaactgcttcctgccagatcatgatgatgcactccgaatctttcatattgtctcatcatgatagatgtgcagactatggcattattgtttgagcatcaataatcagaaaatcatatgatatgcaaagttcataaatgtaaaatatttgtattagtaggtcctgaaaaagtgccaagtacttcacccttttcatgtgtaggtctacaatagagaagtaattgtttcagtttgatcctttggcgcctagtagacaatgcaaatcctttcatattcagtcaaaatgaacaattcataacaatgtatcaactataagtttgtactcgtaaacgtgtagagaacatgttaagttcttaggtgacaaggtaatgctaggagaagtggtcataatgtattagtagtagctaatctattttgctagagaaagtagttcaaaaccagttatagcatagtagatggatgcaggacagtcgcacttgcacttgcatttgtagttttgattgttattgccgaccttatcttgttgtgatgttgttacccatgaagaatgttgatggatgcagggcagtcgcacttgcacctattgttgatagaggattgtcgtggtttacagtaaaatgcaactttgaaagtcagggaaaagtgaggcacctaaattactcttgagtaatacatatgtagatagttgatgatggtgatgaaagagtaattaaattctggatgcattgcttttgacaggcttttggcgcactggttgggatatgtcttggtgtggctttgatgctatttatcgttgtgacactgctttgggcatagcagaagatttatcgttgtaataataatagctacagcatagatctggctccatcaccaagtttacttgtttttatcgccgtgggaagtcatatgattactataacaaaggattactacagcagcctacaacacaaccaataaaaaaaaaaccacactttctcccttgcacaaagttaacttattcataattcgtgtcacacaagaccataataaccatatattgaagagttgcaaacttggactaaaaacaaacagttgatggaggaatcaaattaaatactacatggtgcatagacaataatcaaattcattgaatagagattaaactagggaaataagaaacaggaattccgatggagtcacaagtgaaagcagcaacacatgatttggtttcgagatcttgtatggttagtgtttttatacgatatggactacagtacaacaacttcttcttgttctggatttgaatgatacactcagatttagcatcaagatcttattcgtttgcaatattgattgttttgttttttgcacccgatgcagaagaattgtacgtaaacacaaataattgggaaaagattcagaagagtgctctcttaggacaagagttggagctggcaaagcaaaagatgaagctgttgcaaatctcagagttgaagtaacaacaagacatagaaatggttatttggggaggcctgtttgaggatggagaagagcttgagtttggtcttgaagcaccacaggacctcttccaggtctgctgcatataaaataactcacttcacctttttgatcctgacttccaattttgtctttaattccttgtggaagctctccttccaagcctgcctcttttactatcgatgtatcccccagtacgtaactatacaaagtaccaaaacaccatttttattagtcaggaattaaatcaatcaatcagatcaataacaattcctatctcacctcttcatgtctgtgtcaggcttaggagggaagcagtagagcagcccctgcagcaattcaactgctactttcctgtttcttgcaatcatgactgcatttgggccagcatcaaatgtataagcaatctgtccaggacaacgagattaagatcagaagacttgtccaacgtcataatctcgaaacctatatgaaattcaatacttgcttttgagctatggagtaagcaagcatacatacctctggtgtaccggcagaacggttccacttttcaactaagctgattatcctggcatcattagttagtggattgcgatcaataccacatcactgatagctaaaagctgcaaatgactgccaaatgaaacaaaataagagaaaaagatacctgtgggaggtgtcattcatgtagaatatgggtggagatgtatccatacaaacagcatgaaactgattactgtctgaacacgtcaattttgtaaaagatgtgaaatctcgattctttatagcttcttccatttgcaaaatccgtactgggacaacttcctaaggagaatttagagcacgaagttaaggggactattttcatttttgaagttaagcaagcacaaccaaaacaattcatatactttgtttaggaacccaacaaaggtaattttaggtgatacagactgttatcaatcatcaaaaagagaacatacctttgctctatgctgtaaaagcaaacttgtctcaacactctcacgcattcccgaggtgctgcttgtttccttctgtcgtgaactaacctgcatgtaacacaagctgtatgagatgaaaaagatggacaaaaaaaacaactgaacgaagaagcttttgcaggctatgatggaaatgataagaaaacatagaattatcacagagttaagatcttcttattcaagaaaagcagcagaaatgtacttcttcgtatagctcaccttcattcatatcattagacaaggaagtgtaacaaaaagttaattagagactgacataatatagaagatgaagaataggatcgatactgcgcatgaatttaaaaatgcactagattaaaggtatttaagattcataccacagcaataatgataacaagatcatcccagtgcttatcatctaccagttgaactgcaacactgtcacttccatcttctttgtttcccatattccacttgacaaatcccccaaataaactacggcaagcacttcctgaaccttgcctacatggagaaatgacaatataagttataatcatatatactggtaccacttattttctagaggaacatcgaactatacatgattcaattaaaatcacaacttaaaaaataacaacagatgatatttaacagtcactgtaaaacaaggataatagtaacttgtacagttaacatggaagatacaaaaaagatcattaagggtgaaaatgcgagtcaggtaaggtaagttataccttgctatagcagaaagttggcttggatcttcatttacattcatcaacttggcaagagcaaaaactgtacccaaaagcaagcgttatatactactacattgagcaatttccattccaaaagatagatcgacttagggaatctagaaaatcattcactggaggaaagagacaggatcaatgtcattaaagttgagcaattctaagctacattatgcagaaaagatacagatctagaaggaagatgaggaataaagagaagaaagccatgttaccatttgatcgtgtattatccagagaatctatgctaaaaaagatcaatcggacactgtaataaagttcataaatccaacaaacaaaaagcacctacattttcatgattgtactatctcatcctagcttaaagcaatcttcaagtatccataaacatacaatgaggttccttcactttaacaatgacaaaaaaaagaaagagtccccaaacggcggaattttcgtgttttatgctaacgaaccaacacccacaaggaaacgtagagaaaaaatcagagtacctaagcaagcaaaaccagcagcagaagatgctaagccagcagcagtagggaagttgttatgagaagcaatgtgcagatgcagcttctcccaatctttcttcgcaatcttgatacccttttctttatcttctacatcatcagcacgacttcgaatttccctcaagcaattctggtacctacttccagaaagcgagatttcctatactagcatgaaaccggaaaaaaacaacatcaacaaaaaccaacaatactcaaatgcttatagatcacaacaatacattacctaatccaagttcattttacaattcaatttatatgaatctaagcttatgagaaaatgaagagcaagtagtaccttgccattgagccacattcgatctcgatcaaaggaaggactaacagcgacggtggtgagagtacagaggtgatcaggatcaagcgtgacgctaatgctatcattaatgggaagaatccgaacctcatctctctttccccaatacttaatcacggcgatattcgttggagtctgcgccgtcaccatcaccacccatttctcctccgccattaacacagctcaagctttttcgattccagagatctgtgtagctttgagaagattcaaatagaaatgaaatggaagtgacggagagttcgaaagagaaagaaacagctcaaatcaggtgggagattaaaataaggaggatgatctcattggtacgattcagttgcgtccaaactgcacatgcgtaagcgattcatgattcttaattttttaatatgcgaaaaaatcaaaataaacacccccaactcttaaatattcttacgaaataagcgtgtactcttaaattaaccataaataacctccaacttttaaaatattcttacgaaataagcgtgtactcttaaattaaccataagtaacctccaactttgagttgacttttaacaaaaacagttgacttggtgttactgtagtatgatgttgataaacggttggtcaatttggacattgtcaacactaagttcaagtttacctgatacgattttaacatcgagtctaattaagaggaagtgaggaacaaagagagaagggatgaaagtgatttaattaatgttacaatagtgaaacagccaagttcgaagtctcgtttcttttatgagagccagacaacaagacagaggataaattaggaggtagccaaacataatcaatggcatccatttgcaggtgcaaatcaggcaaaggcgtgcttgttgatcccattaataaccgggccaacaacgcccctggtcgccttcacatatgaaaggtattcgctataatgcatgctgaataatgtactctggtaacgcgttagattgattcgcctacgcactgcttctgttattacaccattgtatcctgctttacgcaccagcgaatcgattgcctctatctttgtccagcctggggataaaaaaagtaatcgttgtatcaacaataccaatagcaacaacacgtacttgaattattgtattgaaatggtaccttcatgagctggcacctcaggcaaatatgtggcgcttcgctttgtattagtctcaggttcagtaaactcaatgattataccatgcttaccaccctttagagtgaaatcacaaaacaaaaaatcaacaacgggacaatgtataagacaaactacaaacaagaag

SEQ ID NO: 37137 - DNA, 2403 bp, Arabidopsis thaliana landsberg
  unsure (1)..(2403): unsure at all n locations
tggtattgaaaacattatattatctaaaactaagagcatattttaaaatgtttgtttaatttctttgttttctgaatccatcttgtcttgatgcattgggatattcagatagcacctccccgctcctatgatggctctccgagcgattttgaccatttcaccaactagaaagccttatcaaaatctttgtgctttcttccgtctccaagagtaaccattactttatcgagttaggtcgtaggttctgccgtggctcattcatactatgtctcaaaactgagttagggatggtaactaatttggcttccccattttcaatgtttgttcgcttacgctataaaggtgaaccagaatcagcccacgaccctaaccggattaaaccgacattgttcttcttcccaatctcgtttcggcccaatattaaaccaacgagccaatactcccttaaacgattatttggggcaaaaagactctcaactcaattcacatgcccattaaaggcccgatataatttcaccgtccaaaactacaaattcgtttcggcttgcttcatttctcagcttctggttaatgggtggtaaatgatagctctaagaataaaggcttttctctactacataagaaaaaaaaaagagaaaaaaagaaatagcccatctctacttgtcccttttattggcctgatttagcttattcaaaaataagaaaagaaatgggtttgttaataataaatcagtaatactaatctaacggctaattgtcaaatcgttgagaagacagtcgaacggtaagtttaattttaaaaagatcaacattatagccgttggtgaagattgccaacaagccctataaatacttccactaaacttttttacagccatccaagtggaccaatcttttttatttggctaaaatgtcaattgaattcagatggtatagttgcacacaagaaaaataaaaaataaaaaaattcagatggtattaacagtttacatattcacccttaatcaaaacggaaaangagagcataaagccataaagtaaaattcagtctaaaaagctgtaacaatttcttaaatacaaacgacccaatttgttgagatgtgaaaaaggcaaaaacaagtcactacatgaaattggatgttgtaggcccaatttgttgatatagtaaaaccgaatcattttttatcaagcattaggttggaaattggttggcccatagagtatgtaaaatcaaagtagaaatggagaaaaagtgaaaaacaatgaaatctttcttgtttattttgatttttctcaaaatttacatcttttcgattgttatcatcttataggtcttttgcaactctcttgcctttgtcgtgcttgttctggtggagaaaggagtcgttgttttgtgggctcttgtgttatgttgtgaaataggtttggtgacataaaggcccattcctatgatgagcttaagctaaccaaattatacatttattgttagattgcctctaacattttcacaataccttgtggtttgagtctttgagatactgttaccataagataagaccgagatataataaccacgtgctctctattaaaatcccaagcgtgtgggtcagagtctaactcgattagagagaagaaaaaacttgttcgaggcttcgaagaatgtcgatgttaatggctgtcaaaacaacttcactctgttgtagcagcttaaaccttacagcttcaccaacattccgacggaacccacgcgcggcgagattggtgaatccgacagcgagaatccaaacacgttttcatcgcctgattgaagaacaaggcattgtgcttatgcctggatgctacgatgccttatccgcggctattgtgcagcaaaccggattctccgctggttttatatccggttacgccttatccgcttctctcctgggaaaacccgatttcggtttgctaacgtgcgccaccttttttttctttctttctttagtaattttttgtttgtatgctgtcgttttatttgtgttctttcgtcgttttagaccaccggagatggctgcgacggcaaggtcggtgtgtgcgtcagctcctaatatacccatcattgcagatgctggtaaagttgcaaaattttgatagtataataaggacatcattaaagaatgcaagaagcttaactaaaaccaaaaaaggaaaaaaaccatttaaaaacattgattcgttgattctttaccaaagattgaaagtatcaatctttcttggttagagtcgcttgcttgcttatagttctcttcatagctttttgaaaatagtggatttgcttggttatagttctcttcataggtttcttttgatctttttaagataccggtggaggaaatgcgctaaacattctaagagccttatagg

SEQ ID NO: 37138 - DNA, 1943 bp, Arabidopsis thaliana landsberg
ccgcctatatcttcaagaccttaacgcgttacttctttatttattttttatttttttgcttagaattcgtatttcgttttgcgatgaacatgtaaatcataagataatttggaatattagttttcattcgccactaaatctttcaatacattattttgggtgatgaaagcacaacttggcattgaaagtttgaaacacataataggtttaagaaatttagtgggaagctaaatatccatgagattattttgtggattgtgcaaacattgtagagacataagttattatcggattgcagacgttgcaaaaatgtgtacacaactgttaacatatgatcatatcataccatatggcctcgtttctagaatttcatgtgctgttaaatgaagtaactgttaacatttaccatactcagaaatggatgtattatcctctcatatgatctttcttcaggccgatctacctctcgatcaattcttgtagttttgaatggttaacatatttcatacttaaattctgttagctttagatttttgttttcttcttcttcttttttggtataatcctgttatctttagattcaatgttctctatattatatgtgattttatacgttcggaacattcagaacatgtcgatcaactacgaccgaaaataatagaagggaagaagagaatcaataatgaaacccgagcgagggagactaacctcattttctttctttgtattattaatatagtcaatgtctttttttgtattgcttacacacaacaggacacaaatttactaccatgagagatagtcgtaaaaagggataaaatgtaaatgtgagaagctatataaaggatgctaacgggagagagtaagagcatcaaacacaaagcaaaacacataacacaatgggggcaccaatggcctctttccttgtcttagcattctcccttgcttttgtctctcaaaccaccgcaaattacttctactcttcccctccaccaccggttaagcattactctcctcctcctgtttacaagtccccaccaccaccggttaagcactactcgcctcctcccgtttacaagtccccaccaccaccggttaagcactactcgcctcctccggtttacaagtctcccccaccaccggttaagtactactcccctcctccggtttacaagtctcccccaccaccggtttacaagtctcccccaccaccggttaagcactactcccctcctccggctttacaagtctcccccaccaccggttaagcactactcccctcctccggtttacaagtctcccccaccaccttttaattattactcccctcctccggtttacaagtccccaccaccaccagttaaatactactcccctcctccggtttacaagtccccaccaccaccggttaagcactactcgcctcctccggtttacaagtccccaccaccaccagttaaatactactcccctcctccggtttacaagtccccgccaccaccggttaagcactactcgcctcctccggtttacaagtctcctccaccaccagttaagtactactcccctcctccagtttacaagtctccaccaccaccggttcactactctcctcctcccgtagtataccattccccaccaccaccggttcactactctcctcctcccgtagtatatcactccccaccaccaccggttcacatactctcctcctccagtcgtataccactctccaccaccaccggttcactactcacctcctccagtcgtataccactctccaccaccaccggttcactacttaccttccttcagttgtttaccagttccccacccccacccaaggaagcactacccaataccagatttttcttcttcttccgggccgattaccttcttcccccttacgggatttcccatttggtaacttcccttcccttcca

SEQ ID NO: 37139 - DNA, 2393 bp, Arabidopsis thaliana landsberg
cttgtgatttacctttggagccaaacagtcccatgtttggttatccagagaaatttgaccatgaaaagtaagttgatgttgaagttttaaattgtaaaatctcactgcatgaacatgcaggatataagtatagtgtgtaccatattttactgcaccttctgttcaatactcagtgttttgttgtgcagagtttctaatgattggtgttgtacagtgcagaaaaagatgaaaacctttcgttgcacaggaaactggatgggtctccaaatacgtctggtccaccatcaaggaatatgctgttacgatctgcctctgcgctagagaggaaattaaggtgataagcctacttgttattattatttttttgtgctaaccaaccccaggtttgaatatagcttctggtaaaccaagcagtggaatagatgaccgtatgtcattagtatttatcttttattcttcagtttctcacagagcgagtcaaacatggctaacgagttttggcggcagagccggaggaaggtcattgctgatcagcggactgctagttccaggtactctcatccccgttgaattgtatatgtatatgcatttttgaaccaagttccaatctaatttcttagatcgtttttgatatatctcgtctgaagtcccgaacatctttccttccgagcccgtacaaagtccatgctaagtggcgacaagaacttggcacgagatttcaccggggatgttgccacatcaaggtttcgttatggtgttttgtcctttgtaacttaggattatgttggaaaaggtctttgcagacttgatttgagcttttagttttataaatatgcaatatattgctgcaagagggtatgttgtttgttggtgtctcgtttagtgcttaccgagttcttttgtctagtttttgtgggtgtcagagaaccttgttctcatgcctaaagtttgttaaaaaaatgcttatgtattcagttttcacgtgcagctgcaaatctgttggaggagcaataatggaaactaagagaataaggaggagaagcatcagtataactcctgagattggcgatgatattgtcaggtgggtgtttagtttattgctcattgaacttcatgtgcatggcaaagctagtatgatgttttttttaactatctgcattttgggttacatatatagttcccctcataacattcttctctgacttcaatatataattatttccagtgataggttgcagttgtatacagtttcaccatatatttttttctcagttgtgatttcatacatgatgtttaggacaaaattaatggtacactcttatggtaaatattaaaagaatgccaagagaggggcgttctttttctaacttgggatctcatacatcactgcacgagcatgtgattgtataacattccatatatggaactaaaagttttagcaattgcaatggttgttacctctcattcagatttattgaccattaactatttggaacacggagcttcagtgtttttggtaattattatattgataactttatttttaaaattacctgttaatctttatcagggcagtacgagcgatgaatgaagccttgaagcagaatcgcctctcaaaagagcaaggggatgatgattcatctcctaactctccaaatgacagaaccgagagctctcatctccagaaaaatgtacgctaagcttattaatatacatcactgaaatatattgagaaatttggctatgctgcttgcttggaatcataatagttttactgaaaacaaagaaacttgggctgcaacagaataccaaaccgtgtctcttttctcgttgactaagttgaaagtggaagtcctgaatttcacgaaatgaaagaaaaatcctagaatatgctgcgttgtgatttttaggaaataaaaatttctgtttcaacaacaacgcacaatgatcaatttcaagtagatgtttatcaaacatgcttaaaattatgattcttggaaacgttcactcattttggataacgacttataaatttgtggcttaactagacttctctgcttctaggtctctggttttcatcttgatgcccatgaccaagtttctggtggaaggtcgacactttcaagggaaccactagatccgcagaaggcaatctcactaccttcttctccccagaactaccgaagccaatatgaacagagtggatcgtcacatcgcaatataagccacatctgggataaagtattgggatctcccatgttccagaataagccattattaccttatgaagaatggaacatagacttctctgagctgactgttggaaaacgtgtcggaattggttaggatctttagctcaatgttttcgaaattgtgtgttcttaaaaaaattg

SEQ ID NO: 37140 - DNA, 2031 bp, Arabidopsis thaliana landsberg
tttgttgcttcatatactggagggtaccttttataaagttgcttgagacttatgtgattgttagatggaaaactccacaactaaattaacattttgcaacgcaggatgaagggaaattgctatcttgaatgggttagggtgaaaaataatggtgttaaggaaatattgagtagtgatggtaagttttgatccattttatacctttcggttcagattcctttccgccgccttaaaaatccgcttcagattattcattatgatccctgaacagagtttttggatttatcactggacgatgtcggggaaagcattgaacttatttacactcctgttcgtgaagatggaatagaagggagtccaaggagtatcaggactgatggtattgctccaggtgagctgtcttttcaaatttgaaagaatgtcaatcttgtacttagtttttgtagaatgtccatttaagctaaaggttatacattctatcttgggtttgtacactgttttcttaaatttacttatctcagctccttcaatttttccttgtaaacagcaaatcctatggggttggagcttttaattcctgactgctgtgagaaacaagaggttgtgcctcataaaacttattttgggggccatgaaggtgttggagagtacatctggtatcgaactaaggtcaagttgcatggatctgcacttacggaaatatcctatgccggtgaagaggttgttgtttgttgtagaacattgtaagagacatagatttcccaaactgtgttcaaatttctttcttagtttattcttttggataagagtgaatgatctgattctcttgcagaaaatatactccatcgcttgaagatgtgggggcttatctagtcttgtattggattcctactcgcgtagatgggagaagtgggaagccagttgttgtgataacaaactctcctgttgccccaggtacagatattgtcacactttctattatcttgctaattttgtcctaatcagataaaacattgtagttaccaataattgaataatcattgcaaatatcaatctagtttgttatgctaatgactacttgcataatatcacctatcgatttaagctttttcttaacctgtcaacattcttttttctccaatctgtttaagccatagagctgatgtgtaaaagtttatgttctgacggaataaaatgaataatgttgcagctgatccagaagtatctaatgttcgtgtgaagaaacttttttcggatgcttattctggagaaggagagtactttggtggacatgaaggtccaagtctcttcagttggtacagagagaatgatggaaccattgatcttattgatggggctaactccaaaacgtatgaggtgactgagtcagattacaattgccggatattgttcgggtatgtttcccctgccatcgattgctttgattatttctttagcatgcgtgtatttatggctgttttggtttacacttttgaatgttttagttttgtctcattcatgaaataaactcctaggcatgtgttaacgggtctgaggcctttaagttttcagaactggcaatggttgtcagttcatcgattttaatgtttcttgttttcgaagtactgatatagggttccttagctccatgatggtttttgacttttgtatgcgaactttgaatcttagaactttttcaacttattttgcaggtacacaccagttcgttcagattctgttgtgggagagctaaagatgtctgagccaactgaaattatcctcccaggtcttcattcttgatcactagcaaaagcttgatttcattgatttttgttcttgtgttatgttttccttttttgtttccattttgttgggtttcttcgagggttctctttgcaacacaatcctaacactttgatcacaatacagaggttccaaaagtagacatgcttgctttcaccggaaaggctgtacaaggtgatgttctctcagccgtccaagtgatcccaaagactgaaattcaacaacttg

SEQ ID NO: 37141 - DNA, 1561 bp, Arabidopsis thaliana landsberg
  unsure (1)..(1561): unsure at all n locations
cacggtatcaccagttaaaatctgaaggtaaaaaggttatatatgaatttgtaagaaaacaacaaaaattaagccgatctatttgtcggcccagccgctaaagagtcaattatacccctataattctcacgcggtttaagaaaataaaacaacaagtaaggggtgtatctgtcttctcacacataagatttttttttttgcttattaaaactcttacgtattgttgtttcctattctcaaatttgtattttccagattttccagaaaaatctcacagcggtaagaaaaaaagaaaaagaagagtcagtggtcttgttgtttcgttcttccttgttcgctcnnnnnnnnnnnnnnnnnaccaggaccaggagacgcgcacacaattcgcagaatgtaacgttgttgctactcttcttctctcgtttctgtgacctaagaaccattcgaattcgctgctccgtctctctggtttcgtccttgaaaaatcgtctaatcgagattcctttctctagccacccatctcaactgctgagtagcaagctgtatttttgttgacctaactaaaccctagcttcttcgaggttttctcttgattcccttgtcttttctagctcccgaatttgccagttttacttgattttcatttttcatgtgtgatgtgtgtttttctatgtaattggatcttagggttttttgatttgggaataactctttgaaatcgcatttaagattgtgtctcaatgcttttttacgatccaattccttgagatgttttgtagatttctttcagtcgcttaattaggggaatgattggatgatccttcctgtgtagtaggaagaacagataaagttacatcagattccaatttttaaaagagaaccctagtttactattaagtatgtggacgattctatttcatatgaaaggtcttggtgttatatatgtcatctgtgtatatttatctaaaactgagtcagtatagtgcatgctttaattgaggagactgtctttcactttggcagtggcatttttttgacgagtgcttctcttccttatcatggactggatacacaaatctactccttttatggaaccttcgaatttggcaaaactggttcaaggaaatgttcctcttcagccacatgacagccattcttcgctaactgatctagatatggaccttagagaagtctatttcctgattttacattttctttctattggcccctgcgaacgaacctttggccacttgagagacgaaattttggaaaaagggcttttaccccgtagatatcattcctggtggtcaagaagtggcatttatagcgggcgtgctgatgatgatggcatctccctccccttgagttatgataatttgatagagaggtactgtttctttttttttttcctactccactcttccattgttgagttactatggaagccttgccatagcttattgaaaggtgctgttacttgtctctcaacatggggactggtttgtcatttctttatgtgagtgttcccacctatctaattgtgcccaagttttttttcttt

SEQ ID NO: 37142 - DNA, 1517 bp, Arabidopsis thaliana landsberg
  unsure (1)..(1517): unsure at all n locations
aaaaatctgtcggtttcacttttaggatgtttcgtttttttcttttgtttttctttcaatttgcattatgtttttcatatagagtgtctgtaaatatccattgcactcgtctctctacaaaggtgaaggtctacaagactatacaccgttgttattatttatcttcttcttctttatatcaatcatccttaattacatttcagttgtcttcattttctcaaagtgatgatgatgaaatcgatatatatgcttattgtctggtcatggatatttatttccagtgtgttgttttatatggactattattgccgtagaccttaacttcagcgatgtttccaatgtacatcgtgtacaataaacattttcattcgtcgagatgttatcatatgtttttttgtatgatcattgttgagaaagacaatgctattatttcatgggggtaccctactaccctaggtaaacatagcttgattaagcatattcctacatatttatttggctcttccttaacagtccctttttaaaacaaacacgtccttatgtgatcatagttatggaagtgttgggctgagtttagaacaatcagagttttaaatccaacaaaaacgaagaaaatgctagggaaattcgaaattgctatcgaggttttctttctatgtggcttgtttgattgtatatatttcggttctgactttgtttttgtatttttttttcttttgtacaagctagagataactggttttaacatatggttcannnnnnnnnnnnnnnnnnnnntttggtttggttcatttctcatatgaaaataaacattatgattttagtatatatgaagcttaattttgacaagtttataaatgagttataattgtaagttgactgtggactaatgcatgatctaattaaattgtacacttaccaaaattgcttatcttcaattctttactaactagttgaaatctgtttctatatatctctcatttcaacgttttgttttaggtacaaagaactcttccagagatgaacttctcatatctagaaaaaaacctcaatgaggtttgaggaaagtaaaaacaattgtcaaaatccgagaaaatctgagaaagtaacaaacggcaaaagttacactatctcttcggatattgtttcacctccatattcaaattcaaatcccatcagtgatcacgtacatcccgccacacccattcctgaagccgtctctcaaagtccgatgaaagaaatctcaatcgatgatccttatctcccaccacatcctcagctaccgaaacttgaaccgccacgtggccgtcgtgtctctttagaagaattattgcatccgaaagagaaattcaccggcgatttgatgaaattcatacgccaaagcgggaacgcgatttcgaaacgcatctcggttttgctagagaacgacgatgacgacgactcgatcgatgacgtgaccgagttcaaaatctctggagtgaaagttctcgtgaagatgaaaaacgaagaaggaactt

SEQ ID NO: 37143 - DNA, 610 bp, Arabidopsis thaliana landsberg
tgtaaaaagggtgaacataatttaaaaccatagaggatgaaatatttaaggatctgcggatggaaattttataattaaacctctctcttctgacacaccaaaaatggacgaaactacccctatccccgacacaaatctctgttgccaaataaacgatattagtgacataaaatcagagcattaattgctcggatatctctgggtaaagattttgaaagatacagacggcgttatggggaagacaaagataatatcagaaaaaatgattacacagatatatctcgatttgtggaagtatatgtcatatgagttccgctatttattaccacatctacttcatcgttgcccacacaaaaccaaacagagcaaccttaaaagagccctgggaaatttaatgcgctgaagaattgagtcttactgggaagtttctgggtaacatttctgagcttcattaaataacagaaggtatttatgtgtcgtcttcccgaaatccacttcttcttccatatacttagttcgataatcgtataatcgctaataaagaatttacggctatatttttcaggtacattatgacaatggtggtgcgtttggttagaggggagtcgag

SEQ ID NO: 37144 - DNA, 3681 bp, Arabidopsis thaliana landsberg
tctgagttcttctaaatgcaagctgcgatcagttttaaaactaagtttagaatacaagttaatgacagtcaaataatagctgacagaaaataatgcagaatcacttacttaacatatggatccataacggccatgttcattagaacatatctatgagcaatgtctcgctctttactcgtaagagttacttgtgtagctttctctagtggtttgccttcaagaacaagtgaatcactttgaatatcttcattgcggttaacgacttctggaactgataatgagttttgtagaaactttaagcaaaatgccatacattctccagctaaatatccctcagccatacaagcttcaagcgttgcaaaattcttcacataagcctttagagttttcatgtacctgcaagttaataagattagatcaatatccaaattttatataagtaattaacttaatagaaaaagttatagacaatacctttcaaagggatacatccatctaaagtggactggtccacctaagcgagcctctctagccaaatgaattggcagatgaaacatgatgtcaaacagagatggaggaaactaccactccacctggcacatagtctcaactaattcggactccaatgagattagcttctcagggtcaataacccgctcacacagcctgttgaagtagtggcataatctacttatagcgactctaggtcctttaggcagcaatcctctcaaagcaacatgtaacaagttctgaaggagcacatgatgatcatgagacttcaaaccaccaatgactggtggatccacagaaacacagttggagatattggtacaatatccatccggccctctaaacctagccagccttttgcagaatctctttttctcatccttagataaccaaaatgccgcaggaggtaagtatgtcctcttccctcttaactgagtgtgcaagttactacgaattcccatatcttccaagtctttgcgtgcattcaagccatcctttgatttggcagattgcattaaagtagacacaatggcgtcagacacattcttctccacatgcatcacgtcaatgttgtgacggacaggaaggtcctacaatacaaacaataagcagttagagtcaatcaaagttaaattcaagatacaattcaaaaggtgaagtatttaccttccaatatgtaattcaaaaagaattgatcgcttcttccatctccattgatgtgtgtcttcaccatatacatcatcttcacacaaatctgatctctttcttttgctgtttctctccaagcgtctcccaaaatcatttttgaaatcctttaatgtttcaaatatttcttctccagtttgaattctactagttgtcccttcttctacagtgttgtcaaaccaacctcttctacacgtgtaaggatgtcctggtctgagtcgttttctattgcttaagtacacatgttttctactgaactttaaccacctaaaaggtgtatctttcccacagacattacaagcttgctttcctttcaccttacaaccagccaatgtccctaaggctggatagtcactaatactccacaacaacatagctctaagagtaaaactttcctttaagaatgagtcataaacgtgaataccatcactccacaaatcctttaagtcatctatcaatggggctagatagacatcaatgttattgctgggtgctgtacgtccatgtatcaaaagagttaacatgatattttccgccttcatacacatggttggacccatgttgtcgttaactagtaaaactggccatgtactatacttagtgttctgaatagagaacggattcatcccatcagttgaaagtcctagtctacggtttcttggttcagcagcaaactaaggccatttatcattcacttgagcccaagctaaagagtttactggatgtcgcattgtaccatcatcactagcattgctaaaatgccaccttaagtcctcagccatttttttggatctaaacattcgcttgaatctatctttgatgggaaaatatcgaagtaccttagctggaatccccttcttctcttcaccagtgtgtttatccctttcccatctggaagcactgcatgtaggacaagtatccctcagctcatactcctttctgtataagatgcaatcattcggacaagcgtgaatgatatcatacccaaaaccaaacatcttcaagaattttttgatctcatttgttgaagtgggaagcacattctctcctggtaagatgtcgtgcactaaactcaaaagttgatcaaagtaattctctgacatcccactctttactttaatgcggtaaaaccccataattgcatacacctttgtgtacttgggacacccataatataatggagtttcagcatccttcaacttctctctaaagtcagattcttctttagttgatggctccttactatcatcttcattctgattctgagaatcagaatggtcttctccatcaaaataagttgttcttatcagctcataagctccaaattcactactaggctgaacttctaacttatcagctcgtatctccccatgcttactccagcatccatttctcttgtatttatgatccattcccttaataaccagatgctccaaaacagtatcatttggttgatgacacagattccggcaatccgtacatggacaaaacatttcagaaggatctcccaaacgtctcgatgatgcgtaaacaaatgttgttgctcctttctcgtactcaatgctattccttggcagccatacccaactcttatccatttttaaaacaccaacaagctccaaccccatatatatgataatatttatatatatatatatatatatatattagttaacagagatacaagaacaaagacacaaagagaaatttcaaaaacaaaaattcaatactatcaaagctatattgaatacaagaaccacataaactcaaagctacacgtaaactaaaaaccacagaaataaactcaattcgatacaagtgaatcacataaagagtcaagttcaattggatacaagtgaaaagtcacagaaatagtcaagttctaatcgatacaagtcaatagtcagtgtatatagtcaagttctaatcaatacaagtgaatacaagcaatcaaagctatttgaaactcaattcgatacaaatgaatgctcactatcaaagttatatgaaactcaattcgatacatgagaatagtcaagttcaaagttatatgaaactcaaaatcgatctaagaaccacagaaatcgatctaaataacatacctgtcaaagagaagccactgaaatctttgagaaacgcggatagcgaaagccccaaatcgaaacccctaaatctgagaaacctgaaaatcaaaccctaaatgtgattaaaaccctaaatcgaaactcaaaccagacaaatttcacaatgcaaaccctaaatcgattacaaaggaaacataaccttctcgatttagaaccagatctgtgactgagaagttgaagagtaccaagagagattgaggcgttgagcaagaacacgaacagggacgggagagagacagacaactgaagaacacgaacacgaacacgaacagagagaattgaagagagaattcaagagagaattgaagagatgagaacagtg

SEQ ID NO: 37145 - DNA, 2215 bp, Arabidopsis thaliana landsberg
tggaacaaagttccctttccctatcacattctcatcaatcatttttgttgtatctactatatcatctattcacataattgtgtatctaaccactttttcttagatattatttctcatcacattcccaactctttataccttcaaatattttcttctagcattttacggattttgatacggatattttgatgtttatccgagtttcacatatccaaaaagtatggattcaaataatttcaaaacctctatatcattgtctacctctaaaatcgcatagtaaatgacctgggaagaacaaactagggttctaaactaaaatcatgtccatccaacttgccacgtcaacaattttgtttagcgagaagctaacaacaacaagtcattaaaatttgtagccaatcaaattataaaaattagtatgagcagctcaatatttgtcgatttgtagataaaaattctcaaactccaataaagtctcgtatatagttgtgaatcaaagctaaagtacgatctatagttttagaacgttggcgcttgtatatagttgtgaatcaaagggaagtacaatctctacttttagaacgttggagcttacacaaagactctatcaagaaaaaagagaaaaagaaaaaaaaaagtcaggatttcattcacgagcatagagtgagcaggtggctccaaactgtccgagcactcgctcaagtgaagcagattgctggtctctggtggccggatttgtagatagaatcgcttcactaactgaagctgctactatgtgtttctgtgtttctcctagaagatatgcagcacctgattcttcaacagtttcacactcgagcaaagcagagcaatcatgaaatagagaaatacaaaactattagtgagtaaaatatgagaagcctaatctaacagttagagaatcactacatacatcgaaaatattttttagtaggcttgaatctttaaagtctttaaaatcttgatttcgaaatgacttagcctctgcgattgctcctttctgcattgcatttagttagagaaacacaccatggatatgtgtaacaaatatacaaggaattaagaacatacccgtactaattcgacaatcttttgacagataaggagaaaataaagctctgatccaccctgcatataatacaagcagcttattaaattagttcaaggaatgttaacaatgtgaatcactcgatatattaactagttactcagcccaccaatgacactagagtacccataagtcacattggcactgtgcatctttcatcatctttagtatttcataatgttatatatgtctatactttcaaatttaatctgcttagtgttagttcattactcattcatgatatctttagtattgctcaactcatttttatcatgattcttgttatattcaggaccatactcggggcttgatgattggtagacgcatactcatgcattgaatgatcacattgcaccatccatcaattctgcaaactttcttggatccttacttgtggatggacaactatggcatcaacgcctaggacatccatctcctgccaagttactgcatatttttggtacactacctatgtctaagtcttctttacaacataatcattgtaacatttgtccattaactaaactaaaacgtcttctttttatttcaaatagtcatttgtctatttcaccatttaatcttatacacttagacatttggtgtcctttcttagtagagtctatagatggctttaaatactttctcactattgttgatgattgtattagagtcacttggatttatatgttgaaaaataaaagtgatgtcattactgttttcccaattttggttaaatatgttctgactcaatatcaatctgttataaaagcaatttgtagtgataatgcaccagaattagcattcacacagctcataaaagatcatggtatcatttatcaattttcatgtgcttatactccactgttgtggaacacaaacatcagcgtctgctaaatgttgcaagagcattactctttcaatcgaatctgccattagtttactggagtgaatgcattcatgctgttgtctacttgataaatagaacaccatctttagtattagataaaatctcaccatatgaaaatttgtttaaaaagaaacctgattacaactttctaagaaccattggatgtccttgctatgtttcta

SEQ ID NO: 37146 - DNA, 965 bp, Arabidopsis thaliana landsberg
aaaactagaccgaaaacaaaaggtgacttcaacaagatacagggattacactatacatgagctctaccgcatcaccaccccctggatgaaaatagttccaataatacaatttctctaagtaccaaaacttcagtactgaacaccatggttttaagctaaaatggaaaaacaaaataagtgttcatgaaaaagggtgttttacatgtttatcacattctatatggctttcatcactaagattccaagtttacagaacgttactgacaactagtctactagtcaatcgagataaccaaactacagatattgagttcaaaacaaatgaatcaaatagctgaaccttcttttctcacgaacataccttgagcctgttatagcaccaccagaaatatcccaaaaatttctcttcacttatgtccacactgcagcaataaatagaacatatcagattaagcgaatataagcatttctcagtaaagaagagtgaaaaacaggattatgctagcgaagtattgttggttcctgattatatgagggccggtaactatatatttattttctcaaaattttcagcaaacttagaaaaacttacccatccaaacgaaatctttcccggacatcaatgaggtgaggtgaagtgaagagtccagttcgaaagccatagtttcgaataatagactctgtaaaggtacatgtggatcccttcatgccacataagaaacaaaaaggaatactgttaggtgctggatcagatagtaatcagccatgctaacaatgaaccactttcatcaaacaagttcactgaaggtttgaatcaaaaagtaagcaagtactagtttcataacaatttcctttgtgctatcccaaatctactatcacataagtgatatgagtcaagattaaagtagcaacttttgcaaaactgacactccatcagatgaaaccatacgcatctccaagcatgc

SEQ ID NO: 37147 - DNA, 2125 bp, Arabidopsis thaliana landsberg
  unsure (1)..(2125): unsure at all n locations
aatactttttctttttgttggatcccatgacaaatcatttgatttatttgaatccatgttaggaggtggagatttttttttcaaaaattgatcaagcatttgcattgcctacataaaaagaaaagcatcaatatcaaaattgaaaagttatttccacatgtcaacataattatatgtactattgaaaatctaatcaaacaaagagactattgtaaatatctgcggtttgtcctaggaataaattatgaactcattaaaatatattcaagtaagaaggaccattaaacattcctcccacaagtctaaaaatgtgcttatcactttaactacttgaattattaaacaaaattttctttaaaaaacatattttctacagacgtaaaatattggatgatgattgaggatgaggaatcaagaattatgatgaaaccttacaaaattaagatattaacagatttatttaatgacaaaaaattgacttatcgattttctagcaaagattacgaaggaagaatgaaaaggaagagactcaagtttttttttgtgaagctttgttattgccgttcagggatttgatttttataattgagttttaaacaacaaaattaatataaaaaatacttagttaaagcccagcagttcgttagaaaagcccaacgataatgacagaatattgaatctcaattaaaatatagataattcctaaaattaatagcatatttctattttaatttttctgaggggtcaataatatttaagaggggtatcaacagctttcttggacatgtatcaaataattacgtttaaaaacataattactctttacctccgccactgatcctcatgaatgtcattagactattgcgttccaaaaacagaaacttaagattatccaaactcatatggattgatgtcattgttatgagtatcttgttaacaggtccataaaaccggaagcctgagaaaattgattgtaataatcaattttggagttggtttgcttgtttagaggagaatgattaagtcagagaagctttaggtttaaggaagagaagacgactggaggattaagtgagagaagactttatatttaagcttaaagaagatgtacttaataaaaagtcttaacaaaaaatggcaaggtaaagacactaaagtttgtacataatctaaaccaactaagcaaaaaatacagagaacatacaactaagcatttatgtaaaacaatcttaatcaatattattcatacattaatcacaaaaaaaaaagcaattagcaaaattagtttgatgctcagttttattagttttgtacttaagtatttacctactttacacaatcaatgcaataacaaagacaaggatgatttattttctcatgcagaagctttctccacttgaagtaaatcctcatgcgacaacactagtgtctttctccacttgtgttttccacttgcagtattccatttacactaaacaacaacaaaaacagagagaaatagagcacattagcataaacaatttacattcaaaactacatattgattcaagcaaataacatatatgaagaaatcgatttctagaatgcttttaatgattcaaaacagacataaagatatgtatttcaatgtatgaaaactaaaatcaaaccttacagtgactagcaaccatccgaaaaagcttgtcgattctaaaacagagattatgcttaaatgatactatctacaaaaatcaaaaagtttatttccaaatttttcttcattcatgccaaataagtaaaacaaggcatccaagattcaaataaccctaatgtgtatgccgaaactatcaaccataaatcaattaatttttgataaaattcttttacaatcaagcgaaatagcaaacaaaaagcctccaaattaattcaaaaacactttaattttgctatgaatgaataaccctaattttggtaaaatttataaactccaattttgattttcaccataaacgacaaactttaatcattatctacaaaggaaaagagcttgattcatactactacgaagaaactagagcttccttcaacgtcttctctctgattcacatcctanatgtctgattagattaacctccgaccgatgatg

SEQ ID NO: 37148 - DNA, 1902 bp, Arabidopsis thaliana landsberg
atttgtaattacaatggagaaggaggcgacccagagagcaacacacttaaccaacctctagttaaggctaatcgaacactttcttcaactccacttgctttggttggtgccaaagtttcccatatcgaaagcttggactatgagtatgttcttcttcttcttcttctctgcataattttgaattcaggggtcttcttttaatctttaatctaaatattgacagaataaacgagaatgatctgttcaagcatgactggagaagcagatcaaaagcacaagtgtttcaatacatattcttaaaatggacattagcttgtcttgttggtctcttcactggtcttatcgctactctcatcaaccttgctgtcgaaaacatcgccggttacaaacttctcgccgtcggctactacattgctcaagataggtattgactcatcagccaaatcttgaaaaacaaaacagtcaagatcaagaaattgagataccttgtatgacaagtttatgtttttgaaataggttttggacaggtctgatggtctttacgggggcgaatttgggtctgactttggtggcgacagtacttgttgtttactttgctcctacggcggctggtccggggatccctgagattaaagcttaccttaatggcattgacactcccaatatgtttggttttaccaccatgatggttaaggtttgtttcttaaaccttcacaaagtttgaatcttcccacaaagttagtgtgagatcttttgttttactgatggattttgcggtttttttccgattagattgttggaagtattggagcggttgcagctggacttgatcttggtaaagaagggccattggttcatattggaagttgcatagcttctttgcttggtcaaggtggtccagataatcacagaatcaaatggagatggcttcgttacttcaacaacgatagagatcgaagagatcttattacatgtggatctgcctctggagtatgtgctgctttcaggtcaccagtaggaggagtacttttcgctcttgaggaagtcgctacgtggtggagaagcgctctcttgtggagaacattcttcagtacagccgttgtggtggttgtattaagagcgttcattgagatttgtaacctccgggaaatgccgacttttcggcttaggaagacttattatgtttcgatgtgagttatgtaaaaggttaggttccacgcagcagatttaatccccagcccattgaattggagtctttgggggcattcttggaagcttgtacaatcatcttctgcataaagttctccggctttacaatctcatcaaccagtaagtgtttatgaacgttcaagagttttaaagatttcttcttacttaacattgtttggtaaattttggtgtaggaagggaaagattcataaggtgcttctaagtcttggggtatctctattcacatcagtttgcttgttcggtcttcctttcttagcggaatgcaagccttgtgatccttctatagacgagatatgtccaacaaacggaagatcaggaaatttcaagcaattcaactgtccaaatggttattacaacgatctatccactctgcttctcacaaccaatgatgatgcagtcagaaacattttctcttcaaacactcctaatgagtttggcatggtttctctctggatattctttggcctctactgcattttgggtcttataacattcggtatagcgacaccgtcgggtctcttcctaccgattatcctcatgggttctgcatacggtaggatgctaggcacagcaatggggtcttacacaaacatagatcaagggctttacgcggttcttggtgcagcttcactcatggctggttcaatgagaatgactgtttcactcggtgtt

SEQ ID NO: 37149 - DNA, 1325 bp, Arabidopsis thaliana landsberg
ggttttcgtcttttgcaggacgacttcatttgataaaatctgttctatctagtatcactagcttttggtaatccatcttcagggtgccaagtaagtgtattaaggaacttgaaagtctcctctctgctttcttgtcgtctggtccagatttaagcacacgaaaggcaaaaattgcttggttggaggtttgtaaaccaataaaagaaggcgggccagatctatgcttattatctgaaacaaacaccgtgagcataatgaaacttatatggagacttgtttgagctaaagattctctctaggctaactgggtccgagtcaacttgctggaaaataagtcgttatggttagttcgtggaagtagtaacatgggctcctggatgtggaagaagatcctaaagtatagagacaaggctactcctctacaaaaaatggaggtacgctcaggtttagaaacatctttttggtgggatatttggagctctatggggagactggttgatatttttggtcctcgtggttgtattgattgaggtattagttcttcaagctcggtggctgctgctctttcaacgcatcgtcgtcgtcatcattgtaatgaagcataaaacaaggttgaggaggagatggcttccctgaatgcttgttctactcaacgggtcgggatatctgtttttggaaatggcacaatggtgcttttaaacactctggtcagttcaaaagatattttacatgcaattcgagtttcttatcctatttgggaagcgtacaggggagtatggttgcccatctacactgccagagactcatccctaacaaggatagcatttcgcaatcgcctagctacgggagaaaaattagtaaagtggaataatgatgctaatgggggttgttctttctgcgacgaggctatggaaactagagagcacattttcttctcttgtccatattcatcagcagtgtggtcagcccttacaaaagatttgcttggtcaactctttacaacaagctaggaatcaatgactgccctactcacggatccaccaagaccaaaagtccatatgttttgtcttgaggtatgtttttcagctgtctattcacaccttatggagagaaaggaatggaaggcgacatggggcatcgccaatcccatcatctaagctagcaaaactgatcgataagaacgttcagaatagacttagcactttgataacatcggatctcccacgtatgaagacagcttgcgatattggttccaaacccatgctcgttagcaagttttttctttgaatgttttccaaatctcaaatttttagacagatgttgtg

SEQ ID NO: 37150 - DNA, 1838 bp, Arabidopsis thaliana landsberg
aaattatgaattaatatatgactgttatgtttccatcaactacttgcagagtgaagttacattatacgtattgtattccagttaattgcaatgttactgtattatcataatcacagggaaacaccgagaagcagaacatatatcacggacctgccttgaaaaaaacatggagcttgacaccgttggctataatactcttatcaaggcaatgctagaagcaggtacaacagaacatatgatgtatcaattccagttgaagtttatatggtacatggaaccaacactcaaacctctgttgtcacaggtaaactacaatgtgcatctgaaatttatgagcggatgcatacctcaggtgttccttgttcgattcagacatacaacacaatgatcaggtaaaggcatgcgatctggcttccttatgtttaagaatccagtaaagttggtcgttgtggtaattatttccagctatcttggttggttaatgcagtgtgaatggaaggggtctgcagctggacaaagcaattcagatttttagtaacgctcgcagatcagggttgtatctggacgagaaaatttacacaaacatgattatgcattatggcaaggcgggtatgtatctaatcaagaaatttataactatgtttttcgtgtaagttatcaatcacagtttctcgtagacatggaatgttctgtaacattgaccggtcttgattctagttacattaacaaatgaaactttctcttgctgttacaggaaagattagtgaagcattgtctttgtttagtgaaatgcagaagaaagggattaaacctggaacggtaggtcttagccaaattcttcgtaacatctatttagtggcttaacattatgagatatttcttaaaatctaaccatgggtgaaaacaaatctataatactgggaaaatattgcagcctagttacaacatgatggtcaaaatatgtgcaaccagtagactccatcgcgaggttgatgaacttttgcaagcaatggagagaaatggtcgctgtactgactcatccacatacctcaccctgattcaagcctatgccgagagttcacagtttgcagaagcagagaagatgataactctcatgaaagacacaggtatcccgctatctcacagccatttcagttcattgctctctgcttttgctaaagctgggatgatggatgaagccgaaaggatatactgcaagatgtctgaagtcggtacaagtccagacagtgcttgcaagcggacgatcctgaagggatacatgagctgtggtgatgccaagaaagggatattgttctatgagaaaatgataagaagctctgtggaagatgacagatttgttagcagtgtagttgaagatctgtataaagctgttggtaaagaacaagatgtataaaataaagagttttgaactaagacctgttccacgacataaagcctaaaagtattcacatttgtgactttttctatctagaaagattgtcttgtagccaatctcggaaaatgttctggaaattatctattgtacagttccggttggccttggatcttctgcagagtgttgggcagtttttagtgtgaggaatttgctttctcagcttggcttgctctacaatcctatagacaagatatccactcttcgacacaagttttgatcatttctctatataatttatacacgacgaaggtaacagagtagtggatagagtagtacttcaacccttcaaattgcgtcttttgatccttggataagcaatggtgtaccagtatgaacgtatggttactgttggggcgagtataaacgtatggttactgttgtg

SEQ ID NO: 37151 - DNA, 1415 bp, Arabidopsis thaliana landsberg
  unsure (1)..(1415): unsure at all n locations
atccttaaaataagaatgttggagacaaagataagtaatgattaacgccttaaacaaaaagaaggccagaaaagataagtaatgatttgcgttgaatgagactaattatgccttgggtgggattagtagattttactttttactagattaggccactttgtttagtttggcaaagtgatttgattattttcaagtcacatcaatatgtgaatccaaagtccaaactgaaaaaaaaaactaagtacgaagtcatcatcaattcttaaaaatatggtttttggatcagcgactcctaacaatggtctatagccggaatctttctttcaacaattttcatcatattttatacactattagtatcacactactgtctagattcgaataatcttaagttcttaacaaaagaagtatttatgtccctaaattccaaaagtaaaatcaaatcaaagcatcgcaaaagaaacttttggagttgtccaatagacacaatcattttagtaatcttaaagctagtaatattctttctccaacgttagcaaactatacgaccttttcttagtgtcattatcaacaacaatgactattactaattttgaaggacaaacttgccaaaactaaaattcaaagttttaaaaaacaaaaattcagaaagaaacaaccaataagcaacaggctgagcagggcacgagatccactgccaccgcacacgtggacaaccaaacattttactcactgcaaagatactctctcacgtcactaagaattatttaacttgtaattatagtttagtaggtaaatctcaaaaaaaacattttaataaatcaaaatacaaataaaatgcatacaaaaagcaaacaacctccgtgcaaatcatatcatatgcatggcttaaagggtttaggcttcaccttcccgatcgctagagttactgtgctagtctctatcttcccgtcacagttacatctcgtccgtacacgtggacccacatcctctttaagctcactagctgattgatatcgtcttatacctttggccgtttcgtctctctctctctcgtttaattacttgtacctatcaactcagtgatactctcgcttctgagagagaagagagaaagcgaagctcgtttcgtatcgtcttcttcctcttcatccgacgctggattcataaggnnnnnnnnnnnnnnnnnnnnnnnnnnnnnnnnnnncgttacggttgatgaagttatttttcctgctttgctttcaccggatctctccgcgtgctttagcttgacgagagttttgtttccgatcgtttctgtgcgtgatatcgttaaaaccgagtcgaaatctctccggtttgttttcttgttctttgtgattacatggaatccgacgtttcgatgttcaatttctgttgttcgtgaagtttct

SEQ ID NO: 37152 - DNA, 1562 bp, Arabidopsis thaliana landsberg
  unsure (1)..(1562): unsure at all n locations
cagaggtagaaggagtaagacaacaacttgtgatggctgtcagaaacctcaagaacggtaagaagttctagtatttgtatgtcgctgcgaatacaggtgttgtcagatcatagtagaaatcactatataacttgtactgttaatagaattcgtttctctcataaaacattattttaaacttatcaagaaatcaatattttccactgaaataagtaacgcttacataagattttgagatgcccacttccaaaatctgatcatatccactgattggtttttggttagtttccaattgctacgccgtgtttgtttctttacttccatacaagttttgtttggccagttccattcgctgtgtaagatagagactggaatgaaaaaaaaaagatgttaaagaaatcaacggtatgaacaaatctcacttctatagggatcatatataatgaatacctgttttgctcgcttatcaattggtgtgcatgacttaagaggcgagtaaaatctctcgttttttggtnnnnnnnnnnnnnnnnnnnnnnnnnnnngcctcttctcttcttgaagtttgttgcctcctttatacttgaaaaactcgagtatggatggactctttctcttggtattagctttctttatgttccctggagtctccaaactaggtggagaagcataagaaggaagagattgttgttgtttccttgctctgcttctttctcgaactctgttaaggaaatcaaccgtccaaggagaactttgtacttgatttgaagaacggattgcgtttgatagtggagatccaccaaaatgtgatatttcttctctaaatggaagctctgttgttggaactgcagatcttcgtgttaagacctcctccaaaagggtcctttggcgttttgctggatagttatcagcatagccacgcaaagaagtgttgttatcatattttgaatctttctcagtggcgtatctttcagaactcgagtcgatgtcagccgcctttgggaagttaggctggagagatccaaagaaagataacttccttgaagattttgattttcttggaagttcctcttcattaacatcagaaactattcgagcaaacctattataaccaggagaaggcgggaagtcttcctcgagatacttatcagctctgtcaattacttcacctttgtagtctgcgatgaaattctccgagttcctattgtcatgcaagttaaaatctctcatcaccggaaatttacatcctctgttctggctcatgaatttgtctttaactgggaaactccaatcttctaattcaggaattccaggaagactgtcctccactgaaaaatcaggctgatctttctcccaaaatgtgtcctttgatgatgaaccaggtcctgacttcttgtcaaatctctcaggatctttagacggccaagagtcattgggatgactgatcccagaaggtttgaaaggtgcatctgagaattcagtgacagggtcaaaatgaaagatctcatgatctttcgatgaccaagaatcatcaagttggaaatccccagaagacttgagct

SEQ ID NO: 37153 - DNA, 1515 bp, Arabidopsis thaliana landsberg
cttcttcattcatctgaagattcttcaatttccgtttctgacttctagattttcacttgattcgcattttgatttggttttgatatatcacgattcttcaattttgcttatcattatgagatgatatagatctttctcatttcttcgaaattcgttgtagatttctttgtgtgttacttcattcatctgaatatggcttcaatttccgattctagcttctagatttgcacttgattcacatttcgataaggttttgcttcataacgattctgtttcttacgaatttgcttaatctaatgagatgctacagatcttaacttttgcaatgaaatttatggcagattcgaattctgcaacaacaatgacaattagcaacggagatgtcaaatctgaaacctgcaacaatggctcttctgagaagaaaccattcaggatcttcgttggttacgatccacgagaagatcttgcctaccaagtttgtcatcattcaatcacaaaaagatcttcaatccctgtagagatcacaccaattattcaatcagatcttcgaaagaaaggtctgtattggagagaaagaggtcagttagagagcactgagttctctttctctcgtttcttgactcctcacttgtcagattaccaaggttgggctatgttcgtcgactgtgatttcctctaccttgctgatatcaaggaactcactgatttgatcgatgataaatatgcgatcatgtgtgttcaacatgattatactcctaaggagactactaagatggatggtgcggttcaaactgtgtacccgaggaagaactggtcttcaatggtgctttacaactgtggacaccctaagaacaagactttgagccctgagattgttaatactcagactggtgcgtttctccataggttccagtggcttgaggatgaagagattgggtctattccttttgtgtggaactttcttgaagggcacaatagggttgttgagaaagatcccaccacgcagcctaaagcggtgcattatactcgtggagggccttggtttgatgcttggaaggattgcgagttaacggataaatggcttaatgagatgaaagagtacaacaaagagatcaagaaggaagctgataacgcaaagtagaaagaaagaagtaagaggtatgttgttcattaccaacacgagtagtgaacttcctttacatagtgttggctttgtagagccagggatcattagtcttgtggagggctatggagttttttttaatttcattgaattcgttaaatcattcgcaaacactattagtacctatattgaggtcatatggtataataaccctattcgtttgtttatttgttgtgttttgtacctttgatggtattttatttgtataattgatatgtgaatttatgtagcatttctttttaattgatctataatgagcagtagctcaacatatttaaaacatggatggatgagtaatgatcattagctagcaaccttcattttgatcagcg

SEQ ID NO: 37154 - DNA, 2874 bp, Arabidopsis thaliana landsberg
tgagaagcttttgaaagaagcagaggagaggctcgtgaggatctatgagtctgccgagaagaatcgtgccgcggtggcggaggaggaagctgcggaggttgaagtcaatgaagaggttgtgagtatactgcaacaagctgcggagaatccattggaccgagttgatttgtctggtcggaaattgaagttgcttcctgaagcatttggaaagattcaaggtctccttgttcttaatctctataacaatcagcttcaggtcagtttttctaagtccctaatggtcaaattcataatcttttgatcaaatctgttagaattctgatatgtttatgtgtcaaagatgtaaactttgctctggattttgactctttagggtgaattctttgacatttggatcagtacttgtgatagattcaaaagtgtgtttgcttgtcaaagatgtaaactttgctctggattttgagtcttttagcatagaggtagattcttggatcggttcttatggtagtgtctagattgagatagatttagaagtgtgtgttgcttgtttttgatcaaaggttatgtatgtaacagtcgattcctgattcaattgctggattgcatagtcttgttgaactggatgtctccacgaattctctggagacattacctgattccatcggtttactgtccaaactaaaaatcctgaatgtttcgactaacaagctcacatccttgcctgactccatctgccgctgtgggtacgtatcatataacaactccactttgtcaagtttgatttgtgaatcaattttcaccacttcttatatcaaaattgtaggtcgttggttatcttggacgtgagcttcaaccgtctcacctacttaccgaccaacatcggtcctgagctagtgaatctagaaaagctcctggttcagtataacaagatccgatccttcccgaccagtataggcgaaatgagatccctaaaacacctcgacgcccacttcaacgaacttaacggccttcctgattctttcgtgttgctcacaaatctcgagtacttaaacctaagcagcaacttcagtgatctcaaggatctcccattcgcattcggcgaactcataagcctccaagaactcgacttgagtaacaaccaaatccatgccctccctgacacttttggcacactcgatagcctgaccaaactgaatgtggatcagaacccgctcgtggtcccacccgaggaagtggtaaaggaaggtgttgaagctgtgaagacgtacatgggtcagagaaggatcaatatgttggaagaagaagagaagaagaaaatggaggaagagatggagcaggcaaacgccgggtggctcacacgaaccacatcgaagctgaaaacatatgtcgcagatgtttcagagtatctcggatcaaattctcctcgagacccttaccttgaacgacagctatgatgtgacttggcttgaagaacaatgaatccaaagaggttgaaatttctcgttttggctggttctgtctcaattttttctcctatttttcggtatataacgaaggggctctcttcgttactgtgttgtctggtgttattctttctgacgggtaaggcctgtcattaacttaggttcaattcaaacttaaaagactctcacggggtccaactaataagagaaaacacttagttatttgtttaacctcaattcttcttggattttactaggtgtggttttggactttacctatttttggtttccttagtgtaggaatcttacatgataactataagcgaaaagaacatgattgtttcacgactttatggttattcgaagaatcacttactatatacttattttagtaaaaaacaaatgttgatcattaaatctcaaattacgccgccaggctccggaagcaatatattttagatccttggtttatgcagatcttcttttggttccacacttatcaaccaattgcacatgcttctctttggaaacaacgtagtctttatcatcacactgattgcttctttactcttaagctttcattcaattcccacctaattttttgtctctaacaaagattacagagagaagcataatcaaattgatccacaatgaagaagatggcctcggcttatataccctataagcggttaaaaccaatctaaccaacactaagcagattgataacgaaaatgtcatagttagttgagacacgaaccaatcaattactcgagttaaatcaaacattcttcttcattttctagtgtcttccacactttagagagacatttttcttcttcttctcctttgcgttgaatacataaaacaaaatcatatattatacattatacatctaaaatggctcattgcattaattttgagctccatcaaaaaccttctatatatataacattaactcttgatccattctaatcttcaaacactacgagaaaaaaaaaaagaactcaagttacaaagtggtgatggagaaaccgagtagggcgcctgattcggtggtgtcggagtttgaaggaacattactgaaaaacaaggattcattctcttacttcatgctccttgcctttgacgcatctggtctaattcgtttcaccgtcttgctgttttcgtttcaccgtcatgctgtttcactggcccatcatcaaactttttgacgttctccgctacaacaacgctgctctcaagctcatgattttcatagccacggttggtctttgcgaaggagagatcgaagcagtggctagaaccgtcctgccgaagttctacatggatgacgtaagcatcgacacgtggagggttttcagctcgtgtaagaaatgggtcgtggtgacggggatgcctctggttatggtac

SEQ ID NO: 37155 - DNA, 1375 bp, Arabidopsis thaliana landsberg
caaaataaaaatccggtttctagtgttctttttgggaaattatttcagatatagggttttgtgaacattcttgaatattgattctctgtttttggcagatgcaatacatcgctcttgattgattattgcagcaaggaagaagatggtagacataagtacatacttattgatgttggcaagagttttagagagcaagtccttcgttggtttaccttttataagattcctcgagtcgattccgttaagccctttatatacttatcttcttgatctcttgcatctatttttttctctgaaatgaaatctaacttttactgactaatgcttgtatgattttgtgtagatcattctaactcatgagcacgcagatgcggttcatggcttagatgaaattcgatctcttcaacctcgtggtgcaactgttgttgataccgatccacttcccgtctttctatctcaatttacaatggagaggtaccatcttcgattagtgttctctatctcaactctggcttaaagcttttcaaattagcatttgatgagacttttaaggcaacaaaaaattgtgcagtattgctacaaggtttccttatttggttgaaaagaaggtaaaagaagtacctagacgagtttcacttcttgactggaaaatcatcgaagagaattgtgacgaaccattcgctgcctcgggcttatctttcacgcctcttccggttaaatttcttttcacttttgagaaatcaaaacagtctaattcttccatgagaccttatagactcaacaatgttagttatgctttaggtgatgcatggagaggactacattgctttaggtttcctcttcggcgataaaagtaaagtggcttatatatcagacgtatcacggattccaccgagtaccgagtatggtaagagctcattatgttatgccctaatcattatacctctgtagttcacttctactaaagagaaagattgatattcttatgaatctttgattaagcagctatttccaaagctggggctggacagttagatcttcttatcctggatacaaatataccgcggaaggttaacatcatctcataacttttgtttaccgctttttcgatcttgataacctttcttgctgaccatctctttgataatagagaggaccacatcccacacacatctgttttacagaggtttggttcaatggttctcttttttttcttcccaaagaatgcttcacttctctaaacctttttgagagtaagtttcaatattcctattctttaggctcttgagatcttaaagaggctatgtccaaagagagcgcttttaacgggtatgacacacgagtttgatcaccatgaatactttgagatactttg

SEQ ID NO: 37156 - DNA, 367 bp, Arabidopsis thaliana landsberg
cattgtataattgctcggtttcctgcaattttttccattcctctgtgtaaataacctattatttgttcacagtcaacaacattctcaccatctagagtatcaattaagcgaagaacaccatgcatggatgggtggtgaggtcccatattgactatcataagatcttttcctgtaactggtctcttcataagtttttccttgattcgttctggcatgaattggatttctgaataaagaagtttatcaaaaaattcaagatctaaaaaattcactaattcacaatttttgaatttaacgagtttttaattcccgaatattcaactgattaacttaattctttataaccgactctatttttttttgacca

SEQ ID NO: 37157 - DNA, 3185 bp, Arabidopsis thaliana landsberg
gaccactcttgtcgcaaattgtgtactctgttatgagacagattaaaaatgtttattttggtttccttaagcgttatgttgttttgaaatctcaggttataattagacagttggaactgagcaaggctggtccttccaagttaggatttgatggagaagaagacgcttgggtctttgttaaaaagcagagactcttcattgtctcgccttctcttccacttcctcaacaacagcatttcactttggagaaacctgcaatatctcctcaattagaagctgggtttagagaaagcatggaggttacgcaagatagtacctttgttcacactgtggtgccttctcttcctctgcctgaacatttcattaggcataagcctgaaacttctgagtctcaagctgaattaagagacgttcttgcggatccgcacaaaactactcatgttcccactatggtacctgctcttccttaacctgaatatttcactttgcagaagcctgcgtcttctcagtcacaagttgagttcagagacgtcatggaggatacgcatggaactactcctcttcaaacagagatgtcttctcttccattacctcaacacttcgttctgcagaagcctgctggaacttctcagtcaaaagcggatacacgcaaagctactcttgttcacacggtgatgccttctcttcctgtacctgaactaatgtactttgcagaagcctgcaacttctcaatcacaagctgagttaagaacggatacgcgcaacgctactctcgttcacacagtgatgccttctcttcctgtacctgaacattacagtctacagaagccttcaacttctcaatcacaagctgagttaagagcgaatacgcgcaaagctactcttgttcacgcagcagcgatgccttctcttcctgtacctgaacattacagtctacagaagccttcaacttctcaatcacaagctgagttaagagcgaagacgcgcaaagctactcttgttcacgcagcagcgataccttctcttcctgtacctgaacattacagtctactcaagccttcaacttctcaatcacaagctgaggtaagaacgttgacacacaaagctacccatgttcacacagcgatgccttccctttctgtaactgaacattgcactttgcagaagcctgcaacttctcaatcgcaagctgaaactagtcgtgttcaaactgtggaacctgaggcctgtcctgatttcacctcagtagacaaaccggagatagttatgagtcgcagtctcacaaccaggaaagcttcagcaccaaagagatcactgcaagaaagtaggaagaatcaggatagaagagtggagatccacaggaggcgtgcgggtcacaagcccataaggtttccaagagtgatgtgtagctctgttgttatggataatgagaagctgagagtgttgaatctggagaagaaggttgagaaagcgggagggttgaacgaatgggttggatctataggattagggagagagtttgagaggatgttgagaggacagaggatgagtaagtttcagatggcgaatttgacaatggagaagcttaagcagatgggtgctttagccgttgggccaagaagaaagcttatacatgcaataggttgtgtctatcacccacattgtctacgtgcttcctttaactgagaactatctgttagagtttagttgaggccaataaaacttagcttacgctttattgatgttcaactagtattgttttggttattgatactctttggaccatatatgtaaaacagagcaacaatccactgtttgatgtgatcattgcatcgtgctattttgtatttgactatttggggatcagtcgtctattagcgttgcacatgcaatatcattatattgcttcttcttctttttttcaatcaaaaaaggatctagaaccagaaacaaaaagtccaaaattcaggttaatcattatagttttgctaattggaaacgtatgcaatgactaaacataaaatttatagtagaaacactagaaccctaattcttcaatttcaacataaatctttcaatttgagtggaatcattcaaaacttgattcccctaacttgaaagtaattatttgaatgtaagaattaaaaaaagcgtattttgtaaagtatcacgactaaaacatgctagttgagttaaaccttcataaaaaatgaaacatattatttgagtttcgagaaagaaaaaaaaaaaacattttatttgagttgtcgcagacacgatcacgatgtaccctatatatagttccaattagcattatttatcccatcaacaacaactattatgtcagaaatattgaattagtaaaagaaacaaatcttatctgggccatccatttgcacacagaccaatggacgtagagcgtggtaggcacgagccagatgtgaggtaccttgaggtgccacgtcacattgaggaatctttggcggggtttcattgtttacctataaaaatggcggccgcaaagtttcgtacgtctccgatgtttcaatcgtgaaatcgaaacaaacaaaataattaaaaaaaagaaataagaggaggcgatggcgatcaaagacctgacggcgacgaccggtgattcatctcttcctttaataaaatctccgccgtctgaaacaaccggcggtgacagaacctctgctcttcaaacgctcggtaacattatcgtctccatcgtcggtacaggcgtccttggtcttccttacgcattccgcatcgccggttggttagccggatctctcggtgtcattatcgtcggattcgccacctattactgcatgctcctcctcgttagtatacctttttccgaatccttaaattgagtataattattgacttctccaatcgacttcaacaacgtaatctaattggattgttttaatatgcagattcagtgcagagataagctagaatcggaagaaggagaagaagaatcgaaaacttatggtgatttaggtttcaaatgtatgggaacaaaaggtcgatacttaaccgaattcctcattttcactgctcaatgtggtggatcagtagcgtatttagtgttcataggtcgaaacttgtcatccatatttagttcgtatgggttaagtatggtttctttcatattgattctggtgccagtcgaa

SEQ ID NO: 37158 - DNA, 1942 bp, Arabidopsis thaliana landsberg
tagaaaaaaaagaaaaaaagagagagatgatcataaaataaggaaaaagaagaaaaggatttcaatttttaattctaacaggatagtgcacatcacatggcagaagtaggacagtaatttgtttttggttacatgtgtataaaaatgcgattctttgcttcattcctctttgttaaaataaaataaaataaaaataaaaggaagaagaagaagaagaagaagaaaggattcgtcttccttcttccacaccctttctgacacctcatctcccctcccaccttctccgtcccgttccgtttctccatcaggtaattattaatctcctcttaatcatccctctaatctctttcccgtttcttcatctcccgattctcaattccatctacacagatcctcgattccgatccaacagttcgaattcagtttccgattctgatctgatcgaaccaatactcactgagatttgatcggcgattatggagtctatatctccggtatcgaatcagcttcttcagccgacgacgacgagctctaattccgatcgctctcgtcgtaagcgtaagaagaaatcatcgccatcatcggttgagaaatctccatctccgtcaatatcgttggagaaatggagatcggagaagcagcaacagatctactcaacgaagctagttcatgctttaagagagctacgaatcagccaacaaccatcttcatcatcatcttcttcgattccacgtggaggtagagccgtacgtgaagtcgccgatagagctttagcagttgcggcgagaggtaaaacgttatggagtcgagcgatactttcaaaagctgtaaaactcaaattcaggaaacacaaacgccagagaatctctaatccgacgacgacgacgttaaccaccgggagtatcaggtcaaagaaacagagagcgacggttttgaggcttaaggctaaaggtttgccagctgtacagaggaaagtgaaagtactgagccggttagttcccggttgccgtaaacaatcattaccggtggttttagaagaaaccactgattatatagctgccatggagatgcagattcgtactatgactgcgattctctccgccgttagttcttctcctccgccgccaacgccaggtcacgaagggggacaaacacacatgcttggttagttggccaaactgtccttttatttttttccaattttaaaaaccaaaaaaaaaactgtttttttttatcatattattattcttctcactgtattgtttgttgtttgaatattttactattcaactttatttaccatttcgtcatgtatatccttttttcttgaatctctctattaccaaaaaaattagtgccaagaagaagaaacaggacagtgattaatttatgtataatcgtaataaatttcagtttcttgataatcgtggaagcacatttgagagattgtgatttagtttgttgtttttgcaatacttgttgattaagataacaactgtggacataatgacaaatttgtttttaaagtgtttggtgaattaatgatatggcaaaatgaaacaatggagagtataattagtttttgttttgttatgtttgaagttaggttggtgattggaactgagttctctagatctgttatgacaacatttattttcttcttctgtaaatggtattggggtttattttggtatgtggttagattttgacgatgcaaaaaaacaagttaaaaaagcgaaaaaaatctagagagttaacacaatcacatggttgagaaagacatgaacatggtgactcacatgattcatttctgcacatagggtatataatcgaccactgaccagtgttttttttacttatggttgattcttttaaaagaacaaaactactcggatacacgaaaaaggtgaataaaaaaaggcactaaaaatcttcttctttc

SEQ ID NO: 37159 - DNA, 2163 bp, Arabidopsis thaliana landsberg
  unsure (1)..(2163): unsure at all n locations
caacacacaacatatattacaaaacaaaagttttgttatttgaaaatacatatatggtttctggacccgggctcgagtgacagcaataagtttcatagaaatatattataaacctactttgaactcttatataaatatatcctcggctcatcacatttatcatatttattttagttgtaccagcacataaacagaccatgttgtttgacacctacaaaaaataacacaccacgttacgtacatgcgtatcaacgatgacatgcggttgattgattatggnnnnnnnnnnnnnnnnnnnnnnnnnattggagttcgattttttgttgtgaatcatggagttgaccatggtccatttgcggagactcttatttgagaaaaggagtggcgactagtaaaacaaatgacacgtcttgggtcttcttcttctttttttgtttgttgataaagatcttgggtcttctatgcaagagataagaagcctttttgtcctttttagtttttaatataccgtttcacttactttaggctggtttatgcactgcatcggtggtatgattgctttgtttcttttgtctctttctttcttttgtgttaatatctaggcgatctaaacctttcactagcctaagtgtttatttaatagaaaaataatttcacttttaaaataatggtgctactggtttgccattgtggttaaaggattctgttgagtcgaaacgacatgtgagctctgtgtaacggacatctcgtcattttttacttgttgtggttaaaggttccttttgaatcggaatgtaagcattagcaatgaacaaaaatgtaccagatgcaccttaatctcatagtacagtaacaataggaaagatacaaaacggtagaggaaggttttgatgtttaaaaagcacaagcttattcagtcaaaaacagatgtagagattttcatgggcttatgaagaccttaagcatccagctaaaggcatctgaatctcgtgctgtggatctcgtcttctgagcgtaacgttcaaagcaataaacttcttcatctacgctctcgctggacactgtatcgtgtgctagctctacagctgctacttgggagacctggaaattctctgcagtctgttgcaacttctgtgcagactccatttcaccaagtgttaccagacatatcaacaacgacttcagctctcgctttcctccatcggtcatacgcatacctttcaaatgatcaacaagagccatctcctcacccgcactgcatttttaccccaaattcatttacatttttgctcatcattggtacctatcaatttgcataagagatgtctatatatatacctgccagcacggattttcccactctttctctggcgcctcaaatctcttgccctgctagtagcgttgcttgagctgactgaagcagcagaacctctccttgtcctggaataatagcatagaggaaacaagaacttgtaagttaaggtccaaactagttagtaactgtttccctatttaacccacaaaacaactacattatagagaaattgattcctgagaaaagtcttcattctctacccaatgccctacaacttttacgttacgacttgtcaacacgcttgtcccttcaaatgcttaatcaaaaccaaagaaaatgcagaacgtgcctaaatctccttttgaatcgtcagctctcaactagcaggctaaacaatcatgcactaaagtcccacccggaaacttatcactttaccaatacaaaattatatatgttggaatgttcatgcatataatcagatgctggttaatcgaggaggagacaatcagaaaacatgttgaagtcatgagacaaaaaaaacgaacatgagctcctgtttctaaaaacgatcaatacctaattcagctctgttttagattgaaatctgtaagatcagctgagaaaaattccacataaataaagactgcgagagtaagacaaatgcaaggatgtaccccaaagtataggcgctcattccactcaggttgctacttgcttctgaagctgtgtcatcgtcaagatcaacaacagatcgttcctcggatttgagctttgctgcaagcaataatcgtctctgccggacagctagatagcgagtcaaatattttcctaccttttctattgattct

SEQ ID NO: 37160 - DNA, 6011 bp, Arabidopsis thaliana landsberg
  unsure (1)..(6011): unsure at all n locations
gtttgattttgtcaattttgactctttgaattctggggttttccattaaaaaaactcagattgttctaagatttatctctgaattgagtaagttctattgaaattggcatatggattcgacagatttttgagcacgatgtatgttttaaatttcgatgtcgacgcaccataaattttatatatatgaaattgaaatcttgataacaacannnnnnnnnnnnnnnnnnnnaagttgttgttgttgatgtggctgctgcttagagtaatgtttgttgctgcaagttggcttattgtctaatccgttatattattattttattttatttatatacagttgtgtttcgatttgtaacattttagattccgtctttgaccaattaaatctttcctccaaataaaatatttattttcttgctttcatgtttttaattttgacagctactactactaagttcgttttaagcatcaattcgtttatgcaaatagagagaatatcatgtcatgtcttaaaaaacaaagttgctcataaacaatctttttttggttttgattttcaagttagtagtaggaggaggaggagatcttttaggaatctattcctctgttttttttctttggttgagaaggacccagagaaactcttgttttgttttcagagaatctctgtttgtggtctctctttatgaaatctttatctctatcttctttcagattctgcttcttctgtctagttacttagtggccaagattcacttatttgactcggcaggcaaaatctaccgaatatcttatcttcttgcaacttgtttatagacttaaagctgtgtacttactttgttttgttgcttcttcttatcctttgtcttgttctgtctcttggtcgtgatatgaattagttctttcttcttggttaaattgcagaacaagtgaaagagcttaatatccacaagactcttgtttctttcttaaatggctaaagtttattggccttatttcgatcctgaatatgagaacttgagctccagaatcaatcctccaaggtaaatcattattacatttcacacttgaaacccattgatgctacttccaagaagctcatactttttttctatgttgttgcagtgtttctatagataacactagctgcaaagaatgcactcttgtcaaggtaagcatcttcttcctctgattttagttgattcgatgattaaactgagattttgatgcatttgtgactgttaattattaggtggacagtatgaacaaacctggaatactacttgaagttgtgcaagtcctaaccgatctcgatctcactatcactaaagcttatatctcttctgatggtggatggttcatggacggtactaattttgcatatatgtatatacattcataacttattatttcattacaatgaagcatctcactgattctattttcacatctttttagtattccatgtcaccgatcaacaaggaaacaaggttactgatagcaaaaccatcgattacatcgagaaggtatattcatataagcagtagtttgtataatatatgcaattggtttgttatgacattatatgtgattctttttttttcttttttcttttaaaaggtgttaggaccaaagggtcatgcttcggcttcacaaaacacttggcctggtaaaagagtcggtgtccattcattaggcgaccacacatcgatagagattattgctcgtgatcgtcctggtctcttgtcggaggtttcagccgtactagcagacctcaacattaatgtggtggcagctgaagcatggactcacaaccgtaggattgcgtgtgtcctctatgtgaatgacaatgcaacttctagagccgttgatgatccagaaagattgtcttccatggaagaacagcttaacaatgtgctgcgtgggtgcgaagaacaagatgagaaatttgctcggacgagtctctccattgggtcgactcacgttgatcgaaggcttcatcagatgtttttcgctgatagagactacgaagcagtgactaagcttgatgattctgcttcttgcggattcgagcccaaaatcacggttgagcattgtgaagagaaaggttactccgtgataaacgtgagctgcgaggatcgaccaaagctcatgtttgacattgtatgcacgcttacggatatgcaatacattgtatttcacgccacgatttcatcaagcggctctcatgcttctcaggagtatttcatcagacacaaagacggttgcactcttgacacagaaggagagaaagagagagttgtcaaatgtctagaagctgcaatccatagacgagtcagcgaggtaagtaaacacattttgttggtgtatgtttcttgcgttagaagcaacaataccttaagttattgtctgaaatttgattatagggttggagtttggagctctgcgcaaaggacagagttggattaatgtagaccctcccaaggattctgagagagcacgggctatcagtgtcgagagctggtgtgacaacagtaggagaaccagcagtctacgctagctttgtgaaagatgcttcagggaatccagtggatgtgaagacgattgaggcgttacgcggagagattggacacagtatgatgattgacttcaagaataaagttccgagcagaaaatggaaagaagaaggtcaagccggaacaggaggaggatgggccaaaaccagtttcttctttgggaatttgctggagaagttactgccttgagagaaaaggtaactatgtgtggataaaacgtactgtaaaatgtgtattatgtatgatctagagggccttagtgtgatgtatgacttggtcagggattttggtggtttgcccgaagtcaaaccgaaccaaaactggttttcggttactttagactttagtcatagtaaaatgaacatgtctataaatgaataatatgcaactcttccaattggtaggcttgcttttgtctatgtaatatcaatccttcttgttatgtatttatctttggccaaatgtgatattttctgtagttttaatctcttcttttccttctattttgtaacttcttcgaatcttgaatgtcaatatcattgcagtgagaaaaatggattatataattcagtgagtatacagaatatacactaataaatagtacacaagcctaaaaagtgataaatgggtgcatctgcgggtacttttgttacagtcgaaactgaaaaaaaaactaagtcaaccgcttgatgtttccatatcctagcgaataatattctttcttccataactttcatgtaagcaaagtacttaagagtataaactaagtttaaaaacattgtttaaacgagaaaaaataggaatttatattacgcatatataacttaggacacttcttagggtttggatgttatgtccaattagtttacacaacatttaaaatttaacacctatccaaaaaaaaaccttatagttttaatagtaatataaaaatatacatttaaaaacattttttaataaaataaaaacaagtgttaaaaatttaaattatgtgtaaaccatattgaacctaggacacctcttagggatttggatgttgtgtctaattagtttacacaatatttaaaaatttaacacctatccaaaacaacccttatagttgtataaaaatagaaaaccttatagttatataaaagtagaagtttaaaaacatattttaatagaagagaaacaattgttaaaattttaaattatgtgtaaacaaaaacagtttgttaaataaattaaaaactagggctgaaaatactagaagtgaacgaataatagaacaactaacttacagggaataagtgtagatgaacaataaatagtgttgtccacaagtctagtaggcggtaacttctaataggctaaaaattgaataaaacgaagaaaagagtaaacatttggtttatggataaacttataaactgaagacacaaaaaagaaaagcaaagaggattttggagattacttacagttacagccaagtcaagatagagaggattatgactttatgagattggtgttattgttgagtcaatataatagctagggcatcatccatagcctagttgaagcggacaaggaagaacggtgattgtgaacgacgattgggccttgttctctccggcgatgactggaatcaaacgcggacaacgttttgttgttctgaatcttcttcatccttcaaattatcacgaagattgagccttgttctctccggtaatggggttttatgaagatataaacgcaaacaattcttaaaactcaagagtcaaaacaagtttcaagtaaagtcgtaaacttgacacgccttttaacactacccattctttcataaccaatcccaattttgctatgcattagcttcattgctaaatctgcttttcccactttcctcaacgcatttgatcatcataacattaacagttcacttctctttctctcttagtaaatcccgttagccattttacaagctaagagtacacaacgcattataatcatatcttcacgaatggtaaactcgatttcaatataatgatagatctcctattgttaaggtttttccaagcttactccttagcttagatttcatgggatcaaatgaatactactacttagtaaaggtccgtgttcaaaaaaagaaagaaagtacagttaatatttggggaaaatgctattaattaattaatgcaaacataataatatgacatacatacattaatccaaaataaaaaaaaaaaaactaaattttattttatataataatatcatacaaaatctaataatgaacattattaaataaaactagtaaagttctacaacttagtgattgaatatagcttatttaaaaataaaacttaataatgttttttttttgtaaaacctcaaaaagtgttggaaatttgattaatctatatgattgcatttcattttataataatctttccttaaagtaaatctttgaataaaataaacaatcctagtaaatatttgagtagcgtagactgtagagtatacaaattcaaaccctgaggcggtcaacgaaaaaaaaagaagagaaaacaaaattagaagtcaggcctttttctcagcgtcgcctgcgtcaatcttaagctgtctttcaaaaacctctctcaatatttaaactgcctctcctccgtaccgctctacccaaaaaaaaactctctccctctctctcgaactttgtctccctccattgatttcactctcgtatcgagtctcttcttctagaatttgcgcatcctctccgccatggctgccgagaagttaagagacttgagtcagccgattgacgtcgttttactcgatgccactgttgaggccttttactctaccggatctaaggaagaagtgagtcccgttgtttatcataatttctctgagaattttaacgatgaacgagtatcgccaccacattaagcggtctcttattcactgttaatgcgttctatcgatttgggggttaggcgagggtttagtatttgcgatacgaattggatgagttttgcttaattctttttcctgggttagagataggtttcgattgtttgtggctgttcttgttatctggaaaaacactaaacaatgtaatttgtgtgtaaaaacgatgtttgcatatgtgtgctttcaatgagataagaatgtttgaaaacaccttgcagagagcttctgcggataatatcttgcgggatttgaaagctaatcctgatacttggcttcaagttgttcacattctacagaacaccagtagtacgcataccaaattttttgcccttcaggtcagtgttttagtgttctcttatacctgctcttctctttatttagcattcccgttgttatatataatgtcccactacatccattccaaagaagacagcattagcattctatttagttgtcttccatcgtataatttcaggtgctggaaggtgt

SEQ ID NO: 37161 - DNA, 1428 bp, Arabidopsis thaliana landsberg
cttttgttcctaaacattactaatacttgtttccatataaatccaagggataaatttgttcaaagcattattgtcacaattcctaaattcctatccaagcacgaactgtctcaagaacgaatggagaaaccttactctctggctcactataatttacaagctatgagtaaagtatcttcttaacaatatcttcttgcattttcttcacatgaataaaatgtgaaatctgaaaagtttaagggttaacttcaatgtgtgtgtttttttgtcgaaagtgtcttagtttctttcagtgacttctctctttactatgtgagtataacgagactgacacataacacattctcagagatttttggcttatttcaattatttgttttgcatataacaaataaataacatatcattccaataagaaaaccgagcatgaagatacaatcattattctaagagcagccaacaactttcaaaaaaaaattatgtaaacaagtcattgaatcagcaccatagtgatactgaactcaacttcactaattgttttgaatcaaattaactatagcaaaaggcaaaagaaaggaaaaaaaaaagggggtttcttgcaaaatggatctcaagtaccatccttattctcctcttatttgctcttgtaaacctgcacagaaacctcatcagcttcctcatttggtttaatattgactgcaatctcttattctctcatctcctgcccaatgagaaccttgagaagctcttgtatcacagctgctacatcaaggtccaagcaaacttcagaagcattctcatcttctttacctataattcagcaactaataagcaactttatgcgagaatctaaatagttctttccttgggtatgtcctctgatttggatggtgacgggataaagatttaaatcccgggagtttaacaagaggcacaactgtccacctccctttacgtcgaaatcttgatgtacttctaccatatcatacttgagtcatttcttaaagtaaagtcgaaaatattccatgatggtgaccaatttgcataaagagcccaaatattgcccttttttttgggatatatgtgcactagtccttcctttgtcacctattgtccattgaactctatgtgagaatgagttgagagaatcactgctgttacgtttcccgattgtaaagcacccactcgtcttgtaataccctgaatcaatccacttcttcattgaacccgtatatccctttttcttgccatcaagccaagaaaaacacaactcaaacggttcttgagagataaccttatggaccaatgcataccgccgaggcattccgtaatcatcataagtagcccatacctggttttctccgggcgaaacaagaagtctattcccttgtcgaagatgtagaaatcagcatccggaacactcattac

SEQ ID NO: 37162 - DNA, 1608 bp, Arabidopsis thaliana landsberg
tccaatttgttttcgggatttaggcggcgccatgactgcgactgcgatttttgccttgtccaaccagaacaaacaaacaacagtgtaattgtaaaatcatgatgtggataataatacatatgttatgtggtttgcagaatgatatcgttgtttgctatgacaacatagatatacaatatccacgcatctatggtttctcttgaaattacaaattatttgtgcgattcacaaatacaaactaaaacatgatgggattaacatctactcttagcgttgagagaattggcgggaaattattgtgatcgatgaatgcaaaaatgttgtacatgatatagaagatacaattgcaactaatcgaaaaatctttgagaaccattcttcaacttttatggaagccattagaattcaacaaagtgactatcaatggtcttgagcttctccaatacctctccatagcaatttaattatcaacgtacaacatatatatgtatatctcatcataatattccccaatcatactcataccgttttctaccgtcggagacgtgaggatatcttctaagttctttctcttatgttctagaccaataatgattcttttaaaagctaggtgtattgaatattgattctgattcacatagcatagttgttatcgttagttttcattgagttgtgttttcttttctttacctttgtaggagatggtcgaactcataataagttcaatgtattagattaagatttgtcttctgtttgtagtaaatttggatgattttttaagattgtaattcaagtcggacattggtgtatttgaagaagtttatgcactcaaactagcctaggactgaatgtagcagattatagatgatagtctgttgtgacttttgtttataagagcagctataatttttattattttattattttatctcagattagtcgttgacaatatgagaaagagattatttatgtaattgctggagattaagcgtgactaataaagcatcaattaaggaacagaaagaaagaaaaataaaaagcaagaagagagatagcatgataaaggagatgataactttacagaacataaagactttacaaaacagaatgtgatgatttgtgacaaccacctcgttttttttaaataatatgtgctataatgagaagcaacacatttaaagattgaagcttgtctgtaaagtaacaaacttttttggtcactttgagagaatcaagaggtatcattataaagctgtaaagggttggtgaaagccatcacattttctgccaagcttttaaaagaaactgatgtgacaagtagaaagaattttgaagaagcaagaaaggttatatgaggagtttggtgtataggaagatgtggtgggttgtacatcgacggatgaacaagcggaacttaaaccgtgattgctaggtagaggttgtcaaaacccgaagatcgcggattcatatattatgaactttgtaaagtattttgtgatctgacagaataagaggatatgtcagttggggaaagacctggaagagatatgaaagggaaggctccagcagatagagaaggagccgatagcagaagagcgagagcggtta

SEQ ID NO: 37163 - DNA, 3318 bp, Arabidopsis thaliana landsberg
cattcagagactttatttaacaagatgtccactctcgatctcaaaagcatgcatgcagaatcattcttatattctgcttctacatagacgttggttatgctgagctggaaattcagccaaattcctatacgtactttttttttctacataggttcacagagttataagagatactcagaaaagctaaccagaatagatgctatcccagcatctaaattgctcatacttagacttgcagaataacttattttatctcaagcttgttccctgtctactacggtcacaatcgaactgattgcatagactgaaactgttatggaactggactgggcccaagaaagtataaacctcagtgagaaagctccacaacttaacacgcctatggctttacaatataatataatctttttaaataccttgaaaaccatgtacggttcactgagctcgatatccaaatcatctgaaccatccaagtgcttgcagaggacgtcgattggcttcagtcgaccttcacgtaatctaatctctgacctcaccttgctttgatcgaaatggaactgtagatcaagcagatatatcaagcaacatacaccaaacaactgtaaagaagaattaattgcaaaagcaaagaaaacgcagttatacctcttcctctttcttctcccaatcatggaactcagcccgagcacgttctgtagctaacaatgcctgcagaggatagaacgatttaagtcaatagctatacagtattaaccaaattagagaggtaactggctaataagaatttcaattgtatacatccttctggataccagaatttaccatttcttcttcatgtcgagctttctccactgctctctcttctctcctcttcttaaccttttcaacctctgtctgcgcgttaaaccaaagtgcttaagagttaatacataagcagaaagctcattccaccagaaaaaatagcaaatagttacaagcatcaaggaaatgaaaatttcatcgatatttttaatcagtaatgcttattgtacataccatcctttcccggtgtcttctcttctcagctttaacggaaaattcttccagcggtactcctcgatgaacatctttttcaatcttcttccgccacacaaatctgatattaataaaattgcatgccatgagaattgcagactcttaaaaccaagttactcacaagtacatctgtacaaatcgataacacattcaatttaagccaacttttttaactaccagatttcaaaatttgtacaagtagaaaaccaggagagctccataatcctcctacatcctatcatcaaagttatacaccactaaaactcagaaacaataatcatattttcttagtacttacgtctcagtgagatttgaatcaccaaatgggtttgaatcattggagtaccctgacactgactgcgtcttcagtttctttgctgcacgtaatgcctacaaagaatttaacaagtagcataaagttagcaaccagctccaacaaatacaagggttaaaacacacaaaaaaaggacaaaaaacaaaataacatacaacaataagtttaccttcttctgagcttttttagacatatactccgtaactttttcctccgagtaatccttagatgaagatctcttcttactcttccgtccaccatcactgtcactggaatcatcacttgagctacggcgtcgagtccgacgactgctgctacctttcttcctcctggaactcctgggcggcgacaaatcatctgagccatcagagtcagaagtgtaagactcggactcagacccagactcggattcatctctccgcttcttctgccttccacttctatctctcttacccttaccatgagaacccatatctctctgtcgaagataaattgaatcattcttaaagtgcaataaacaagtattcaaagagagtccctaaaagaccaacatctaaaccctaagaacacacgaagtggttaaatgagcgaaaagagaagctccaaattcaagtttcaccagcagtaagagaatctaagcagaaattgaaaccaataaacagcggaaggagaagagaattgcaaacctagttggagaggaagatctggagtcagtgacgatgagtgttggtgattgcggcgtctgcgcgacggtggtgaaggcggtaggattttctcctccccgataatggatcgagcaaaggagggttaagatttattaagtttcagggagattttcgtcattcggacgtcggttcttctttccttctattttaatacgacgtcgttctgtcaataaaatcatgtggaaattcccggttcaagaaaaaccgaccgtctatggaaaataacgactggttaagagcaaaatcggccggttcatattgtccacttatatgatcaaaaacgttaaaaacacatttcagagattttggttgaaatttacacaatttacacaatgtttagagatcaagtatatagaattaagggtttgaagcaatcggtaaaataaattcactttccattttgtgaaaatcactgtggtatatatatcagcacaattgtaagtacaatttgttgtctattcttcaatgagccaagtggtaaatagcagctacacacacgaaatctgaactactctcgggtgtctttattcttaccgattatcaaattcatatataggatcaatgatctcactggtaatcaccaatcatcggtaataagccatgtgtctcgatgatctaaaaggagagttatcgaatggagatggtttccatggcgccacaggcttcttcttcttcttcacgagtttgatttcagaacggagccaagattctaccacggagaggaggttgggtgaagttttcagctcctcaatatctgtcattttcgataaacgattcagctcaccgtcctgaatgtaggccaaatgtgtcgcccatgtctctagcccgtcgaatatgtgagttgcatacacgattgtagctcctctctgagttaatcaatggtataaacaagtcaaagatcatgcaataagtcatcagtaagaataagtgtgtgagttgtaatcttccaatacgaatacgtgctcagaactcaagaagtgaaactataaaaaccggtacaaatttgcacttgaaactgcatgatacatgcatgctactactaaattatccttttatggtactaccacagatcatagacatgcaaggaccctatagtaattataggcaacatcacttagcagcaacaagaaccgatatgaaaagcttgtccttgaatggttaagcattaatatttcagtttcgaac

SEQ ID NO: 37164 - DNA, 2072 bp, Arabidopsis thaliana landsberg
attaaagcatcccattacggtttttgaattgatgtgatttgcgagcaaaaactctcttagacctacaccattcttaagcatgagggtttaaggcatattagctttgaattgatattttcctgaatttgtagattcgacttggtagattctaaagatgaagtatagatatcatgtatttgtaaaagaaatttgaatagtattacaagtcttaaattggattttattcatgtaaatgggtagacaactttagattagttacaacttatgcagtgagcattttagctacttatatcttagagaaaccaaaaaacaacacatgatattatgtctttctggtttctttatttgtgtatataaaattagtagtctcatttataagattcacaaggataaagaaaaaataaaggagaaaatgtcacaattaaagcatattagagagctccatcaagtggctcatctcttccatttgacccccagtagtacttgtttcctccaaaagccatttctcaataaatgtcaatggtggtgtagcattatgatcatcatcatcctcatgatcaccatcttcatgatgaacatcatcaccgttgttattctctgaattctttataccctggtcatcatccccgttgattcctttgctatgaccctcttcccaagaaccttgaagctgctcgtatggaaactgatcactgtgatgatcgatgaaattgtttgtccggttctgcattttgtgttccaagaaagtagtacttgtactactctttggagacgctctcatccaaccctcaagaaggcgggaaatgttttcggtgcttgaagcataggtagatctatgattaatggtgtttcttgtcgaagaagtttgcagcgcaatgttctctgatctgctcctctcatcactgtcagacttgttgagcttcttcttgaggtgtgtgttccagtagttcttgatgtcgttgtcagtcctttgagggaggtaggaggctatggctgcccatcttaccacaaccatatgtaaacaaataagccagtttagggttcacatcatcaaaatatatacacaaaacattcaagtataaagagatgtagatccttttgtctgagattacttgttacccaataaggcttgcaagtgaatgatcattccttcttcatgaggagtaaagtttccacgtttaattccaggtctcagataatttgtccatctcagtctacaacttttgctgcatctcaataacccttttaaaagccaaattaagatacaaacatcaggacacatatacaaacaaagaaaagaaagacactagaagaaaacatgttgagaaaagataatgaccagtgttggtgggaactgatctccagttttccaggaccatgttcttgaatgtaagaaacaagaatgatatctttttcaggagtccatggtcctttcttgatccctatcttgtcacagcatggaggcctacccatatcctcacgcacacgctcttgatcgttgaaatagtacttcgtgtgtgtatatgtgtaagctatatagtaagtactctaataagattggatttttggtatagtgtctctgtgtatgtaagctagatagtaactagtaagactctaagattggatttttgtgaagagggtctactcaaaatctctctttggacttgaaatagtcatcctcaatttctttccttctttgaatctttctctttatttttttggcttcttacaggagaggtttcactaaagactttgaatgttgaggagaaacacaaatgtctaagtcttatgggttgttgttctttggatctatatgcattgaaataaagacgtacacatatttacactagtgcatgaatgtcaattttatctttattttgaagaatttaatttattttttgtctttatatattaacatatgaaaaccttaatttctttttaaattgtgacccctaaaaccggttttaattgcctacgaagttaaccgcaacacgtaaatattgacagaaaaaaaaaaaaatcttctacgtggctgctgagcctaaataaaaacctttgaagggaatcgagtc

SEQ ID NO: 37165 - DNA, 1650 bp, Arabidopsis thaliana landsberg
  unsure (1)..(1650): unsure at all n locations
accaccaggagttggtgtcgcaggcgatcattgaggtaaccaccaggacttagtgttgtcggcgatgctggaggagaactaccagacgtacgtctagtcgtcgatgtagtcgaagaaccaggagatgctctacttaaaggagagacggagacaatagacggtgaaggaggatgaacccccaggagatcgnnnnnnnnnnnnnnnnnnnnnnnnnnncgatagactagcagaattagaagccaaaggaggagacccacccggagacggagttataggcggtagatgggacaacaactggaggacgagtagaacgaccacatccaaaggaaccacaatccaccggcggaagagaagagaaagccgcacattgccctggtgatctctgcgcaggtctcgccggcaaacaattccgccgatcatcaaacccaggcaacccaagacaaaccggcggctctccactgaagaaattataactgaaagtgaaattctccagcctcggcaactgacaaatactcgccggaatgttacccgagaatctattatgcgccacatttaactgctccatcgaaaccatcccgccaatacnnnnnnnnnnnnnnnnnnnnnnnnnnnnnnnnntgaaatcaaataccgtaacgtttttcaaccgtccgatctgagacggtaaacaagaattaaacccattttccatgaagatgatctcttccaagttcctcatatcacccaaactcgtcggaatacaaccgtggaaatgattattcgctacaacgattacggaaaccggagaatctcccaaattatctggtaactcaaaccggaaccagttatggttgatgaaaatcgcatcaagatctttgctgaagagctctcttggtacaggtccttcgaattcgttaaaccttagatccagaaacttcaacgacggtaactgaaggacaacagtagggaatattccggcgaaccggttattactgagatcaagctcgaataaaagcttaagacggttaaaccgatgcggtacggttccacaaaaccggtttgaattaatatgaaacaaagcgagatctgttaacaaaccaagctcttgaggtagataaccagcaatgtcagcgtggtttagatctatcccggccacggtacggatccggcggttatctaaagccggagcacagtaaacgccggtgtaactgcaaacatcagaaccgatccagtttgttgtgaagttgtttggatcagagagaatagcttgtttccaagcttgaagagctatgtaagcatttcgaagtcgtggattctcgaagactagagatgggtcaacgtcgacattctcgccgcggtcgccgaactcgtcgcggaagtagagaagttgacgttgtgtgattagccggacttcattgtcggagagatctccattgaaagtaagtgaaagagagtaagagatacttgtgaagaagaaggtgataaaaagaagaacaaagatcagagacgtgttcttcatcatcatcttcatcttcattaattcacataacaagacatcagtggatttgaaggaagaagaagggtaaatgggaaatgtaagtgagaatctctataagtgaagaagtaatgtgtgaagagggaattataagtgagagagaccccggtctttgc

SEQ ID NO: 37166 - DNA, 1696 bp, Arabidopsis thaliana landsberg
cctgacgattggctctgtgggtgtctgctttcagttatggccttgtgtgagagtagtgaagatgctgattaggttatggcttgtttggagcgagctaataagaagttggtgacatttgtgaatctgattgtagatgagaaaaccgaatatgagactgtaaaagaagagttcaagttagtgatcaatgcaacccaagtagaggcaagaaggcccttctgcaactgtttgatagatatatgcagaggcaacaaccggcatgagagagctcatgagcttctctacttaggaacactttttggtctatacccgggactacacaacaagaccataaaagaatggagcctagatgtgaggtcattatcagttggtgcagctgagaccgctctcgaagagtggatgagaacacttgccaacatcattaaacgccaagaggaacttcctgagctggttttggcgcaaactgggacaggaactcacagattctcacagggattagcaaactctttcgccttgcatttgcaacaactctctgcaccatttagacagagcgataggccaggtatctttgtggctacaaaggaggatttggtgtcatggttggaatcaaagtttccacctttagttacttctcaagcatgaagtatcatcatctgttatcctaaactaaaaagcaacattatttttcccagtaaagttgtttataattgtaatagcatattgaattttccatctttttgtattaccataaggaagaaggaatcaaattagttatttgcagtcttattctctctttccccaaaagatttgacttttcataaagattcatgcaaaaaaagaagctctcatttcacaaaagtaaacaacacattccatctctctcttacatgcatacacacctttcagttacagtctgaaaagacccataaatatttgggacttcctctaatagcttagcagcgccagctattctgtcgcttagcatcatatgcagcgccatcgttgagcatatcttgagcatcagtctccattccgagctttgagagcgctaaagcctgcaagtaaaaagctgtaggccatatatggtatgcacacctgtgcctgcattgcatctctcagtgcaagctcctgttggtctgtcattaagtaggagaaagcccgtctagcgaaaactgttgcagaaggaaccggcatcatccccaccaactggaaaccatagatacagaggttagaaattcttttcgaacaccgagaattatggatttgttgctatttcctctcaccttggagtagtattcaattgagttcttgaaatccttgtctctgaaagcaatgtccccgaacttttttgtgttaagcatctcctgcacttgttgcgtccattcttgaaatgaaagctcattttctgcaccttcttcatctctgtaaccggttttaagcaaaatgtcgtgaaatgtcgcaaggtccatctttgcacaggcctttccaagaggagaaagcatagttggtaatattactgtgttctttggtaagcccattaagacatgagaagcaacctaagcaacaaaatcaaatccaggataaacaaatttggatatgaaattcatgatatggtcggtttcaggagggattctttaaacctcttcttgcttttgagtggtgctactgcagagagaagaaattggtatctggtcatcct

SEQ ID NO: 37167 - DNA, 1061 bp, Arabidopsis thaliana landsberg
atcctttcctgaggatcacacgtgtgaacctgatacttgtttccaacgtagaatatgcctggatgcttcagaagcataccatttagcttctccggtgaacccaaattccctcttgaaatgactcagctttacgattgacagctttttccacaacgtcaacgagagtaactcgtgcaccaaaccaacacttctcttctcactctcctttgaaccctcaacaagatcctcatacggagatatgtaaggaaaggcattaaactccatgaacctctcccacggtttggtccacgtggaaggtaaagagcaagagaaactaggctcagagccacatttctttgctgctgcttcaactgcagagacagccaactcaggcttccacaacaaaagctcaatctccattgaactcttcctaccactataattcactaaccgaaacacatctgagtactttggaactattctgataacataatcatcagggaatccaaagctccgcttaaactcgttaagcttcacgacattgagacgctgattaacactcaacataagcagctttgcaagcctatctgcgagtacaggctcttgtgtatctttgaccaactcttcctcttccacaagcgtcatcatcggtttcgttaacctacagtaatactcatcgttctcgagataaacatggaaacaacaagggtatttcttaagccaattcaaggctttcccctgaagatcaagagtcttaaacttcttctgtagaaacttaatcgatgcaacctgattgggacaccttaagataatgttcttgagccgactgttaacaatccatcgcttgttacgcgagagagcagattcgagatcagggtctttcttcgttgaccaaagtgagaatcttcggattaacaatggagcatacttggtacccagaatccgatataactctcgtgtcatagccatatcagtctctgactaccaaacctaatcaaactcaaacttcaattattgacgaatgcgattggttataagcaaaaagaaatagaaaagcctccacctttagagtatcagaggag

SEQ ID NO: 37168 - DNA, 2106 bp, Arabidopsis thaliana landsberg
  unsure (1)..(2106): unsure at all n locations
gcgcacaacaaatattttaaataaatatattcatagtcaacatctttaatacaaatgataagcttgttacaaaacatttgaaacactgacaattatttaatacaaagcaaacaacgaaaaaattaaacataatgtaagtcgacaatagcttacggatgtagaagatgcaatggaatttaattatctctttagctagccaatgatatgcaataaaaaaaaaaatcaaaatcctaaaaaaatatataatttaataaccaaaacaggttaatgacaaataaaaatagaagattaagtgtccatcgcatattcaaccgtttaatttagtcgcttaaaactaaaattcaaaagatatctttgtatctaaaaatgaaaaaacacaccaaaaatgtaagaatatatctcagatatataaatgcgagcttaccttctctacagaagggatttaaatctttgatccnnnnnnnnnnnnnnnnnnnnnnnnnnnttccatattttcatgcaatcattcacgttttgacttcaacacatccaagatatgcaatcgaacgtaaaaatcattaattatctttaatggaactatcaagctaatgggaagcgacatagatctacttcagctgaattaatatccaatcaaggtatttataggaaccatagaggcggtgaaaggttctaggatttgcttttttcaccaatatttatctttataaaatgtatctaattaagtaaacagataatttgccattcattttaaaggaataaaatcgaatctaacaaatatacataaaagtaattttgataattcaaaaaggcaaaaataatattttttggcgtagagatttttcttatatcttaggagttttttttagatatctactctttatactttaggacattttagatagtacaataacaaagttagcatgtctttaatttgtgtgtacatatatatataaagtggacggccttagaagcttataaatttgactcttatttaatatatattggtaacaaccttgtatatatacttgtgccagataaataattatacaatagaagaaaatttcagttagagctaatgtgttttggaaccgaaatgatgaggtttaaaaagatcaaactttacacaaattggtaacattcttgtaacatatataaatttacacaaattcgtagcgttcttgtaagaaataaataatgatacaatagaagaaaattcagtgattttcttgctatgttactactcattcactattaaaattacacattgataaacatgagtttacattattaactaagcagaagagttatcgttggtcattttcttggaagaagaagaagaagaagaagaatgcttgtgattctgtgaagaattatggcttgacgaagatgacgactcagtaaagaagaccacgtcttcatcggaaacgactaaagcttgaattgatcttggaaaaggcggtggattcacttccaagacaccttcaagaatctgaacaacttgactcatcgctggcctatgactctcttcgtcttgtatgcaccaacacgccactttacaagctctcgtgacctcctctatgtccactgcatctccctctagtctagggtcaaccagtgagcgaatgtctccatctttggtgagtatggtcgcggcccaacttggaaagaatctgactttctcgttctctgattgctctgtgtttctcctcccggaaacaagctcaaataacatcatcccgtagctgtaaacatcggctttcgctgttatcgcaactcccgatatccattccggtgcaagataccctcttgtgcctctcattgtcgtcaaaaccctactaaaatctcgacccacgagcttggccaaaccgaaatcagcaactttgggacaaaactgtgaatctaacaaaatgttttcgggttttatatcgcagtgaatgatacagtctctgcattcgtcatgtagataagctagtcctctagctgtccctaacgcgatttggaaccgcagtttccacccgaggacgatcttttcttcaacttggtttaagaaaagatgagaatccaaagaaccattaggcatgtaatcataaaccaacaatttcttgc

SEQ ID NO: 37169 - DNA, 1648 bp, Arabidopsis thaliana landsberg
gaagaagccaaagtatctcgtaacttttactgttggatttgagcagagaaacaacattaatgcagctgttaagaaggttctgcaacaatttctcccctcttgtttgtaaactatttgagtattgacacttaaagatttttgctttcatcatcattgcttcagttttctgaagatttccaaatattgttattccattatgatggccgaacaactgagtgggaccagtttgagtggtctaaaaatgcaatacatatcagtgcaaaaaagcaaacaaaatggtacgaaatctgaaatgtagctcagcacgatatactctaattcttctaatcatcatgaaaattgatctacaaaatcctcaccttgagctggttatctttggcaggtggtacgcgaagagatttttgcatcctgatgttgtgtcagcttatgagtacatatttatatgggatgaagatcttggagtggagcatttcaatgcggataagtaagttattacttgtctgaagtagcagaacaatcttatattttacattttgtgatggaattctattaaaacttcaggtacattgagttagttaagaagcatggtttagagatttctcaaccaggcttagagcctaacaatggactcacatgggaaatgacaaagaggagaggtgaccgggaagtccataagtaagatctccttctctaaccattcttctttgcctttctttcaaatttggttctgaattaagaaatgtgttgttacttactgttgaacagagatacaaaagagaaaccaggatggtgtaaagacccacatttacctccatgtgccgcgtaagtctctctttgaaacgttctctttagagcaactcaagagtgtttagtcattgtcagtactgagttttctgaaaaaaattccctctcacaggtttgttgaaataatggcgcctgtattttctcgagaagcatggcgatgtgtgtggcatatgattcaggttcgtcgatctgtagatacatagtcctagtcttagtccatcaaaataatgcttgctgttttgatcagtttgtttatgtttctgatgcagaatgatctgggtcatggatggggtctcgactttgcgcttataagatgcgttgaagtaagttgtttttgcccccaccttgcttaccttaataacacaatattctcttgactgatgatgaaaatttgtgtgttttgcttttgcagcctgctcatgagaagattggtgttgtggattcgcaatggataatacataaagtgataccttcacttggaagtcaaggaaagtcagagaatgggaaagctccatggcaaggagtgagagatagatgcaaaatggaatggacaatgtttcagaaccgattggctgatgctgataaagagtatcttgggaagatggtgaaagattagatttgtttttcttttttctttctatataattaatatattaaaaaaacttttacttttgtatatcaaatattttacactaaattaggttttcataggacatgtgtgaagccctttttattgatattgtgtaagatttatacattttgattgagctttattatgttgtttgttactttctccatttcaaattcttagatgtttttaaaaagaaattgctttcactcttta

SEQ ID NO: 37170 - DNA, 2430 bp, Arabidopsis thaliana landsberg
agaggtatttttatgtttccttcatgtctttgatactgtttttgatctcaaagagtttcatattattcgattgctgatggataacattccatcttttgtatcacactatatgtgccagcttttaagccctactaagttcttctcatttctaatcagcagtactatatggtctgatagaggtgttagctcgttatgtatgataacttcatcttggtgatgaaatttataggggtcactctctgctgcaaggcgagcagctggttttgtgagaggagatgatgtccttcacaagattttcacagaactggcacatagatacaagtgagtcttcaaattcttttggcatcattttaacagtccattgcctaagcgctttgcattatctggatatatattatttgttacagagatagagctggtggatacacaagactgctacgtactcgcatacgagttggtgatgctgctcctatggcctatatcgagtaaaactagtttcttttctttatcagtctttctggttttacattcatatctccatgttagatcaaataagaagtgttaatgatttggaagctttctggtgaactaatttggtcgatacttgatactttggataggtttattgacagagagaacgagcttaggcaatcaaaaccagcaacacctcaaccaccgcaacgagtgccattggacccatgggaaagatctcggctcaccaggcagttcgctccgcctaaggaggagaaaatccctgattctgagctgtaatgtggcataagcaatttccctctgttcaccaaatatcttgtctctgtctcaaaaatgtattttcgtgatcatttatcaatatgccacaatatgtttttacagaaggcaaacaataagttagctttttcatttgtttgaacattgaaaatgtactcttgaaaacattaacaggcttagagagactctttctttgcctatctacctatgaactaaactgttagtaaaaaatgttactctctttttcttgctcctacaagattaggttagagtttgagatgctaatctcttaatgtgtgccctatgatcgaccaaaagcagtaaaatttatgtacctaatgcatggaccttttacctagttaactatctttaggtgaactacttaacagaacctaaaaccccaacttgattttccatttgaaacctactcttgtttgaatttaatgtttatttacctgccctttaccagtttctgcgacctgcatcatcctcctgacttttacagccatctctaaaccattgagatggtgataatgataatgatgatgatgatgtctacttcgttgaaaacttttggggatttcgttttcttacaacaaattctgctttaacgtcaagcaaaacgcaacttgagatcctcctccatacacatttatgattttagcccaacacgctatatatggaatcattccctgcatacacctataggcaaaaaagttgctttcttccaagttttgaaactttattgttttacttcaattagtcctaagactatgaactctcaattgatataacatgaatgcaatgtttgcttttatgtttaaaacagtttatcaactaaattacaatgagatggttttcttcttttaaaacattcctaaaccccttatagtcttaaagattgatttaagcagacatcgaagcccactcatcagcctgaataaagttagccaccgaatacacatgaacatgctcgtccggtatctgactgctccatgaaaccctttgtgacctatctgatcccggacccgtgttcttagattcaccgtaataaagtgtcttgagcgcgaaatccccgctccaaggtaaccatccatcaggagtaatcaaagcctctaaattacaacctataaacacagtccttgagtaatctttccatggcctccccaagaagttcttatgcaccttagggttagctttaaacagcttcatgtactcctctgttccgttaatcaaacagttcaagaacacgaaacccgtggactgggacgggtcaatccttccttgggcagtgactgcgtttttctcgcccttttcagggttaatttgacgcggtgcgattaggatttcacagtcttggaagacagcagctgaattcccaaagataaagtcaacatttccttggatacgacagtttttgtagaactgacgaagaccatgggcatagagagtgtcttggttcccaaggaactcgcaattctcgatcagagaaaaatcgctgtcggatctaaacgccaccgcttggtgagcgtctggtcccgccgtgttctggaacgttagatcacgagccatgaatccatctcctaccactcctaaacaaaacaaaacattcaaatcacatataaattcacttttggcattactattacaattaacaaaaaa

SEQ ID NO: 37171 - DNA, 1238 bp, Arabidopsis thaliana landsberg
cctttacaacaacaggtgacccgttgccatacccgtgatttgccgtactgcggaccccaaatcctgctggagagctgagccaggctatagcttagctttcacagaatgggccgcccgagcctgtaggctaagcccatgaacgtgacttcagaccatgtgcactagctttccccaatcataaacatcttggtccctagccattgctacactgaatctcttctcttccgcttcgagatgagccgtgtgcacagattccaacaactccttggtggcaatcagctctatactcaaaccatccatcgttctctcaatctctttagcttccaaaacagcaatatcagctctctctgcagctaattctttttccctcaacatatctttatattcattactaaccatttcaatctcttctctaacagaccgtaactcagaagtagccgagacttgcctcgctttagctacctcgagctgtgttttaacagcaacacttgcctcattagctacacctttctccatctcctcaacacgcatctgcgccagctctgaatcctgtttcgcttgttgctcttccttttccgctttctccaattctagtttcagctcctcgatgagtccctttgtgttctctaactcctccaacgcatcgtatttcgcttcttcagctaactcagcttctctcttgtactcaggcattgcttcttgtatcttctcaagctcttcatctaccatcttccgtctctgaaacacacattttcgtcaaaaccaagatctcaaataaacacaaatcatgtgaagaaacaaaagcttaactacaacctctatagtctgaatcttatgagctttccaatctgtgatcccaccaaacttagaaactgcttctctaaccgattcgaaaggtgaagctgtatcgataacaccaatcggagacccgaaacaaggcgattcgacagatctcggagaaccaaaacgaggtgattcgacagatctcggatacacaaatgctcgaggagaagcaggaactctaagacgaggagaagcaggcaaaatcctagcatcttcgataacatcggttcttgaatcttcagaaaacgaatcttgatgacttatcatcacccttggtgcaacataaaccttaggaggttcgttgataggacttgtctcacaatcttgaaatggattatgtaaatcttcatcgtcgaatgtcaagaagtcgatgtcattgaaagacgttggacctt

SEQ ID NO: 37172 - DNA, 1609 bp, Arabidopsis thaliana landsberg
  unsure (1)..(1609): unsure at all n locations
cactaccaccgacattttggaatctttaattgcatgtttaagcttaggaccgagtgactggtttttttcgatctcgttgtctttgaaagtaaggatcagtttcctatcaagttcctttaaaaagtggctgaggaaggtcttgcggacatcttctccgctgaagctcgggaaaacatcatatgacctgttacgagaagaggatgaagaagccataaaagaggtgattctggaaaaaaaaaaactgagagagaggttgctatgaagttcctacagattacaaaataatatagtattagctcagtggtacactggtacctagatattgcttcattgtttcttggatatttctgaggcaacttgacagaagtttcctcttttgagctggatcttgacttattcaccaccacacaagtcagaatcatatttatgactcttattgttacatttttgacacgagcttctcacctcacaagtaaaattttccaaagtcactgttctaccaataatcttattcataaaaagattaaacctagtcagatccattaaaacaatctcacgtcccacaactcttgaaatcagcttaattactgtgtgacaatcttcataaacctggactacaaagtaatctattcctagctagaagactgcaacttctaaattcagtaatcacacacttttggtggggtgcgttcacaacaaacgcctactaggaatttcaaacaactatttagctaaggatctctctagctactaaattgttttagaatcatacctgaaaatggggttaaaattagctcctagaaagactctcggatagatttgggccgctaatcgattaattaaccgtcaaatacacctcattcacggtaaggatcagagaacctgattcgcaagtgagatattacatctctggttttcagttttcccttcgccgggaaacaaagttgttcgtcaccagactcttcctctacatcgcgagtgggctccttgtgggcttttactagttgggcttaaactgttcataggttccaatttaatattctatgttttatcatcagcccacataggcccaaatatatgtggtattatcataatcctgctttgactctttgaccattgtttctggaagtcagtgccagacaattcaaatacttgagctccgaacagtcgtcagctagggtttatcttcactcagagaaaaacaaaaatggtggtcgaaaaacaaacaacttacgaagaagttcgtctgaaaagagtggaagagaacaagaaacgaatggaagctctgaatcttccaaaactctctcaaattctcaattccacttccgtcaagatttctccggttctgatccatttctctcttctctttttacatcatacatacaatgatcgattgaatcatttttgtgtaaaaactattgacagatgaagaagagatctattcctcgaacaccagagannnnnnnnnnnnnnnnnngtagatcaagccgtatctctaattcttcttctgttcctgtttacagagaagcaagtcctctttctttaaaccttcttgattcttcaatggnggggttttcctcatttctagggttttagcttggctatgaaa

SEQ ID NO: 37173 - DNA, 2072 bp, Arabidopsis thaliana landsberg
ttcaccgtttcttgttcgatctgtttgagctgttatccatctaaattgacccttgagttggtatttctcaatcagagaatgcatcttcttgatctctgagatctcttccctgtctttagacttagaagcgtcgaagaatcctcctacgatcacgaggttcaccaagtctcgtagcctcttgttcttggcataccactcagttaatccggttaggtttttgacaacatcaagccttgccattgagaaaatgatcggtttcttcttgtccactaaataaccgcttttgttcacaagaaaaatatcggttagtattttttaatacacatagataacattctataacatttacttacaaataatattaatagttagtttcatattctataacaatctataacgcttcttgagaccgtgtagtattgtggaaaagtaaaatagggaatagagacgtacatgtgttcgtcattctcactttggctatacaagagttcatcaatggaagtgtagaacttggtgaatctcccgtcttgtgcggtaaaaggggaatagatagagtcatccgcgccaggagctgcgatgttgaacctgggatcgaagacattaatgccggagacaactctgtatagccccgggactgtgaagctcatgtggctctcgtattgtccagccctctctttgctaacaagattgaaaaaaacaggatagtgtcaaaccaggctggtttggatcaaatggaacaaatgcattatattgtctaaatgaaattagttaaaataccttccagcaatttcttgataagtgctagctatgatgaaatcggcagagttcatagagattaagtctgccgtaaattgagatgagaaatgatatttaggatcaaactctttccacttgatatctgaatcttcatatttagtcttctccaaggcatgtgcaatagttgcctagattttttttctttcatttcaataaatttgtttcgacataagaatgagtaatttattggtctaaatttaccaaagtaaaaaggtaaagaacctgagtaattccaagcttattagccatgagtgatgccaccaagtttccatccgtatagttcccgattattaggtcaggttttccttccaaaatatccaatatctttgttgttgcatcctactcataatattttatagtttcataataaaatatcttgagaataaaacatagaaaatataattgttgaaaaaaaaaatctaccattcttatatatgattttaccttagtgaatctttttaggtatgggtagatatcaaagcgggaaacccaacgacgtaaaatcccattttctgtttcaaatggaattcgaagaatatttgaatatttggttccgaaaatagattccaattcttggttgcatttagtgtttttaacgtatgtgattaatcgtgttacctaaataaaattttcaacatcaatatcgtattagccaaggaaacaaagatgataccataaaataccacgtaacaagttctagcttaagaagtaatacaaaatttgaaaaatattcatgatcaagaattcaagactcagttcaaatagaaagagaagtatttcaaagataacttacaacaagaatctgaggtttgaaattaaccccttgagagttaattctgtactctgtatgagagttgattttgtattgcatcgcttcgtcaacttgctcctccggtcttatccgaactatgctgtctcaatatgccttaagctttcacgtcctgtcgtcatctgttactaagcaaattttttaaaaataagtggtgtttgatatattttcactcttcttttttttacatggatcggaacaaagttttgtaaaaattattgcataagctaataacagttactttttaataaatatatgaatatatccatgcgtgtgtctatttggtaaaaaatgcaaagagacatgggtcatctttggtcttctcatgcgaataaaaacaaactaaatcaaatagaaatagaatctcagtgggaatctgagaaaacgacttgtgattaatttggaatagtctttacttagttggagc

SEQ ID NO: 37174 - DNA, 769 bp, Arabidopsis thaliana landsberg
ggtcctttgtctctgttgaaggatccttaatggtggagcctcttggaagctgtggaagacaagttttgctattgtggcttcgagtagaagcacgcgctgatagcaaattccctcccgggtaagcctttttctctatacatagtaaaattaatcatcttgcaatcttgctgaagagtggaaaggcattaaaccgaaattatgaatagcgatttaggaagcaggtctttagtcacaaggaatgtaactacttttgcgtaagttaaaattagggattagttagtaagttttgactagtatcatattttagttgggagtgtgaaatcttaatcttacattgaatgtatctctctagtatatactcttgttgttgagtcagcaaacaaaagggtttgtgttttctgagttctgttctctttttgattgttgcctggatacagatggataattgatcctccgttagagatcacagttgcggctaaacgcactccatggccagatgttcctcctgagccaccaactaaaaagaaagatcaaatgccattatcccaaggcaacaccgtcgtggtaataccaaagcagcaacaacatccaacgaaaatccgaaaaccgaaacgcaaaagtaagaaaagtaaacacgaacctagaccaaccgatacaacaacacaagtttattcatcttcgtctaagcatcaagaaagaaactgagaaaagaagaaaaaagcttttgagagttcaagagattttcttctactattattattcatttgtt

SEQ ID NO: 37175 - DNA, 1410 bp, Arabidopsis thaliana landsberg
ttttggaaagtccggattgggcccgggggtaataaaatatttggggacccctaacccttattttttaaccccattacaagttataatcccttattttcttttattcacaagaaaattagtcctatggatcacaaagatcaaggtccaaccgctttgacctatgagtatctgaaaaagagccaaatgaccagtcatatccatttacctataactgatttggactaaagctcgttaaaagaataaagatggcgttacatcatcacagataaatctttggatacctattttcataaaaacacattctctttgcaattttttttttttttttaatcttctcccagagataaaaatcccgttcacattatgttaaacaaatacattttttcccactcttgttataatttagttttagtgttcttgtaacaaacagttaatgtctataagagacatggttagctaacagtataacgtttagtagtcaatatttaataactcactgatgtaataaactactctatcttataatgactgattctgtagtaaataaagatttacaaataaattatgatattagagtttccaatgtagatctctaatgacttttgaggtataagtgaagtgtatatatatgcacaagcatgtacagaagaagagacaggtaaagttgtatagaagaggatcaaacctcactaaaagagagaagaggactagtgaggctatcgtttctgtttcctgatcctgagaatctaagtgggagcagagcaggatctttgtacgcactgaccaagttattgtaaaactcgggcattgttggatcgtttctatcttccttatctctctttgtcaacacctaaaacaaaacacagagagttaacaccaaacatcttgtaatgcaaatttcagatttacttctttatgtgtgtgagtgtgtgtgggatttgtacctcagcaggataatcagtgaatataggcatgaagcgtttacgacagaactcgttaaagagaagagtaaaaacgggaagagggacaagcaagtatgtagctagttccatcttctttagcgcaaatagaccgattgcaattgcttgcataagtacaagagagaatatcatcgtatagtgtatcattggccaaaacattccacccgtatcaaactttggagcatacacattcataaactgcatcccaaaacacaattgagtccttagttctagtgcacgaagaaagctaggagagtaaaatatgtgtgtcatatatacctggcttcggtagatgatgtatgcaagcatatagtataaaaggatgaaaggaagaatcaatggagctaagaagaagtatgcatcccccaagcccaaagaagagaactataagagtgaatctgtggaaccgcattggaggtacaacaaattc

SEQ ID NO: 37176 - DNA, 3672 bp, Arabidopsis thaliana landsberg
ttctgggtcacagcgaccactatgaaccagacaggggcatgcaggtcaaacacacactaatccgtaatatacattttcttagtgactactttattttaaatgagcgtaatatttgaatgttagtgtgatttttcaggtaacaattgcgtttaatcactttggagagaaattgatacaaaggatgccgaggtgtcgacgtggatacatccatgtggttaataacgattttactcaatgggaaatgtatgccattggcggtagcggtaacccgactattaacagtcagggtaaccgctacaccgccccaaccaacccgtttgccaaagaggtaactaaaccctccacatgttttctatagtcttggttcgttagtccattcttagactttgcttttggtttcatgatattttgtgctatacaactttattaaggatttgtgaaactttcattaataagtgtaatctttaaaacattcatcttactaatggagagtgtcattgtgtaggtgacaaagagagtggaaacaccggatggtgattggaaagggtggaattggagatcggagggggacattttggtgaatggagccttcttcgtggcatccggggaaggtgcggaaatgaggtatgagaaggcatatagcgtcgagcctaaatccgcctcattcatcacccaaatcacatttcactctggtgttcttggcgttggtggcaggtttggattctacattttgtcaataaatgattcactctttgccaaatttttccctttgaaaaagaacatttcattttttaacaaatcaatactttgaaacttttattttaccaacacaaaccatattaaaaaatggtatgtctacatacccttttgttttcttctacttttggctttaactttattctttttcttttgtctaacttctttttaccccactattttcataattaacctcaaaaagtcaaaatggagctaatttagggtgtttgatttggtacaggaataacaatctggggatgtggactactactggatcggaaggtactagcggtttagattcttataatgactataccgatgaaatgtctggcgctggttcaaccaaccggttatctttttcagttcttgttttcttgctaagttcgatatcatatttggtcgtgttcacttcttcaacccaaatgtttatgttgtaacatgaattgaatttacctattttatcaaggaacaagcaaaaagttgtttccatactcattcttgtgcattcttttcttctatgatctttatgtagttttaatggacctcataatttgtagttttacaaaatgttatagttcttaataataataccacgtgtgtgtttattgtatacgtatatgcaatcgtgacgttgtaatagtcctatcctatctttaattaattacataactaatagtctaatagagattagatattaatctttagcattatattatcttcttccttgtcttttctaatatacaagagggcgttccatacatgcatctacacttcattcggatcataccaatataatctactttaggatattgtaatttagtatattgaacattaaatacttttcccttgaaaaaataaaatataaaacatttttaacaaatcatttggcacaaaagtacactaaaacaattaaaatgaattcatattaaaggtgaagcccatcaaccaataatgttaacataaaaaaactataatttttcatcattggagcatggacttctcatgtttttgttgctgtatataacaagactatacacatcaatgctatatttttacttaatttgttattatggatatgtacctttatttttattttatcttattttgtttaggaaattgtttattgtgtgaagattaacaactttatctttgaccttgactaaacttgcgattcaaatttcatattgataaccgattcaaattgagttcaaatttacatatttgtgtacattaaggttgaatattggaacacttgtttcaatatagcactttcgaattcaattatccatcagttaaaaagtaaataaaccaactttagaattatgaccatagagaacatgaaaactcctcaaagtccctagtctcttgaaaccaccaagtaccaatgttaatattgttctcactgcagctattgctgctgtgatcttctgaaagatttgcttcactctggtcagtagaaatctctgatatccaatccgaaatccgattttcatacggtgatttcataacaccgaagctttctcttccaccaacactaccgttggcttctttaccactttccatgctcacaacttcaacaaaaccatattcttgagacgtcatctttgtcccagtgatctctgtttccttatacttgtgcaacaattcttctcctgtatttcctctccactcaatgaccttatctgcagaataacacatcattatttcactgaatgcttatctaaaactagcatacatatgcaacaattaaagtatatttaccatagttttgattttcctgattctttctataatgagttctgcaatagttcttaatctcgttatcagtcctaccaggtaatcttcttgcaatctttgaccacctattgatacacaatatttaattcagaccgccaaaaacaatcatgtaagtaaaagattgaaaggtattttttttgtctctcacttgttaccccatagagcatggagctgaaagatgattctctcttcttcttgactcatcggtccacgcttcagagtcggattcagatagttcatccaccttagcctgcaactcttaccactcctcttcaaacctttaagtatgaagacaacaaacaaacatatatttcagacatgtaaatttctatatttggaaagtgacacaaaataaggtttcaaagtgtaccggaaactattgccaaagaatcccaacgacgttctcccaaaagactaatgaccttcactagccgttcgtcttcttcttcgagccatggccctctacgaagtgtttcttccttcttaaaatccatttttcgttcttttactctgtttctttgtgttattacttaattaaatcctttctaaaattgtgctttgaacttgtaagcatgctttggctttgcttaaatagtaaagtcatgagtttacccaaattgggaaaaatgtccaaaaagctgacgaacacatatagtttagtggataataacatcatgcatcagttagttaggttcttgtttttccttgatctaggtcatcttttaagttatagattatagatttggattaggttccaagtatctttccttttgaatcatcatcaacttgtgattttttattatcattgtcttcagggattatggctttcgtcatcttaaaatttaattaactaatctaagtatccaatcgggtttggattttggaatttcaatatcttagggacttaaaaaagaagatgaagtatttaaatagggttgagataaaaagagatgaaaccagatcttttttccactcattcagaagtgtaagccaacgaagcactcttaagtatgattagttaagtaaatcccagtgttaagcctaatctcatttctgcaacaaagagagtttaaaatcgacgcatctaattgagccggttgataaagtccatagagaacg

SEQ ID NO: 37177 - DNA, 1593 bp, Arabidopsis thaliana landsberg
accatgtccctgatatgaatctaaatttttttcagccgaaagcctatcacccttacgcctggagttagcagcataaccacctttcgaatatgaactccgcgaccctgctctctgattatcagaaaacctgtcaggatttgaaacctcatcaacatcttcatcatctccttccaatctatctaaatctcttcttgactctctagattcccgcactttgctagctctttttacctcgttcctctctgcagattttcctgatctaggaatagccttcatagccagcttcttcctcatcaaatccagaattgatgatgaaccaaacccttcatccgcagaataattctcatcagaggcgtcatcctcgtcttcttcctcattgtgactcatatgctgcttcttctgcgttaccttcccaacaagagctttcactttctgggcctttaaccttccaaaactcgcagtcagacctctcgaacgcgaaccatttcttctcgcagattctacaacaccaaataaatcatcaaaaccaataataataacgaacacagttcctaatacctaattttacaaaatccactacaggtactacaattcgaggagggagacaaaagctagcaactaaccaaaattacctgacggaatcgaagagagtaaatcggaagaaggcggaggagcgaactcattctccttatctgccgcactgatgataacgaatccgtcatcggtggaatcgtcgtaagagctcgaagtttccagtggtcgccgagtgaaaccagctcctctagctaccactcctccgccgttacgaaacaaccgcacaatctcattccgattacagatagtattattcctcgccgggaaattaaaataagccggtggagctctcgccaacatctccccaagtatcttctcttctctcttctctcttcacttcctaaacagagtgggaaaagaaaataaacggtatagtcatcatagagataagagaggagatgacccaaaaacaaaaatatgaacaatttaaaagattaaaacacaaacaaataataaataaataaaattgcattccatctaataatatcctaatttctttttctattgggaaactaatttccttatctccttatatatagatatatattttttaacaactcttatctcattatatatatatatatatatattagttccaaacccttaaaccctgcaactttcagtttcttctctaaattggtttttaagagattatttattggttatgatgtctcaaactaataatcatgatactagggttacgaagatttttgtggggaatttaacatggagaacaactgcagatgatttgagaagatactttgaacaattcggacaagtggttgatgctaatgttgtttctgaaacttatcctggcagatcaaaaggctatggttttgtaagtatcctttcttttccttaattctacttcattagtaaacctttgtgtatatttaaaaatatgaagatttcctctgacctagaaacacgttttgtttgtactctgtatggtttgattccatatttaataccgggttaatgaagacgattgatttgtat

SEQ ID NO: 37178 - DNA, 1797 bp, Arabidopsis thaliana landsberg
gtgaaacagtcagaggagtgcacaaaatgcaccctctcagcttctagttatccttcacacaaacaaacccaactcatcaacgtattattctcaaactcaaatccagaagcatttcaagaactcagctgaagctttttagtacaggccactccaatctcatctccccaaaaacccaaaccctagagatcattatctactagccagctttgaaattcaacctcggctgtttcagaatcagagtatattacaaaccctagcttggaattagcaaatcaaaccatcaagaaggaagaatcaatccaactaaccgtttctccaagttcacgagcgagtaagaagacgaaactgaatcagagcagaaaaaccccgcattttttgtttcacgcccaattcggaagctaagaactttgagaattcccgaaatttgagttggagcaaatcgagatcagttgagttgaacaaatgattggagctttgagaacagagcaacagattcgaattgcctaaagaatgatgaaattcgaattgaagaaggaggaagcgggcaatgagaagcgggacccaagcttgtaagcagaagaacaagtgttggaagatttgaccagaaagaattcagacaaaagaaaaatcggaacaaaacaagtaacttccgagttccgacaccaacccaatgatttctcggcttcttaataatacacttctgcttcgattgaatcttcgtggcttcttctttcgtatggcttttcagatttgaatgtctgagcgctttcgctcttctgtgtttattttagcttcgatcgctgcttattgggtttttgttgttcgtttttcttcacttttgtttctgtctgttttgttttttctctctctctctttctgtctgtcttgataaaattggttattgggtttcttcttttcgctcgttattgcttttgtactttggtaagagattgtgtaacactagattgaacccatttgattatattcatcttacaatgttttgatctgagtgatctcatctaatattggatcatgtcagaatttgtttacttgacactttacgagattaaaagatgagtggtgttagtacttgagatttcccccaaaaaaattaggtgttggctttttggtcaagtaaaaaagatttaaaaatttggcatcgaacaaaagaaaaagagtttcaacatatggaaactgcaaactacaaagcttcgtcagctggaacgaaaccaagcttcaaacttacaacattaaacattagagatttcagacaaatgaaagaaacaacagagacacaattccacataactcgacaagacaaatcctcctaactcaaatactacaagataacctaaaaagataacgaagtgaccaaagaccaaacacaaacagagtgggattcaaatctaaaagagatgtcacataatcctacctcatcataatactctcctactgcattgtgtttgttgtgtacagctcatcttacaaagtttatttggcccgtcctttgcctcgacctcctctgcctcttcctctacctcggcctcttcctcttctgctgtatgccaagaccttggtatttcccgggctgctacttgctgagtttgagttaggtagagactggtctcctgggagccactcttcttcatgggtgcttgaactgttagaggcacttgagtggctgtcattgctttcgttattaattgcaccatctgagccattccctactgtcatatcatcaccatgaatttcagctataggctgagaagccttggtttcttctggaggtgtgggttt

SEQ ID NO: 37179 - DNA, 1607 bp, Arabidopsis thaliana landsberg
  unsure (1)..(1607): unsure at all n locations
actcaatatggcctacttgccacaattgtgcctctttttcgttaagagtaatatctttaagggatctttatccacattatcctgagacacccagttcatatgatttgaaagcatgcttttggtaacattactgttagcggaaaaagaggattgctccatatcatataaacagatatatatatttgcttgaaagttgaaacaggactagcagtatcaaggagttcttgcagaattgtgtttgtggctaaaccaacttttggtaacatttcaaaccctcattattaagctctttaagtatccaatgaggagggtacagttgattagacatagacataccttgtagtttctgaagacgattggctaggaatctaggaaaatatggcaacatgttttactggaaagacaagtcaacatggaagacgagcatttctatcttaaatcgacgaatctctttcttttatgccttagaggctgatagagggttatgcgagtaaaacagcttataaaaaaacgtgtccacttgacacaaagtgagtcaaaatggaaaccacacttgcaaaagggtctgaatgtacataacccaactataaatggggattagatagctggatatttactttaagagtacacatgctttttgtgtctttctacaagacacaagatagtttacagcaggaacgtaatgtaacccagtcacaattcggaaacagccgatatctaaaagtcgttagctttccttcgcagttcgtttaactcattctcgatctctgagtctttgaaagggtatctcgtgcttgctgcaacagtgcttctccctggaggaagctctcctttctgctccatatcatataaacagaggataactataagatgtatgtttcacagactcttaactcagttaagtaaaatgttagtagcaaagtaggctatcgtcaaacatgaaacaagacagtaaggtaaacatagaagtaatttgagtagtttgaattgttgattttagtgaaccatcccaaattgctgaacccattagtctcttcggacggtaatttgcaatatggacatatggtagcttgtggatacaatattttcgcgaatgatgagattataaactctacggaactaacaagatgattgacgttttacaaacctttgagcttccagacaattctttcttcaagtctgcaagatcatcatccacagatgaagtttcaagcatttgaaactgcatgtacaaagaaatacacgttaatgtcaagatggttgctagatatacaagttcttctcctaccaacaaacaaacagtaaaccagattagaccattctatcagtcgtagaagatattagataaagcagcgaaccctaatcaatgcaagattttacctctgaaacaaatttnnnnnnnnnnnnnnnnnnnnnnnnnncatagaaataccaagacaagagatagacaaccaaccttccccttgagttcatcggttccaatctgagttagtgcatctgcttcagacttcatagccataactgtcaagcactttctagatttttgtctctatcagactgagcattcatttaacaagcagattgtgaagtctttcacaacgaaaaat

SEQ ID NO: 37180 - DNA, 2191 bp, Arabidopsis thaliana landsberg
ttactcgtgatatatattccaggtcttggcaatgatttgtgatgagctctctccagagactgtgatgctgttatatttgtcagcttcaggttagttttcttttatttgtcattggaaaactttaatggttggtaatttcttatcatgttgtatcaacgatattggttattattatccaggtggtcctgctcgtgaaaatgttgcgcaaccagagaactctgtcggttcaagcagaacatcaaaaagcaagctgcttgcccgagcttcccaagaacagaaaagttacaagtcagaacctcatagcaatggaaaactaatgtcggctgagtactatgaaaatcacctctggttaggtcctagaggaggaagctctggtaagtcgttttcttcggattaacatttgagtatgtctccaaagatcagacttttctcactcactgtctcgtttttgtttaggttcaaacaacctttaccctggtgacctaatcccttttacacggaaaccacttttcttgatcattgatagcgacactagccgtgcattcaaggcaggtttgtcataacttagtgtttcatttctctggagagtctgatagtttctctcagtaactatgcgatatttgctgatggattgtaataaaataaacaaactccaggttttgggcggcgcagagagaggcgagcctgttgctatgcttctttctcctctgaagccatcattcgagaacccatctactgatgatacggaagcactaaatggaagtcagtttacttttttcttaacagctcctttacaagcattctgtcaaatgctgggcctctcaaacaccaaacctgaccctgtagcacttgtgatttgaaaaccgtaaatgaaccaaccttttatagtgtggcatgcgtctttaccatttctgattacaatcttcaggaattatgtgatgaagcagagagcatactttctgcttccttttccgagtgggaaacgattctcttgacttccaaagtcttgaatcttgtctgggcacaggtcttacctgatccattcttgagacggctgattctcaggtgagtttttctcaaagttttcggaatcaaaacctcacaaagcatggactcttgtcaaatattgtcttgttgttgtgtagattcatattctgccggtctgtactcacttccttcagccgcacagaggatgatgacccgtatttacctcaatgccacccgaatctcccagagctgctctcttcggtatctaaaccggtgcagtcctcagtacaacgactagctgagcacttgggtgttgccaaatctttccacttcaccaacacataaaattagaaaaatccatccctgtggttgagagtaggttggtgggtgagagagtaggttgtttgttcgtttttgttatagaagtttgtatttgtttagggtataaagaaaagagagaattgtaatttttattttgatttgatgattctttagttttgtcatatttgtaaaagattagaacaaggtaataatcattagtctcttctttaggatggtttgctttgtgtacgaggagaggttaacaatatctgtgcattgcattaaagaaactaagaaagtgtgacattgttctatcgctttttcataaacatctatgtaagtttgagccaagaacgaattaaagattgaaactttacccaaattatctattcaactttgtgatgaatgggttttaagtttcaacatttgagctcaagaacgaagtaaaaaggttgatacttttttacaaatgatgaaaggtgccagagattgaatcctagccgtcaaataatatatcaaaacgccaagaacaaaggtgtctctgtgagattgaatcgtagccatcaagtccaatttctaaccggaaccgcttgatttcgctgtcttctagttctgcgacctatcatcgctttagtggaaaggaggaagaaacatggagatttcgaggtgagtttgcagagatttgaataaatctttggatagtttcgtctggtattaactatgtttggttggagttgcgattattagtttgagaagcttttagatctgttttcagggaatattcatatattggcatatctgtttttcaattgcagatggatttgactactccaagaaacccataaagatctttgatttgaaaaacctaaaatccatccacaat

SEQ ID NO: 37181 - DNA, 5831 bp, Arabidopsis thaliana landsberg
  unsure (1)..(5831): unsure at all n locations
aatcttttttgactagaaagtgaggattgtgttgacagataactaaaggtggatgcttgaaggttggtgttcaaacatatggaggtggactgtggtacacctggtttgatcgtgacttgactgttgcaggacgtgtgattcttaaagaagagaaagcaggttctgtctcgtattctcatcgccttgtcaggattgaggatcctatcatgaggattcctaccttggccattcacttggacaggttacctttaaatcattgctttgtattggaatacttcttagactctttttttgtcgtgtttgcgataaaaaaaacattatttatttctcagttactttatgtagagaaattaatattgaactttatgtacgtttcgttttgccttgcggacaggaatgtgaacactgaaggttttaagccaaacactcagacacacctcgttccagtactggcaacagctattaaggtgctttttctatgcttgctatgttgtccagcgtctctgctaaattttgtttcatctagtatggctaaagtatttgtttgcatgtcacccactatttgagatcagaacccatctccgtgaaccccttaacttttggcagatttatctatgaagtcgaaaccattgttgtcaagtttgtagcagacttgaattcttacttcctttgcaatttatttatattgtgtgatatatttgaaggcggagctcaataaaacgccagctgaaagtggtgaacatgacgaaggaaagaagtgtgctgaaactagttctaaatcaaagcatcatccgcttctaatggaggtccagttgaaatatataagctttatggttttagcttgaattttagatcttgttctggtttagtaaccaagtagtcctctttttaatttcttagatcattgcaaacgcactgggttgtaaacctgaggagatatgcgactttgagctgcaagcatgtgacactcagccaagtatactagctggtgcagctaaagaatttattttctcgggaagactagataatctctgcatgtcattttgctctctgaaggtacgtcctttacttttacttttagaggagaaaatagtccatggtctatatttactgatcttaactgtgccttagttggtttccacnnnnnnnnnnnnnnnnnnnnnnnnnatagttagtccatgcttcacatttcaagagacttgtgtttcaagcccaatttaaattactccaccttgtagatctttctgtgcaagtatgttaactcacatctagtgtaagttttattctggatcacaatctaagttgaacatctcttacaatttgttcttctctctgaatggaataaatctacccattatgctgctgtatattgatgaacaatgatacaacttcactgcaaccaactttccttgggtattttggttcaagaagcagtgttgttgacgatctatttcaaatatttgaacttgggcacatttacttatagatgcatcgtcatctggaagtgacttagaggatgaaagcggaataagaatggcggcactatttgatcatgaagaagttggctccaattcagcgcaaggagctggatcccctgtcatgattgatgctatgtcacacatcacaagttgcttcagctctgacactaaggtagcaaaccattcgagtgatagacattaaactgggattgtgttatactttatataattttgtttttgtcgctcattatagttcgcttgtttcatcgttacaggtgctcaaaaaagcgattcagaaaagtttgcttgtctctgctgacatggcacatgctttacatccaaactttatggtaatcatttcatctggcaatatttttttcatttccatgcacagaagttgatgtccatctttcattgcattttgatttcactttttaggacaaacacgaagagaatcatcagccaaagatgcacggaggacttgtcatcaaacacaatgcaaatcaacgttacgccactaatgccgtaacttcctttgtattcagagagatagcagagaagcataatctgcctgttcaggtatgatttgcctgagaaagattcaaaaaaatgttcttacttatttgcatattataaatgaatgtggacatgaatattgtaggattttgtggtgcgtaatgatatgggttgcggatcgaccattggtccaatcctagcaagcagtgtggggataaggacggttgatgttggagctcctcagctctcaatgcatagcatccgtgagatgtgtgctgcagatgacgtgaagcattcatatgaacactttaaagctttctttcaagagttcaactccccttggagccccaaactcactatcgacgttgaagagattcttaaatcttactgctgtctaagttggaactgaaaagatcctttgttaggaaaaactacattaataaaaggatttatagccatgttatgtgttgcctgcggttaccatcaattcaccctcccgaatattcatcaacttattacttaagcgattcatttaattgagtggtttatctcaattatcttgaaatgaagaagatcaaaagacatatatatgatacttttgttagagcttcgaaaaagacaaagacagaaagataacaactagcaatgcggtttcaggcaaatccgtcatggtccatgatgatgaactagcctgatctggctcttaacaaatctcaattttggtcccaggattgtaaatgtcatgaaattgaatagaatatgcacgacaagttcacttgtattcatcctaaatcctgtcaaatatctcaacatgtgattagggaaaatagctcgtgtggaagtcattcatgcctcaacaacaagtgctttctacatattttatttctcaggtatacaaaatcataaagtgagtgtgttcaacaaatttgtaacctcctagtagtgataaaagggtaaaaacaaataaaaatggttaaggcagaagaaaccgtagaagaaacctagttttcttcagtcaaaagcaggaggaagacctttgttattatactttgtacagtcaaatggtcctacaacttggttgctcttcttgacctgaccatcacaaaagacaaaatggttttgctcgagttagttttcttgaactgattatgacatataattagcttgtgaatgaagcatcagttaatgaagattatacaaaaattaagagttgaattctttccataatgttgttaggtagaaaaacaaccaaattaatcaagttccaatttttcaacttgttgtttccttttatcaacaccaaatggtaatgagagagggagagaaggattataccggagaccatggacctggttcaggagcagatttctcggttggtgaatgttgcacacgtccacttttcagtgttaaaatttcctgcatatttaacagaagagttctgctgaggcattgcagatatacttatatatcatatgcaataacagcaagtgggtcttcagttcaacatcatggtttcattcatatatttgagatatacatacctccccagcagcctcaattgcagctaaccactcgtcagaaaatggaacagcatttggaggcttcacaattattggatcaggtttcttctcaagtttagcatccctgttggaaacagtgacttattagctcattcttaaaataaactgcactggaggaatagaaaaggtttactagtggagactggattagattatttacagtagtatcatcttgtcattgccttctgatgcattgctttctgatgtcaaaatgtcatcgctgagtacattgaactcgttaatctgcatatcatctctgcctgagatagtctccttcatgggtattggagttcctagttcttcctctctgggcgcaaatgatacaggatcaggagagatctttacaactttaacttcatctccttcattggggacgagttcttgaccagtaacctgtgcactgaaatccttttcagcatctacctggaattcagcttttacaacatagttatgctcaatacgtccagaatttgaatcctcttttgacatgccttcagagattctggaaaagtttgtgccctcatttagacactcaggaactccaaatatagaatccgaggaactgactgattcacttagtagagttttagtttttccacaaaggtctgatgcagtttggatatcttctacttccggatattcttgattacggacgcccttgacagaaaactcatcaaggccactaatgagctctggatcagtaaccacatccacctctgtccgctccaatttatcctcaggctcctcatctgaacaatctgagtctgtaaccaaatccatgtcttccagctcagagttatctccaagctcctcatttgaataagagaaaaccgcaacagatgcatctttttctggagaacaaccaactaatgttccaagttgatcagcctgtttcattacacaaccatcatttacatcagatgtattttcactgctggaacaattgtattgcttctgcttttcagaagttgatttctcagagaagggttcatgagatgattccagaggtttaatctccatcgtaacttcaacggaggaaggccttagtaatttcacttgttccatgttgtcagcatcagacgaaccagtaaagcattctatctgcatatcaggcccatcagcttcttcgtttctgatcaagacatctatctcatgaccaccctctttcacctcaaggactaattggttcgacaaatgttgctcttcagattctctaaaccagtatttgcattcggaaaatggaccaatgaaatcagtctcatagtttttctctgtgctttcgcttatttcaattctcttctccgtttctaatacagattgaccatcacacaccatgttatgatcacacaaaacagagttcgctaccgcatttacctcaagatgattgcatggtgattgaacacaatctagtgcttcagaaggctccaaaggtacagaaacaaattcagtattacctaactgattttctgaagaagatggattgtctgcatcaccctttattgaagccaaatccccaaagaaagatgattttgcagtgaaggaatccaaaacctcaggctgctttgctacatattcagtagaatgataaacaactaacgcatctttttcttcagaaaggcaaggactaatctcgtcttcgtttccagggtgcaggcattcatttagaggttgtccaggtacatccaatgtatcagaatctccactaaaatcattggtagtacacatatcttcttcccccggattgctgactttcaactgtgagtagttgtcaaacagtgtcaactcatcgcaaggaggaccctgcatcgtagaatccatagaatctttcattggtaaagcacagtattcttctactgagaggcaagacttccttttctcatctctattatcgtcagacatattactaccatcttgtacattatttttgcagcctgagggcggcagcgcactgttaccctggaattcttgacattgttcagtagaaatcttctcagatgtgcaataagttacatcatccagaactaaatttccagtatcaccttgaatgacacattggtgctgcggattttcatttatctgaaaactcaatggacaacgcaacactttggattctacttcctgtgtgctattcaagtccactttcaacttttcctgtgaaggtttgagacatatagattgagcagagaatcttgcagctgaatctgaactgccaaaaattccagttgctgccttgcagttgacaccgggaaacttttca

SEQ ID NO: 37182 - DNA, 498 bp, Arabidopsis thaliana landsberg
atctgataaatgtgcaggtcagagcgttttcgctcggtttggggtttcggaccggttccccgccagttcgcgacttcactggcgaaaacccgccgtgacctgcagcgatgatgaaaatcggtcactatctaggtgtgctaactagtttgctggaggagtggggggatcgtcgcggtcggagtctcacacccaggcagagcaccactttccgaagccgtacgacttcggtgtctgatacgtgacaaataccaggtggatcgcataatagttgtcgttcgtcccgatcccgaggacgcggtcgaacatgttcgatacccaaccgtcgactgagtcgaccccacacccctcgatgccgtctatcaccaccatcaccggaacctaaccattaaccacagctcgccccgtctctacgtagtcgaacatgcatacctgttcatagcgccaggagaagattcccgtaacgacaccctgacgcctcgcccatcttatctttcagca

SEQ ID NO: 37183 - DNA, 1082 bp, Arabidopsis thaliana landsberg
acactttcttttggctgtttctgatgttctggcttaacatatctgttttctttgctgttcttgttattagcatgatctaagtttctgactttgaaatcagcaaaaatgtgtcgtggttggtcatgctggaatctttagtgctaattatctctggctcatacagataacaaaaaatggctgcggagcttgtaagttctgcaacaagtgagaagcttgcagatgtggactgggccaaaaacattgagatctgtgaattagctgctcgagatgaaaggtatgcagagccagactgcttttttctttgtagaaagtgatatttttttaccaacttataaattctttttagccagagaatttcaagctcgcagatgttgctatgatgtttaaattttatcatccttaatgattgagatatataaacactttacttttgcttcgtcttggacatactttttttctgataatgagtctatctatggtgaacaggcacgcaaaagatgttatcatggctatcaaaaaacgcttgggaagccaagacccaaatactcaattatatgctgtccaggtaggttgtggtccagatctatcgtatacagtagaatcatgctttatgagaatgtcatacttttgaacgttttggtaacttaaaactgttgttttgcttgttcttgcagttgctagagatgttgatgaataatattggagagaatattcataagcaagttatagatacaggtgtactccctacgcttgtgaagatagtaaagaaaaaagtatgttcatctctgtttctggatgttacttctctaccaatttgagagttaagctgcttatagtttgcatattgtttggttggcatttttcgaacactttttagtcggatttgcctgtaagagagaggatttttcttcttcttgatgcaactcaaacctcccttggtggcgcttcagggaaattccctcagtattatacagcatactatgaattagtggtgagtttgaaacaagaacattcgaattccgtgattctgctcttgaagaagcaaattagataagactgagagcttttctttttgttatctt

SEQ ID NO: 37184 - DNA, 2780 bp, Arabidopsis thaliana landsberg
  unsure (1)..(2780): unsure at all n locations
cttctcgacgcagaagaccgattcgtctaaagaacatccgtttgattaaattaatttcatctacttatcatttatggttattaatatatgtgtccactaacttcagcgactaaagtttgtaatcttgcatcaaaatatgttgtttggttactgagaaaatgataacgtagacggcaaaaggcgtactttatacatgcaagtttgtcttaatatatgaactagaaaattttaaaacttatatttaagtaattaattttcatcaagttttttaacaattcaaaattctctctcgagaaatgttattgttaattttcatgtatgattgaaatttctctagaagtgatacacgtagtatatttctgtcagaaaaatagtttagcactttggccatatgtgaataaggtgatgatatcaaccatcccattacatttattttaattatcacaacgctgtaataattcttataaatatgtatgattgaaagaaatttatttgagtaattattttgaacaacatggtttaatacatacacaatttatggtattctggctaatatagattcaatagaccgatcataatgacatagtagtatttatttggtaaacattaattaattcgctaacaaatcatagataggtatctatcattgaaagctatatgtagcatagctagataaatgtatgtgtgtgtaaagctagattcgtataaccgattgaaatcagaaaacgataggatcgggggaggtttaatttcacccacatgattgtcatttttcctttatgtggtagcaacatacacaaatttatatgcatccatcatatatcaatgtgggtcacctagatgcctatattattggggtttgatcagccgatgtttgttgtatttgggttgattttccatataattcatttaaagcatcatccattaaaaacgaaaaatcatttcatatatgtgtttgggttacagaaattttattcgatgagaaatgtcaaaatataaacgagaaattgtgatgtgatgcaatattgctagtgaattatgaatatctattgttcatgactactgtatacatattactataaatgtccatggatatatttatagtaaataatataaagaagtcaggggaatgtgattgcaaatttgcatacaccgtatggatcgtacgatgaaccaaaactatattaggcaccaatcaatcaaaaattttaagagataccaaagttgcttcaatagtaattagagatggngaaattaaggtggaggagaaccacataagtggcacctctcatattttaaaatattgtggaccaaataaaagaaagagagagagtgaaacaaatactcacgaataagaacaagaaggatttaacaaacccatgatcattgttatcattagcctaccacgtcactcctcttttgtccatttcttcccacttttaatatctgttttaacttaccctcgaaaaatggagaattgtttcgtaattttctcaaccttttctccaaaatattcagattcctttcctcataactatagaaacaaacgtaacaaaagaaaatgtaatattcaaccaatctctgaataatatgcatattactgcataattagatcattatacatgcatccttatttcaaaaaattaacgagaaaaagtttataaacattctagaaaattatatataacttggaatcaataaaaaggactaattgttatttaatatactaatataagaaatcctgaaaatagggattaaaacaggaggcgaagagcaagaaacagaaaatactctaaaagacacgaaaccaaagagagggtgttgcctagtcagcatctgatgacgtggcatagctctcgtgtgtgtgtgtctgtctctacaaactctaaagaaacggctataagtggaagcgtttggagaggtcacgtgatttgcacaaatttttcgttttcatgctattattatcgtattattaatcacgactctctctcgtaacgcatcatttttttcgtttaatttaccttaatttattctcacgcgcgacgctccgtttcgacgcgtggagtttttgctcaaaacatgcatgattgttaacgttttctttttgtacaaggaaaaaaaaaaacgtgtacctctagacaatagttagagagaaatgagaaactggaccaggagatgtgaatggtttcattcctactttggttaatcattgcaaatgccaataattatatagagaacggcgtcaattttctgcaaagaaatatttttactggtacctttttgtgctacctataaatgtgttggtttaatctagccatcacacgtatatttctagctatgttagatctttaatcattctcacctagactcctttacaaaaaccaatacagatgaaaccagtcccacccctctcatttaagtcatagtatatatttgtgtaacgagaatacagacaaaacaattaaattcattgtaatcatacttgaaaatatagtcaatgaaattaattatcctacaattcttgaaactatatacaatcaatgaaattaatcctacaattcaagtaaatttttgaaaacaatgtctataattataattatgtatattgaatagatatatgggatattttggatcgtccaactctaattcatatgtagattaaaaataaagagaaagcaataaagtataaagaaaatgtacaaatcgtaatgtaatttagtgatgatttcctctatataggctgatgctgggtagacctttggctaccatgatgtttatct

SEQ ID NO: 37185 - DNA, 2884 bp, Arabidopsis thaliana landsberg
agatgattcctacaaaatttttattataactagagatgttatttatgttgtgtacctgagacggaaggtgaaggcaacgtataagtggaatcttccagagaaacaagtttggaggaacccatcgacgaggagagaggtggaattagcagattggaatcagagatagtcttgttaacaagaaaagacacaaagtcgagaccgtcaagagatccatgtcgaaactctcgtaagttttggacacagagtgaggtgtactttgtggagctacaatgcctttgcatttcattttggtaagcaaatggcatatttcttgaagaggcatcaacaatgagaagggcattgaccaataacacccaaaacaagaccatatctataacacccatttctttaaaacaaaaagttggttatcctctatttatattcttgggtactttatgtggtaaagttgatgatatccaattaactagagattagcattgatttatatagaggagggaatgaagaagatagttttagctgaggaggtgagtgtctggtgagttagtttagcggtctaccatttttttcatagagtagattgagacttgagtggcttcgatgggatcattaacactcacttttttgttttgtttttcttttttcgtttttatttgggaccaaacatatttttttgttggacaatttgatccaactatatacctcaaatactcgctcgatcatacccaatttttaatcatcaagatccaaaataccattatccaatcacttaaactatatatccactaatgccaaaacagaacatataatacctgtcataactctcgtactagttgacttggacgacatatgaaaaccttagctactttctgtgtgggtaaacaaacaagatggaaccgaaaaaacaatcagttctaactggtaagaagataatgtaacatgcttttactacaacaactctgcaaaaagaagtcaaattattttatcatacggaagagtgacataataactgctaatccgacggaccaccacactatagttccttatctgaattttggtatagttcttttgtcttagaaaaggttttaccacaaaagtctcaaaacgttgtgggctcaaagacgaggcagagcatggactctaatcacatacgtgcaccttgttaaccgctttcattccatctattacgaatcaaatcatcactattaacctatcaataatttaacataacaagtgaaaaaaaggaaaacaagttctaagacagaataattacatgtccagttatcgaattatggacaattgtatttacatttcaatgaaagaatgaaaaaaacatccccaaggatcaattagagaacaccaaacagattaccatcaccacggctgcccccaacctatactttgcttcagatgcacctgaattcctccgtggcggattccacatctgctgcctgctcgggtcgatttcgataggaaacctacaggaaccactcgacggatctatcttagtaaccaccccaagattgttaaaatcacatgagccacgacgattatccattttttgaaaatacatattgaacgcataagaagcattcgcggtcgggtccaaggcggcgcaggaggaacccggcccgagcgaggtgcagtcggcattttgacacgcgtacgtagcagaagcctgccaagtggcagcaccgttacccgcagcctgagtggagagcacgcaccactcacgtgcctggtaacgaacacctttagtcggaaccaacggacggccgttaccgagactcagaggatacttaacggcgccgtcataagagaatattccccaatgtctttcgaatttcccgggatcaatgctcttggcatcttcgtctactaatgagaatatataaacttccggcgccattctccggcgaggcgtaccttgtccttgaaggatacgattcaataacccttgattgaatctctgagccattgcaggatttgcgttctgatcaccgtcggttggccatccgacttctccgacgatgatttcaattttgttcgcatcaaatccgttcttctccagcgccgagactaaagtgtcgaaatttgcgtcgaagacgttcgtgtaagagattgaaccatcgacgacgggcttagctccaccgccgccgcctccgtttgggaagaaggcgtattcgcgcgggaaatttggatcagcgttgagagagaggaaagggtagatgttgaaggtgattggtgagacggaatcagctaggaatcgaacaatagagatcattaaggtttttatgtctgatcgaaaatcgccggaagaaggaagaccatcgctggattcgtagacgtcggcattaagaggaaccgtcactttgacttgccgaccaagaccagctttaactagagctgcttgaacgttttgcagcgctggatatgttgatcggacgaatctgttattataggtcttcaagaatggctcattccccaccgctacatatctgatcaccgattaaaaatccaatctttagaaacttcaagcatgtttttagcttaaaagtctaagctttcagaaggttgtttatagtttaaaagtctactcttcagatgcttaagcatgttttagcttaaaaatccaagcttgacaaacttaaaacatgttttagctaatggcctattgaactgcaatgcaaattaccttatgtcggttccatatctagagatgtattgagagacgttttgttgaacccaaagctctgcgttggtaacagtggatgccatagttgccaagagatcgttggggatacccgaccatgacttgaataccggatttaccaagagctctgagtgcaccagggtcagcttcaaatagcttaactttgttgaaccc

SEQ ID NO: 37186 - DNA, 4509 bp, Arabidopsis thaliana landsberg
gtgctcgctttgttccatcgcagaatttgtttctcagctgctagcttgataattttacatatccagtttgaacgtggaaaggctctagataacattggaaaagatgtaagaaaggtatttgaagaagagggtgatcaagaaagcttgagcatccttccaaaggctgttgatacagtgagaaagaaggtaagctttgtaaatcaatattttgaaatatattttgtacctctttgcttttgttttgggcgatcctgttctgataaacttgacagaaaaactagtgcttgaatcagataattaaaaatattcataattgaatagcaatatcaactttttttttgtctaatacatagaggcccagactctacgatgtttgtaaaaatagttggttcgttctttgtttctgagatagttgagatgctcttttcatgttgagacacattaagatgtatggttcttaagagctttcagagattgcatagacagtcactagtaaagtgttataggcttttgtatttgtcctattcttccatgtcttactactttgtccctttaactaaattatcaggtagtccgttcaaggatgatatcagatggatttcgagtcgacgggagacatcttgatgaagttaggcccatctactgcgaatcgcattacttacctgcgctgcatggatcagcacttttctcacgtggagatacgcaggttcgtcctgaaactttttcccagtaacgcctatcaaattaaaccttttgaaccaaacaaaaaaaagaataatctcagggtattaggtagcagaaggttaaaagaaaacccgaatttctatattgtaagaaatgacattactctgtactttgtatcacttctgagggttgctttcctagcttagtttcattttttgtcgcttcaaaagttgttggcctgaagtgttaaagacaagcttaatctgttcactgcatttaatgagaatcttgctttaagatgttttgtatgtgttaaaaggtgctctgtactgtaacacttggagccccagcagaagcacaaagcttggattctcttgttggccccccgaagaagagattcatgcttcactacagctttcctccatattgtacaaatgaagtcggaaaacgaggaggccttaacaggcgtgaagttggtcatggtaaagtctttggtttcctttctctatttgcatgtaaagtccttattcacatttttcaaacaaaatattgctggtaaagttaatcctcaattttccttatctggtcgttcatatcatctttctctctagctaataatagaacaaggatggctattttgtcttaactttctttgaagtgtttttttgttatctaagggaatgcttttgtgctttatgcttgactgtgatttacattttctgtaggaacacttgctgagaaagcattgcttgctgtattgccccctgaagaggcttttccttataccattcgtataaattcagaagtaatgtcctcagatggatccacgtcgatggcaagcgtttgtggaggtatttattgtcactcacagacgagattgtattatgtttttgcaagccagtgcaaactatcatatgtttctattttaccttcataatgaaaggtgttccgcttctcaggtagtatggcattgatggatgctggaattcctctgcgagctcatgttgcgggtgtatctgttggtcttatcaccgatgtagatccatcaagtggtgaaataaaggactaccgtattgtaaccgatattctcgtgagttctcttattctaatttgttgtctttatttttatatggttagttatgtgaataatcatgaaactgaaatgtgtggcagtgcagtagttaatttaactgttgttgtctaaaccatgagtagagttaagttgctaaaatggattttatagaactgcatacaatgacttctcagggtttggaagatcatcttggagatatggatttcaagattgctggcacacgagatggtgtgacagcaattcagctggatataaagccagctggaataccgttggatatagtttgtgaatccttagaaaatgcacgtgaagcccgtcttcagattcttgaccacatggagagaaacataaattccccacgaggccaggatggggcttactctcctcggctaggtttttttcccacttgtcttttcgttaaccttagctaatagaatttcccctgctcaaactccaaaattatgtccgtcttgcagcaacgctcaagtactccaatgactcacttcgtaccttgatcggacctatgggtgtactcaaaagaaagattgaagtggaaacaggtgatttcttgacttcaactttaattgttaacagcttagttcttgtgacctttaaagactaaggaattgaataactcgtttgaattgaaaaatttaagtgcttttaagaaagtagtttcaagatgaaattcataaacttatgaataatatccacttgctttcttatagtttgctttgaagattttttatgataaataagtttttttgtttaggtgcaagattgtctattgataatggaacattaactattgttgccaagaatcaggatgtgatggaaaaggcccaagaacaagtatctttcagtcaattcagcttttaattgatcaatgattttccatgaattctgatattatgcatgtcatcaggttgacttcatcattggtcgtgaactagttgttggtggtgtgtacaaaggcacagtgtcatctataaaagagtatggtgcatttgttgagttcgctggtggtcagcgaggtctactacatatgtttgagctatcccatgatccagtaagctttcttagttacaacctgtgacagtatgtttccccctgagtattgttttctcatgtgaacctgaatgttttcattggccaaatcttagaaccctaatccgagagctttattttcttggccattactctagttgagattggttaatacttaccttgtctttatgcaggtctccaaggtttcagatgtattagatattggccagtgcatcactacgatgtgcattgaaaccgatgtccgtggtaacattaaattatcccgcaaagcactgttgcccaaacccaaacgcaaacccgcatctgatgctggaaaagatccggtgatgaaagagtcgtcaacagtctacatagaaaattctagtgttggagagattgttgcaagcatgcccagtatcgtaacgccacttcagaaatctagattatcagttcctgcagttgtcatccgtactgctgtggagtgtaatgaggcagagaaatcttcccctgtgaacgacaacgacaaacccagacgcgctgctacatcaaagccagaccggaaacccaaatccacagcctctaaactgattgcgacacagaaggaagaggaggcactcgaatccattgctccagaagaaacttcagctgaatgtggtgagatactgaagcaggacgggaagctaaaatccgtttctcccaaaaacaatagcactgcttctaacctagtatcattttcaaaagctaagaaatcaactatgaaggagaatctatcagagaacaaggctgaagagagtgcatcggttagtacccgaaaactgaaaataggaacggagatgacagccacggtcgaccatgttcgagcccttggattggttcttgatttaggtggtgaaatccgcggtatgtacatattccaggtatgtttcagtaaattctcctttgacttgttctcccattttcttgagttaacttttgaggcgatatacttaattcttgctttgtattgatattgtgtactatgaatgagtacagggagataaagataagttcaaaaaaggagacacattgcgagtgaaatgtacaagttttaacaccaaaggagtccctgtgatggctttggttgacgaagagggagaagaatagtggtaaactctctttcctttctacaaggttttttcaacccaagggatcatgtggagtcgatcatatggatcatacgagagttttgcttgaaatgtttttatcatacggatcgaatcaagagatgctcgttagctgcttttggtgagcaaatcttggtagatggatagattcattggcgtcacaacttgaggaaagctaatgaactcggttaggtaactagtcttttactttggccttgtgatgtgccattttgtttctcttttattgggggggttttgtggaaccgaaagtggattgtattgtttagtgtcttagtaactgacgtctgaaaggtgcgtaacgcaagtttcatcatttttgtccaatttttacaaaaatacaaaagcaccaaaaacccaagtcggcagctaaagatagaaactacgcatcccaatggcattcttgatagatattatttgtccgaacatattttcttctaaattacaaattcatttcaacaattgacgtcaaaaattaatttaagccaagagacgaggaactaa

SEQ ID NO: 37187 - DNA, 1478 bp, Arabidopsis thaliana landsberg
gtcaggttttttttttttgtctccgcgcctctggggctcggggcatattcgcttttgaaaatttgctttaaaaggtgaaaaaattattcacttaaaaagtgattttggttgcctacttttagacttccagctttgtcgttgcccttttctcactcacacttttcaaccaaataatttgccttcagttttttatcataaactctcgttcagtatttgtattgtacagcacgcaccatttgatcaaaccgcatggagggaaaggagaactcaatcttattaattgtgagtcaatagaacttaataaagttattttccttctccccaattttgaaatctttaagcctttattttcttatactatattaatcaccaaacttttattagaaaagaaacacaaaagtacgtagcactaaattatctttttttttctattagatagttttaaaaatcgtcgaaacctatcttcgtgtactttgatattctaccttttgcacatggcaagtattaagaagaagctcactgcgaagtatcaacaatgtatatattataacatgcaaactcatgcaagaaactaaagttctttaacacagatcgtatttaattttattaatgatctgaaataatgcttaatcgatccacttacaagtgacatatcataaactaaacatacacattatataaaaactgcacttggacacttaaatttcatattaatttagcagaagcattgaagaagtactaaactatgaaacctttctaattaagcattaggctcattgttcttgacagcatgtccaacgctcgggactatgtcctggcgtcgtaggttcgaagtcatcgttatacccttcagcattttcttcattctccttcatcttatgaccaatgcccgggctgttaccaggagaagtaggcccaaaatcatcagtgtacccgactgtgaaatgatgatcatcatgatcttgatcgtcggtttttcgcaactgtctcgcctccgtaaactgtatttcataaaataccgtcgaaatgaagagaatactaagaatgatataaactgagagtttcatgttaaaaataaaaatctgtgagaaggttagtttctagtgtatacgagagaggaaggtctagattacccgactttggcttatgtttttaagtttgttcgagagatagatcgtttttataagtgtaatgtgagtggaacaatataatgagcacagtgatttaatttggaccgttcatgtatcaatttccataactataaaaatgcataatgagaataaaaaaagtggaggggtaatagtattaaacattcgctataataaacagacaatcgatatggacgtcatatatccaagctgaagaagggaggtttcaaatggtttattggtaacttttaagggtaaatatataataatcaaaacgtacggtttcaatcatcatataagatataaactcaacctttcaaaaaatatatg

SEQ ID NO: 37188 - DNA, 1426 bp, Arabidopsis thaliana landsberg
agaaataatcacaccactcatcagttatccatccctttctttttacataaatttgtcactttttctcaaacgattttttggcttctgtaaaatttataaaggcgaaagtttttttcttatggattctctcgattccacctccaacaaatctccatttcaattgaaacctagaattctccgaccaagaatcaccaacatatcaaaccgaatcgatgaaaccgatcctcgaccatcatcctcggccggtaggatccaaaggttagtacttaacaacgaaggtcggaccaaactaaacgccgatcctgaccgtgaattctattcatatccacggttcgtgaaccacgtagatgatagtttcatatcctccttacccggactatacagaaaccggttgagaaaaggaaagactgtacttgacttgatgagctcatgggtcagccatcttccagaagaagtgaagtacgagaaagtagtagggcatggtcttaacgcacaggagcttgctcgtaaccctagactcgattacttcttcgtcaaggatcttaatgaagatcagaagttcgagttcgaagacaagtatttcgacgctgttttgtgttctgttggtgtacagtatctacaacaacccgaaaaggtacgttaccgtaaaccaaaaccgatttcggttatgtcaagaagattcctaaaccgggtctttattatataaaccgcaggtgtttgcagaagtgtatagagtgttgaaaccgggaggagtgttgatagtgagttttagcaaccggatgttttatgagaaagcaattagggtttggcgtgatggaaccgaatacagtcggatccaattggtggttcagtactttcagtctattgaagggtttactcagccggagatcatccggcaacagcctggagctcagatatcggttttgactcggcttatgggttttatcggtttagcttctacgcccgatccttttaatgctgtcattgcttataagaatttcaaacctatttatgagtaacacgcacataaaaaaaagtgtataagaattggatgggaagtttttgaagaaaaggaaaaaacctctcaaccaagtccagctggagaaacttacaatacaaatttttaaaaagtggagaatgaaattacagatttcaatcaaattggaagaacctgtattacacaagaaataattgacagaaagattacacactttggaaaatataattaatatatagttttcaattagcatgcattgtatgtgattcgttttgttcgaagattcatggacaatatccaagcaaggtagccttgtccctcttcaaacgagtatcacgagcccgcttactttatggtttagattctataataacagtatatatattagaaggaagtcttttatattaaaacaaaaatccattggatatg

SEQ ID NO: 37189 - DNA, 1358 bp, Arabidopsis thaliana landsberg
aaggtttgtgtattaacttgttgactacgcaacatgactttattttttagacaactgaaattgttttgtcctaatccttaatttttagacaactgaaattgttgaaagcctaaaacaaagataattttattcacaaagggaagcatgaaacggaaaatcaaaagtcaaaggttaagagacacgattaaggaactacatcagcaccacatataggacacgtggagcgataagagagaagattagaccttctctggcatgaggtgttggaacgactgttcacataaatctttgtccttagcttgggaagtctctagcactagatcgtctctgccaactgtggaacgaacagaagcagcttgtaaagagaaacttagagacatagatatggcccgccgaagtgtttgtcgtccatgagagaaaccgctcctgtagccctgcctcgaactcacggcttgaggtaagactatgtggcttctccttatcagattcaagctaactaattgtctttgtacctcctctggtaattgcaatgtgaaccggtctagattttcacctagttgttgaaccaatgaatgtccggtcgaatgagatctagggacgaatatctcagccatacgccagctcgacaataaccctgtagatctcgatctagttgttacactattacctgtcaagcttctctcattggggagtttttgaacacctcccgtttcaacatccatgttcagatatggataactctcaccggtgtttgagagacagatttgcacgacaaaccggacatgtggaccaagaagagagcgcacatcgatgcaattagcactggaagtgtggctacaaggaggcatccaacgtagtgtttctttatccacaaactcgcttagacaaattgcacattctactccgcctttgcctatcttgagccctttaacctccgaatagaggaaaattggaaaggactcaacgagttccttctcgagcccacgcctcgctctactgtgaaacacttcttggcttgccgcctcaacctctgctctatagaatgttttgtgcaagaaacaagcgaccatgcttaatgagataaatattgcaagcacaatgattgcgattaccgtttccgttgggaaattggtttttctattgcggtctacggattctgactcttgctggcatgttacataaggtaacaaatggacaaggaagagcggcaacaaaaccttcgtttcgatcctatagatgagatctctcgcgaatatagtcatgatgtgaaccgtccttttgctaaccacggtggatcacttgagcttcatgtgttgagcgagagaagagaatacgaacaagccgtttttataatacta

SEQ ID NO: 37190 - DNA, 1880 bp, Arabidopsis thaliana landsberg
ctgacaattacttgatgactctgcaggtgcgctcaacagttgcagaagcagagaatgctgctcgagtattcactcaattgtctgctgcttcagacctccatgttcatgggtttgatagcaagaaaatacaaacccatgttcagtattgctcgcacttgctggaagcagcaaaagttcaccgtgaagctgctgagcaggaggagctgcagaaccgacagagattagaagttgctcgtcaggctgctttggcagaagaagcacgccgtaaagctgaagaacagaggaaatatcaggtaactattgacttgcaagttaaccatttgcagcaacaaatttattttggtgatatatatggaagcttttcaagtcagtgatatgcatttttctcttgggcagttggagaaaagaaaacaggaggaagagctgagacgcctaaagcaagaagaagaaaaatttcagcgtataaaggtaggaggtctcttgcttttgattacagtgtctatgaagatcagatttctcaacattgttgtgtagtgtcaagggaaaaattactctttggtaatactttttagggtgtatccctttgtcagtatggtgtcttgagaagatgtttaggatgacatgctgattttgttttgtaataattaatgccctaggaacaatggaagagctccacacctggatctaataagcggaaggatagagtggaagatgatgatggggaaagtaagcccagtgagcggagaagaaagaagggtggaaagagaagaaagaaggacaaaagctcaagggctcgacactacgaggacgatgaagaagaagctgccactatggatgatcataatgaagtggaagatgaagacgccaacactaattataacagggaagatgagatgactactcaagaagctgaggaacctgtggatgatgatgctcatgatcttctcgctgctgctgggctcgaagatcctgatgttgatgatgatgaggtaatacataaacttcaatccaattcatggaactacacaaatgcaaaacacaatgtcacactaagtctgttttggtgagtacaggtacctacttcgggtgtaaggcgaagaagggcgttatcgtcatcagacgaagaaggtgaattaatggaggagagtcatccaaattcaagcccccagaaagaaaaagaagagagcaatggggaagctggtgatcctaacatggaggaagaagaggaagaggaagaggccaattgagagatatttcatacataacaacagatatctcttgtgtgtttgtaactttagtgacaaagatttcattgattcaatttctctagtagtcagagtgtgaagacaatttacattcacaggccaaggatgatcagtttgtattttgggttatttggattgagccttgtttttatttgatattgttactaatagaaaagcttttttctttttcaatgtttttaaacccgacccggacagtaaatcggattaccttctggatcaccaggtcatggggtcaaccgggttggactacgggtcaattgattaaaatttacttaatatacttaatgtcaatagaaattacttaattttcataaatataaaacaaaaataatcatatcatgtttaacaaaatatgaaatcaaacaataatagaaagtgactaaatttttcaatccaactagcagtctaaacccgtaacaaatatgttaggagatcatcaatgacgaaaataaactaataaaacatatatctcgaattcaaacaactaatctcggttgtctttctcaccaattcattgattttcttaaagcagaattatgaagtcttcaccaaaatctaaaatatcaaatgagataaaaaagtgaaaataaattc

SEQ ID NO: 37191 - DNA, 1792 bp, Arabidopsis thaliana landsberg
aaatgatttttttaaaagagaaaaattaattagtgttaattctcaaaatattattattagtaatattttttacgtagaaaaaaatatcgaaaaaagtgaatcaatccttcccccaagaaacaaaaaaaaaaacttactttttttgccaaaactcaaaaatctctttacaaaaattgcaacctcttcttcatcgtctcatcttcttcgtcttcttcattattaaccctaaatctagccgcaactacctctctctctaggtctctttctctatctccctctgtttactcccacagctctaaaagcgttttcgaatcgtcacacctggagaaggaagctaatcactttctcattttggaactttgaggagagatctgaaagtttttttttttgttgttgttctggatcgttcctgttccactctcttcatcttccgatcatcgttattttcgaagctctctacaaacaaaatcgattttttttctggtaaacatccttttgacatctcgattcgatttctatgttgttgagctgagactttcttgctacattttgttatcactatgccaaagatcgtgatttttgacgatgattgaacatgtttctattaaagtgactatgcaaatgtttatactttacaactttttgtgaatccatcttattacttttgctttcgatttgtatatgtgtgaaaatgaaaatcaatagaagcttgtgttgatcgatctatggaggtagttagcttttttgttgattttgttggtctattggcgtcgttgttttccattagggagcttatagattattgattaatatgatattgtggagccacgagtatcattgataagatataaatttggccaaaaatgcttttgattgaaatatgcaacaccattaagagtgtttttgtgaaaaaggaatgctcgtactgcaagctatggtttcttctattgtatgacattgccattacttgctatctctattgattcattttaagcactttcctgataaagaatctgttttatccggttgattgctcttatttgtctgttactgctcaaaccttacactatacttccaatgtttctatgccacaggttaatctaaagaggtgaccgaaagaagaaaacttttacgttttgcatggagtaagaatgccagagttaagaagtggagcaaggagatcgagacgccttgacgagcagcctaaccctccgctagttgaacaagcagaaaatatcgtacttcctcctcagactgcaacaaggagaagaggtggtggtagaggaagggggaatgctgctttagctaaaggtgcggcacctccaagaccaactgctgccggtagggcaggggtatcaggttgacagacttagagccagaaccttgtgaggttcgtccagctgcaggtgctataggggccactgaacctgccttaaatcgagttgaaggggtagctgataaggatattgctgcggaaggcggtcgccagagaaagtagtaggcatggaagaagattccagcatgggtccagtccctgagagggtaatttctgttaaccttatgaaattagtcaccggattttgtgcatggttatatccatgcaaaactctagaattaggttaaagaaggtgctccgttttggagttcaacatattcttttaacatcatcttggaacagtcatttgttgaaatgtggtttgcgaggccatgccaatgggtttaagccttgcactagctttttgttctcctttgagagagatatttcactatgattatcgttatctggataggt

SEQ ID NO: 37192 - DNA, 1568 bp, Arabidopsis thaliana landsberg
aatgaagagtctgcgtttcttgtactttaatagattttttagccggaaaataattggcacaggaaaggttttcggggggcagctttagctgacccattccttaccaaaaaaataaattctggcccatttatcccaaacattgaaggcccattggaaagtcacaacacgagtttcttcgcttggtctaagtttaatatcttctcaagaggatcgatcttcttcgttaccttgatttccaagctttagatattctcgaaccaccgtataaacaaacaccaaattgctttaatttgcataaacaaacgtcatgattatactttgggcagataaaggaatcattagtctcatctaatgtgttctttaccaattgtcacatgcccattcaacttttgcattcctaataaataagatgttaataaattaataacacctagtctatatcatgacaataatagtttctttgcgataacgattgatggtaatgaatagtatagttttatttgaagtatataatgaagaatgtatagttttaccaaacaaaatcattgaatcataccaaatatttttgccaaaatgatttatatattttattttttatgaacgcatttatataccaaccgtataataataaattggaaacacggaaacgttgacaaaaaagaaaatgacgaacaataagaaccgttgatcttgttagaagccgcaatgatatgaacaagaagaagagagtgacggttgtttcgctgtcagtttgattggacaaaagaagagtgtgggtcattatcgtcattttaccaaccttcacgttctcttaatttctattttaccattatttaatgaagctagattattagtggtttctttgtttttatacatcggatcggtagcagaataaataagcttttttttaacgagttagtgaggccactctggagacaaccacacctgccattatctatatcattctccgttacttcgatcccaccgattcgaatcattctctctctctttcttgatctgaaaattgagtcccaattccagcaaaattatcaatcgaatttctgatcaactgagcgcgacggtggtggcgacggtggtggcgacggtgacagcgatcgacggttatggcttcgaagactaagtaagactctttactcagtttcactctgttttagttttatcctattttctctgggaaattttttagtagatcgtagtagatctgatccaagttactattttgagaaattgtcaatgatcgagttttggatctactaaattcatttctacatttgttttgtcctaattttttgcggcaatttatttctttgttctgagatcgactgttgttattgtcttttgttggaaacagaactagtttgtccgaaacaacaactactactactcctaccgggaaatcatctccagcaactccaagaatagcaaaaagaacagttaataaatccgaaactagtaataataattctccatctactactactccacattcacgtctttctcttgatcgttcttctccaaattccaaatcttctgttgagagacgatca

SEQ ID NO: 37193 - DNA, 2514 bp, Arabidopsis thaliana landsberg
  unsure (1)..(2514): unsure at all n locations
tgtatcaatcaattactaattaattttctctggttttcttgatataacaataacgttaaaaaatctcattgttaatctctttatgccatcattagtattgtaagattttgtacactttaaattgtaaatttgatcttacagaaacaaaagatctacaaatcttagttacagaagataatggtattaaactatacaaatcttagtagtttaatattattaataatcaaaattattctaaattagaacttttacaaaataaacatttatcagtcgctttcataaatgtcaaacaataaaaaaagaaaaagaatcaaagatctaaagagtggcatttttatgacgtcacattgaaatccaaccgtgtaaattctttttttttcaatataagcaaattaattcacacgttttgtgcgctgtcttcgaaactaaatcatttataaaaaagacaaaacagacaagaaaatacaaactgtcaaaagaagattttatattggttgatttgaaatctctcagcaaagaagaagaagaaagattaaaaaaaaacaatcctttattatttttcatttcaactccaattttgattatctgggtttcgaatattcctcattttctccaatcacaggacgaaaagtaatcatctttttgtcttttcttctccggcgagagactacaatggactctnnnnnnnnnnnnnnnnnnnnatcgaaagagaaattcgtggcttcacgaccatcaacggctgattcaaagacgatgagaggttgtggactcgcgaatctggcatgggttggtgtagataaagtagagcttcgtcagaggttgatgatgcctgagtatcttcgtctcgctatgcgtgactgtatcaaacgcaaagattcctcggctattcctgatcatttacttcttcctggtggtgctgttgctgatatggctcctcatgctcctatggttgttttcattaaccccaattctggtggtcgtcatggtcctgttcttaaagagaggcttcaacagttgatgagcgaggaacaggttttgctctcactgaacttgtattacaaatctttttctttgggtttttgggggaatttcgaatctaatttgtatctactttgtgttttgattatgttagtttggaaactttcttaaagtctctggcttttaagtttttaatgcttgacttatatgtttatgcttaactgatgttagatctagtgttttgttggaactttgaaggatgagttacgtttaaagattgagtcttttggaaagctgagtgatgttgatgttgtcaagttattggtttgagcttttgatattgaaacttcatggtgacttttgtgttgatacaggtgtttgacctcacggaagtgaagccgcatgagtttgttcgatacgggttggggtgtttggagaaagtggcagcggaaggagatgaatgtgcaaaagaatgcagagcaaggttgaggattatggtgagtgtattgaccatatttttctccaatctctatagatccacttgaatgtttttagcaatcagaattgtgaatggaattggttggataggttgcaggaggtgatggtactgttggttgggttcttggatgtcttggagagcttaataaagatggaaagtcgcaaattcctcctgttggagttattcctctcggtacagggaatgatctttcaaggagttttggttgggtgagttgtgttttctttgttctctcttatgttgtcgtgacaaaacttttgaattggtactgactatggtatctcttcttcagggtggttcgtttccttttgcgtggagatctgctgttaaaagaacactccatcgcgcaagtatgggtccagttgctagacttgacaggtaaaagtcttattttgctcaaaacatttagcttttattgtatttctcttgttgtaaaaatgtatgcgctttggttatgtggtgttgcagctggaagattttagtgtcaatgccatctggagaagtcgtagatcctccttattctttaaaacccgctgaagaaaacgaacttgatcaggttttgctctatttcattaggcttgcttcttctcattgaatcatcagcatgtgattttgtaaattgccacggtttagtaattaaccaggctttatggtggtttcagggtttggacgcgggaattgatgcgcctccacttgcaaaggcttatgaaggtgttttctacaattacttaagcataggtttgttgaacttctctttttgatatcctaaacaattttcacaattgtttttctgaccagattcttgtgtttgtctggtttgtttaggtatggatgctcaagttgcatatggcttccaccatcttcgcaacattaaaccatatcttgctcaaggccctatttcaaataaggtttgtttattatatttgcacctaaactttggactcataattagtctttgttaaaagctaaagtagttatgttggttttgagaaacgacattacctaccacacaatgtttg

SEQ ID NO: 37194 - DNA, 1460 bp, Arabidopsis thaliana landsberg
ttatggttatagatactatcattggtaagggctctttttacttgagacgtaatctttatcaatggcttacgaaaacttagtcacggtgtatgaacgcaggtagccatataactaacagaaataaaaagagatttatttaagaattgactaggaattaccaataaattatatgaaaatagaatagcaaagtaattcacttaagaataacaatctttattaaacaaatccaacaaattatatacattgcacaaaactcagacgagaaataaagaactcaatgaaaattgaccaatgtcaccactcaccaacacgagagggcgtttctagcaaaatcagaagtcacaagaggaaatctgcaaaaacctcaacattgagaggagaagcaaccaaataaatgaaatagataaaacaatttttttcagtttctcctctgtttcttttcttcattctttctgttttggtttttctctttacttcaatttcgcatctctctacgagtttcttcaataatacaagacgagatgacgctcgcacgatgaacatgagtatttgcgtttgaccttgaaacaaagtggtaagaaacagaacaaccacttcgtctctatatccaccgccgatacttttccgccgcaataagggcacatccctggtgcttgttgccgaccaagctccgtcttctcttcatgatacacaacttccaaacacatttttactcacaattctcagacttcctttgtgtcttatctttatagtgtttctaggcttggcttccttttttctggtacgttagctaggaaaaatctagaacttctagaagtgtggagaagaagaaacgaaaaggatatttttattaccaagaaaggcaaaagcttatttcaagtgtaaagatgtgtttttcagaaagacttggagggtttagcactacaacgaccatggacttatagaagatggaaggtggatgacgtggcaaactctccaacgatacaatattttaggttttattttaaaaactcaagtccttgaaaccaagtttataaggtgtagaaactatctgttaatgatatatgcgtaagtgacaggtttcacgaaacataaatcatatattgccaaacaaaaacttaagtcgacaagaagatgggaacaaaaacctcactcgttttgagagtttcatttgcttaacagacacgtttaatcttattcttaggtttcaaaagaaatgaaacaacctaactaagatagattccgaaatcaattgccatagaaactctagtaaaaatgttttaaacaaatttttacagaccacatagtgaagtgggaaattgcttcaaatactatgaagtttccgatacatccatagtacaatacaagaactaaattaagagtgtaccgttagtttcttcctcccaaaacatttgaatttcacattttcatcatcttctggggatagagtcgacctgcag

SEQ ID NO: 37195 - DNA, 2591 bp, Arabidopsis thaliana landsberg
actttaaaatttaaaaacggcacccaaatatgggattaggttaattgaaagtggcatattttcagaaaagtactttgctttatctttcctcaatgttccattcataagactccgtctttcaatcgaatatcaacgcatgagaaaattatgatccattttgaacttcactgacgagccggatcatactaggactggacttatgatcgttgatacttgagtgagattatagctgagatggtcaatccatcgacactagattggatcattaattgatcagacttagctcattcgtccgacccactttaccatttatatatagtttcaatctggccactttgcgacaagacatggtgtataagatattagtaattaaatttaaaacaattcgaatacttatgagaaggctaccgtgaagaggacccacaagaagtctttagagctgacaaaaggaagaaatatgaaatatgagtaacgatgtctctgtctcaaaagctcatactcctttctcttttcctctttttaacactgacttattaccaaacatttctttttttgacggctatgtcttaaaagttagatcacatctaaaatatatatatatatatatacagtatatagttcatccattcaaaattctaaagataagtatttcaatcttgatttccaaaaaaaaaacgatgaggtcaatcctaaagatcagtattaaacacatacacacgcacaaatccatccaaatgttctttgaaaagaaaatatgtatgggccggggcaagactcctaggtatctaggagttgcatttccaacctaatgataatagattatttaaagttttagaaaaatggaactcgtgactcgtgcactgagaaatcattatcaaattcgtaaaatattagagagcaaaaagtctgaacaagacattttccttttcatgagttactgccttgttcggttatgatactccctccgttttataatataagttgttatagaccaaattttttgtttcacactataaattgttttcaagtttttatgcaagttatatattactttaatattttatgattatttctattctacagtcttttttatgattggctgaactttttaaaaattaatatgtttaatatgcgtgtatttagctaaaacaacttataatgtaaaacggagggaatattattttttagtatctgtttcatatttttaaaaacatatctaaatactagttaatcaaaaaagagatctataatttcgacaaccctgaaattctaattcgttaataatccatgaacatagactcaaattcggatgtgaatagatggatcatgtttatagaatctctttcaagtaaatttaatcttattttagttggatcacgttcaagcatccactagcttgtctaaaattgttacgaaataattaatgtgtattcatttattctatagagtaagtggacgaaaaaaagggaaaacgtgtatggttttacagtaactacttacgaattgcacttttcaaataattagctttttaaagaaagctttgtagcttgatccgcattggcattcgtgttttacgtgtagatgtgaattcaagacccaaaagtaagcgatgaatgcgcctattactacatgctttaaaaagtttttaacaaataaatattttaatctccactaattcagtcacttttcttctccaattcctgctagaaagttatactatcatctttctataaaaagacgtcttctctatttcttacccccaacaaactttggataagctattttccattctctgcacgttttcatggcgactcaagattctcaagggattaaactctttggcaaaactattgcatttaacactcgaacaataaaaaatgaagaagagaaacacccgccggagcaagaagccacaatagccgttagatcatcatcatcatcggatctgacggccgagaagcgtccggataagatcatagcatgtccaagatgcaagagcatggagacaaagttctgttacttcaacaactacaacgttaatcagcctcgacacttttgtaaaggctgccaccgttactggaccgccggtggtgcactccggaacgttcccgtcggcgccggtcgtcggaagtccaaaccacctggtcgtgtcgtggttggtatgcttggagatggaaatggtgttcgccaagtcgagcttataaatggcttgctcgttgaggagtggcagcatgccgcagccgcagctcacggtagtttccggcatgattttcccatgaagcggctccggtgttactccgacggtcaatcgtgctgattataattatttactctctttttaaaaaaataatttgttttggttttggggttgagtggttttcctctaaacccgttgaagaacgtggtgaatttggttgctattgggtacatacaggctggcaaagtagttaatttgtcatttgtcaatcaatcgaatccaattactactttaatttactactctctatacaagaggattctttttaaacaatttaattaatattatcaacctagaattcgtatgcattagtatagtggcgtgtgagataaaa

SEQ ID NO: 37196 - DNA, 1221 bp, Arabidopsis thaliana landsberg
cccaacgagggggagtgaagtttaaactgaaaccgacccccttaccttaaccgagtagtaactcggaataaatgggtacaagaacagttctttttttatacaccgtaacagtcaatatatatacatcttttaatggttaaagacctaattaatactccgtaaaagacaccaaaaatgtagaaaagacaaaaggcaatggtaaaacaacacgttttgctcgttcacctatacgtggtaagaagtctccaagtgacgtggcagcttctatgaacagagacgaaatattgtccaaattcatttcttacagtaacaaacgtacgcatatttaagatctagtgcagaggttgtctttcccagcctgtcaacagacatctttataattaattattgagaaaagagaaaaacagaggaaaaaaagatggagagaagcttgaagaagacgaagaacaattataacaactccataaagagcaatcttatgaaagatgatgaattgtttcatgtgattcacaaagttccctgtggagacactccttatgtcagagccaaacatgctcaggtccagattctttatccattcttgatatgagtttttctttctttgttgttgtttatgagtcaacaaaattttgaaaggttactcattctttcatatgatactaatgaaattactgatggtagaagatattattgttcaagatagaaatatctttgttgtgggtgaatattggtgtaatttggatagaatgttattgcatttcttgcctgaaaaggttagatagtttacctaaaaaaacaagctataataattttaggtgatctggtaaaaaagggtatatatatgcactcaggtttatttgcatatgttttaaacatatatcatgattaatacggcatctaaaataaatgtcatgccacttttaatttacatgatttaaaagaaaaaaacatgcgcggaattaatatccacttatttactaattttccacttcgttaattttaaaaatatcctttcaaaacttagttacctagcaaattaaccaagaaaattatataaccaaatagttctgtatataattctttgaaagaaataaaaatgtgtattttaactattttccggttaaaaaaggtaacacttgcaaaaaattgaccgattggaaaacgaaagttactttcttaaattttatttgcaataacgtgtcacactttattctatatctt

SEQ ID NO: 37197 - DNA, 3315 bp, Arabidopsis thaliana landsberg
tcacaaatggcatataaaaaattctgagtagaagacagtgccatttacatgagaaaaagagaagtttcactaagttatgtaaattcttactaaagtttatattcgactagaaccatagtaatttcaattacactcatggtttataccggacaagagcctaactatgcataacaatacactattgttcttattcgatatatgggattcatatgcattaggaagctctagagaaataacgaatccatacaaagacttattcaatccctaaccaaaccctaattctgatagagaatcaatggatctgcaatactaaaacatataacgaattgaaacgaagaaatgatctatttcggctaaatcaagcgaatacgaagcaaatgaaagagacagaaatagagagagagtacatacatgtcctcttgcgagcggcgggataagcacatgccgagcaacgactcttctggatgtgaaagctccggcgaccacatctcacacagagcgtgtgtgacttgttcctcctcttaccaaagctacctgttcctttaccctgtcatttccaaagcaccggttacacataagtcacacatgagcttacatggaaaaaaaatgccaatagattaccattgccgcagatgcaggggatgatcaaagtttgctctacagaaatctttgcggctccgagaagacgactgtgtagcgtcctttagggtttttcctacccaaaatggatcttcatcggttaccgccaaaaatatgggcttcttaatgggctttatgggcctggttctgatattacctcgagtcaactggcatatatataatatgagtagtgagtggtggtggcaatgataagtaggggaccaattttgaacactgcttatcaatgtgatgacgattgcttacctataaaagtggacaacacaatcaacaagatgacaccttcttaaagtctgacattatcagcttccttcttcaactactacatgccactaaatcaatgttagggtttctttttgagatccctagtgacataaatatggttatcttctcaaaagagatgagcagcaagaaagatgatgaaacctacatcaaaatcaattcagagagttggtcgtttcttgaagaagactcttgggagcatcaagtcaactatctgctctagtgattacaaaaacttacctaacgacactcctctcttgagcccttactcctgcagccgccgctgtccagaagattcccaaacccaaaccaaagaaagctacaccgttatctgttgtgacacggctgtggcagatacaacacaccagaagagtctcaacaaccaacataaaaagaaaccgaagaaagtcgctgagccattcgaggatgcaaagaaaagaggtgacgcgttggcacaaaagatgaaagatctcaacatggtggatctgagagacgtggatcacgcattggatgtaagggaagcgcttcgatgctattcaagcatcagaagtcctgtgtaccttgacattgttgacaatttcttcacagacatgtattacgagttctctgatcctcgtacctctgctaagatcaatggttcaagaagaaaggcaggctctttcaggctctaagttattctggatcatcttcgctttcaggggctgtatgtagctatttcatctatagagtatgcacttcttaaaaacagttgttctgctttggtaaaatcacctgtcaccctcagtttctacctcatcttgtagagtcaagttacgctcatctcgactatcaatgcaacatattttccacttcaagttatgacaacttacagtttataatactatatctgaagatagagatgtgcagcctactactcggttcttgacaaaatgattttagggtagataccacttttccttttcatgaaaaaatggagcaatcaaacatatgtatggagaagcgaagttactcttctcgaattatgataaaaagttacatcaacacaggattatctgtttttcacttgataaatttgcattttaaaacacacttcatggataaaacggatcatttcttgccactcttcttaagtccagaacctccaaaggatcccttctgcgatgccttggctctaagctctttaagggcctgttttatcattttcattcaaaacaaagcaggtcaggctttcggtaacaaatgatcactgtacttctcatgcgaaagaaaggctaatgagtctttcacacaattgggtggaaaaaaagtaaactaaacatcctaatatggacaaatggtcactatttcatcaaagttagaagaaactagtccatatcatctcaaaaggatctgtaatgaatacccctaaactaacaaataattaatagaaatgacccatctagttgtagtcaccagatataaagtcataattagtgtcagtttgattagtagaccaaactgacaaagtggaacgtactaatgcataaccttaacaaaacccatgtatctaaaacagaagctctcttgtgaagatacaatctttgattagtattttatagctttccattaaaaaaggagcccaaacatataagtttaactagatgcaattttccaatcacaaaacttcgtatgaacaaaaagagaaaacaagtcagagcatcaaagtgggaactcaccttttcctcatctttcttcttctgaatgttagctaagtcagtctgcattgataccaaatcaacatttcagcaattagagaatgtctaagagtcattaatacacaaatagtatgcaaacaaaatcaagtgaagaagtcaagactgtgcccttaaaaacactggatcaaaattcgaacttgcgtataaatcattgaatccgagcaaaattaatgatttatgagtcactgaatgttaacaaattttaagaattcaagttagttggacaatcaaaaccagatccagagcaaaagcatcgtttgattcgaggtctaaagctaacaatataagccgatttagctgaaggcaaatcaacagaaaatccaactcgtaaaagaaaaaagaaacagtagagtcacctcgtcgtattccttcttatcagctttaggctgcttcaaaggtttcgcctttcctcctgtttaaaaccaaaataagatgagcagatcgtaaacgatgtctctaatcactttattcggtgaacgaatcaccaactcaaatctctgtataacagcaacgtaccttgcttggaagacatgattggttcgttgagctagggttcgatgttgagctcaaaattggggaaaaagtagctgagagttgcagacggtatcgaatctctctgatt

SEQ ID NO: 37198 - DNA, 2695 bp, Arabidopsis thaliana landsberg
  unsure (1)..(2695): unsure at all n locations
ccctcataaccctaaccctaattttccctctctccttcgcattcctttcccattctctcttcacacaaccaatcttagctcagatcgatacatacccacaagccgatcaatctcaactccaacatgaatggaccgtcctcctcgttttccaattctgctacatcatcttcctcttcgccttctctcttctctccacagccgccgttgtcttcaccgtcgcttctctttacaccggaaagcctgtttctttctcctccacaatgtcagcgatacctctcgtcctcaaaagattgttcataacattcctctgggtctctcttttgatgcttgcgtacaacaccgtgttcttgatcttcttggtcacgttaatcgtagctgttgatttacagaacgtggttttagctgtgctttcgttggtagtgatctttgttctgtttcttgtagttcatgtttatatgacagctttgtggcatttagctagtgtagtctctgttcttgaaccgatttacggtttggctgcgatgaagaagagttatgagttgcttaaagggaagactcttatggcttgttcgatggttttcatctatcttgttcattgtggattcattgctggagtttttggagcagtggtggttcgtggtggtgatgattacggaattttcgctagaatcgtcgctggtggattcttggttggtgttcttgtgatagtgaatctaattggactgcttgtgcagagtgtgttttactatgtttgcaagagttttcatcatcaggagattgataaatccgctttgcacgatcatctcggtgggtatctcggtgaatatgtgcctcttaagagcaacattcaaatggagaactttgaagtttgactgcatcatcaaacagagtaaatcaggttttttgcagtttgaaaatgtctttgtatgtttgtaatatttgtaatcttttcacgaagtgaatttttgttttttacttgcatatccaatgtagcgagggaagagacttgtttttacagagtttctgttacttgttagagacttcttgttcttgcattcaggttatacaatgatatgagagaatattttgacaaaagaaaatgggctatataatggttcaagagtctggttgtgttctgtttcattgagctaattagtttcaagatgaatactctgcttcattctacattatacttgggagatatatgactttgatcttgtaggtatgagttgtgaattacttccatgaatgctcattattaatgtattaccatgtacaagcaatgactcaaagagtggcaacaacaaattcctcaaaagaacttgacttggggactgtgagcaaaatatcacaccactcaactttcccatacgtaggaagccaacgagactgaggcggaaaactatgacttgtaccgacaccattagattccttgttgtgcgactcttacatagactaaaacgggaagtgaaccatcttgaactagggctggggattcgagttggtccacggctcagagtaaaccaacgtggcttagagttaccatggaacattaaacagagataaggacaactctcggtgcttcctaatagtctccgggtacggggtatcgtaaagatccgtggaggcgaggagagagcagaatatcttggaagctaaggagagagttgggtagtacaacctcgagaggcgggctaaacagttcatccgtatatgttaatttaccatatttttgtttttcgtagtttttctattgaatggactcaaattaatatcgtgtgaaacttttgaaaatactgaaaaggcccttttagtgcaataattcaaattgaatatgaccttgaattgttttaaaatcatttttcttctcttgattgaacctaattgaactacaaaactatggtcaaaatatatgaatggtattgagtctattgagttttgtcctactcatataatttggcagttcatgaaaagaaatggatcttaagtggaatatgcgtcacctgtcataattataggttgaatgatgaatgtttagttttatttgtcaactatttttttttcgaggataatgtttgttttttgtcttttccagtccgataatgcttaaactaacattctcaactatcaaaacattccaacgtataccgaaatgaaagctgacgtgataaatccgatcaagaacacagctacttaacgtggctactgccagagaccgacggttattaaattaagttttcttatatacataaaagttgttcaatttaaattaatgcggtgaattcgcacgtttaaaatttcacagaaaaaatgttttttataactataaatgcttaatctcatgcacgttctcttttcaggagatatgtaactaactaatgtattccatgatgaatgtttgggaaaattaattacagtggatacttgttataaaacttgtatgagtcaatggccttaatatttgataagtatacttaaaactttatttggacattaaaccgccactaattttccatagcacatatagtcaacttaacacattataggttagtgttgcttgggtataaattagtaatttagtacaccaaacaatttataaccatntattcaatcagtgtaggcaaagaaatcttgaatagcgcttctattcttatgaatatatngacaacgtggtgttttgtcaacccaataaatt

SEQ ID NO: 37199 - DNA, 3428 bp, Arabidopsis thaliana landsberg
taagaattgttataatgtttttttttttttttgccttttgcgtttttataatgttattgtgaaattatattggaattttgtgtggtaagaagtggtgtcaggataaatgattctttactggttttgaatctgacaagtgaatgaaggaagatgcagaagcaaacaattctgtaatttatacacaaaaaaaatctatttaccctcccacctgtatccaaatctgtaattgataattattttcctattcttttcacttccaatattttacccttaacgtgtcacataggtcacattactattatacagtattacatattactcttgttgaatatttaatgaagagactgatcaacaaacatattattattgttatgaagtaatttagaagaaacacatgggttagtacttaatatcatagaagtctgcgtgtttgaattggatttattatttgaccatctaattggtcaacatgtttgaaatattacattattcgagtacctttaatgttgtcctattttagtcataaaatatgcaactctcttcatgaattggttacaataaaataagtttgtatttgcatggcttgttaaaatcatgattttatcaaacgaaacttattagctactcatatttatacatacatggaggctcttggttggtgcactaaattaaggttatgaaatgtactaatgttgagcccttcgatcttatttgtgtgtgattagcttgttgaaacactagatatatgaggacaaaacaaaaaagcaaaaaagtccaaaggaaaaatacaagtgttggacgatgaaaggggagaagaggacacgagatatgaaagcaaaatgtgaatgaggtaatctgacacatatatgaaacccataaatttacgtacgtataaagtaaccgatatacgtttaatggggttagagataagatcctttcttctcattttctggaccaccctatataatatgacttacgtgtattgatgtattgtcattgatgtatgatttgatatgttaacaaatttccaatttatataattcaactttgcatgaacaaacccgtgttctttataaataaaacaaaactaaagctcgtgttggttcactttttgagtggcattgtggcaacatccaaacctaccggtcaacaacatataacgagtggaaaaatcggatacaagttcgtgtgatactagtgtggttcgtttcaaccccaaatggccaaatcaatcaatgtaaacatattaagacatagaagaaaataattaatgagatttcacaatgtagatattttctctattccactttcaaaactcaaaaacaagagatatgaccattctttatctaaaaactaatatggttgggaggttctctttgaaaattttggaggctaaattaaatataataatttgatgatttaattaagcatataaaaatttgaaactatatggttagggtgcatatatatatatatatatatttctttctttttgggcaaccggatgcataaatttctaaaatgttactagatcatagagaaaactatgaaagatgaagcaagagctaaggtaagcaaaattaataaaactatcataagtcagcatggaaattagatcaccatgattgatttgaatgacgatatgcttcaccagcaccatgattgtttattttctagctatttggtgtgatctaatattatgagttacttttccaataaaaaaaagaattagggtaatggaatagtaaaatattacgatatactaacgttttgaagagatctaaagtgcaccctagaaaataaaaatgtaactaggacacaaaagaagtccatgagtgaggctgccaaccaagcaaaaaggacaagttattttggcgaccaccgacctcccttctatagaacgcaacatgccttttcgattcttgaatacgtaagatgatttttttatataaatgtactttctaaaatgaattaaggagtaatgtatcaccatatcaaagtttcgggtgagtttagggtagagccgcagccgctaatcgtaggttccaaagtactccattgttgataatggctttgaatggttatagcggttcgagcggacaaaaccgtctatacaccggattgctttttatttaccatttacaaactatagtcgtaatggtacggatccaaaaaaataaaacaaaaccaatgcaaactaactgcgaactaactgcgaattgtctttaaactaagttctcattggtttgttctccgccccaaaattagtatggactgaaccgctaacggattagtctgcactaaccacaacatccattcaaagacttaattatttactatcatgtcatatgtgtggggcattaataagtgaaacatattaatagcaattaaaatgaatgatatgagccatgatcttaggactaaacattgggcatgctaaattgctaataatatctatcacaagaagaagcgcgacacacaggaatagatgcgatcatgaaagatcattatgatgattcagcgtttttcttctttaggttctaaagctcaatgattgaaggcctctgcaaaattttgtttggtctttggagatagaaaggagcttagatagagatatcaaatcagcatccaacaacattttagagtcattcaattctgactttagtatctctttccaataaaccgaaaatgtgggtgagaataaagaaaagtgaaatgttttgggtcatattcatcataaaatgcaaatagcggggccaaaagtatgaagatgggaaaaaaccacaaggactgaaagtgaaagggcttaacaaaaagcaaaataatgggtcccacaacaccgggcctgtgccatttctttttcttctcatcccctttcaagaacaagaaagagatgacatgcaaggcagtttatgcagcatgaacaacaacatgaaccaaagaaacaaaatcaatctctaaaaccatatcaatgggactacaaggtcagctctccgacgtgtcatcagattcgatcccactgatgctactggctctcctcgcaactttcttcagacacgtccggtctcttctcctcttcccttcttctgcccccgttgttgttgttacttcaaacctcagcgtcctcgccgaccagctcaacctaaatcgcctcttctcgtaccgctactccgacaacgcagcctctgactgcatcgtgtgtctgtctaaactcaagaccggagaagaagtgaggaagctagattgcagacacgtcttccataagcagtgtttggaaggctggcttcaacatctcaacttcaattgcccgctctgtagatctccattgctaccttatcatcatcagggacatggcagtgatgcgtcgatctcagccttcccttttcgctctacctctactgcatcatttcattgatttttatgtgaag

SEQ ID NO: 37200 - DNA, 1431 bp, Arabidopsis thaliana landsberg
tgcgtatgcacatacttgtcatccttcaatagtcttcttacttgtcatccttaattagtcttcttacttgtcatcctttagtagtcgattgcttgtgatccttcaatagtcgatcaactgtcatcctacacgaataaacaaagcataaagagtatttgtcatgtctcatatcattctcatccaaacaacttgatgaaataaagcatacaaataaacatgaacacgcactaaactcaaatcattctcattcaaacaacttgatgaaataaacatgttacacgggccaaactcaaatcattctcattcaaataacttgatgaaataaacatggctgaatataataaacatgactgaaagacgaaataaacttaccatgaacaaatacttagattaaactaaaatagaaatacatgaacaaggacttaaagtcgtctataatgttacaaaaaacacaaaagcaacaaagacatacaaaagtaacaaagacataatagaaacaacatagacataactgaaacacaaagacataaaacacaaagcatcaaagacaaagactgaaacgcaaagaattgagaagattgtcaagtaaaatacatgtttttgattagtttattctttagttctgtttccactttagtaagcgtgtagaatcttgcaactaaactgtctagcagtttcttgtcgctcaacgtttctttaaaagctaaatcttgttgctttattttcccacatactctccatcctttctagcctctttccttcttcttccacatttgctgaaactccagccatgctcctttgtctttacccttagcagccttcacacccggtggacgagcttaggaagcttcaactacatgtgtaatccttggaacagctacacgaggagcaccattaacctttcttcttttgctaagtaatgtctctttggttggaagagaggcgcattacttctgatcatgccttaactccctccaacaatgctccattgtaatcactctcgtaaatttcatgagctaacctcatcaaatcattctcattcattccactcgccatccgagatgtttcacctgcatgggatcccacaacatgtaaatttgttgatcttggaccacctttacttacaatgacttgctggtctattgttgagagtaccaacaaagggacttgctgcaatgtactacgcaatgtgtttcctgaatacatttgctcgttgctcattaccaataacaacatccttgctttttatttagccacacaaagattagtagaacatcgtctttagatgactacttggtccttgttcttggtgtgcgatttgtgtttgtggtttcaccatgcaatgctgcttcacatcatcatgtaccgaagacaggggcgtcagattcaccaagtcttgtatcagcaacattgatggaggtttcttgttga

SEQ ID NO: 37201 - DNA, 2342 bp, Arabidopsis thaliana landsberg
ccatcgtagaaatgtgtgcttcatttctctgctcggatttgaacagtcattttttatggtttataagattggattctgctggaatgttgaaggatttgtctggtggttattgtatgaaatggttaagtagtgagaataatttatatggcctgttttgagtttggtatatgattgaatgagactctccttttgtttgcatattatagtgaacatccgatatggctgaaatcaaggatgaaggaagcgccaagggctatgctttccctctcaggaaccctaatgttacgctgaatgagagaaactttgcagccttcactcacagatcagctgctgctcatccttggcatgacttggagattggtaagaatccttgtctttgttactttgaatagtcatgtgagtcaagtgttgattgtttgatgtaagtgttttgtttgttgaatctttcaggtccagaagctcctactgttttcaactgtgtaagttttatcttcttctacattgcggaagattagatcatattaagaaagttagtgctggtcttgtgattgttaaatgtgcttgaattctttgtcaggttgttgaaattagcaaaggtggaaaggttaagtacgagctagacaagaacagtggccttattaaggtacagtgttctttggcagtctctgcttgcatcatatatgctttgattgagtataacctgtcttctgatccctcaatatatagtctgattatgcggttatatgaggaattctttgttgctagatatatcataagtcaaaattaatgcattccaactaaatatccttcatcgtaagagtcgaaatgaagaaaaactctgatcactgaaagtattcctctctaggttgatcgcgttctctactcatccattgtgtacccccacaactacggtttcatccctcgaactatctgtgaagacagtcatccaatggatgtcctgatactgatgcaggtgctttctctcgcctcatcttagctttcatgttcatacaaacttgatgtaaacaggcagtgaaataacagacttgagataaaatactgtgcaggagcctgtgctaaccggatcattcctccgtgcccgtgctattggtctaatgcccatgattgatcaggtaacaaaaactcttaaacccaattctacctctatgtaatgtattaccttagtaagaaaccaggaatcaccttgttctgaaacttgcagggtgagaaagacgacaagatcattgcagtatgtgctgacgatcccgagttccgtcactacagagacatcaaagagcttccccctcaccgtctagctgaaatccgtcgcttctttgaggactgtatcctacagagacatgttgcatttaacgtataattttgttttcgcttatgatttgttttcagttttcacttaacaaacaatgtttttagacaagaagaacgagaacaagaaagtcgacgttgaagctttccttcccgctcaagctgccatagacgctatcaaggactccatgtaagtttgttttattccaaacaccaaattatttacacgttgttttgttaataatgagcaatgtactggtttgaaacgcagggatctttacgcagctttacatcaaagctggcctgcaacgctaatgaagaaaccagtccttttccgttcctcccggtttgcttagacatcactgaagccgccttctatactacatgcatgttagataaaatttcacttggtgcatttaatttcgtaatgctcatcagaaaacattgttgaacttaaagctttctgatgatgatgaaaaatttccagtacaatcataaaatttgaaatattagcttttcttttccccaaaattttgtttaatgttgtttcgcaaacatccgaaaagtactctcatacaaatcgaagaagatacaaaaaaaacttaagaagctactcgggccttcttcttcttggtctttttgtaagccttatgccaggtcttataagtgcccttagtcttcttagatgtcttggtctcaggatctgcaatttcgtctactgcatcatcttcatctttgtctcctcctatatcaaacagatcctgttcctcttcatcagaactcaacacaaaatcctccacaacgtcatcttctcctaagccttgctcatcctgcttcttctctgttttactctttccacctctcttccttttcttctttttcgtcttctcttcttccggctctttttctctgttaattacacatttgttgttttaggttatatcacaacggtcagataaaatatctacgttataggcgtaggagacaacccggttcccatcctatctatattctta

SEQ ID NO: 37202 - DNA, 1902 bp, Arabidopsis thaliana landsberg
  unsure (1)..(1902): unsure at all n locations
tgtcctgtgttaaataatttataacatctcattaatttgcaccactgacacaagtattttctggtcaggaaactgttgagtcaatatgttagacatcgtgcagctcttggggcgaaatttcatggagtgatgtgggcttcagttccagaactgcctgcccctcctttggcttgcaagcgacgggttcaaatattgatgaagaatgataaatttcggaaggcgatcatgagtctttgcaatctgctcagtgagcgttatgcaagacatctggagacgaaacagaagtgtttacccgagagcaacaagtcacatgttcttgttagatatttatccccggcaattggcggaacggattctggttctgttgagcaaggtaaagatatatgttttgatgaagaaaaatgggatgacttcaatgaaaagagtataagtcaagcctttaatgatgttcttgagctcaagaagatggctaaactggtggcccctaaacggacaaaaagttctcgggaatggtcaaacagagatataattgatgaggtgctccttattgcttacttttctttcgtttgacatcattcccacaatttcttcacttctctgtgatgtttcacttttattgctacaaccaattcatacataattttactggaaacattcacccctgatctggaagatcttaatttcagtggttcttttgcttttggcaatttatgataaactaaaaaatgaactcgcaggggagtgaaatggttccacctgcgatccactcagaggacattcaaaatgtgtctgtggatcaagttaaagatacatctcgacgatctggtcattatcgtcttcatcaaactgtcaggcctttagatgaaaaggacaacgatagtatacaagtacggaaatctctggcagtttctactgctgcagaactgttaaagcttgtctttctgagcatgcctactgcacctggtatgccaaatttgctggaagataccttacgacgttattcagagcgagacctcttcacagcctatagctacctccgagacaaaaaattcctggtaaagtttcttattactttcctgttactgggttaaaacttctggctacttccttttgttatatgcttatttgcttatcagttgtatgaagaggcataagagtgtccatgtgaaaatagcatagcatagcatgtttaactttaaaggatcatcttttcttcctttttttggttcgatgttgctgtcaaaaccacataatgtgcaggcttgatgtttggatgagatggtgaataagaaacaggtttctacatttcttcacgtcactttattaatttattttcaatcaagtttatttgcttgtatagataaacttaatgattgtatttgtcaattaaaactgaaaagtcattgaattatgggaacgttccaggttggtggaagtggtggacagccatttgtgctttctcaaaacttcttgcacagtatttcaaagtctccattcccagttaatactgggacaagagcagccaagttctccagttggcttttcgaacatgaaagagaccttatggctgggggtgtcactcttacttcggatttgcaatgtggtgatattttaaatttcttttcattggtttcttctggtgaactctctatatctgtatccttgcctgaagaaggtgttggagagcctggagatcgaagaggtttgaaacgtagagctgatgacatagaagaatctgaagctgagagttctaagaaattgaagctactaggcgaaggtgaaatcaacttccgaaaggagaagggtttccctggtatagcagtatctgtncgacggcaactataccaacagctaatgcatagagttgtttaaggatgatgactctcgcactggtgaatttca

SEQ ID NO: 37203 - DNA, 1456 bp, Arabidopsis thaliana landsberg
  unsure (1)..(1456): unsure at all n locations
aaaattagcaacacacatcattcatctacaataagaacaaaccttaacacacgagaagtacaccaattggcagactaaaagaagaggagaattgagttctttgtctcagtttttttttttttttttttttgtgtctcagccggaatgggtctgaagtagaagtacggacaagacaaagaaaccttgtctgtctctatacaaacattatacacaaattccaaaaaaaaaaagaagaagccttttcttgttatcttttttggtatatgcagatatagatttcctctcagatatatgtgattctcactggggtcttctactcaaataggctttttcttcttctcaaggtacgaagattatatatataaattcacatcacatgcttctatataataatagtcatatagattaagaattgctaaaaggtgatccagaggacctgcgtatgcgtacccttttctgaggtgatctattcaaaaggatcgacgaatttcacgcccttgtcttgtgattctgctacctgttagaggaagagagctctggctcgagagttgcagctctgagaatggaattgacccaccgctctgggagaaaatcaaaccnnnnnnnnnnnnnnnnnnnnnnnttgatgtaggcacaccggtcatgtaagcatcttttgcaccgcctgctatgagctctgtcgatgaagaagaaggggcagctgccagagcacccaagagagagctcactgggtaaggagccaccggtgcatcagctagagaggacgcagaaggattgtatctgatcgttcccattggatgatcaaacttacatgttgatccaaacttacagaagccgttttgtacgtagaaagtgcaccgttgcacgccctgttttcaacccaagataaacaacggatttagagacagaaatgttataactatgatcaacaacctttatgacatattaacacagagcataccgggcgtagaggaagaccaatggggctgaggacgcaattcgctcttggtggaacccgatctcgaggatgatgaaacttacaagatgttccaaacttacaatctcctgttttcaaatagtattggcactctggttcaccaggtctctctggaaaggcctgttctttctgtataacacctgtaggagaggacagagatggataaaccccgggaagcgaaggagtggtggaagtgagctgtgtaactccatataaagaagttgccccaacagcgtgctgcgcaccaggagatagagcagggctcacaggtgcctgaagcaaaagcaaaagtgagacagtaagagactggtgaataacaaatgtattgatgatacatcaataaaaaaaaaggtcaccgagtaaggactccagcctggaataggaacgaccccgggggttaatagcattggaccataggcgccttgcatataagaaccaggaagaagagttcatgcaact

SEQ ID NO: 37204 - DNA, 3454 bp, Arabidopsis thaliana landsberg
aatccgactgtaatatttacctgggttctggcgaacttggtattatcattaacctagctgtaagtgaccttggtgatacaggtgactgacattatgattcctaattgtgttgcagagacgcaacatcaattcaatgctagagaaagcgattggggatttacatcattcatgccacttagcgaactttatgatcctagtagaggatatttagtgaatgatactgttttggttgaagctgaagtcgctgtacgtaaggttcttgattactggtcatatgactctaaaaaagagactggttttgttggactcaagaaccaaggtgcaacatgctacatgaattctctcctacagacactataccacataccttacttcagaaaggtaagatatattcttgttttttccttcagtttgttaaattccatgggttctcattgaatccttgaccggacaactgaattttgcatgttgcttgtaggctgtataccacatgccagcaactgagaatgatgcacccacagcaagtattccgttggctctccaaagtttgttcttacaagctccaatacaatgacactagtgttgcaacaaaagagctgacaaagtcgtttggttgggatacatatgattccttcatgcagcatgatgtgcaagaactcaatcgggttctctgcgaaaagcttgaggacaaaatgaaggtaatttttcttttgttgtcaggccatgatttactactcagttggtgtttcttgtttttgagctcttttttcttcgtttttctgtagggaactgttgtggagggaacaatacaacaactttttgagggccaccatatgaattacattgagtgcataaatgtagattttaaatctacacggaaagaatcattttacggtgtgttatgtgaaacaggaacccatcttctgttgtctgaatgtattggaagctaacatattaataatatcaaactaactttacagctgtgtctttgacttattccagacctccagatcgatgttaaaggactgaaagatgtatctgctttttttgacaagtatgttgaagttgaacgccttgaaggagacaacaaataccatgcagaaggacatgatttgcaggtcggctgttttctttctttctcatattggttcctggagatgttgagcattatcaatgtccctatatgggtagttgggtacccagcaagtctatatagtctactctttttctgcttatcatttggtgttggggttcatagtgcgtgtgatgctaccaagcaagctaaattaggaaactgtaaatagtatatttcaaagcaggaacagctgataaagttgcatttgactaatttatattgttactctgaacttatcttatattggaatactttttttattattttcaggatgcaaaaaaaggtgttctattcatagactttccaccagttcttcaacttcagctcaagaggtttgaatacgattttatgagggacacaatggtgaaggttggtatttgaagtcacatgtacataggaagtgaatatgtggtatgcgtttggtggtgccttgatttgtgagtgctgatgtagcttttattgatagataaatgatcggtatgagtttccgcttgaactggatcttgatagagaagatggaaagtatctgtcgcctgatgctgacaggagtgtccgcaacctttatactcttcacaggtatataaattttctctttcgattcatatttagtgaattcctcaggagcttgcattcaaagattagtttccctttattatgtggtatgccgtctggcgatttagtatttattcgattgtctgctagttcttctcaaggaatctgcttcatgtaccttaaatattacacctgtacatgcacagtaaattggtattttatgagtggaagccatgaaaatgttatcatttcatttggtgtctgtaatattcccagcttgacatactagttgttatttgtctgcagtgttttagttcatagtggaggagtacatggtgggcactattatgcttttataaggcctacgctctcagatcagtggtatgcatctttctattatcaatataacattcatggttttttatgctcaaataatttttacatttcgggagctacggagtatttgaattcgatattaatttagcaatcttacgctgatgttattcacaaggtcacacgtttttgcaatttgtccaaatcatgttttgtgcattttttctcattaactcgttcaaacttctccttttcaggtataaatttgatgatgaacgagtaaccaaggaagatttgaaaagggctttggaggagcaatatggtggtgaagaagaggttttattttcttgctccattttccatgatttgaaccccaatcctaattcctctagcctgacatatttgctttcgtgtcttttcagctaccacagactaatcctggtttcaataataaccctcctttcaaattcacaaagtactcgaatgcttacatgcttgtatatatccgagaaagtgacaaagataaaataatctgcaacgttgatgagaaagacatagcagaacatttaagggtaaaatattttcgggcattttcttagtagtttatttgcgtcttggttttacctgatcgttcattacattttgacaggtgaggctaaagaaagagcaagaagaaaaggaagataaaagaagatacaaggcacaagctcacttatataccataattaaggtttgcttatcctatttaattgggcctgataatatcttttgaactgttccagagtgttattttgatactgtcgttactaacataatctttgttaacatgaaaggttgcaagagatgaagaccttaaggaacaaattgggaaggatatatattttgatcttgtggatcatgacaaagttcgcagtttccgtatccagaaacagacaccatttcaacagtttaaggtacttgcctgcgtatctttgatttattttttccaaaaaggaaataaattagtgtatgtgaaaacggtctttctggtaacaattgatctggatttcatgagaaaccttcaaaattctgctgactaaaaaagttctttatgtacaatttaagcaatcgttgaccttcaattttatgctgatataggaggaggtagcaaaagaatttggtgtacctgttcagttacagaggttctggatttgggcaaagagacaaaaccatacctatcgtcccaatcgcccccttacgcctcaagaggaattacaaccggtaacttaatccttttgaatgctattcatgcacatatatagaagtaatttaatccttttgcctctttcttctggatatgcgagtttatatagaagcaatactaaaactattatagaatctgataatctgctacctttttatttgttatactagaatctctacatctgattattc

SEQ ID NO: 37205 - DNA, 2114 bp, Arabidopsis thaliana landsberg
tgggatgatgggattgaagaactctgaaagagaggttcatgcttcgacacacaaatctcgtcaagttttgtgacttcgtctagaaacgaagattaccttataatctagctttttattctaattttttttgcattcatggttataaatggaagggatttgatgaaattagatgggattggagatggagaaggatggaggcacctgaagagagaagaacaattgttaaaactataagaaattaaagaataaaaagataaaagagtatcatgaagagtgaagaagaaacaatggtcataaaactatatttgcgattatttatgcaactttatatattttttattttttttaatcttttaatttattttatattactattgtaatgagattttacttataacaaaaaaaaatatttttactattcgacttcttgttacaacttaaccattttcattatgaccaaaaacacactttcacaaaaactttgaacaattttcatttctttttgttacaaacccctccaaaaccaatcttaaaacagttttcatttacataaaccttgagattaaatcacattaaaaatcccaaatcatatgggtttaaacttaaacagaatcttataaaaattcgaaagcccaatatgttttgttttcccaacaataaaaatagattggaacagaaaggttgtgggaggcacacattacacaccaaagcagtgttttctttctcctgaaaagatttttcaagctctctctttctctcaaaggtaaatgcttctctgatttcgccatttttgcttactcgattcaaaagacatgtcgccggcagctacggagacggagcgatggtgcgttgtaactggtggtagaggattcgctgcaagacatcttgtagaaatgctcgtacgctaccaaatgttccacgttcgtatcgccgatttagctcctgcgatagtgcttgatcctcacgaggaaactggaattctcggtgaagcaattagatccggtagagttcaatacgtctccgctgatcttcggaacaaaactcaagttgtcaaaggtatttttgcttcgaattcaatttagttcagtgattcgtcgaattcgtttttgtatctgaagatatagtgaaacaggttttcaaggagcagaagtggtgtttcatatggcagctccagattcatcgattaacaatcaccagcttcagtactcagttaatgttcaaggtttgaagaaacttcaatttttgcacatttcgtttctgtcaaactgatgaattcagttagttcttgtgtttatgggatttttaatgtacagggacacaaaatgtgattgatgcttgtgttgatgttggagtaaagaggcttatttacactagctctcctagtgttgtgtttgatggtgttcatggtattttgaacggtactgaatcaatggcttacccaattaaggtattaattacgcttttggtgtgaactttgaatttgatgttttgtctttctattgttgtacagaactatggctttgagatgattctttgcttgttttggagtttggttactaatattttcttcattctattcagcacaatgactcatattcagcaactaaagctgaaggagaagagttgatcatgaaggctaatggtagaaatggactactcacttgttgcatacgtccaagcagtatttttggtcccggtgatagattattggttccgtcgcttgttgctgctgctagggctgggaaatctaaggttggattgttttctttgtttaccgttttgctcctctatgtgctgtctgccttcctttttaccttttttacctttcctcttctctcttctcttgatacttttgttactctcacgaaggtagctgccctttattgacattattatctaaacgtgtttgaaagtcatgaccatgctgtgcatttggtagatagttctgtactatgaagtttttctcagaagttatgattaactctttggaaacacacagattgattcacagggaatggagaatttttttttaccattaaagccataactgtgaaatcgtttggtgacagtagagcggagagacaacaatttatgtttgttttacgcaaaatata

SEQ ID NO: 37206 - DNA, 2751 bp, Arabidopsis thaliana landsberg
ctcggcgatatagatgtcaatatcgttttcaaattcggtatgtcttccactgaaacgatcactgagaacgatctccagttcaatacatcgctgaatggaggaacgtagccggagttgatcagaactgggacacaacccgagtaaagtgcctccacgatcctcgggctcgcaacctcataaccgctaggacaaatgcagaacttgctgttccgcatcatgtcagaataagacgttcctctagggagatacttgtggactctaatgtcattatctttgttctcccaatgctggagcaagactggccttaccggtccgtgtacaccccctgcaaagaaggcgaggatgggacggctggaaggtgacggtccaccgaccaatccagttaaggatcccgtccttagattgatctccggtatcgacacatcttttcttggtttgaatctctctgacgtgttggcattgcacaaagctctaatcgaattatgtcctagatgtggatgagagaagcttgcctcaggaccctataccaaaaaatttcaagattatagcgataactagctaaccagaagatataagccaaatatattgttatagcgtacccaatcgtgacaagaaagtatgaaatgatcggctccgatgctgcggttccaatatgggtatttatcacccacaagattgatgtaatccttgactgtatttcggatggggctgaaatcgcgggaatttcgttcatacacgtatcttaccatcttgacgacactaaatggtagataaaaaacatgagccttgtcgggattattggtccgaaaacgtgtatcggtttctatctcatagatgaaacttccttccatagagtagatgcttttgcatggaccgtcatggaacaacggtggctcgccttctttgtatacatatatcttgaattgtttctccatctccaagtaactcctaaacatttcaatacataaacaaaacattgtaaccacatcatggtcgtgttagcaaatcgtcaaaagaaaatctgtttcactctctactctagaccacatgaaaacatttttgtgcacatgctcgaatgtcttgtctaagataatatgggtttcacgatcaatcaacaagttacgctatcattggttaccttacttttgtaaaccatgtaagatgggccaataataatattctttgattttagaaatttagccctccaaaaaaataaggtatgagattccttgctctgcttacgctacgcatataagatgggacaccacaaatctattgcatttactaatttaatggaaacaaactactactagtatttagcaagaaattaaatataaaaacctactaaaaacgtaactcaaacttaattgaaacttcctggccaggtttccccatcatattattaaaaagtaaatccatgtccaagccataattatgattcacactgccaacctggatgactgcaatttaattcaaataaaattcatagtttccaacctgtttgacttcaatttaattcaaatacatttttgacgaaccaataaattcacagttccaaaccgtgtaacttaaatttaattcagatacattcttagcgaatccaaattgcagtaacttcagaataataaatatagaaagtaaacataattattcatttcacttaccgatgaaagaccttagcgttccaatacataggaccaagaggaacatagtccgggtcgtccacgggatcatccatcgaagcggctttaatggaggctcgagctttttgtagcttgaattctatcttctctaaattgctaagaactcttcttttctttggttccaatgatgccgtagaagagacgttattactcgttgcagtaacgttgatcatattcagttgaattgtgcgattataatcaccctgttcaatcattgttattctctagactattgtacataaatgaaattaaagaatggttccatatcagtaaataaatcactttaaaagaaatcaaaactatatgaacattagttggttgattaattagttcaaatttatatcacccgaccctacatatataaaaaaactgtaatctttgctttcttattttgcggtttttatgcgactgcttctctcgtccttaataaaaacgaattaaaattcacatttgactagttgacaaaatattttttacagttgactgtagtttgaccacggaatttaaaacataaatgttatgatatctgttggtaaaacattaacataagtatttgttagtaacaaataagaacagaaaagaaataaataaaatagccggaaaagaaaaaagacatgcaaagatgaagaatgaagaaaggaataattttggtattcctaagtaatttctctaacctgaatagattccactttagtcgataaagatgatgctggcaacgagggaagtatctccggtagcagaggagatggcgccggtgccggagccgtagacagaaacggaggaggaagatgagaagtagtagtggacagagaggttaataaagaagttgaatctttaggaccaatatttacaaagacgaaaccagaaatgacaacaagaggaaccatgaatagaaagagtttagttgaatacgacgtcgttgaggaacatgcagacatgtttctacacttcccatcaacatcttcatctcccatgatctctctctctattaattctctttctctgagaagaaaattataaagaaagaagaggaagaagacgaagaatc

SEQ ID NO: 37207 - DNA, 1724 bp, Arabidopsis thaliana landsberg
  unsure (1)..(1724): unsure at all n locations
ttctccacaataaattgataggtgccacaccttcctgacatctttttataaatccgtatcatcatttagagaaacttacatctaatcttagatagttggaatagatcgaagtaactctgaaagaccttgaagtagttcccaacaggcgaaacatagataatgaaagtatatttctggtgcaggcgcaagaccaagaacagctcctgttcccattagcaatggtctaacatataaggaacctttacctggtggtggaacctaaaaacaagacaccaaacacaagttaaattcataacagcaaacaaatatctagataatttcctctgcatatcgggagacaaaaaaaactgcgtgattcattacccaacgtttgtttgctagtacagtttcggtcacagcttctacaaactgctcaacggttggagcaggcatacacatcctctcagcaccatttctcatacgctttgcattctcctcaagacgaaagaggaggatgttattaccatctttctttgtgtaagcttttagcccttcagacaatccctagaagaacatacactaataagactcaggggagcctaaattgcactctatacaacaacacattgcttggcatttctcatcatcacttacaatatagaagatttctccgtgcaatatatgaatatacattcagtaaataaatcctcactagatgcaactaacataacaactaggagactagacttattgacaaactcaggctgtgatacattgtccagaatttgacaaatttctccatactttcaaaccctcctaactcccttaaagattcttgattagcataaattaagtttctttcatagaattcattacagtaaaggacaggactttgagaagctagaaaacaaaatcgacggcagattacatttttcggtgccaagaatctaaccaacttctccacactttcagatccttacctagaaccccaaaaggcttttccttttatcgaacttgttaaggacatgactttgagaagctaggatacaaaatcagataatagattgcgtttcagtgtcaagaatctgacattcaaatcctaaaccttaacgccacaaaaagcttcttttaaccataatctaagcttggtctagacttttgatcatactcaatacagtaaaggacatgactttgaagaaaactaagaaaacaaacctgtccatagttgagtacaccagcagatgggctaatttcaatattcccaaaacgttgcaactcaccttttgagaactctccatcaatgttacatttcatcacatacatatannnnnnnnnnnnnnnnncaaatccaacggtatcccaatctatgtcggctaattcaggtaccaacgtactaattcaacataaacaatacatatatataagtaagaacctgagaacttggacaaatacccaccaaaaacaaagaacgaacctggaagaattggacgaaacagcgttgcatcgagtaagagagattccaccattagaagaaacagaggaagaagaatgctgaagctgtgaaagataatcggagaaatgggtcagataaatcagaagatgataagagagggagatgagaaaagagttgaccttgatggaggcaaatgacggcgcccataagttacgagtagaggagtggaggcgcgtggagaaggcgcgtgaaggacaaagtaggtaattttgattaacactggggataattg

SEQ ID NO: 37208 - DNA, 1226 bp, Arabidopsis thaliana landsberg
  unsure (1)..(1226): unsure at all n locations
aacaagagctgacttatgtttcttccaaggacaagttcgaataaagctgtcggtaattcatagtgttgagtcttgggcttctgggtatggatagctataggcatcttctttatagctgaagtatagaacatcattcataagagatactcgttacattttgcaaatttctataatgtgacaaactataaaatgttctaattttacaaatgtttataatttttcatttgaattagtcttataggcttagagaccggagatccaatgatccaatgtaaattttttaaaattatacaaatatattaaaagaagaagaaattttgttttcgtggatctctcaacaacaatatctaaactactttttgtttcacatttcatttttactcaaaaactcaaacatcaacaaaaattaatattgtgcggcgctaaagccgtcatgttagntgtttgcggacgaagccccacaagcgaagtaagtgtaacaacttgcaacacacacaccagatgtttaaaaatcgtcataataatcactcaataacaccaaagcaaaattaataaaatctgctagttctctataatagctttgtaaactataatctcaaataaataaataaaatctatatgttgaaaaggagcaactatatatgtttcagtgtcacttacagtcaacaaaacggaggagatcggagagttgcatctccgccgtgggtttgtaaacggaacggagacgactggccaaaagcagacgtatgagccgcctaatgacaagatccggcaacagattcttctccaacaacgtcaaacccgccttcactgatgcaccataagctacgtcaataatcttctccatcactgatgcgccttccttttttttttttgtctgttgagtgttttttccctaaggtacgatcttaataagtgtaacgttaaacatataaagagagagaggcgtaaatttgataacgagaaggccaaactgggggctttatttcttaatgcaacgttcaggccactaaggattgttaaggacctgtataatcttattcttttgtgagggacgtgcatgtgacctggttttaaagattcgaaaggcgtacgatatatgggtacgaaggatgatggttttaagtatgatttatacgaccacatatcccgtttagcaataggctgttatcaaaacagaaaaagatctttttagtgtgtgctcataatcggattccccatttggt

SEQ ID NO: 37209 - DNA, 2676 bp, Arabidopsis thaliana landsberg
tgatatgctcagtgcacaccagataggctcggcagattatgactacgacagcgcgctaccgatgatgacaccggtatagacgaaactgcggccgagcacggtgagtggacgacggacgatgccgcgatcagcacctctcattagtgtctagagaatatctcatcggcagagatctgttcatctactgtggccacggtgcactggattctaaagccttacctcagatttctcgaatttcagaagtccgagcaagtaaaagcccacatctacaaaactagtttgagctggttggtgtaacggacgagattcccaatctcatcatcatcatctctatcgctacccaaaacctgttacttcttcgtaacggctctaagtctcttctctcgttctctccacacacagaaatatctcgatctaggtttctaaaattggattctctatctcaaacgctaatcgaagagttttctctgaatcgttttcttaaatctaatctcgcgaagtttcagtgacagattcaatcaaacttcaaaatcatcatcagttctggaaaatttacgagaaatctcccgtttcaggcaagttttctctcaatttgttgcttcgcaatgtcaaaatcaatcatataggctttcaatcaattgcttcgaatttagcttctaattttgagaatgacatagttagggtttcgttttccctgttacaggcttaagcatttcgaaatggcaagtgttcaaaaagatccgattcttcaagtagagacaacttgtggatctcttttattcgaactccaggttattggcagattaagagtctttctatatatgatactgtttctatttttgtgtgtgaagtgtttagagatcttgtttggtttgttttgtgcaaaattagattatttgggatgaagttggagaaacagaaactgatagagatcaaatgttgcttgagcttgaacgtgaatgtttggaagtttatagaagaaaagttgatcaagctaatcgatgtagagctcatcttatacaagcaatagctgatgctgaagcacaattagctgcaatttgttctgctatgggagagcgtcctgtgcatattagacaggtaattcttcattatgagtaatttgatatggacttatggttatgcaattttcgagcttaagatatttatttgtatgtgttagtctgatcaaagcgttgggagcttgaagcaagagcttgggaggattcttcctgaactggaagagatgcaaaagaggaaagttgaaagaagaaaccagttcattgttgtcatggagcaaatagatagtattactaatgatattaaaggtcaaggagaacttgttcattccgaacctcttatcgatgagactaacttgtctatgagaaagcttgaagagttacactgccagctgcaagtacttcagaaggagaaggtgaaatttgatttgtacttgaatattttgcttctttgtttttgtttggttattccgaccattatattgtatttactccttttgtggtgttgtttctctcagattgatcgtgtggagacgattcggaagcacctgtgtactctgtattcccattgttcagtacttggaatggattttaatgaggtcgttggccaagtgaatcccacattgagtgatccagaaggaccaagaagtttaagtgatcatacaattgagaaattgggggctgcagttcagaagctgatggaggtcaagatacagagaatgcagagggtaagtgatatattactctgacgagttatgtagaattttctttgctgttgttactcattgttgcttattgaatttgatgcagcttcaagatctagcaacaaccatgttggagctctggaatttgatggatacacccatagaagagcagcaagagtatcagcatattacctgcaatatagctgcatcagaacatgaaataactgaagccaatagtctctctgaagacttcattaaatacgtaagctgtggcgatttttcatgtttacactgttctatacatgaccatgcttataacttatggttcataacatgacaggttgaggcagaagttgtccgattggacgaggtaaaagcaagcaaaatgaaagaacttgtgttgaagaaaggtcagaactagaggagatatgtaggaaaacccacttgttgccagtgtcagacagtgctatagatcagactatcgtggcgatagaatctggtattgtggatgctacaatggtcctggagcatcttgagcaacatatatctaagatcaaagaggaagcactaagccgaaaagagatacttgaaagggttgagaaatggttatctgcctgcgatgaataaagttggcttgaagaatacaacagggttagagtcagaatcacaaaatctttttaaatttaaataagcttgttacatattctgagatttttcactcttcaggatgataaccgatacaatgctgggcgtggatctcattttactctcaagcgcgctgaaaaagctcgttatcttgttaccaagcttccaggtaagttgctctttgtatcaataaattatgtgtttatgatgctctgaatagagaattataaaggtagtattcttttcatgtttattcatgcaaggatggttgaagcattggcctttaaaacaatagtttgggaacaaaaaac

SEQ ID NO: 37210 - DNA, 1961 bp, Arabidopsis thaliana landsberg
tgaggaaaatataaaagtacaggaaatagccacttaacctagcaatttcaagggcgaacttcactgcgtgtgctggcattagaggtcctttcctgtctagatattgtcgaagatctccctagaaataaacacttaataattagaagcatagattttatgcagtgaaatatgaaacacagcagtttgcagaggttaagatctaaacatcttaaacaacaattaaatatcaaagccattcttcatgtcatatctaactaactgtcgaggtaaacaaaggactagctcaaaacgttgtcagtttattttgtaagcttcttaagatctactcaaccaagtattaccagaatgtttataggattccaactgctagtgttcatgatggatcttgaatctaagatgataatttgtaaacctggagaggtcatacatcctctgaatgtggttattcagattgagaaagattaggacctttggtaaatactcggtgacaatcatcatgggggtactctgagtaactgcccctagaaactggacaacattcggatggcgtatcttttgaagcagtgcaagttcgtccctaaatgcattcctggataccagaaggatatgaaaacctatagagcatgattaatacaataatacaaagaaatcaatggatgtagactcacactttgtcttcatcagtgaacatttcctctccaaaggttttaacagccacgtcaattccacgccatgaagccttgttaaaggtaccctgtaaagcagacagacagtaattacaactgtgaacagcaaataaaagcaagtgaaaacagcaacaaataaatttgggcaagggaactacttacctttgaaattttgacagagttggaaaaatcaagctctgtaggatgaatctcgtactctggaacttctttatcagttagaacatgcataggagcaatctaaaatcagaaacgattattaaagaaatcaatccaaacattcagaaactaaaacatccatcaatgcaactatgagggataaacacataccgtaggcttagcaccatgtttctccaaaagtttaatcacatcatgatttttgtaatacactgcatctgcaagaggctggtaagatcaatcacaaattgttaaccatcactgttattgcaaccgagtttgctaaatctaagtgctccagtaaaacatatgatttgtgcggcaattcgtcgaacacaaaacgaactaaagagtctacgagaagtcaagtcaggcaaagcaaacaaaattcagcccagagaaagttcgaattcataccgtactaccccatcggtccttcgtatcaaccttagcaccacggctaagcagcagctcaacgacatcggttcgtccttgacaagcggcgacgtgaagagcagtacgggcatcgatgtcacggtaatcaacattagtacccgaatcaagcatcttattgatgccatcgatatcaccttcgttggctaaatacattaaacgaatcgtcggatccccgatcccagctgtagccgccgcagccaagtcgtcgtcctcatcttccgttaacgtatcaatcggggttcttgattccggcgcaagcgaagactgcctacctagcttgaatctcgccggcgatttaggcttaatcgtcatgttcaacagaggacttggtgagaattttctgccgcaagcaatatgagctgtaaatggaactgtaacggcagcaacagaaaagaaaaagaaaagtagaaaaaaaagtcccaaccaatcagcaggctttaagggtttgcctcttaatgcgggtgaagtatcatactcgttttcctcctccctactcatcataatctacagtacttcatttttttttgtaattactactcctttttttattaaaaggcaaaaagcattttttctctcttttttgttggacataactttctccttttttaacaatttactacaaca

SEQ ID NO: 37211 - DNA, 2491 bp, Arabidopsis thaliana landsberg
  unsure (1)..(2491): unsure at all n locations
aaaaaataaaaataaaataatagaagtttcagtacgttcagggtgcaaaaacattttcgaaaaagaggctataacggggatgatgaatccgaccatgatggtgttgcaaaaatttatgtatgatgtagttattgtccagggatcaaaacaccatcatggtcagatccgtcatcccacttatgttttcttaggtcaacaagtatggacaattgaaaagtgaagctctatttattacggtatgtttatgtatcccttggaagtatattctaaattaaactccctttatttgaattttatgttgatattagcagtttgagattaaccgcctcgataacaaacatcttgaatccgttgaggttgatcacgatgatgccacatccggtttcattcaaggacttctattcagaacaaacttcatgatttctgaactaattggatatgataaatggtaacaagtattcacttgcattcaagggacaaaaaatcattgggatatatgattatgacaaacacgattggaagctgaatggttgcgggaggcaagcagtgggataatgatctgcaagtggaaacttcttacttttatcatatcccatcagctcgaaagtcttgatattagttttgaattgaagtgcttgaattacaccagatttgttgtgctcgtgtatcccagtaaattcgactaatgaccaactttttttgaggtacgtttttttttggtggattaaagaggttcaagaaaagtctttgtcctttgttctccatttgcttgtcaaacgcacgttcttgagcctttcggcctgcaatatttacactattctcttttaaatgattttcactatcccattatgatattgtgcaaaatatttgtcgaaaactcgatacttgatacaatggtaagaggtgatcaactctcgtttaaagatcaccaggcacgacattactctgcacacaaacggtatgactttaaaatatattaggctatagagagcataacaattcgaaacataaataaaacataaaacataaatatattagtcacatgaaacttgtttcatgtgactaattgacaatatttgtttcttttatttttctaatgcagattgagattgaccatcttaacaatgagcatcttgaatctgttgagggttattacgacgatgcatctggtaacattcaagcacttcaatttaaaaccaatttcaaggtttccgaactgattggatatggcaagggtaccaaattttcactttcagtcaagggaaagattatcattgggtttcatggatatataaaaagccagaacaatccactagtaaaatctcttggagcatatttcacatggattcctgcttgtagattagaagcaaaaggcagcaagggaggcatacaatgggatgatggagcagaccatgaaggtataacaaagattcatgtaagaggtggttttgaaggcattcaatacatcaagttcgattatgtcaagagtggacagcctaaaattggctcagtccacggtctctcgggtagaggtttctcgcaggcggtatgtattggaatttcccgtgttctcattattggcatgatttctaacctctcttttttccaccattttctttttcttatttgttttcagtttgagattgaccatctcaacaatgaacatttggtatctgaagagggttactatgacgacgagtctagagccattcaagcacttcaattcaaaactaacataaagacttctgagctgctaggatatgaaaagggtaagaagttttcncnnncagacaagggaaggaaaatcattgggtttcatggatatgctgagaagaacctcatttctcttggagcataaatcacaacagtttctgttactaaatcggtatgtcacgctagtaagataatcaagtcttgggatgatggtgtttttgacaaaaaangacaggtgtatgttagatattcaatcaatcatgtagcgtgtatcacgtttggctgggttagtaatcattcagttgcgacgcgccagcacgggaataacacatcattagtagaagaggtcagattccttgatagctnatacttggagattatatacttattgttcttgacttgtatctaaaataagaagtttaattctactacagtttgagttagagtatcccaatgaatttatcacatctgtggatggtactttcaaaaactctggtatgaggaaagtgacgtccattacgtctttggttttcaaaacatcaaaagggagaatttctccgacatatggaagcgtgactgggactaaattcgttttggagaccaaaggttgtgctctagctgggttccatggatggacttttcttggttttcttacttctattggtgcatatttttctccgctgccttgtcctcctaatgcggagcaactaccagcacgaggttatgatcgaggagcaatttggaatgatggtgttagaaagatatatgtaggacaaat

SEQ ID NO: 37212 - DNA, 3176 bp, Arabidopsis thaliana landsberg
aacatcaacatttctgaaacagttcaagtaataatattattacattatagtttgaaataatataaatttatggttgaaacttgatgcaagatacagacaagtttaagatgaagataacaataataattcagcataaatcaaaaagataaaaaaaaaaggaagcaagaaaaacagagtaaaacgaataggttttgacaataattgccagatatttgtattttgtcgttgttcatattatatctgtaaaaactgttcttgaaacacatccatggctgtagcgggaagtccaagaagcacattgatgcttctcctctgttctccatgagacaaaaacagagttacttctttctcaggcaaagctactggaccggataaaatcggttctccccaaccgaaatctgtcgtgtggaaacccaatcttgaccatgtagtgatcagaagagtcgaggaaagagaaggtcttgctctcgtgacttcgaagtaatcaatagcagatctcatgtacccatcagttaccatcttaatggcttctctgactaatcccaccgcgaaactcaacggtttttcgataagctccccagcttcacagatggagtttgtgagaacaattccatttccgaagtacccttttggcagttgaggctcgaacttggctctaccatcaacggcgaagagaagcttcgttttctgatcactcaacatcttcaacgacttggttcttgctctccagacaaaagcagataaagcctcaaaacttgtgcatgagttaccgaggagagactcactgttctctgttgcttggagcttaagtttcttgattttctctggatcaaagcagaaggatctgtagagagttggctctttggtgtaaagagagttgatgttggatttatcttcgatctcttcaaattcttggtggagattctcgatctttggagggtttcgagcattgagaatggttctgtctgagaatgggggagttgttaatggtaagcctctagcgacttgaccccatgagttaacaaactccatagctccaattccatcgaacatacagtgattcatacagagtccgagaacaaaccctccacatttgaatttagtcacctgttaattcaaatcaatttcaaacccttcaacttcaaaaaacttacaaccctaagaaacaaaacgattgcttgaggaggaagaaaagtagacctgagcggtaacaggagggatctcaagaatgttcttggcgtctacaacatcgtacacaagcttccctagagtttcaggatcgggtttggtaatgtcaccaatctcatccattttacagtttgcttctgcttccacaaacacaactccttcttcggtacagtcaactgtgagtttacctgaattcacccacatcatagacattagatgatgtttttgtctgagtttgattaagatagagaccgaaatcgaactagtcagttaccttcaggactgatggtgaggcgtccagcgagaggatagtaatgaacaagaacttgactcagagctttcttgatcacattgtaggattcttggttggttcttgactccgatgtgtagtaatataatgttttcacgatgatggcgatgttttgatcgagattcgagagatagtaatgaccattcggagtttcggacacgggagggatgagttcagggtttttccttgtgacgatgaactcagatgaggcgaccatttcaatggttttcaatgaaagtaatcgaaaaacgtatggaatggctcgaataaagaaagcgagaaaacagagagtagaccttgatatatagggttttaagtcctaagggggtctagtagagattagggttagcggtatcttgagtagcaagtgtatagctggagagataaggtagataaagcttaaggcccactcgagtttttgcacagaatttatgggaaaagtgaaagagccaagaatataacgtgaaatataggttctttagggaggttaagtggagaatagggtttaggtatttaacaagggaagattatgtagctacagagataaggaggtgatcgaaaacataataaggaccactaaagaactggctacttcaatactttaagaccggtatggacggctgattgaataaatacatatatttatggggtaattggttggttgatcgataagagtgatatctaaccatatttgatgttacggcctacgggtccattacatggatttgtcaaagttggatgttttctatatgtaagagaaattttaatattaggttcaaaaatcattttttgatcattcctctaataatttgatcacatattcggacgtcggagtatgaagtttcaattggtaatatattatatgtgtgagatttgcacttgcagggtagagtataaagaaagactcgggatctgtaaatgacatcaggtgattcacttggaaatcaaagctagaaacaatgaaggtgaaacacgggtaagcatagctggaaacaatgacatcaggtgatctcacttataagtatgaattacaattttagtagaacttttttttgggtcaaaatagtttctttatttttagatgatctcataatataaatcagtggtttcatccaattttgtttgttgtcattgtttactttccatgcaggataaactgtcttctctgtttactttctatcattgtgtctcttttaagtggaattgtaaactagtatagagagaccccaaaaaagaagcaagctcaaaaatccttacaaagacatctacaaaaatgaactcaaatccaaaaagtatccagtcgtacaattagtatatattaagaaaagttggaaacttaacagctacacaaataggaagacgctaaacttacaaacggttcaagataatgttgatcggtgtaaaaaaaacatgtggttcaagacaaatgtttgaatgatgaccataagattaattatgaatcataaattaataattattaaaacaatttaaaaaactttggcattctaaactaataaatatcttgtaaatcaagtaacacaataatcatctgataaaatataaaatttaaacatgattaataaattaaaaacacaattaaagtactaaaataaaaataaaaattcatggtgaaaagcttattatcgtgcatttagttcatcaccaaaaatgcggcggt

SEQ ID NO: 37213 - DNA, 2376 bp, Arabidopsis thaliana landsberg
gttgaagttagcatttctttattcgacgttggtgatttctgtgctttgattttcttccgtaggttctgagacatctgttgtacctaatgcgcatttcagagaagtctatccaaagacgagttgctcttgcccttgctcatctctgttcacccgaggatcaacgaaccatattcatagatgacaacggcatgtgacagtttttttatattttcatgagctaaatgagatgcatgcgttatgtttaatgcgttaaccgtccagtttagatgttctttgtccaaaaagttaatattgagttgtcttttgacagggttggagttgctactcggtcttcttggttctttaaacactaagcagcaacttgacggtgcagcagcgttgtacaaattagcaaataaatctatggcactttctccagttgatgctgcttctccttctccaacacagagggtgagtttcctttctgcttcagttctcctataggtaacgggtggaagtctcaatgcagtattctgtatgtctttttgggacaggtttatctcggagagcaatatgtaaataatgctcgctgtcctaatgtaacctttctagtcgaaggtaatcatatataaatccagaagttgtggaactctagttagcttcaaagtccttatgtaaaacagaaaaatcatactgcaggaaggacattctatgcacacagaatttgtctgctggcatcctcagatgcatttcgtgcaatgtttgatggtggttacagagtaagtgaactaaatattttggtttttcgataatgttcttgtggggtaaatgatattttgatgacaatgacgtatggatgtatgctggtctgctctctatcaaaggaatacaattatcttttggggaaattagacctgaattgtgtcacggtttgtgtttcgtttatatcacaggaaaaagacgctagagatattgagattccaaatatcaaatgggaggtgtttgagttaatgatgaggtatgatgaatgaacctctgcatgcttttgattgactcactcgagatattgaaatttcgaaaagtctgtgagaacttttcatatacacgtaattgactcccttggattatgattttcaggtttatatacactggatctgtcgacatagcaaatgagatatcaagagatgttctaagagcagcggatcagtatttcttggagggcatgaagcgactctgtgaatacacaattgctcaggtgagccagaattatatcacaatgtaaagtgatgatgtggtttgcgtagtacttaacgaaatctgacacggttactttgaatatgaaaggatattacgttggaaagtataggagacatgtacgagctatcagaagcattccatgcgatgtcgctgaggcaagcttgtatcatgttcatcctggagcatttcgataaactgagttcaatgccttggtaatataaacaagatgtcactctctctctccactaagatttgttttattgctattagtctgaaacaaaagtgaatggaaaatgcaggcagaacgagctggtgcagagaacaataccagagataagagagtacttttgtagagccctaacaaagtctactacaaacctgcaaagcttgaggttgtagaatgcggaagaagaagactgcacttaactagaggtaagtagacaaggaattatatagagagaaagagagagagagatcaagagccgccattagaggtctttatcgtcctgtactgggttgtcttagttatttgctgtgctttttggttcgttttggtcattttgtattgtattaattaatctcctctgatcacaatcggtcttgaatgaaatcgctaccctttgtatccaaaaataccattgtggtataacttccactattcaattcaaaatccactctccaactatcctctctgttgagaaaagatactttgggtagagttgtgactaagcgtagctgtaacgatttgatattggtagtggtgaccagcgagttcatgtctgaataattaagagatgattcaacacagaacataatatcccatttttattttacaaataaagaatcaatcgaaagtattactgatgattagagactgtaacttgtaagtattttgtagcacaagccactgaaaattacattacacataaaggagttttctttaacatgaaagattcaaaattaccaggttggttctaattaattacgttttcttccaaagtgattaattactcaagtcacgatgaattattaacctttctctttttttttttttttaaattagtctatagagacttttggttcaacgaacgtaggagggagttttaaagagctccggtgaaggagaaaccctaaaaacac

SEQ ID NO: 37214 - DNA, 3297 bp, Arabidopsis thaliana landsberg
aaacaacaagtgtccttcagtggctctcatgttccaaatttgcgattttgctccttatcacaatgtaaggtggggattagggtagattatatcgttcaactaaacatctaatgtcaaccttctggtacacaagatgggtggttgtaaagaatggacaaactcatgtaccaacatggcttgctgaggcttcgaggttgatattatgcatttctccattggaaatgctattccaggacggctttacggtggtaatccaatagacaacggggaaggaaatggaggtgacaggtgatttgtagtacaatatcgtttgttctgtctctctcattcttcttctggtgttgtaccactatagtgaatctagtttagctccttatctgtttatctagtggcgtatctgtacctctgtttattttgttttattgaatgtctctgtgtttttttcatatgagcagatttggtcatctggttgacatttatgcatggaatccacattgtcggtaccttgatggtcgtggaccctcaggtactttcttatatcagagggctatatcataactcaaaaagcttttaatgactgaaaaattccctatgacgatgttaaagaataactaatttcaactaagaacagaaattacctttttatttgctttggttcatggaagcttagtaattgactatggctcttcaattatttaccaagtttgttaggttcttaaccctctaatgtgtttccccaagtataagtcgtccttaaactataaattgtgtgtattctaattggatgctagctactctagagtgatctctttctcgtgtgcaaattacaaatatgtgatcacatggatattctttttacaggaaatgattccagtgcacagaatgattggcatggagcgtggtggcacagcagcttcaccactctatcaggtcagccttacataccttcataatcagttccatgagttcccaatacagagatatataataatcatgcttttaactggaaaaaataagaggtgtaatttagtctcagtgtttataatcatatcgtagccataggcatctcctctagttacttagctttgaagtttttaacaggttatgtagaggaagacagcccttacacgccagatggcaagaaaggaacttactattttgagtttcaaggcccttgaggacaatggaccgtctccaacaggtcagtaatcatctactcgatcaatgacattcagtttccattggcccttccataaaatttagtataatctccaggcacttttacctctatgaaatcgtagttacttttaaaccaaatccacatgtgtcagacacttgtagttgtcgaaacaacaaatctatcaggtagaactgaaacctggtcaatatgagttatgtataaagaacatctttttcagaaactaaggtcctagattggtgatatctacaggatgttcagttcacgcttggctcgccggccaaaatgtcggtcgcattctggtacccagtggacagcaaaccatggcatggatcaggacactacacgatcaactgcgattggacaccgctagatatctcctcgggctcttcttcgggtgtcacggctgcaactgtcaagggctctagcgatgggaccagcattacagccattttgttgtccatgatatctcttgtgttttcgggttttattgcatataggctatttagtcccaggaacgttccattcacacccatggaaaacaatctgtaggagaaatatggttattagtccctttggtctaattgctgatttggttccacgttgagagaggttcttcttttttggcttataggtaaaaatgggttgatttgttgttggtttatgtggctgttgcaaccgtatcgatcgacttacagagattaattctagatcgcatagaaaattgaaagttggtcttaaaaaaacgttcagtgcagcatgataaggaaaacattgaggcatggtcatttaaagatgagataaatatcgagtattggccattgaggagactataataataagtaaagaaataaaaaaccaatagaaactcattaaatgaagaaatagagaaacatacagtatttgtttaaagcatttgacaatgaaactagaccgaagaacccaatttctccgtatacaaaacgttggtgcagtgatcatcggggacttgatctaaagtattattagctggatctcttccggtcgacctaaaataataagcagctagacagagcttccaaaagtttgcgtctaaacaattcgtgcttaagatattaactgaaaacatcttttcccacttcacactaggctcttcttgctgcaaactccatacgtccacactcggattttgtagcacatcagatacacataagctatcttttagactccataagtacacacttttgcagtatttggtgtaccaactcggtagtggcacataacgaaatgtttctgtgtgaagatcgatggctgccagctttattagttgattagtgtaaaaatcaacgtctggctttggcaaccaataaagcgatccatttgcaaagattgatcttttatcattgccaagttgaccgtaagaaatggggaaatatacgtatcttcgttcgccattttttaggtttaaggcttcggtcttgacaaaatgacgatcgaataaatacatcaagattactttgtatgttcctgtaaccatgtctcttccaaatcccacattaattggcaaatcattcgaccaacctaaagaaaaaaaaatagacattaaagtactataacaactagtcaacgtctatacttttttgtaacaatagacattaaattaatatagccctttataaaatttactttgcaatttatatttataatatttttattttttttgtgaaacaatttatttataatagatatattgtatattgtatataatcagcataaaaatttagaaataaaagtgtttcataccagtgcggcctgtatactctcgcaaaaactggggagaaagaatccggagttttctcgtggcggcgttaatcatataaacgtaaccgagatcgtagatgcagactattccgttgcaataccccattatttgatcactgtatcataagtagaatatttgggatatggaactggagatgtgtaagaatgaatatacgatgtttatgtggtcgtgatgatcttttgaataagtttccaacaacccggtccttgatcagcgttcactagccataaaacaataaaagatcaaggagttttggatccgggtgtcggccccggcg

SEQ ID NO: 37215 - DNA, 2959 bp, Arabidopsis thaliana landsberg
  unsure (1)..(2959): unsure at all n locations
gccaagcaaaccttaccttattccagaaagaaatgaacattggagaattttcatcgttatcggtctaaaagggagaagtcctaaacctgaactaatcccatcctgcaacacatatttatcatcagatatattgaattcaaactggatcatctgatagagatggggaagagagaaagagattgaaaaacctcaagaacaagcaatgattttggatctccacgccaacgctgaagaagttggacataagggccaagtcgcaaactccagcgagaagcacatacgatgcatggatcctgccaactcgttctgttcgcataacttaaaaaatcagtgcatgctgtaacatacttcttgatatagaatcacatcatcccaatattcaggttcgcagattccatgtgaggtatattactgatgtctctgaaccaagcaatgatttaaggtgaacagagatgatattttcatgacatgtgtttgcaaactatgcatttacgcaaaataatccatcactaatgataaaagagataaaacttataacctcttcttacattaagttgggtgaatgaatggcaggaaacaaatggatcttcttgtttttgatgaatttaagatggccaaacgatggttctcctgaaattaactgcaacatcaatcaatatacatacttttaattcacatttcaataccataaaataaaacttatcctatttgattcatttttctaataatattgtcattgataaccaaacaattggcagaagtataccttctcctgtcgttgttcgcacagccattcgggtatggtgtttgtgtatgccaatagctcttctgccacagaagatattacaaccattggaacctaaccagagccaaactagagttacttagactcacacagctaagaatcatttcaactaaaataaacttttttctgtgcttcatatcctcaagaaagtaaaactaaagaaaaagaagaaagagacatcaaacctttagagacgaggattcaagagaatttgacaatagctctaggagctgcagaactatcccaattctagtaatcgttatcaaggttgagccaccagcatcagcagattctgcagcacatgaacaaacaaacgctagtttctccatctcttctaagctgtcttcagtgtttagtaatgaatccttgttgtcactgctaaaaatgttaaacagtaaagaaagatcccccactttaagatctaaacaaacatcctcttataaatgtaaagaggggtcttatatgatagtacctgattgttgatatataattattatctgagtcaggagaaatacaaccatcctcagtcacttctgcagattggagggatgagaaatctgagtaaatcaaaacatcggtttctttgagaccatggaaatcaaaactttttgcatgatgtgaaacgaagatggagtctgacacataacttagacttccattaggtccgttgatcaaccaattacaagccccaatatctagacctgaacttagagccttaatgattaaggtcccattgtaacaaacttcttctgcaaactttacgccttgaaccttcttcatgcaactctctatatcatctaaactgtgggaaagattgcacaaaacttaaagaagctatcaacagtacttgaagatctagcaacatattgtttgagaagccaataatagttacctgtacagacgcatccaactgcccagatcatcaccactctcgccgaagacaacttttttaagcaaggctggtacttgctcactatctaaattctttatccacccaggaaaactggagttgtcaggtccatgacagcatctgaattccttgtgcatcgagacaatataatccaacatgagctgtccaatcttcgctgttacttcagtcatagatatctacatcgtagcaacaataacaactcagcacaatacacaccccaagaaaaaaaaaatcattcagaaaactcaaaactttaggtcctgaacacgtataccttggcaaaaaatccagggttttgagtaaggaatggcaatccgagcaatcccatagggttagagatgagaacaatatcaatgaaagaagcctcccacaaatgcaaggctttcacagttttgtaccacggttcttcacacaccaaatcagcacaagttagctgtctctccagtttttgcttcttttgaattggattctgagcatccaacgactcatcagatagatattcagaagcttcagaaccaacaccagatggaacaggagagaagattttgattgccgaaaggtccaaagggcagtcaattaaaatcctgaaaccacatagattcagcatatgacaaggcggatagtgaaagccatctcctttgctcagacatgtctgcaaaaaaacacaaaactttcatacttacccaacccgaggttttcaataactcacacgaaaagtattagactttcattaaccaagagaaactcaccaattccatggagacaaacaacagtataatctgtttaaaaaactgaataagcgaggtttaaattcagagcttttccaaacaacgcaacctaaaaaaacagccagaaatatgcgtatcatagaagaggttcagtataactccataaaatttccgtcttgttttttagagagagactaacagatgcggcaaggaaagtannnnnnnnnnnnnnnnnnnnnnnnnnnnnnnnnnnaggacgaagcggcggatttaattcgaaactggtttagattcgaaaatcgaatttctccggttcggtttggttggattagttaattttttcaaaaactaaattcgggttggttgctttgatacgatgttgctgagataatagaccggagaaagacgacgaagagatcagcgattttgtttactccaccaatggattcagctcgagaggtcagcgatggtagactcaccgtcgaaggtttctct

SEQ ID NO: 37216 - DNA, 1956 bp, Arabidopsis thaliana landsberg
tgacagatatgtatacaaattaaaaccatatagatagatagatatagggtaaagatactggaatacaaatgatcaattttcaagttcgaccaaaatctaaagaaggaaagtcaaaaggtgtccaattagagaagggcccccaaatgtttgggaaagacaacggataaaatgatgggcgcacgtgacattcgctacttttttacccaactttcacacgtgtcgattccctattgctcattttcccactttgtcatagattcatatgatgggcgcacgtgacacataaaatactttttaagacgcaatgtgtgggcacgtgtcgattccccattgcccattacccccacttcgtcacttccttatcgatgtcgaacaaaactttctttttcccaaataaattcgcaccatattcgggacctcttttttttttttttttttgggattttattatatagtttgtatgattttggttttctttttcttttactcgcattatgggtctaagattctggagtgcttgatttctcaagtaatatgcaggtttaatttctgcccaaagattttcagatatccgatagtccaaaatcgtttatattggtttactaagttttctttaaacattcgatattagtaaagagacgtgactaagattttggctatatcaatagaaaatgaaaaagaagttttgggcctataaacgctgactatacacacatgcttctattagagtggttcttattgtaaattggagtatcaaactatgtagattgtgtctgtcgaagctcgcaagggttagagaaatgattgtctcgtccagataaaagcattttcttacacaagacacgaaaatgtttgtgatcaaaacttcaaatgattaagcattttataatttaatttggataacagatacatttttccaggcaaaggtaacgattatgtttggaaaatctgaatcaagatgacatcatcgtgaacataattacattttaagacggagcagaacaacgagacaaactacgaatacattgaaaaaacagatgcagatcctgctgatttatgacaagaaattaactagtttttataatcacacatggaagtactatgactactacttctacatcatttttatagtaaaagtaggagatcaaattacatgagatggtaatggatcaaagcttaccaagttaacatgcatgaagtgatttatacgtgctattgagtatcagccatactcccgtttaaagtccagtaagctacctagcgttttatgcctcaattttgtgaaagttttatggcgtgatacttctacataatacgatgcaaaagagaattaacaatgtttgtgataaagtgtagctctagccatgaagaaaaactcatgaatggaagcaaagtaaagaagtcctgctaagtaatcgtttttttaggacaagagattcattaccatctcatgtcgccacccacactttgtaattgtagtggatcggatggtataacaactaagaatacgaacctatatataaaacgtatgttttcattagtgtattgttataaaacttatacatagatttgagtattcaattaccacacgaatatgtattgtttagttgcgaacaacgttgcacctttcgtggccacacaagactttccccgatcgcagcttcttctctgcttgacgccaaatactatcacgtatcttaacaaaccaacaaaaaaaaaactgcgggatgtagaaagaaacaacaaaaagttttgggtcgatttgctacagaattacatttattgtggtctttttgaagataaagttcttttagttcttgtggttggtagtcaatttatttcattttcggaaattaatatttattttagttttttcgtccaacggaaacgtatccactctttcgcttcttctttcttctgatcatcctcccgtagctgattcatggagtcaatcca

SEQ ID NO: 37217 - DNA, 1672 bp, Arabidopsis thaliana landsberg
tacaaggaaaaatgcttgagaataaatgggggaacctgagttttgagattgtcaacatagacaacgactgtttcttgggaacatgcttcgacaaatcttctaaatgatctttcttcgacatacctgcatccagtattcaccacgacatcttcaatagacttgtagcatttttggctcttgttaaacaaaagggggaaagaaaaacttacattttcacatctgtgaaataatcaccgaaagttgccacgaggtactcggtaacctgtccctcgcaccattctataaagtaaaatagctaggttatttacattaccataggaggaacaagtcaagaacacgtatcaagtaaaattagtgatctcactgagaattaagttggacagaagaccatatcttaattctgaaatgattatgttataaagaacacaactattacattatataacatgtagaaaatcaatgcatatgagaatagttttatctattaaaaatcaatggaaaccagtagcaacagtatcaaggaggtgacaacgactcgactgcctctattcacacattagtaaagctaatagattagttcttcagaatagtagatacctttctggtaaagcttgacaagtaattcctgaactcctggatcctcaaagataacgcgaactgtttgatgcactgcttcctgaaatcaaaggaccagatgggacttgtgtaaaatccaacataaattttaactttaaagatcgcaagatcaagttgaaatttcatttcaacagccatctgggcaactgtaaggccataaatcgagatgcaaaaactatatttggattgaagaccaaggagaaaaaggaatctttgacgaaccttagccaccttcaagaaacctttgcaagtgtcttcaaaattcacctgacagaaacaccccattagagaagcattttattagtatgcaaacaagagtgtatgtgcacatagacgtggagtatagtgggactgagagtgggcatgatgcagtggaatttgacatatacaaacaaaataatcaattgcaacgaaattgagctcagaaactggcagctggattacctgctctgcataattttgtggaagagcttctaaagtgctattacttaacttcatggcaaggtcgtaacagcgaaagctgctgtttatctgtagtcaatattaacatataaatattcgtctgaaaatgggagaaagaaatagtgtcatcaaaagagtcatatcttttgacataccatagcgcatagaggttccagaccaatatcagatgcaggttcatcaactctcttcttttcagctgcttggaaatcaatcataacctgaagtaattcacaatatgaatcaaaatttagaacatgcacaatgctacaaaagttacgaaatttaagaagtataaaagttagacacaatgaaagaggggggaaaatagaaaagagaaaaaagggggtaaacggaattcaacgattttgggtgagatatgaaaaaaaaagctgggaatgggtaaagtctccaacattaactttcacgagtcttagaagaaagcaaagaacgatttgaaatttctgagtatctatagtaaatagatagcctaagtaaggaaatggaatattttcagttcatagccgaacaaagaaatgtctttcaacctctttgc

SEQ ID NO: 37218 - DNA, 1527 bp, Arabidopsis thaliana landsberg
ctatattccaattgtatatctccgagtaaaatgctaaaagtagcttaaagtaccatgaaaatgaatgttaacacacccaaaaacaagtcttatgcggataagaaaggaacgatgttaaccagcaacaattatcatcgttaacttggtcgtatcatcaaaacatgatagtttcatatattttaccattgcgtggacagtggacactggacgctacgtgcaggactagccgagttgggatcaaaagacacatgaatttgatgggctagatgattgatgtgggaatcatttgcactatagtacaggcttattttaaactactaaagaattgggcttgatccatactaaataaacaacccaattcgtaaaatgtagggagaataaggtggtgacaagtgataacagatttgtgctgattcggtaaagttgcattcattgtgatctgccattcaaatctgtacgaataatatgacaacccaatgaaaaaacattggacgagaatttgttgacaactacatacattttgtaacgaattcatacaactagcaaaatgaagataaactaacattcagtcgaccaatcgaaaatgtcaaatgagagtattgatacaactagagctgcacctataactctatgactatgtttctgtcccccaccagcattggtgtggtgatgcttttccacaacttctttagtagaaaaaaaggacccataaaggaatgcttttggaaaaagacaaccccactttcattatgataacacaaaaacggaatacataaaaaatgatatagtcaagtaaaattacaaaatcagtgactacaaaatttgattcgtatagttaaaaaatcacaatctaatcaaagttatatattggacgctagataacatttagccacaaaaggttaatccacaaattataaattttagtataagtcatgagatgtacacacatggctctgaatgacgagttgctgacacaacataagaacaatgaaagggtccgtggattcgattcagaatcgagtcaaataatagtctcactcttatgtatttgcagcgacatgctttgcgtctaaattaatttaagaatcacttctttttcttcttctcatcattattttaaggaaatcattgactcatacgtttaagtaccaagatgaataatcataacttttataagaatgtggcacttaatctgctttaactaaaaaaagttacacttgaacttagccaaaaacaaagtaaaagtgaaaaccgacaaaaaaggatgatgaagaagttaaaaaaaagaggatacaaagagagataaaattggattaaaagagtaaatacaaaatcataaagcagttagtcgcgaagtaagggaagagatataagaatgagacgaatgcaaatctgcgtctcattcggtttcgttctctttcttctcagactctgcgtttctttctcggggaacataatatctgagaagaagattcgagagagagagatctgacggcttttcgctagtctcaatgggacgctcagcat

SEQ ID NO: 37219 - DNA, 3364 bp, Arabidopsis thaliana landsberg
ttatacttctttgttatttccaatttttctttctttcctctaaaaattttaggaactattgaatcatttagtttctgtttgtgtaaattaaaattaaaatttctgtttgttgttatcttttttagaatttcgatcgtattttagctccattgtttgtgaatcttcatttgttactttttttgttttctcttttctcacttgaattttggaatatttctctaggttttaccttaatttttgattagcttaaaatttgaaggataccttgtaaataaatattacactatagcttgtctagtctaatagtcttcactaatattgtgcagtagaagtaaatattataaagagttgttgtctattctttaacttgatgtgatgttgtttttgatgacaggtaaaaatgggaactaggttccaatcattcttgctcgtgttcttgctttcatgtttaatcctcatatcaactgcctcgtgtgagcgaaatggtgatggaactattagaattggattgaagaagaggaaactagaccggagcaacaggctagcttctcagctttttttgaaaaaccgagggtctcattggtctcccaaacactactttcgcctgaacgatgaaaatgcggatatggttccgctcaaaaactatttggatgctcaatactatggtgacattaccattggtactcctcctcagaagttcactgtgatctttgatactggtagctccaatctctggataccatctactaaatgttacctatcggtacgcgttagtttgttcttaatgcatattaattctgaaaatcctattgtattcttactcccaaaagaacaaaacaaaatatctatgtttaatgttttttcaggttgcttgttatttccactccaagtacaaggctagccagtcatcgtcatatagaaagaacggttagttctctctgttcatcttgttatttgatactcgagcttcggtactttgatgtttcttgataactattcaagaaagggatacatttagcgccggtcttttgatatgtttgttgataggttttgacaataaacctcattgtcattataggaaaacccgcgtctatccgctatgggacgggtgctatttctggttactttagcaatgatgatgttaaagttggtgatattgttgtcagggagcaggtaaaacgattcatccgcttacatatttcagagtattcatgtgagttaatatctaactgctacatctatatgaccacaggaattcatagaggctactagtgagcctggtataacattcttgctagcaaagattgatggtatcctcggtttgggtttcaaagagatttctgtaggaaactcaactccggtttggtatgaaaacgtttttgatctataatctgatgaaagaattgttgttgcaattctgaatgatgaaatttatatgatgtgtgtaggtataacatggtagaaaaaggtttaattaaggaaccgattttttcgttctggcttaaccgtaacccgaaagatccagaaggcggtgagattgttttctgtggagtcgacccgaagcacttcaaaggagagcatacttttgttcctgtgacacatacaggttactggcagtttgacatgggtgatctccaaattgctggcaaaccaaccggtaagtaagcttttaagatgtttcagtttcaacataaatgagtccttttacctatgatatgacatctgacttctatgtaattcaggatattgtgctaaaggttgttctgctattgctgattccggaacttctctgctcaccggtccatcggtgagaatcatttcactgaaacttttgtagattgtacactacttagcacctgaaacatgctgaatatttatatttgcttgtttagactgtcatcacgatgatcaatcacgcgataggagcacaaggaattgtaagccgtgaatgcaaggccgtggtggatcaatacggaaaaaccatgttgaattctcttctagctcaggtttaaatcactgatcatgacaccattcacatttttataagcaatacaatcttgaattttacatcacttgacttgcaggaggatccgaagaaagtatgctcacaaattggagtctgcgcttatgatggtacacagagtgtgaggtcagtactgacactatccagtcaaaacaaatatgtcaaacataaaactgattcatgtctgtctgcagtatggggatccagtcagttgtagacgatggaacatcgggtcttttaaaccaagcgatgtgcagtgcttgcgaaatggcagccgtgtggatggagagcgaattgactcagaatcaaacacaagaacgcatactcgcttatgctgctgaggtgagtttcgagagtgtcttgaaagccttattttggacataagcatgttaagactctaatctctgtaaaacatgtatagctatgtgaccatataccaacccaaaaccaacaatcagcagtggactgtgggagggtttcgtcgatgcctatagtcacattctcaattggtggcagaagctttgatctaactcctcaagatgtaactactctcatcagcttttccttaagtttcagcttacaaggagagtaattaaaaccttttccttcttcttcttttggtcgatcagtatatattcaagatcggggaaggagttgagtctcagtgcaccagcggtttcacggcaatggatattgctccgcctcgtggacctctctggtaactatcatctacaaatacaatctactaaccaacaaactcaaatgggttttgctcaaaattttgtacatcgtgtgaaaatgcaggatcttgggtgatatcttcatgggaccataccacacagtgttcgattatgggaaaggaagagttggattcgccaaagctgcttaaacaatatctcttctttaataccctcgttttttatatgatgtttgtgaatgtgtttgtaataacttaaaacatattgctatcctagaatggtatcatcttaatacagatttttatttggtttcagagctgtttgatttgctttaacttacagagtactaagtgatcataatgagtcccaaggcttgagttctctgtcacgatccatgtgtttcctaatcacttagcctttgccaaagctagtgtcattgacctcgctcgcagggttaggaaaattcccctgaaaaaacaaaagaagaagaatgtggagattacaaacaagtttcagttgagtaacaacaacaagaactagctgcagcaaatgattcattgtcttaccaaaagaatgcgaccaggctgtgcaagatgacccggaagtgcagtggcacatacttgtagttaatccatcccaccac

SEQ ID NO: 37220 - DNA, 2052 bp, Arabidopsis thaliana landsberg
  unsure (1)..(2052): unsure at all n locations
acttttcgttgtacttatgacgaagcgagccttggacatgggcgggttaaaacagggatctcatgatcttgaaaaggattcttcaagaagcacagaaaaagacaaattcgtatgaattattgactcatgtcaaagttatttcatataaacaaatcctatgaattattgacactagtcaaaactcaatgaacacattgattggccgtgaatgctacggtccatgaagggatcgagtgtggaccagtctctgcaatatgtttgttaggttgacttgttttcactagaatcgtatgtttttccaatacatcagtacgtttaacttcaaaccaccgtcaaatgaaagctaatttcaacttcttcttttttgtaatattttggggtcaacaattgaatttgttctatgccatggtgagagaaactctaaacgaatgagatatttatgatgttttaacgtagtctttcatcttcaattgctagttacgcctagaaacatatgtgactttaaactatcagataaacacttataaaacacacttttaaaagtcattaactcgactaaatacacaacctacaaaaaaaaaaagacaaactaaactccgataaaaacacaacacatataataatcaacccttaattacacaaaaataaaacagtattagaatgatcaaatttctaaatattttagtttttttttggatagaaactaaaaatttaaaatttagactataagccgataaagctgataagcccattaagtataatgagaccatagttttcaaatttggactagacaagcccatttacggttttggtgtaacaccaaaaaaaactctgttcaatttacaataatactcatatcacttcatcttcctcgtagaatcttcataattgttaattcatcctccattagaatccctagggttttcttccatacacaatcagactcaacgataagtaccaatcggagaagagatcacaagtggatgatgagttacgaaggcaacggagatggtgtcgctgtctccaccgaaaaccacaacgagaactacatatctctagagagctcgccttttcatgaagactccaagtctcgagtatgttacactttcttctttacatatcttgcgtacgattctgtagcttttaggcttatgtcgtgaattagattggtaatcataatttgttctccacttgtattgtaattttggtacaattctcggattctgcttgttgaatttatgtttttgatagtttgatttaaaggattcactggatttagagcatattttatcatgttaagttcatatgttctctttagaaatctggggatagtatatgagagaagccttttgacatttgtttcctgcaggaatctcatgatcttcggctggcacgcttgccaatggttgtgctggcctaagagacgccttggcatctgatagtgtgagatttcaaaggtaacccacacaaatattcttatcatctgcggatataaaatcgtggaagattcttgaattgttgctcattttctttattcaaattctccaggaaagccttaaacttgttgcaatatctactgcaagaggatgattcagaccgcagtattgccactggacttggattcccccgagtgatgatgcatcttgcctctagtgacgatgctgagatcagagaagccgctcttcgtggattacttgagctttcaagagagaaaaacgatggaagtagcagcatagataaaagcgatgagaaactgaggcagctactagaagaacggatcaaaggaatcaccttgatgtcacaagaggatcttgaaacggttaaagaagagagacagctcgtggatttactgtggagcatttgctacaatgaaccttcttctctgagagaaaaaggacttgtcgttcttcccggtgaagacgcattgcctcctgatgtcgctagcaagctctctgagcctcctcttagagcttctgcagcanaccgtaatgctactgagaagaaagatgaacctatgaaactacttggaccatagacgagaaatcaaagcta

SEQ ID NO: 37221 - DNA, 4270 bp, Arabidopsis thaliana landsberg
gagccattattatcgagtgttgtgataacaaagacatcaacacgagtagtagtggatgcaatcatacaaattttcatctaccacaatcagaatattcgataaattaatatttatatacttagaagcttatagttcatataaaaataataataatatagatcaaatggaagacacgattggtgatcacgggtcatgcgcatgtggaatttaaaagatattgttcatatgcacttaccagtcactagcttccacttctagtttcggtttgcccacattgtatgccatctactgataatgatctattttttagtataccatgtaagaactgaattagaagttttgcttagacaaatccgaggcaaagtcgttggatcaacatataattataccattttttaaaggcacacggatcagaggtgtatttaagttgggtattagagatctttagtgataacctttgagtctaacttaagtttcgttactttgctttcatttcaatagtaccagtccgaatgattctaacaaccaccttaatatattcattggttatttcaggtacctaattctggttaagagtagaccaactcggtttttcaaactaaattcatctactaacatcagtccacaaacgatccatgaacacataaaagaatgattcgcagccagaaaaaaaaggaggagattttctgttaagaaaaacagaaaaaaaatgcgtatatataataaaatcataagaatcaggtgtctgtatacatataattcacaaaccggaaatctttaggcttagcctgaacaaacgccattgatcgacatcctaaaggtgcatgtagcagtcgctgaagatttccggttcggtattggactgagaatctctgactatataaatctacaagatcctggaaaactgctataagtatcaatctgatttgctctcgaggctgtaaatgttgccaatggttccaacaatgctaaccactacggccaagattagcatcagccatgacactgatctttccacgaagcttaacgaattgctctgtttccctaaccgcaatgcgatcagagcagggaatgtaaaaccaagtgaaacagctgatgttgcgcctgtgaatttgaaagcagtccatatgtttggtatcatcgttgagccaatgtaaataagagccagcaagaccacagtgagtcccaaagatctctttttgctttcggatagaggaggcgagccttcaaacagtaaggtattgacggtttctctcaaggagaaatggatcacagggaagacgagaactagatgaagaatgtagccgattctgacaatgtaattcaccgcagagctgaaccggataccgagatcttgatcaaagttggtcaagatatctgattcggcgtcctcgccgaagaggagataacccgatacaacagataaagcgtagacaacaacacaaatggctgttgtgattctcccaactcggttcatcttatgaggtgatcttttcttcaagctcgttgtatatcggctgaacattgaagtgacaaacgtatgcgtttgacataatcggaatgaccacaagaaggtccaaaattgcttgtttggaaccaaagtcaggagacaaccttggagggtcgatagttccttcgataagcttgatggtggcgacaacaaaacagacaaccacaaagacaacagcaagagcaacagaagcagctgatgtaacgctcaaggaatcaatcttgttcaaagcacagagaggagccaagaagatgaccataacaatcaaaatcaaaactttacggtgatcccagaacccattccctaaccattgatccaaaaccccaatgtgatggagagaaccagacataacatcgcccataataatcaagtaaacaacgagaacgccaccattgttgacaatgatacaaatctcagacaaaaccctagcggttttccccaaagcgaattgaacaacctcgccgtaggatttggacttgtaaagaacagaaaatctaaccagaagctcaacactaatctcagacaaaagagccatgaggataatcaaaacaaaccctagaaccaagccgagaactttcatggtggcgggcaatgccatgatcccggcgccgataatagaagtggtgagattgaaaacagcaccgtaaatcccagatccttgattggatgatttgccatgaacgagtgggtaatcagcgacatcgaaatcgagatcatcagcatcttcacccccaacaccattacgggcatcgtcaaaatcattgacgaagctttcttcatcagaaagaagcaacttgtttctgggtttcccattaaccgtcggtttctgtaactcaacgtaagaagttttggaaatgacagagtaactgctatccattcgcaagatctgctctctaattttatttttaaaaaagacagaagaagataatctttgttgattatccgagatcgaataagtctaaagaagaggcttctatgaatctcggccaagagagagagagattgttctaatcggattaagggtcaacgtctcaattggtcgtccttgctgcctcgtcggcgaacgatgctcagagatttgataagttttgggaaacttctatcttgcgattggtgcttttacttcacatgtggcctctttattaattggttaatcgtctttttaaacttcaataaagtacctaattaattgcggattagcaattaaaagtgtcacattaacttatgttaggcgtttggtcatgtttcagaaagatatacatcgtacatgtacgcttgttttccaatagattctgaggaaaagagagactttataataacaaccaaagatgaaattattttggattgaatggatcattcattactcatactaaacaaggaatcccattcttattaaaatgttgcttgcaagttagaaataacagaaatccaggcactcaaaaagaaaacagaaacaattgacttgggaactatgcgatatgggtacaagaaaaatttgatcaccaaatgcaaacagaatctccgtcttctctacaggtactttcttgcaagtgcacgtactttggtgtcaaaatgtgacgacgttatccgagaaccaggaagatacaagggattcagaagaatctgcatgaacaaatcatttggtttccatcaacaaaatcaggacagaacaaacaactgcgaattcatttcatcaagaaaatttacctttatattaagctcatgcacctcttgaaagaagctcttgatgccgtcctcattccgtgaatcatgaaggagcatcagtcgggtatgtgttgataaattaaggaagaaacagatatttacaactgcataagaatctgttaagcacaaaagccaatataccagcctgacactttttacatcaaatttttatttgcacttaaatctcaaagggtctaacgaaaaaggatatggcctgcggtaacatatactgacacaaccagatcgttaaacctgtccactgacttcaagaacctgaagacttgtatgacaatgagatggatcctttaaaatgataatatattttcacaagagactttacttacatggcacttgtagtccatgctaggtcttggacaacatctaacgctgcatgtaatataaattggtgcaactgtgcagcatcttctctctgccaaatagagagaatggtgtaagagactgatgtgcaacttatcgactagaccacataccaattggttgaaacatatatctaccagctagatgaaaagatcaagacaaaaacaggaaaacttccgtcagtaagaaaggataaataactatgtgatagaccagaaaccaatgagtcatgcaataagcaatagaagatcttatagaactatattattagaattatctagtaagaacaaggcctgcttgcttggttatgtaaaacaggttgaaacgttcctcgaccaaaaataatttaaacaatggatatagcaacccttttcatatcactagccaaataaacaacggtgacaattaataaatgaactttgcacctctcccgtgggttaaatctagagagctatactatgaccatgaaactaagtcaaaaagaaagagctggagccagaacggagcaaaactgcaggaacatgtactataaacttcaatgactcagattcatacaaatagagaaagtggagaaagaaatgtactttagcagcagatccaacttcagcttcatagatgggaatatcattccggcccagaagatatagcagacaatgt

SEQ ID NO: 37222 - DNA, 2238 bp, Arabidopsis thaliana landsberg
caattttcaaaataacaaaagtaacgttattgtatttaagaagattgacggttcagtttctcatctagcgaaaccaaaacaaaaggccatcacaaaattgattctgttgactaagctaatgcgttctgtatataggttgtgtgtgttagtgcccgccccaaaaatatgatactttagtccgctcatgttttagttcgttttgaacccaacctccattcaaaaccctatgagttgttccaatgtaactcggaatagtggttaagcttagtctataatagtctacagactacaagaattggttacaataacattttcaagttactccgaatactgtattacgttaagaatgcgtcctaccaaaccttctggcgtagggtcttagttggatatatcacaagagatttatgggatttttctccacaatgcaagtcgcgagactcacaatcatttcaactacataatctccaaaaggaaaaaatccagataaatacacacaattacaacaaaagattatctccatatagagcattgcggttttgagctgtcagtaatcagcctaataaacaaaagagaacatagaatgcagctttgttagtgagtccaagtttcagtcatcttctttccatcaaagttatcctcagaagctccttgaagtttattggatatgagtcacctacaaaatttcaatatcgatttagcatgtttatttcataatataagcaactatcaaggatatatttacctgattttaaggttcctctgcctcctcattcttagttttcttgattctccagtgctgttccctattaacatttttcgtactctcccgttatgaattccatgagaaactcctctgaatcggagagagcgttcagggaacggttcttggctagcttgtactgcatagtcttgacaaagtaggcggcgtgtttctgatgattctttagtgtagtgatgaggaaacctcgtccgtatcaccattcgttgtaattctccattatgcatttcaagagaaactcttttgaaccgtttagtgcatcttggcagttcaagatgtatcgagctgtcttcaaaacgggcatgtttcttattcatcgcccgagttgataactctcggggacactttgattctacttccttcaccttctctgcataaagttccttggcgacacgagagaatctgaacttgaaagtactgcactctcccaaaaggaaaggttggtcacatctagacccatctcctctcttattctcataaccagggtagtttctcttctcgaacgcctcaagctgaatcaacacaagaaagcatctgctagcaagctcctctagattccaataacaaaaaggtgctttgtttttgtgagagacatgaacttctccatcagctcttagcatatggcttgcaccatggaagaatccaaacaccaatcccctatttttcctacagacaacatgtaaaaaatctttaaacaaattcctcaaagttgcagcagctggtctacacattcaactgcgagaagaaagtgtttgtaatttcaaaatgttgaacttactgtatttgacagggatcagactctttcctgtggaaaccggtgtgcgggaagttgaagatgacacgatcgaatcttctatagcgaagatcaggatgaaaatgcagtgtggtagcatcaactccatgtaaaaggaaagctccaagtctcttcaatgtttcaagatttgatcttgcattcttgtattttctaaccacatcatctggtttaattaccataaaagacatgcaacaactgaggaaatcgagcttaaagctgcaacctttgttaacaggtttataatctataaacagagagtaaaacagtgcaaatcttgaataatcaaatcattcaccggaagttcaaaaacttagtaagtgatcacagaaatggaagtgataacgaaatcaaaaccttaataactcttacaatgtaagtaaaccaagtgttaccgtatgaatcgagagaggaagcatagatattggaagcagagccgaagcaagtggctaagctgcaagagaaggagaaatctccttcgcctacgagaagtatctggtgcttggatgaatagtgtttgacccacacttctatatcaccgtctttgtctctgttaagctccgagagctccctcatcgccaatgtagtgaaaatgatgatagttaggaaagatgatcttattcgttttatttatatttcgacatatact

SEQ ID NO: 37223 - DNA, 2421 bp, Arabidopsis thaliana landsberg
aacttggctaaggcaggtggttgtggtgtcgtggcggcggaagttgccggagaagacccgttgcggcgaggaataccacattggaaagtgctatcgtgtgacgaggatctttggtgtataaagcggcttggagatgactatagtgatggtgttgttggtgattggactaaatcgccacctggcgtttccatttttgtagaccctagagaattttagttttataactcaaaatgacataattaatttatatttaaggaaaggaatattattcaactttctctatcagattttttttatttttcttatatccaaatttttccattattgtttgactacaagtttgtgattttatttcccaaattagtgaaattaccatcatcaacgagacaaatgaatgcaaaatttgctctgatttttattctcatttaaaattcgagatgagaaaggcttcaagccgaacacaaagcccattaaaacttggcccaattacaaaggtcaagcaccaaatgttttctaatttaggaaaatgaaaactaccagtaaaactcaaagatggtgttgaagaaacaaaataagaaagattcaatcaaaactctttctcatggtcccattcatcatcctcagtgtttagagtagtagtggtaagctcaggagtgctatatcctgttgatgaaccattggctctaatctgttcaaagaagagaacttgcacaatcacccgcattggcaaacgttcgttctgtaccgcatgttcacacgcttccgcggatagtttcctacaatccattagcccgcatactctcttcttctcgctcttgctaatccccgaatgttcctgaaaattttccaaattattaacaaatcaagaaacgttatgaaaaacagaggatttgaatcttgttttacctttagaaacatgtcaattgcgcgatataacacgtcgtgagagtgtcttgggaagctagagagtgtctcagcgagagagaggaagttctgaagagggagattaggatctcttgatttctcagctaagtatccatcaatgagctttgccacggatactttcgagtgagttttcggatcacggttcataaactccttcactaggctctgcaccatatccaaatcatacattaagatatcattcactgttgtctcttcaagctgctcgctgactcttttctttaacttttctttcacggtttcttcacatccaagaaagatcgatgctcgatgtagcttggtcaagaagctagaggaaatgtttcctttctcatccgggagaagctctatgattgtattaatcaaagatctatcaatgagttgcatggactctttgctaaaaccagctattattcttattgcataagcatgtaatgcttctccaataacgttactcgggactttacctcggttcttgattgctttgatggcttgtttatacaaatcgatgtgaagctcgcataaatcttccacccaccagtcttttggaacaccatcttctggttttctcactttctcaagcttcttcttcctgttgtaagtataagaccatttgactttcgaggagtctatcgaaccaatagaagcaatagagccgagacaacgcttcacgagctcctctgagtcatcagacaagagaccctctgaggtctgaagaacaatgatggagtctttccagctacggaagagacttgagcttaggaacacatcaatcttgtagatgagattacctttttcgacagtctcatgcattcctagatactcagctgcacatctggtagccacaacgttgtaggcacttagtgttactgtcataccgtaacagaatttggcacatgtctcgaatgcggttggaccaccgggaataccagagatatcgatatcatcggtattgttcctgtccgtgcttgagagcaacttttgcaggcatgcacattttgaaagaagaggaaactgcagaggataaaacaagaatcatcatgtctcaagcaaaactcatacatctaaatttgatgcttgcaaaactgatgtatgaccaagcaaagtcttatatccgcgtaactagacactacgattgccagatgcaccacgagtgatcgaatcccaagtaaacagatgtgcataagaacttggagacaaattttacataccttatgcagacaaaatcttgatccctcaacaacgacactaatgtcactagccagttcattttctacatacctgcatgagataaaaaaaaaaacaacatctagagtcagagaccatcaataacaataatatttttttgatacttaaggcacaaaactgcaagaacttatattctcaatacatgctttgacggtaaccggaaatcataatgaaacattgatcaaaattcaatttcatagatctctcaaaagatgagaggaacctcaggaa

SEQ ID NO: 37224 - DNA, 1556 bp, Arabidopsis thaliana landsberg
  unsure (1)..(1556): unsure at all n locations
attgcttctctcattcttacaagggccatgcgtgttgcagcacggttgctatagcaaagcattaatgccctgagacagtttctagaagtttcgattctaggcactgaatcaatcccttgagtgtaagattcctcagctctggaaagatctccaattttataannnnnnnnnnnnnnnnnnnnnnngcattcaagaaaaggtaaattaaatattaagacagaaactaatgaagcaacaataacaactagacactcagaagactacaagaacaataagtagaagaatttaaatgcatagaaatagcagacttgtaaacaaccttaatcgccacttttcacatgcttcttgcgctgcattagacacatctttttcgattcgtgctttttccatcacagaattattaataggcttgtgtagacgagtaagcggatccctttcactgggtttccctgtggaaaaatgtgactgcacaccagttaacggagaatgttgtgaagattttaatggtagtgtagcatttggaattaggatatatggatcctgcccaagtttaatcgggtttttcttcctattgatacgcttcgaagttgatagtggcccctgcactcccgaaaatgatgaagcagaaaaggtaaagctggagctagcagcatctgtattaaaaagggaatggtcatcattttctttcctatcagacttatatcgtgaagtaacctcactttctgaagctgtagcaaaagtttcactactagtttccatctcttcggctgctgatttaaaactttcaggttcagctccagatatagaatctccaagcaggtcttcatgatcagcacaactcccagtattaaattctacagcttgatagttattaacttcatccccctcattaatttccatcctctcggttgcagcaactagctctgcatcaaacaaataatttggagcagtaggtggtatatcagcagaaaattctctacaatcttctgtctcctcatatggagaaatatccatcggtgaatacgcctcaggagcctcattgctttcatttggaatagcactttctgcaaaagcaaactcacgtccaatatttagctgcactttcacaggctgcttaccccctttccttctcgctctcgtagtagccccaacactgtccttcttcgcattgaaccccaatttctggtccaaactagaaaatgggtttactttcgaattaggggtcttgaattccataaaacctgtcttcacactgtcttgattactcacaaaattaaaatctgaagtatttactgtagaggacacatcatggacatttctagcattcagattttgacttggctctgtacctacaaaactatagttcatcggacatgaactgttaaaatcatggactttcttctcatttacacttccctgaaatgaatctccagaatgattcccatcagtagtcatacttccaacacttaactttctactcaaatcatgagatagtatctatctcccacataatgcatagacactgtggatgtgacgttattattctgtttctgatc

SEQ ID NO: 37225 - DNA, 2307 bp, Arabidopsis thaliana landsberg
catgtttttgggtaaaaaaaatgcttactatccaaatatactacatccactagtgagttttaagtaataagatgcaaatgttctgaccaaaaaaaagaaaagtccgatatgacacaggaaaaaatgtatattttacaaaaagagcatgtattagaattctcaacgtccattaaattttgaattttgggtgttcaacttcaaccacaatccccccagttttggttaaacatttccaaaatatttatttctcaaaatggaaaactcggaaaataaataatttattctaatattagtttcctattggccactggccagtcacaactatacgaccttttaaagtcttcccagtctcctagaaacatctgtctttcataattccattaccttaagtgattacatttgtatctgtaaaaaacccaaaaacaaaaagcatgaaaattgaaatttcccacaaaccccatttctgaaaattctccttggtttgtttgtacagtataaagaacaaatttaagcatggatttacaaagaactttgatgttctcttgttgggttctgtctcttttgatcatcaaaacgacagcgtataacgagaaacagctgttccagccgcttgaaacggaaaacgcaaacgcgatgaccgcggttatggagcgaggattaaagacgcagcggcggccggagcacaagaacgcttatgcgacgatgatgtacatgggaacaccaagagactacgagttctacgttgcgacacgtgtcttgatcagatcgcttaagagtctccacgtggacgctgatatcgtcgttatagcctccctcgacgttcctatcaactggattcacgctctgtaagcgtctcatcatcttctttttcttcttctctctttacatcgtcaaaacgccaccgtttaattggttagaaaattctgaagtcttttttttttcttttcttctttgaatcaaggaaataacattattttgtagaatagtttttctaacctcatttggattatacaaattaatatatactatgtttttttaatttagagtaaagagaacatggaagagcagtaatgcgggaacgagcatgaaattaatttttaaatttttcaaaattttattttttggctctttagttaaagaaaaaaagacttattaaaattgagaatgtccagaacaagacagtctttggtcgcagacgtgtttccacgacctttttttggagtgtgcttgtcttttttttcgtctattgttgatataaaatatctcagccataaataaaaaaatcacaataggattttctttcgaacatagaagcttacttataaaatgatttatttcttcttttgtcagtattatttcatattcatgttacctttttcattttcatattcaaacttacatgagttaggtggaaatttggtgtttctcttttgtgtagtggaaagtgagaatttaagagattggatgtgtaaaaataaataaatatattagtgggattgcttgttgattttattataaagagaaagaaaatataatgttgttagaaagagtaatttggctgtcagataccttattatagtaactaaaaagtctcagaccttttctttgttttggtaaaaggaatgaattataattaaattttaaaaaatattttgaaagtttcagtatacataatattttattgctgcattttatacataatgcaaaaaaaatctgttttgatcttattataattcattaatgaggtatgtagggaagaagaagatggagctaaagtagcgagagtagagaatcttgagaatccatacaagaaacaaaccaacttcgacaacagattcaagcttagtctaaacaagctctacgcttggtctctttctgattatgaccgtgttgtaatgcttgacgtcgacaatctctttctcaagaacaccgacgagctcttccagtgtggccaattttgtgctgtcttcatcaacccttgcatcttccacactggtctctttgtgttgcagccatcaatggaggtctttagagacatgcttcatgagcttgaagtaaagagagataaccctgatggagctgatcaaggctttcttgtcagctacttctctgatttactcaatcagcctctctttcgtcctcctcccgataaccgcaccgcgcttaagggacattttaggcttcctttgggatatcaaatggacgcatcttattactgtaagtggctactatactctgcatttcaacaaccacaaaacattttgctaatctttttgtgtgttactatctttattagaccttaagctc

SEQ ID NO: 37226 - DNA, 1836 bp, Arabidopsis thaliana landsberg
ccaccacttggataagtcgcagccttgggttttggaagtaaatcccgcatcagtgactaaaacccaaaaggaaaaagacgctgaaattagcagcaaatatgtctgtcttagaaatttcccaatgaagaaggttggattagagaagaccacataccagccaaaagagaagtgcctcgaagtgaaggcccaacttgaagtgttggaaaaagccaagcatctataccaatacaaacgattaaggcaacataaacacaacatgattattttgtggggaaaaaacactactaatgcataatattattgctaacatgaatagaacgattttaaagttataattggcttagatccctcaaaatatatcagcaagcattcaaaatttagtatacacttggaatcgggtcattcaagaactaaaataatatctcaaacttattctgtttcagaatgccattgcaacacagacagcggtttttttttccaatataaattaatagctccaccttcttcactgaaaacatccatttaagtatcaaaataacacattaaaaatacgagatcagtacctgctgaagataaacagccataacaccaccattttaagtgatgctgtgcaagctagcaagaggcctaaggaggccatactctgacacatggatacatcaagaatatactcattgctatctataacgctcgaacttgcggaggatctacataacaatgctctggaggcattcgtgagaatctgaaacaaattgctaattgcagaatcgaactctgcagtagaagcatcactgggtctttttctgcagacaagaaaagcaaacaaaaattaaagctgtctattcgtgctcacgtagcacatcagatcaaacaacccagttgcataccttgagcagacgagtttgaaaacctcacaagcatgaagacggaagtcagaagaagaaagtaagaagctgcacctgttatgagtatccgagcacgtcatcagcaagaaataatgcagggctaatatcaatataacaatcttcttaagggtgtgaacaaaaatcgtacccactaagaattccatatctggcaagatctggaacaggagcccactcagtgtatgcaacgatggcattcaagcaagctataactacatctgcatgctgttttgccaagtcaaagtgctgcataccagcttcactcattgcagctccaaagtgtctctcaagaagctgcatttttggtatattcagcaaattaccacagcaacaaaacaactttactgagaggaatttatcggtggcatacattatacaataaaggcaaaatctcaggcaacgattgagtaagtccccgcaacaatagcctacgcctgtcacctgaagagatgtccaatacagaagttagacaggaggatgaaaagatttataacccaaaaagtgatatgcatttttggattgagtataactaaactgaaaagcataaggtgagcacaaaaaattacaagactaacaaatattagcatacgggtctgtccataaccgattcaatttggcttaacctaaacttcaagattagaaaaagcttccccctgtggacagactactacgaaaataaagtgtatgctaatcgtaaataccttccaagtcgtcattgtaaattgtaatatcttcaggaagccatctaagagtcatcaataccaattcagcctattgtttaagaaaagcagatgggaacactttcaatgattgccgcgataaataaaacactaaagtaaataaatgaaagaacattttacttgtaaggggccctgagcagacaatgaagttaataaagtaaatatctcttgcc

SEQ ID NO: 37227 - DNA, 4571 bp, Arabidopsis thaliana landsberg
agaacaagatttctcaagtgaaattcccatcgaaccacaatttctcagtggtcctgtagaaatatcaccacaaatggatgaagcgttactttgactcgatgatgaacatgacacctcaatgactttagcttcttcattggcccgcctcttcttaaataccgatactgttacagtaaaaaaaacaagtgaagcaaatataaaaaaacgatagagacaggaataacttgagaatatgaaccaatacatgacagcggttctggtaccaagagtttgttggaaaccgtaaatcatgggaagatatctagaagctaatggcggcgtgctgtgttccgggatatctggtaaatcatcaaaactaatgaatacaggtacgtggtctgacccctttaactttgtaaccaatccacctttccacctgtagtgtgttcagaagttgtatcactgtaaatttgagatccaagtaaaatgaaaaaggaaatctgaagtacttaatattttaagttgaaacacacatgtgatcattcttgatcatctagacttaccttgttggcatattttcattcttaaaacgcttatactctgttaatatgtcacattccttgacatggcaagcaagaaaactatgcccctgcttatcttcgtcctgatgcaagcatgacccagcaactaagatatgatcaatcctcgaaccgtagttaaattgttctgctccactacttgaggaccaacatgtgaatgcatctttcctgttagaaatccagaaagaagcaatcaatgataaacaaaaatttcaaagactgtctccctcaataatagaaacagaagaggttatcacaaaatttcacctttcaggatgttttgatctgaaaacatcagagaatgagcctccacgttcaactagtagagatctaaaccatttcctgaacctgcattttttaatgacatgaaatgagatatttaatagaaaaaaaatattgagtaaagcaaaaaatggctcaaacagatcatgagaatcggtatatacatactcgtttttctcaaaatcaggcccagcttcacatctatccatagcaaaaggagcaatgttgagatccccaacaacaaataccctccttccttgacgcagaagacactcccatcttctctacaagaaaactaaaaaacatttaatccaagtatcattataagccgaagcatctcattgctacattcagaaaccgataaacttacctctaaaacatcataaaaccgatgcttaaactcgatcctatcagtatcatcagctacagctcgcggcccataaacattgaaaacaactgacaaaacacatagatacatacaaactatgatgaaaatttcattttacacaaaagaagttacataaattaaaaaaggatttgattcataccaaagtggccgtgatcagttataacacatcgtccttcttggtcaatcctaagaagctcttctttctcatattcctcaagaccttcagctactgtagacgtttcactcttcccacctcgtgaattactgtttacaagacccgtaatgccttcttctgcagcaacaggcaaagcagtttcacagcttgaagatgctgactttaccctgcaaaacgttgctacacctgcaaaaatttcaataacataaaaactccaactttttaacattttctcaaattttactctaaagccactgaaggcaaagcttgatgcttaccagaataaccagtacgacctttctcactagtgcgagtgcacgagaaaaacgattcatacccatcagctatcgccaaatctgctgtcaattcttgccttctcagtttcgtctcctagattcaaccagagtaatactattatcatggattcatcggcgaaaccgaagaaaaggattgaaatttcaaaagtcgaagtaaaacctggaagcaaatgatatcggcgtcgaacgaatcgagaagtttgagaagagaatcaaactgcgaaactcgttgcctaaggccattaacgttgtaagtcactatcttcatcttctccttcttcccactgtagttcgttcgacaaagatcattcctttaggggaaattgggtatctgtaagattggacggttgagatcttagaagactaaagtcagtagaatcgacggttgacacgtgattacgtaagtttgtaactaaccgtagcatatgatatcttttcaatggtggcgcgtggggagcacaagttattgatttgcctcgtcggcgtccaccaccattatcgccggatttttatatattcacgtagaagaagaatgagaagacgaaaaccaacttctacttcttctcagtggctctctctttatctttcttggagtttagttagagattttaacgttgcaaatggatcaaccaatgaaaccaaaaacttgctctgaatctgattttgctgatgattcctctgcttcttcttcttcttcttcgggacacaatctcaggttttagtgcttaaagatgttaactttacatggctgtgtcatgtttattcatagtttcgtctaattacagaggagctgagatggtggtggaagtgaagaaggaagcagtttgttcccagaaagcagagcgagagaagcttcgtagagataagcttaaggaacagtttcttgagcttggaaatgcacttggtatatatcttttcacaagatgaatacagattttcaaaattttctttgaattgagtttagagtaatggtttctttctacagatccgaataggcctaagagtgacaaagcctcagttctcactgatacaatacaaatgctcaaggatgtaatgaaccaagttgatcgactacaagctgagtatgaaacactatctcaagagtctcgcgaggacgatttgattaactctcgccattctcttattggactgatagcagaatatgctctgctcaagtgctcatcttccaggtcgtttgatcagctaattcaagagaagagtgagctgagagaggagaaagcgactttaaagtctgatatcgagattcttaatgctcaatatcagcatagaatcaaaccatggttccatgggtacctcattacagttatcatatccccttagtagccataactcagggtcagtccagttttataccttattcagcctctgtcaatcctctaaccgaacaacaagcatcggttcagcagcattcttcttcttctgccgatgcttcaatgaaacaagattccaaaatcaagccgttagatttggatctgatgatgaacagtaaccattcaggtcaaggaaatgatcaaaaagatgatgttcgtttaaagctcgagcttaaaatccatgcctcttctttagctcaacaggtgagtgatctcttcaatagttttgccaacaagctctttcatggactgaccagagtttacttccatgcaggatgtttctggaaaagagaagaaagtaagcttgacaaccactgcaagctcatcgaatagttactcattatctcaagctgttcaagatagttcccccggtaccgtaaatgacatgttgaagccataaaccaataaacatattcccctgaacttgtgtttaataccgtgattgagaaggtaccatgattaaacttgttgtagattatccacatgattaacgatgtattcttatcacaagcaaataaaacacaaaagcatttgcttatatctctttgcaactgaactattgtctatgaccgatgttataagacttgagaaacatattcaaacctaacggcagatgtgcgttcctcggtatcctctatacaaatcccatctaacagattgtgacaaatgatgtgttctgttcctgtacatgggagattagagtttgtggacttggtgatttgagaagttaaaaagtaatttacatcttttgtgaaagcttgttgacttgagattgaccaggagggcttttaacattttttgacttgaggcttgcacttctcaaaagtctgcgaaactcattgatgctgattctcccatcttcatctacgtcggcctcttcaagaagtggttcgatggagccttttaaacccgtttgctgcaaacattgattctagtgagacaaggtagacaaagaggggagtgtgaaaagcatgagactgaccaatctaagttcttcgggagttataaacccatctccgtctatgtcaaacttgtcaaatgctgctcttgacctctgttgccacttctcagagtcatgctcctccaattggttcacgtgcaaagcagccaccacaaactcagtgaaattcaccaaaccatcagtgttgctatcaatctgcagagacacatacacattttggatgataaactaacctgtcgaaggggctttaattagtcctaatactctaagtttacctaccgcttggagaatctctgcaactcttgcatctttgagtttccaaggaacatctttcgcaagagcctgttaagattagaaagtcaacaaactctgttgcagtcatgtgttgaaatcgcttacttgtgctgtcttcttcttacctgcctcattttctgaaggcttatagaaccgttcttgtc

SEQ ID NO: 37228 - DNA, 1418 bp, Arabidopsis thaliana landsberg
  unsure (1)..(1418): unsure at all n locations
cgctaatccctgaccttcattattatcattggtttttatttaaacattctttttttttttctcttaaatcgggtcctctaaggactccaaattgtacagaactaaactatctatcatctgcctttgtagagatttatttgtcaaaattattgcctggaagcataggacatcctaacaaaaaaaaatgttaagttcaatgatatttcaaggaaatgaactctttgtgggcttgtttagatctctagccattttcatgcatgtgagtcatgtgactttttagatctttcannnnnnnnnnnnnnnnnnnnnnntacaatatttttcttatagattttggatccgatcaaattttgaaggatgtaaatggatctcagataaaactcacattagtttctatagtgatttacatggtgtcaataactgactctaaagttggatcagaatataccacgcactagaacgccgttgatggcgatcctttactccgaccgcgtttcaggattctttttcagggcgatagctcacaccgggtgaatacttaaccctgtcccctcttactaagactactgagtgatattgctaattatggccactaccatgattttaagcagtgatatcaaatcccgttgactaaagagctatgggaactttacttaaagcataatttggagaaaatggggaaattgcatggggtttaatcacagacataattactgctgaaatcattataaattaaagctactttggggtagttgttgtataattattctttttactcatattatcaactgtcccaaaatattaacaataaatactctcacttcacaatcatcctctgctgtcaccacacaacacaacaaaaccaaggagtactactctctaatctccgatcaaacgacgtcgtctcttctctctcatgggtaattgctgcgtcagctccggtaccaccgatcgggaaaacgagaacgtttccgacaagaacacaaccattgtcgaagaagagacagtagtcaaagaagtcttgtcagagacaaccttgttcactccttcctctagcttccgcacttcgacgttcaaagacccggtgaagaccaagatccgagaagatgagaagaaaaaaccaggtttcttgaaaatggcttcagacccggttttgatccgacccggttcggttgatcctgaagaaggctctgaggtttcggagatttgtagcttgagtttgagcgagagtgtgtcttcaacggttgtgatgaatggttacgatgaggaagatgtgatgatgatgaaacagaggaaatttcagagatctctggcgaaactcggacccgggtcacggtaataattatctgacctggagaactgatcaatctcacgtaagagaacaatggtcatgtaatgagcgagatacgggcgggtgt

SEQ ID NO: 37229 - DNA, 2122 bp, Arabidopsis thaliana landsberg
tgaatgcagtcaatcttgatgtcagtaggttgacacaagagcaagctcaaacactaatcagtcagctaagttctcatgctcaagttcctgtttcagagtctctaactcctcaattccctactattactgaacatgggattatggctgttcaatcttcatctggtacagttttcaatatctcttctaatcttagatatgagaataataatctcacatacaatcaccaatgtctctcttctttacatactgctttgcctaatgatgcttggataattgatagtggagctactagtcatgtttgttgtgatttttcaaaatttaaagagactagtttagtatctggaataacagtagcattacctaatggcattagtctccctatcactcatacatgcaccattcatttatctgattcattggttcttcacaatgctttgtttgttccatcatttcgttttaatttgattagtgtgagtactcttttcgagataataaatgttttgctcacttttatcctacatcatgttttttacaggagtgttctcggggatggatgattgggagtgctaatattcatcacaatctctacatcctcaatcttcaatccctgaatacaccagttgcatcatctagtgtcatcaacttctgtggatccttgtcagctgatgggaatctatggcaccaacgccttggtcatccctcaactgccaagttagaacttctctctgattgtctttctcttaataagtctgcattagctagtcctcatcattgttctgtgtgtcctttagctaagcagaagcgtctgtcttttccttttaataataatgtgtcttctaatccatttgacttagttcatttggacatatggggacctttttcagtagagtctatagaaggatataagtactttcttactgtagttgatgattgtactagagttacatgggtttaaatgatgaaatataaaagtgatgtgttacagatttttacaaacttcattaaacttgttgatactcaatatcagataagaataaaagctattagaagtgacaatgctcctgaactgaaactaactgaattgataaaagaaaatggcatgattcactatttttcttgtgcatatactccacaacaaaactcagttgttgaaagaaaacatcagcatttattaaatgtagcaagagcattgttatttcaatcggatatacctatctcatattggagtgattgtgtttcgactgttgcattcttagtgaataggattccatctgttcttttaaagaataaatcaccatatgagttactgaataagaaagcacctgattataaattccttagatcttttggttgcttgtgctatgtctcaacattacagaaggatagaaataagttcagtccaagagctgatcaatgtgtgttcttagaatactcatcaggttataaaggttataaagtgttgcatttagagaataatctgatttctgtgtctcgtaatgttgtgtttcatgagactatttttccttttaaaaatgataagaagaaaggcattgactgtgatatctttgaccataacatactgcctttacctatatcattagatcttgattttaatactcaggatcattctcatgataatagcacatctcatcatgcatctacatcatcatctccttcatccatacaccaaagtgccacacacacttcacactctagtgacacaaatccagctcctgagactgtgactacagaaacgaccagtgtttcattgccgattgtcagaccaagacgaccatcaaaagctccaggttacttatctaactatcactgttctttctttcaaaatactcctcttcctacttccaaatcaaaaatcactacaccatatcctttatcttctgtccttacataccaaacactcactgatccatataaagcctacatatgttccatttcaatcgaaacagaacctaaaaatttctaacaggctatagtttcaaagaaatggattgcggctatggatgtggaaatggattctatggaagttaataagacttggagtgttgtctctttaccagcagggaaaaacgtggtaggctgtaaatgggtttttaccataaag

SEQ ID NO: 37230 - DNA, 1466 bp, Arabidopsis thaliana landsberg
tattttcttagcaaatcatttcgaaggttacactagttgttacccaacaatattatttggcaaatctgtctcttgtatgattcattgccacactttctctagggctagttagttctgaattctgatggtagtgatgacgatattgaatctgaatgcgacaatgatgatgaaattgggaagttgtgttaaaacaagtactcatcccgaagaagtagatagagagtctgcaaagtgattgacgtattgttttgccctagatagaaacatggaagctgttgttgatgaaatgaaactaaatttatcacatgatccgatcgtttaggtttgatgatatgcatttagaatctgtcatcaagctttttttgtaataaaaataatattaataacagttgtgcactctaatgaaattttttaagcatactttctctgagaaagtgaagaaatgcaagtaggacgagatgatcacgaaacggagttgtccttacaagaacttctatcagagggcttataggtcaagggaagtctagagaggcgtgtgcagaggagatgcttgacaaaggattgaaaactcctttgcttgacaagtttgctgcagcagagatgatcttcgtgatgactagaaccgaattcaaacatggaagattgatgacttggggatcttaactggatatttcaactcctttttaatgggtaaatggttcttggttaatattgcagccaacacttgaggttctaatggctcaatgagaatccattgagaagcatcaggaagcctatatccgaatggagagtcacaatgctgttttataacatcagcacaacatgtatggttacttatcaagtccaaaactcaaacatgtctctgctctttgtactataacatttgcctgaacagcaacacattatctgttatatcattgtaacatgctacaatagtgggtttatagttttcaaaggtcttatttaaccttcaaacacacataaacatatgcgtataatgtaaacctaagcatttcctactatgagtgatagtagttaatcaaaatttcaaaactagtcttgtattctttgagatatataacttgtgcagttctgcgacacaagttatgaaagacgtatataacatatacatacacaagacttaagaatctttgatggtttgaccttaatatataaacatctcctatcttggtaacatgggtcaggagatgctgcacttagcatttggcaaaaaatactaaaatgaaatattgaactttcaagcagtaagaaactgaagcagcatttgcgaaagttttgagagtgaaatgaacttaaacgagaattaaagagctccttgaatgatttatggggttttgcttgtttctgcgtccttgttcctccaaggattaagagcttctctgatggcttgagcttcaggagaaattttccaacgccccgttttttgcttctattaccagaacctt

SEQ ID NO: 37231 - DNA, 1448 bp, Arabidopsis thaliana landsberg
taatatcataatagagaatagtacttttggtgtaatatttagtgttatggttggagaagaacaaaaattttattgttaaagttgcactaaatatagtgatatttcaacacaaaaataatgttatggttggagatgcccttagtttatggtatgttttgccactgttgttcaacaatgttgcaattcttacaaaattcttgaatcaacattctttttaacaatcaactatcggttaaaaatatgaactaatagtatatgagctgctggtctgttttctaccaaaaatcagatgtttttctttgtttattgcattatgattaatctaaacactaactaaaattagtagtattattactgatgaaataaaacaaaggagtggtggggcagaaggaggacaagaacgggacagtggcataaatcagactggtgaagctgtcccttgtgttgttgggtacatcccatgtgttgtcacacttctaaactttctattatagtattaatcaagatctaacaaatcatgttattttatgtgttttcaattattaatcacaattattctatactccattcatttcaattgttcacagtcacaagcttggtccgatgatacaaaaaattgttatttaatgtacatatatatagatatacccgatcacctactatgttcccttgtttttgtgtggtaatgagacaaatatcaagtttaaagctagaccagagatagatatcaacaagcatttgtgagaaaggatatttttcattaatttagtaacgtgtgggcagttttctatatacaattccgtgctagtcactgaacaagtgtagctaacaatgttctaagttgctctaccaacctcgagcaactatgtgtactcttgcttataacacgtcattacaagctattcaatcgaaatgtcttgagggtgatgaaactgacgaaattcgactgaatagagaatgaaaatatcttgaggaagagcttcggtcataatagcatcatgttagttgacattacaaacataaatagctaccttgagaaaactcttcttcatatcatcacgtacgctgtgagtgacaattgatatttgtgtttagtaagtgtatgagaaacaaaatttgtatgtgtggcatgttatcgcagaaaaactcggtgatgtgaatctttaatcttgtgaaaaagtagaaacgattgcagttatatcaagttacaagtaacattagccatacgtatgcgtctatatcaatgttggttcgagtcacttcgttttgctcctcagctttgcatgaaataaaagaattcccaaaataattacataaactataaacggttctcttggacttttgataatttgtctactttgtacaacgtttagcatcttggccaaaaaatacataaataacgtttactattgcgttgtgaattaatggatattttttgaaactatgtc

SEQ ID NO: 37232 - DNA, 2571 bp, Arabidopsis thaliana landsberg
  unsure (1)..(2571): unsure at all n locations
taaaacataagtttattggtgaagatttgaaggccggcaactgattttattatatttatagtgatatgtttttccaatagcttaagcaaaatttgtttggagttgattagttcattttcatttatcttttttgttcctagagcggttagtgaacactgaatgaatacacacactgactccactaagaacccaaaaaaaaaaactcacatcattttgtgtattttgttagataaaatcaaacctagccgacgttagtgaatctgtatccacttaaatatcatctacagcaacaaaaaagtccacaataagatataaataagtacgactttgcttcgnnnnnnnnnnnnnnnnnnnnnncaatcccgaactatttagtcatggaggcgattaacataaattcatgtttaatgatgcgagccgttacatgatatatatacatgttgattcttaattttcatttccaatttcactatttcagtcatatttgagaaaaaagatgtgtgctcgtacgttttaagttccatgaacagccaatttaaaattaacgggtgaataagttgacgcatattcatttaaaattgtaattacgaattcaacttactaaaaccatatacataacgaccaaaaacttaataaaactataaatttaaaaagaaatcaagttgcgtgacgatgtggcgtgaagagatccacagagaaactgacgtggttgatgatatagttagacacgtggcagagtatgagaagtgtctgtttttcaaaggagctatgtgaaccacaaaagaggtaacttcaccggatttgttatctcttcaagacttctaccctctcttctccttcttcctcaccacaaaattagattctttcgtttgttttttgtgtgtgttatatttgtctttatttcatatccatttattgactttgtaagaacattgcattgcatgtggcagagaactcaaagttagtaaaaatgaatactccgatttgtatcacttctttcctttggcattatatcaaaatatggtcttcaaaaactagaattatacaatcgtagaatgcatttacttgtcattcatagaaagttgcaatacaactaccattagtacttacaaacattgcaaccaaatacattttttattgtaaaatagtactccatacatatttcatgctccatacatatttcgatttttcactattttcattccaattttttgtgataactgaagataattttattgggtttttcttttttggtcgtcaataatattaatttattttctaagtattgattttatttattgataattgataatgatatattttcgaatatagagaaaaagattcaccctaataaaaaaatcaaataaaatctggtggctcacgctcaaaacgatagagagaaactcttatcaaagctttttatttctctctcgagggtttcatactctgctgcttcttcttcttcatcagtagagcgagattctctcgcgctctctatcgctacatataaccatgggtttatcaacgaatctccatagcctcgacctccgttcaactttcttcaccggtctacgtacatctccaatcccttccaatttcatcaaaatctcttccatttccaaccctagacgcgatatctccaccatcagagcccaagtctccaccatcagcctcgagacctccgttaaacagcgtcaagacgaaatccaatctcttttctcgaagcaaccctctcagcaaaactccaatcggaaacgaaacgggaagagttccaaaaacggagcttctgggatatcttcttgtgtgaagctagagaacataaggaaaagctacaaaggcgtgactgtgcttaaagatgtgacatgggaagtgaagagaggtgagaaagtagggttagttggtgtgaacggagctgggaagacgactcagctcaggattatcactggtcaagaagagcctgattctggtaacgtaatcaaggccaaacccaatatgaaagtagnnnnnnnnnnnnnnnnnnnnnnnntttcgatgagtaagactgtgagggaagagttcatgactgctttcaaggaagagatggagattactgagaagcttgagaaagttcagaaggctattgagggatctgttgatgatttggatcttatgggaaggttattagatgaatttgatttgttgcagagacgagctcaggctgtgaatttagattccgttgatgctaagattagtaagttgatgccggaattagggtttgctcctgaggatgctgataggcttgtggcttcgtttagtggtggatggcaaatgagaatgtcacttggaaagattttgcttcaggtatatgaatgattgtttacttaaagttttatcctttcaatgagtttgaactcaaagctaatgtgaatgaattgtgtgtttctttgcgagtaggatccagatttgctgctacttgatgagccgacanatcatttggatcttgatactattgagtggcttgagggtatttgaaaagcaagatgtgccttggttattatttacatgacagacctttcttgatcagtatgtact

SEQ ID NO: 37233 - DNA, 7698 bp, Arabidopsis thaliana landsberg
  unsure (1)..(7698): unsure at all n locations
gagatgtccattgttccatgggattatctgtatttgtggagttgtggagttttcagatccataatatccgttggcgttcctctatcgttcctttggatcaagccactagcttctttctggctcttcttcaacaactgcattcaacacaaataccatgaaatttaccattgttattcgactctgtgttttgcagtgtaataagaacacttaccagataatcgacctttgatatcctggtagtgaagatctgaccagatatatgcagctgaagaaattcattacatccacaaaactaagtcagatcatgttattgagaatcaacgagacagcaataacaaaaaaccaacacactaaagaatcagccaaacctgtcaggcaaaatgaacaagagcaagatttaagctcgccgtcagcttccatatggtgattaacaattcccataccgtcaacattcgaacatctattcatattaaacgatttgatagcctgaggattaggcactaacaaaccctcactttcattattgttgctactacacagagtcatagctaagtcttcactagtaacagcatcggtttgactgccacatacattcatgttcgagtctttctcacacgtctctttcacagtatcatctttagaaggttcaacatcaatatctccggcattggtttcaccctgagattctttgacatctaaattctcagaatcacaatcataactaatcttatcctcagaagaagaagcttcattagtatcactagtcctagtactctctttgaccaagtcgtcaacaactaaacacaacctcttggaaaacttaacaccggagccttcacgagcagcaaggctcttaccagaatcatctccagatttaagtagcaaatctcccaaaatcgctgaaagccctctcttgcttggaaggttagtcatatcacacaatgcgacacgtgtttccttggacactactaggctgcaccaatctccagtcatcttcaaatatcaccaaacaaaacaaaaaccaaaaacgttttaaatttccaaacaagaaatcaaaactcaccaacaaaccctaagaatttagaggtacaatttttaatatccaagatatgaaattgaacaaaacccacttcaattaactgacaaagaagctagaaaatgaagcgattcgtacattagaaacgaagaaccctaaatttaacgaaagagacaaaatcaaattgagcttgggttacttaccaatggattaatggcatccgtcgttggccgagaaatcttgatataatcggaagcaagaaatgagaaatcttggtttaatcggaagcaaaaatatactcaacagagaattagggtttattttagaagtggttgaggcgggaacaaatcctgatttctccgatcttagattttcttttgacccgcgttacgaattcgtcggactcgggagtcacgcgcgaggactcttagatttacttaatgggccacaaattaaaaacctacagttacataaagcccaaaagcccacattacctaaaattaggaaagttgggtaacaagatggaaaagatcaatctggcttatgtctggtcaaaaatcttatctgacaaaaaaaggaaagagatcacctcgaaaagcacaccagatagagccaaattgttatccacttatatatctacacgtcattgacaacgacgtgtccacgtcatcttccttgccgtaaaagcattcacctttataattttcataaattcgttagcgaagagaaaattttcaactcattgaaatggaatcgcggcgagagaagaatccgatgacggaggaggaatctgatgggctaattgcggcgaggcggatccaacgattgtctttacacctatctccctccttgacgccgtcgccgtcgttaccgttggtgcagacggagacgtgttcggcgaggtcgaagaagctggatgtcaacggcgaacgtttgtcgctgtatatgagaggaaaacatatagatatacaagagaaaattttcgactttttcaattcccgacccgatttgcagacgccgatcgagatctccaaggatgatcatcgggaattgtgtatgaatcagcttatagggcttgttagagaagctggggtaaggccgtttaggtatgttgctgatgatcctgagaagtatttcgcaatcatggaagctgttggaagtgttgatatgtcccttgggattaagatgggcgttcaatacaggttagtagtagtctaaattgaaatatttttgttttgtggttgttcttgatggaaaaggtttgctcttgttttgttagtattgatgctaggattcatactctagtctctggatttgatttgttgatacgtatatatttgcagtctctggggaggctctgtgatcaatttagggactaagaagcatagagacaagtattttgatggcattgacaatcttgattacaccggttgctttgccatgactgaattacaccatggtgagtgatgtctaatgtcccctcagcatttagtagtctgtctcagtgtcatgcccagtattaagtgtctgtctatgtttcttctagggtcaaatgtgcaaggtcttcagaccacggcgacattcgatccacttaaagacgaatttgtgatcgatacacctaatgatggagctatcaaatggtggattggaaatgctgcagttcatgggaagtttgccactgtttttgccaggcttatacttccaactcatgattccaaaggagtctcggatatgggtgttcacgccttcattgttccgataagggatatgaaaacacaccagacactccctggtgttgaaatccaagattgtggacataaagtgggacttaatggagtggataatggtgcgttgagattccgttttgtgagaataccccgtgataatcttctcaatcgttttggagatgtgtcccgagatgggacgtatacaagtagtttgccaacaatcaataaaagatttggtgcaacactcggtgagcttgtaggtggtcgagttggccttgcctatgcatctgttggcgtccttaaaatctctgcaacgattgccattcgttattctcttctaagacaacaattcgggcctccaaagcaacctgaggtcagtattctcgattaccagtctcaacaacacaagctcatgccgatgttagcctccacctatgcataccattttgcaactgtataccttgtggagaaatattcagagatgaagaagactcacgatgagcaattggttgctgatgtccatgcactctctgctgggctcaaatcttatgtgacgtcttacaccgccaaggcgctctcggtctgcagagaagcctgtggaggtcatggttacgcagctgttaaccgatttggaagcttgagaaatgatcatgacattttccaaacatttgaaggagacaacactgtgcttctgcaacaggtcctcctttcactcctttaagaaactttcacttctcttgagaataatcatgctcaaagtttttcttttgctttcaggtggctgctgatttattgaagcgttataaagaaaagttccaaggcgggacattgacagttacatggagctacttgagagaatcaatgaacacttatttgtctcagccaaatcccgttacagcgcgttgggaaggtgaagatcatctaagagatcctaaattccaactagatgctttccgggtgagttagtgtttgctgtatataatatctctctgagactctcattgccttcattcattacaattgtattctttacatttgtctcctcagtatcgaacatcgcgattgctacaaaatgtggcagcgagattgcagaagcattcaaagactcttggtggtttcggggcatggaacagatgcttgaatcatcttttaacgcttgcagaatctcacattgaaacagtcattcttgccaagttcatcgaagctgttaaaaagtaagaatcacaccaaaatctttccataaaaacttcaccaaatcaagtttataataatctctgatatcaaaccgttactttcttcagctgcccggacccaagtgcaaaagctgctctgaaactagcatgtgatctttacgcattggaccgaatctggaaagatataggaacgtaccgtaacgtggattatgtggcgcctaacaaagctaaggtttgttttcttgtataatcgtaacccacagattatatcagtgacttacttctcgattaaattggtttaaaacaaaacaaaaatcgggtttttgtttgcaggcgattcataaactgacagagtatttgagttttcaagtaaggaatgtggccaaggaactagtggatgcgttcgagctccctgatcatgttactcgagcaccaattgctatgcagtccgatgcttattcccagtatactcaagttgttggattctaaaaacacaagaacaaaacatatatcatcacaatgatcttttgattcgaagcaaaaaaaagatgaaaaacaatttacagggggtacaaaagaatctgcagtcctttgtatgtgtttttagttgttgtttgttttcacaggagaataaaaaaaaacagagtaataaaaatgtcatttttttcgtaaaccaattttttttataagttattggtaaaaaattctcttatgaacaatgcgaattcggcaccgatgtgcttatattagacaaatgtcagaaatgtcattttttgatcaaactatttgagaacttttttttatcaagtttgctacaaagaaatgaggtaattagagtagatatatacataaaggtgaaagctatattcatgagtttattacataatttaaaatgggcaaaactaacaatcaaaatttcaaagaaaagttgtctcatgctggttttgaactggcacgacgatataaccagctaatagacagaaatcatctagactaattttatatcacttgtaatttttacaattttgcgttcaaagataatggtaacaaattaatcactctgtaattattgaaagttgcaaataagatatgaatttatataagcacatcactgattatcaccagagaaatagatgtttacaccgactttttaatattannnnnnnnnnnnnnnnnnnnnggacgactggacgtagagtatataacttgcagaggtcatataatcccacaaatccttgacatacatccaaaaccctagaactgtcaccaattaaaccatcctttaacatcaaaaatttcaacctgacatcattttaaaatatcaagttgtcggatgacattcctaatgatgtaaaaagttttaccactagcgcaataataggttctaattgttaattcccgaaggaaactcttgaccacatgacatatattatttaagccgaaaacaatactttatttcattttgctttctttcttaggacatgcaattttaagttcagacaagaccagcagaactcgacacgtaccctctcccaacatgcacacctcctcctgcctcctggctcttttcatataatataactattttaaaaaaaccacgatatatgacaacacaaagatcacgatccatatatacatgtaacttaaccgccaaaaaaaaaaaaaaaaaaaaaaggacacttaaccgccaataaagtcaataattcacgtatataacataaactgatcaagcaatcgcaagggatcatttgcttttacaaaacatatatacataactattatacactccaaaaaaaaaaaatggtggaggtccaagatttagaaccacttagtccaatacaggactacgatgaagatgacctcgaagaagacgtggacgaatttgaacgttttggtgaagaaatcagctacgacgatctcaagaaacgcatgtggaaagatcgaaacctcatgtgtaagcttaaacagcaaaaaagagataatcttaactccgttatctcttcgccgtcatcttccacgtcagcatcatcctcttcatcatcctccgttatcgtgcgccgaactgaagcttcacggcgcaagaaaatggctcgatctcaagattcggtgttgaagtacatgatgaagataatggaagtttgcaaagctcaaggattcgtttacggaatcgtaccggaaaaaggtaaaccggtaaccggttcttcagacagtttaagacgttggtggaaagaaaacgttcaattcgaccaaaccgctccaaacgctgtttctgattacttgacattagcggctgctcagttaatctcatcaaacgaatctttagatccgaattcgtatatccacatgcttcacgagctacaagacacgacgttagggtcattgttatcagctttgatgcaacattgcgtgccgccacaacgacggtttccgttggaaaaaggtttggctccgccgtggtggccgaacgggacagagttatggtggggagagcaaggagctgcggcgtttgaacacggtccacctccatatcgcaaaccgcacgatctaagaaaagcttggaaagtgagcgttttagcggctgtgattaaacacatgtcgccgaatttggagagagtgagacggctcgcgagacagtcaaagtgtttgcaagataagatgatggcgaaagagactgatacttggtctcgtgtgttgaaccaagaagaagctcgtctcaatcgcctcaagatctcagatgacgaagacgaggatcgagatcaagaacaagcaagattcacatgttttgatcaagaaccgtctctaaacacttgttttattgtagggcaagatcaagaaccgttgggatcaatgaggaaagacaaaagggttgatcaggaattttcctcgaacgattgttttcttgtagcgcaagatcaagaacctaggaaaggaaaaaaggctgatcaagaatggtctccaaattcttgttttcttgttgatcaagaaccattaggtaacaagagaaaaggtgagttcgtggaaaaagaggcgatgttatctaatgtatacacttgccaaaactcgagttgtccttcgagtgatgtgagtttaggattcgtggacaagaacttgagaaccggtcacgagattgagtgtctttacgggactccagaactggtaaaccagagtagtggtggcggctcggatgggtttgttcggtcgattactacgagtgacgatgattacagcgccagctcgaaagcagaggacacaagagattatcataatcaagatggaaactggctagattatctctggttcgagaggttacatgacttgaatttttctgatcaaggatttgaagatcaaacaagcacagtggatttgaaccaattaccagatcattctgactccaatcagaccatgaacgaggatgacatctcgttatgggacatgggttgtgaagacaaagatatttatatgtctcaagattgaaaaaatctcaactttggaatatatatgccctagttacaatgtattaaaaacagagttaagagaataacagagaattttgttgttgttgttgttgttgtttgttgatgatccaaagctatacaatcaagaaataattttctttaatcaaatttttttcaaaaagaatttgtaacaatcttagtcataaaaactatgcctttgtggaatagccacatcttcaaccaatcttacagccgcacaagaataacctttcctgaatctacctttg

SEQ ID NO: 37234 - DNA, 2258 bp, Arabidopsis thaliana landsberg
  unsure (1)..(2258): unsure at all n locations
gatcttaaccaaattttaacttaagatttgtgaagaaaaattttttatataagcataaaaacttttatataaaaggtcgttcttcacaaatattagcctaaaattttgggtaggatactattaataatgatgccttaacactttaatcatgttaaagataattccgtactttgtgaatctcaactttacacgtctccttttttttgtagtattattatatgactttgggattctcttttcaagtacatcatataaaagaaccgaaaagaaagaagataaaaagttatttcagtacacgacgacaaagagaaaaagtaaagtgtatggtgcagaaaaagaaggagaaaaattatatgaatattacgaacaaacaaatattaaattattaacacgactacaaatatagaatggttgaattttgttgaccatttgtgagactgtagacttgactattgtccttgtcatatatacatgggataatatcattatcagctaaagctgattagataacgacgaagagcaagcaaggatggctacaatctctattcaacgaacatttaatggtccacttcgtagttgaatggtaatgaaaccgccttgaaagctctgtacttaccgacattgtttaaatgttcgttctctaacctgttttttacgtaccatgattagttttattaaatgcgattgaaaagtctcgaatatagtatcattaagaaaaacgagtcatttaatgtatagtacgtagtagtaacctgaagaaattccatattccacgacgaataatctcaagacttgccacgactgcgaccactgtttgtgtgtgcatagactcgaatttgatatctaacacagtttgcatccacgcaaatctcagcaccacgtttaagatctacgtttagtttaaatatcagttacttttcttaaaactttttttaaactagtacttactgcctagctagggtgttgtggtctaagcagaacgaggtgataccaagacttggctaagcaccgaccacacccatgccaggtggtccatcgcaaaatcgtactaatattatcactcaccattgcaaggacgtatacttccttgtgtgggatgagaagattatcgcgtaaccatggattcttggatgttcggttaaagaagtccccaatcataaaccaagtcccaatatgtacagaaaaccactgccatagccgaggtaataccacctaacaatctccaaataatttgacgatctttttcgtcatccacttcataagccatccctaagcaaacagcaactactatcacaatgtacttgaaaccgttatacccttgttctatgtttttctcttcaagcatccgcctcatacactacacataaaatgtcagaaattttttttttattgaacaaccaaattataattattgagttagtagagatcaatatattgtacctgaaggagacgatagacgtatgggatgacagcaacaatgaataagaaagcattgtaggcatctgactctgtgcaagtgtttattcgatgtttgtaatctccccaaccgtaatgacatatataaaactggatacttcgaagagcttgcacctgacttgttaactgatcgcccaccaagaaatcaggtaatgttacctgcaggagaagtcgaataataagatttggatatgttgaagtacaatgatcaaatttttatttttcatcatcaatcatcaatgagacgttcagtttctgttcctaccttgtatagaggagcagcaaggcagtgaaagaggcaagtgaggaagaagaagcgactcgaccggtagaagatgttgaatggtaagactagaactacaaacataccctatatcacacagtcattccgttattattgtcatatcgctaattttcgcattaaaagctgaatattggatttatagacttacagtgagcaggaaaagaggaagaagttcggttaatgcttgataatctttagtttcggggtcaacctccatgtcaagattggcaagaatacaaagaagtgcaaagactccaatgcttaatcccacaaatagaacttgtctataaccaagttcagtaccgtgcttgaacccaaatatgaaagagtaattcactcgataccgcctccaatagtatatgttaccagcatacataagtatgtgcagaacgacgaacccgaacaaactgtacgaagatcaaagaaggcagagtgcatcataacattaagttncaccttaaatattcatgagaacaga

SEQ ID NO: 37235 - DNA, 1310 bp, Arabidopsis thaliana landsberg
gataatgttttcgatatgtgaatttttatttgttattcgtatccaatttatgtataagttgaattaatcacgaattaggaacaaaatatttgcatttaaactctgcggatttattacaaataaatatgtttggctggtcatagtcctgcgactaccaaacttggcggatcttatcttgatactacggatttgtaactaagcgaccctatataggattttacagttgtaaataaactttactagaaagagtatctctttttttttttaacattattagtttttttttttttgcgatttatttatgacatataatcgatcatgctgaatattatatcttgtaatatatgttaattctaccatgacatccgttttttgtttaatcagattaaaaaacaaatgtaaatgcaatcaatagttttagacaagtattcaaaccataacttgttttttattctctctatttatggaccggtgaaatatcttttcacatgactaagtatcaactttcatacagttaaccataacagtaataaaacgtctaaaacttaagacttcactaacaatgatggatttgcttaaaacttaaaggacgtaaacgaatatcttccaagatcaaagacggttggcaaaactcaaaagacaaaagacgtaagttagatgtaattttgggttggtaggtagctcactttccaaagataatgttaggcgtttagtgatgaaatagattgtattttggaagtagcctcacattcacatctctaacttgtttgttcatttttaattgttcaaacttcaaagtgtaacaaagaataatcaagtgcaatcttatgttggttaaggttatctttcttgctttaatgaattctgtctatgagaaaagtgtgtccactttgtaagtctggccttttggcatttttcttttcggctttagtggatctgcttgtaaaaggctttttttgaagtcgatatatatagcccaccatctgaaggaaaaaaaaaagtgatgtacatgaggatacgcgtgtaccgttgatcctctccgtgatattgctgatgtggcatagataagccaatccgatagttttttttctctttttctttttgtactaatccaaatagttattaatactaatcagtaccttagtcttaatccggatactcgaacagaaacaaacacacgggtacgtaacatttatctttttaagctctcttattagaaacatcttccatcaactcaatctgtttgtctatttcttctcccttgtactgttttttgttttttaccaaagaccaaccgttcacaacaatga

SEQ ID NO: 37236 - DNA, 1816 bp, Arabidopsis thaliana landsberg
  unsure (1)..(1816): unsure at all n locations
tttgattaaattatatttgttctcagttcctgctaaatatctataaaatatctttttggtcattcttcctactaaatatctgtaaagtaaatatatatttgatcattctccctacttaataatttctttctgtcaagtaaatatctatttgttcatagttcttactaatatctttttatcttttttgtcttgttcatggtaattgctattttgatgacttatgcgtgtggatcggttttgaggcatatagattaattattaagtgggttgattcatgtagatagatgtaattttgtttcacaaactttgtgcttttgtcattatcaagagtacatgggaccaggtctggaccataattccatatggtagactacacactgcttcttcacacaactaactcttggcattagttattgggaaaccatttattctgtctagtgacgntttggttcagtgtactggtttgacacataagaatatacgaccagcacttatcaatctttggttatcagatgaatcttgatgtttttggataagattgcaaaattcacattccaccgtaaaaatacttttacaaagagaagtttgatggactcatgagatgctactgaaaatgaaacataatcactctgtatacactttgtgctacaggtaaaaagaaagtcataaaaaaattagaagtacaaattctgaattgctgatggtttctgtctttctttgcacctagctgatttctctaatagtgtttactcttccttcaggttctagcggagcaatcatgacaataacgatctctgttggttctagaggagcaatcgtgacaattacgatctctgttggttctagaggaacaatcgtgacaattacgatctctgttggttctgccgtaactgaatcagcttgactgaagtcacctaatatcttttggcacgtctcaaccagacagtttctgcattttggacaagtcaaatgttgttgaagccacttgtctatgcaacgaacatggaacccgtggttacacttggggagcagcctgagctgttcaccggaaacaaaatcagacaaacaaatgacacactcttcgtcaagccctggcaggttcatctcaggtgagtaactcacaactgggaacattctaagagctttcttcttgattcctttgtttgatgaaccccgtgttgacgaaagacttggtacaggctcggagatcatgaaacgtgtagaacgtctgagtgcacaacgaatgatgtaatgtaacccgaggcagcagataatgccacaaatgaggattgagagaagcatcataacattcccactgaggttgttctcatgggttatgagaggagatggtgcaaccgcaaaggctcgttgagtgttgtggtcaaatgggttgtgcagaagcagctttctagagacaaaaccgccaaggaattgttcttggaaggcttgagctgaagaaggtaactcatttgcagacatttttactctttgagaaagcttaaggtcaaagtcgcttctctatgctttgttggctttctttggttattgcttcttaagttctgaggaattcaaagttgtcttaaatatagctcgagatgcttactgattactgtggggactgagtattttatctaatactatttttctaagaaagtggggtttcttctttttagttttttatttcttcaaatgagacttgagtgctgattgtgccattggcccataccttctncaaccctaagatgcttgtgtatagggactatcacttttccaacattgatttggaatcatttattatgcccgacttaaatataaa

SEQ ID NO: 37237 - DNA, 1820 bp, Arabidopsis thaliana landsberg
aaaaaacccctttgattatgaatagagcatttaaaaagcaataaagtttcagttcggtctttgcccccgcgatttccatagatgagaatctgaatccaaatccgaatggtcttgaaaaaaccaaagagattttgtagttttctcaagaatttcaagacgaaaaaggaaaaaagaagtcgaaaagagatttacctaagagttgagattctgattcaatagagactaatggaagaagaagaagaatcctaaaaatggagagagagattctatgcaagaaaaatattgtaaatttttattttttacttttgctagaaaagaggagaaatagttatgttggtggacgagaaaaagagaagccgaaactgatgcgaaatcgtatctatctatcaagtacttatcatatctacacagaaaataactaagagcacacccccagactctatgaaagtcccttaaaaacatacgaataataatattttaattttattagggtctctgtataatttgaccaataataaaagcatacgtgtataattttttttgaaactatctcttaaataagggattttagggtctctctctttttatacttaccttttaattattttttattttttttatcattagaaattttgttaaatgactgctctaatacttatatatacactgatactcatgacatatacatatatacactgatactcattatttttttttttttttttttgggtcaactgcatctcaatattttgttttcccatctttttaatacaaatctttactacagtatttgggaaaaccgttatattgtaaattttggaagatgatgatgatgaggtgtattagcgaccaacacgagatttgccacatgtaacggtttaaagccacgtggcaatatgggtggactctagagagacgcgaaggctcgcctcttccgaatcgcaagaatcgagctgtccacgtgtcttacttccattccaggtgaatttttgttgacaaaacataagtagtattttcacactcgttttttgaaattttagcaagaacagtaatttgtaggaacccaataatattacatttgatgtataaaaatattttaatgtggaccgaccacacaatagaggcccactccagttataaaatttcctttttaattgcgtagtttatagaattaataaagttttgcttcttaaaaatcaaataatttaagtataccgattaataactaagtagctttcaccatatttagattaataaattaaaattttggaaaagattgtattaccattgtttttagtaatcttgagactattgacatgttttcaggttacatgtaccaaattatattggtctttacatattttttttctaaagattttcatttataattgttcatgtgagttatcaaaattcaaaatgatgatgttggttatcactacatcatcgttttgataacttccttaactgcacagcctctcttggtgatgatgatgagttttctaagaaggatactaccaacaagaccatctcttaatccctcttttttttttttccgacaaactctaaatgaaatatcctctcaacaagatactatcctaagtcccaatgatacttgaaatgaaatgtttgcttcttactttgcttcttggtgtagaagtcgcggaaggggcatcaaaatgtgctcagcgcctcaataaatatgctcagcgcgctttgggagttatcaaaattcaaatgtggaaaaaaaaaatgctcccaggaagatgcagtgggaataaaaagagggctcgacaggcgtagttttttccttgttagaagac

SEQ ID NO: 37238 - DNA, 2195 bp, Arabidopsis thaliana landsberg
  unsure (1)..(2195): unsure at all n locations
tttgtaactaaatatagctaatattttggatatgtaaatttatttttaattttcggatatcctttagattaatggttcggtatcttcctttgggttatctaagctgacaaatagtcccatgtaccgcccaaagaaattttgtaatgcaatcgggtttttagatagatatacaagtgaacggaaaaaaagtatgaccaaacactttgtatcctatcaaaggagacgattactcttttcgaaccatatagcctcgttagtggcatccaaatatactccaattctttctgtctgaatgtctttgatagccgcttagagaaaaccacctcaatatccccattgcgttggccgttaagcatagttcacaaaatgacaaaatggtcaaattcaaccagtcaccaaatcatcaacaacaaaaaacaatttccacataattatgaaggacacatacataacataacaagagagaacaaagccacatacataatctaacatttgataaaccacttttcacataatcatgaagaacgcaacagataccaaaatatatttgtttttggagatttagcacatctacttgaaaaaaaaactatatcaaaatgaacaaagtggagattatatatctgagatggttgttttgattgaattacaacatagaaatanaactatagagaaagctgtttatttcaaaacatatttttgaattttgtaataaaataaaaactgtctccaaaataataatagaatttttatgtctttgatcttgtacattaacaagtgatctaaacatcaaaagctaaatatgacatttttcctaaatataaaccattacttaatacatgtataacggaagaatacgagtaagggtcgagaatagtttcgaaagctaaatatgctatccggaagattttcatcaaaatatattgattaataaaaagagtccgactccaataaaataaatagtaacacatttcagcggatgttaccaatatcgtcggtactaagatttgggggaaggctacatattgttttgacatttacgacacgaaaaaaatgcttattcaatttaaatcctgtacacttacatttacagtcaaattacttgtgtagacagagacgcaagtgtttacaacaaagctacttacgctttttcagtccaatgtttcattacttactcacccatacttcttaccaaaaccacagttcgtactctcgttgatgtaacctgaaaatacaaatgcgtaatttttctgcgttagaaattggcataaatcgggtaaatgaggacaacttgctagggttcactaataagtgcagaatgattttcaaacagaaaataaacgtttaacagatactgcatatgcaggttcatttaacaagaatttgtcgacaatgtctagctaaacaaccaaattgttgccaaacatcatgcacatatcgagaaagctaacatgtgaatcacaaaatagtaaaggaatcatattaatgagtaggtttaaggatgtattaccgtccaaatagtttataaggtcagctgctcgatattctttgtattacgtgacatcatattcccgtttcttttctcctcttgctcttcgtatgggttacctctataagtcgaacttgcctcctcattatctgaagaccctggcctttctgttaggaactgttcccagaatacatcattaactcttgctggaggagctgcatttgcttggctacctccaactgccacctcttgtctaccccgatttttctcacttgcacttgtttctattgagttgaagtttaactcggtacatcttccaatctcctgacttttaatagtcgtcttagctatctgtgaagctgtcttctccggtaatggagcagaagccagggttagatttaaatgacatgaaaagctaccatcagtctcctctgaagaagttagcctctgctgcaaggtctccacccttgtattgtcatttaacagtaatctcctcgggcatgttccggtatccgcaagctctagagcttcaggtgcaaatgctaggccttctcttcttgttagtgtagtatttggatcacctcctgacagtatccctttgggactcgcaccttcttcattggaactttgtatactgtgtgaaaccatgttcatatctgaaacagcaggagaaagctctaatcgcaatttattagagaaactctgatgg

SEQ ID NO: 37239 - DNA, 2267 bp, Arabidopsis thaliana landsberg
gtactctcaacgatgatgatgccattttcctccttactcttacgtcgaaacgacgctgttcccttaactctccctagacacgacgtctgcgtccctgacgacaccttctccgatttgctctcgtcgtcttcccgagagaaagtgtagctacggagatacatctgtcgacaagatatgctatcaactacacgggccgccggtaggccgcctccacgacgtacggacctgacgaactcggcgtcggactccggccacttatagagattcacgtaggaggcacgaacaggacgcaccggcacgcgagggtcatgtgcatcattgatgcagctggagatacacactgagttcattctcaagttttagtttttgatttgtgatattacttttttcccttcggtgattctctatcgtatatgtctaatatatatggattttttattttaaggtttaataacgtggaggaataagtgaagcttaaatttgaagaaaagataagtggaatgattaaggaaaggggtgttaataattactttcacaaaaagagtgatacttgtaattaacgagcaggggcgcgtcacccagacacatttaaatatttaagtttgtacccttgacatagaattaaacgtgtcggagtggttgtggatatttttatgtatttcttttttttttttaatctctttttcatatatttttaacagtagtttttgtgaaatcacatgtaattacaatcttgtgtagattttataaaataattttaacaaaaaaacttacaaatgttagtttatcttaaaaaagacatatacctattaaaataattttatagatttaattttcttacttagttttcagatatatacaaattaaattgttattatgaaggaaatatggagtttattatcttacggctcactatgcaatggtttatcttcagggagatggtattttaacgtggttgatggaccgatttctcggagacgagggattctagttttcaaaaccgcgtgacacaaaccactatgagatatgggtggccatactctgagcggttcactttaaagttaatattttggtggaaaagttagctaaaaacaacacttagtagagtattcgactgttttttatgaaacaaaatatttgtgtcaaaatgacgaagatgaaaataaacagagttttacaagataataaaatattgattatcattgagaatctcgtatcagcggtcaaaaaagagtttagtttctaactaaaacagtttctaactaaaaccctttttaaaatttacaagatatgtagtagaattggttatggaactcacttaagtatctatacgatttggtcaagagactctcagaattaggatataaacgaaaatataacaattgtgatttggtcaagagacatttacaaattacaaattagaaggcagaatagtttctccctgcaaacaaacatctcacaggtatcatcatcatcacagtcacaggcacacatttaacagtcgaaagctaaaaaaacagagaaaagagtttaggaagcaaaaccatcattactactaacacaacctaacatttaacctccataccatcagcttctctgttaaccatcttctgatacccaaccacataaccaggcaaatgctttgagtaaaccggtacattattgcactgcttatcttcccggattcgccaacaagtctttgtcaccttcttgcttctgttgttgctaccacactcaccattcttaggcagttgagacgctttgacaagggttaactggattctaccaactgttccccggaagcttccactgttgacattcttcagaaagtctatcttcacagattcaatgtccgaaacattaatggttctgagctgtaatccccagtaaaagacaatgtttggctgctttgtataggtttcaacatactctgttggatttggatcgcaaatgccatagacttcctctatctgcattaaagatgagatgagagattttcaataacatagcaaaggccatactatgagacagaccacagaactagcagagtgtttgtaggatttcatatagaaagagttgaaccaaaatgggaagtgcgtaccttgataagaagacaacggaaacgtgacttaacccaaccaacccaatcactgagatcttcctgattagcagccgagagatgtattttggtgaaccacgtgtatgtgtttgcatatggatagagctcaaacaaatcctccaactgaagatgagcttcaagtatcctg

SEQ ID NO: 37240 - DNA, 2538 bp, Arabidopsis thaliana landsberg
tattgaagacttcttattgcccagaaaacgaaaccatttgtaataagcaatagagaggcaaacaagttgacttctctcaataacaatccaaaagatagagagcagctaaaagcttgtgccaagaatttataatttctaattgccaacatgatatcaaattagcagctcgtaagctatggaaatgaaaagtattgaaaagattaacgaatatgatgaccttaaatcatttgaagaacacaccccacgatgtgatcataacaaaattcacttcttttatagaaaatttgactcgtcttcaattcaaatgccatggattctgtatctggaagctcaatttgaaataaaaatacactaacgcacctggaaatcgatggctagagcacgacgggttgatattgcagaggatactacactcaaagaaagctgaaaacccacccacggagatagaagaaactaaaattaagattcagtaaacgaaataggttaggtgcttcgcaatggctgccaaggttgaaacgggcaattgttcttcggagctccaaacattgaagatgaagattttctaaaaccctacaaacgcaaaatttggtcttccgtcctcggaaagttactcgtttttcattttctccccataaaaagctaattcaactattaacacccaagggtcaccggttttattatggttttcacaccgggttaaggacattaatttggaatcttgaccgactcagctggttgaaccggaccgtttccggtttaagaagaataaagacgcgggcggggttgaattaaattgattttcagaggaaccgaaccttcacctcacgactctctcactgcctcactcaccgtcaccgtcgccgtcgccgtcgccattgctttctacttcgccgtgcctggttagttttcggaatctgattttcatttccatttcgttccttctgaattctcaactttgtctgcgattttcagaggtagcgaagttcgtttatggaagcttctgctgagtctaggtttgtggaagctccattaattttggaatttactggaatttccggggattcttcgtcaactactttcaggacttgttgttgattctcacagcgtgatcctgagaaaggtattttacttttatgctttgttcttttgaatttcagattaagatatataagaatccgttatacaaaattacaatgaagattatatgaagtttcgaagtttcaaggcaaagttaatatgcacgaagtttatcagctccatcaaaatttcagggtgccaagtattagccattggaatgccaccaagaaagaagcccaagtcttcagctttgaaatcaaacaaacaatcttcagctaatcattcgtcacaaccttccacctttggcatccagcagttgttccttcgacatattcagaactcccaatcaacttccaactctcatacctccactgctgacccagttgatcaacagaatgtgaatggtcttgcctctgacactgcagttttaacgcctcaaaaccctctaggcacatcgaatgagaaacctgatgagtccaaagatatggaccagcaactcacggaggcatctcctaagatctccaaaaaccttaagcgcttctctcctggaatggtagtttcttttcttatattcccttatattctaatttaatagtttgaatgggtatgtttttctccttaattgctggttgatgtaattgcaattaccctataatatctgctcacatgattgagtcccttgtggtcgtataattcttacatgcttcttttatgttcatagctgataaagcaaagtcaagatgactgtggtggtgagataacttggaaaatctctccagtaaatgaaagacttcgggcagctgctaagaacattcctaagatgatggacttaacagaaaattcactaggggttaaatcttctaccattcgcccttgctctctgaataaggcatgtttacggctttaaattttcttttaaaactaattcttggttcggtagctgtttcatttcccttcttcacatcgaaactgacagcagctagtgcagaagcaatgtcctacatcaggtataacttccaaggttgagcaatggttatcttcaccctcaaaaaaagcttccaaaagaccagcttttgcaacaaatagggtcatggaaagggtaaatccttccccagatgcagagtttgaaattgttaacacttcaagtagtggaaacagtcctttccagaccccaccgtctctttcatgccctcacaacaaggtaaattactttcctgataaacagatttatgagcacattttatctacttcttaactttgctctgtttatgttcagcttccttgtactgtaacgtgcagcggagcttgtggatctatgggggctggacaacataaaaaggtatgatttgagacttgatgcagtcttttagatgcttatgaaaggcgtatttagagtattatgtaaaatgttttgtcacttccacctgtggttgatcaagactacatgcattatttcctcta

SEQ ID NO: 37241 - DNA, 1714 bp, Arabidopsis thaliana landsberg
gatgtttgcgcgtgattagctctaatacccatccttcaagtctcgagaacttatcttggggggtgcctagctccaggaaacaactggtacatgatctttatcctcactctgcaatgcgcccgccgttgataaagaaaccatcttcatcatatatggcggatacacaagttgacggagtttgtggaattggtgcagggattggaggtagaacctgatcaagtgagttcctcagtttgccttccaattcttcaatcattctccccatattgcacaggtgtccgtcagctactgctagctccattttcatctaatttcaacagtagcagaataatgttattcttttacagatatttggttttcctccattgaatcacaattcataccaggaactatttatctatgaaggcatgggctaaatagaagctaatacttacttgtcttctaattgatccagataagccgaatttgcccgaagactcatcatcagttgtcagagaaagcatgatggtacttgttaagcaatattgtgccatttcctcctcctctgaaccaacctagttgagaacctcaggcattagaagcaaaatatgaagtctcattaaagagctgcttaggaaactatgataaagttgcaattgagggtggtatgtgttacaaaatgggcaacattttaaaacacataaggcacgcttggtaatggtatgttaagagagtcacctgtatacatgtatggcatcccacgctccttcgtccaggcatcccctccgaccatgacctgactttgacccatcttcgaaaaataaaaaccagaacagctcaggtaaagagtgtttattgcctaacattcagtgttattgaactctacagaaagaatgtacctttcttgataaggaaacatgccacaaagccttcattatcatcctcccacatgtagactgaagatataccaccttcataatacctggaaaagaaaactgatcaacacaggtgttcttttggtaactttgcaagcttttttcagtctccagtctaatggatacattagaagaatgaaacacatatcatatattgttaaaccatgagataaatctcaccactaggcaagccttatattcacatcagatgctaactatgtctccggcttatataactcaaattactttcactacatggtttgcatgtagaacgaggtatgtaaagaacctcactggtcactatagatcgcagagatatcgttggcttcaactctcaagctttcttatttcagaagatcggtaaagagcatcctctagcggcggaagatactaatttgaccaaggtgacctgcaaaagtcaagattacatgaaccaacaaatagcaatgtagctatcaacacgaagtactgcatcatcccacaccaaagcgatccaatgtgtagaatgttcactctacacaatgaaatagagcaaaaacaggacctgtaggaatctgcgtctctatcatactcacacaagatgataatctttcctactttcaatatcacgtaacgcctgtcattacatcaccaaaccaaacattgggagataagcacgactaaggcaacaaaatcacattttcaaatctcgataaagatagaaaatacctgaagagggagatcgacttgagagagaagatcggaagaatgttgaggaatgaggcttagacagagcagatagagccgtctcagaatgcttc

SEQ ID NO: 37242 - DNA, 2469 bp, Arabidopsis thaliana landsberg
  unsure (1)..(2469): unsure at all n locations
ttgctctcttaaaaatatttatagcacttgtaatcttttaattttttggcatataaaaaggataaatgaagaacccattctcctaatttaggcctaaacattattggcttttacatttccatatgtcagcatactttgggattgcctgcttatgctaaacttcaaattccttgcccgtgcacttgcactaatcttgttctttatatacaggactgtctggagttgttgaacaatcttcttcgcagcagttcatctaaccaggttttgaagctttgtttctggtcttgatttttctgattaatttactagatccaacatatgctaatatttgaacttatacagatactactaagggaaaccatgggttttgaaccaatcatttcaattctaaaactgcgagggattacatataagttcacccagcaaaaggttagatcatagagtgcttctcccattatggatttattttaccagcttgtgcaattttgttaatctttgtccttctgaatgaacaaattcccagtagactgttaatctacttagtgcactggagaccatcaatatgctgatcatgggaggtgcagacacggagcctggaaaagattcaaacaagctggcaaatcgaacagttttagttcaggtttgttatgatattcaaatgttatgattccttattgtggagaggatcaaatatgtttcttattgtatcatatttgatccaataacagaaaaaactactagactacctactgatgttgggtgttgaaagccaatgggcgcctgttgctgttcgctgcatggtaagcaaatcttcttttttcaaattcttcttccttagccccttccctttttttgttagtattcatatttcattgtatatcgaaatttcattcctgatttgcgcaactgtcaataagttggaatagtttcattcagattctagaattcagctgttgaacattgtttctaggttgaccatgggaactgatagacttacagtgatctattagcagttttttttctagagattgttgcactttctttttagccaattgctgaacagttgtctgaagcaagtattttattgatgtttttttctaactggtcttttgcattgtgattctttgctgctagacatttaaatgcattggagatctaattgatggacatcccaagaaccgtgatatccttgctagcaaagttcttggtgaagatcggcaagtagaacctgcactcaattctatcctccggatcattttacagacgtccagtattcaagagtttgttgcagctgattacgttttcaagacattctgtgaggtttgaaactttttttcttatagatttttagttcatagtctaatgtgagattgcttcttctaatatagtatgtgattggatctttatctagaatctcattcactaaacgttttcagaaaaataccgagggtcaaacaatgctagcttcgactttaatacctcaaccacatcccacatcccgagatcctctagaagatgatgttcacatgtcatttggaaggtgccatcttcttttctttcttctgcggctttcgcagtgttgttttgaagggatctcactcttcattctnnnnnnnnnnnnnnnnnnnnnnnnnnnnnnnnnntacttctctagtattaaaacttatccaacttttttctatatgtgtcagtatgttgttacgaggcctttgttctggtgaagctgatggtgatcttgaggtaaaattgtttctctctgttggatattaatttaaaagcattccggaacttacagttatttttttacttcttaaaaacagacatgttgcagagctgcaagcattctttctcatgttgtcaaggacaaccttcggtgcaaggaaaaggtaacaaagtcatcactttaaacttatgttctgtacgcaatatttttgttgttcctgcattgactgactttttgggaaactcaataggctttgaaaatcgtacttgaatcacctatgccttccatgggaactccagagcctctctttcagaggattgtcagataccttgctgttgcttcttccatgaaaagcaaagagaaatcaagcacactggggaaatcatatattcaacagatcattttaaaattgctggtgacatggactgttgattgtccggctgcagttcagtgctttttagattcccgccaccacctaacgtttttgctcgagctggtaacagacccagctgcaacagtttgcataaggggattggcgtctattctattgggagaatgcgtcatttacaataaatcaattgagaatggtaaagatgctttttctgtagttgatgctgtgggccagaagatggggcttacatcatacttctcgaagtttgaagagatgcagaacagcttcatcttctctccctccaagaaacctccacagggttataaaaccgtgacaagaacacccacttctagtg

SEQ ID NO: 37243 - DNA, 2938 bp, Arabidopsis thaliana landsberg
caatttgaggtttgctgaaccagaaatgctcatctgagggtttcaccactaagtctccttcaatggctacatgtttctctgcaacttcatgagctaactgtgcaatcacatgctccaactttgttcccacagcaagaagcaacttcaaattttacattaaaaaaaacaaattcagctcaactgaaagaagatttaagcacattccaacgaagtaaaatgaggacaaaaacaaatgactcacagcaaagggaataaatgctatccagaaatatgtgtgccatcctgcaagatacataattgtagcttcgatatcaaaggaaacgtaataacaatttcttttcatttctattgaaactagacataagaaaaagatttgagttttgtgaaaagcataccgttaacatttagcagcaaaaagatgacgacaaagatccaaagataccaactaataccaacaacttgtttgaaatcatcctctagagcgcgcatcatatacttgtggaaattaagcttggggtttcccttacaatgtgtctgtatttaaaccatatagattgttagactaaaagatcaaagcaaatgttcttgattaccaaatctcaatttttgtaagtaatcaagattttaccataatgaaaccaagacgtaaagtcacgtaatctgatttcgtcacagaatcatagaattgcttgagaaaggattgctgtcatgcaaacaacatactaacaacatcgggtagttccaaaggacaaataaccaatataaaactagtaatgtaatttaaagataccataccgtccatccgaggatgactgaatctttgccaataccaagaaaatgctctttaataaaagcatggttgtgtacatgagtgacccttcttttcctgagagctgcaacaaagcacaataaataatcaaacaatatgcataatgttccgctagcatataatcgatttagtacctgtttcggggtcaaacttctcatctgcgatggaatcctcccatttcttccattggtgaatctgcattaacatagataaaccagaggtttcacacctgagaacttaatttatatatacattgaatgtagaaaatttctatattggtttgtgctcacccttgtgcttccaaaaatcacggtaaggacacagaatgtcacatgggatatggcgaggacgaagatgaaaatatgtagatggtgcaatgcctcaagcgaaagcaatggtactttaccctgaaaacaagagggagagaagtaagtactgattcaatcaagtaatagcaagagcaacacctaatatgactataatgaggccctgaaggtatttgaatttaccttttcgctacagtaaccaacttgcacagcagcatgttcagcaagtagacgcctagtggttccaacaataggtaaaaaagtctgaaaatgttcttttgctgtaacgtttttatgttcacttgccccagcttctcgtcttgaatcgagagaacatggaagcatatgcataagcacattttctttcacacagaatttggaaatgagcccttggaataccgtcagtaacagcgatataaaccctaacaacatcagctctgcaattcaccaaaatgattcatcatacatccacaaatttgcactaaagcaacacaaagaaaaaaaaaaagtgaaagatttgaactttaaatactcaaagcgctgcttataatcagacacagtcacatctcacttaagctttaaagaaacaattggtccactattaacaacaacatcaactctgcaaatccttaaagatttgtcatagatcaataaattcgaaccaaagcaacaccaaaaggagtaaagagttaaactttaaagactcaagctacttaaaatctgacatagctacatttgattgaaggatttatcgaacaatttgcagattttgtaaactagaaaccataattaaaagagtaaaacactgtgttataacccagaaaaacaatactaatctcactcaaaagatccgtggaacccactcaaacaaaaagaaaagaagggattttgatgttttgttttacgttggtgtgtgtgtgtgtacggtaccttctttaaccttttgaagggcttcgtaaaggggtttttgcttcttcttcttaagaacagtaccgaaatagtgaagcaaacgctccaccgccagtgaaatcgcgacgatgaccgtacaaactccggcgacgacccacgtcggagtgaattcaagcgacatcccttctcctccgtgacccattttacttctcacaccagagagaatttagacaataagtaaagatgaatctgggaacaaaaaacagacaaaggaagagtcttttatgtaccaacactggaatgtcgggtccaggaagagaagaagatgaagaaatcagtgagacagattcttctgagtttttttatttatttattttcctctttgtgttgatgattcgttgtcattgtcaataatactaattgcttttgattagattaattatggtaaatgatctctattatcttcatgtaatttgattacgaccttattatagagtttatatattccacttttttttagtattaaaaatctgtgagacaaattaggaaacgcgttttcaactttccagtttccatattattcgtttctattccgtgtttacttaaagcatccacacacaatcacacattcttaatgagttaaatctataatcaaatcacattttccctctttttcctttctatcaactatgttccagttcacatgtttcgttgtatataattaagtgatactaggagatcatgtaagattgtgaaaaaataaaaaataaaaaaatgagatcatgttagaaagataaaatacagaaactttagaggttcactgattagaccgtcgctgtcactcatcttttatttgagactcgtcccgtctccg

SEQ ID NO: 37244 - DNA, 1891 bp, Arabidopsis thaliana landsberg
ctacattcaaattttgatatttgtctctataaaacttaagtcttggtttgtatgtgtaagaaaaaaatcctatagtagatatttgtatttgtggtgtgaaaaatccttatcttgaagccatatatcaattccttacatatttttctctttctttcatccccaagaaaggtttctcattagatcggtatcgatggctgctgccgctaatacctccgccgttttcgcctctccgtcgcagcctttatcctcgaaacgtagtttttgtaagtattttcactcaaattcttgattcatttatgtcaatctataatactagctatataacgagttaaaactaaagctaatgaatgatacagtgtacagttcaaggattggtccaatactaaggagatttccgaggaagaaacttgatctccaagttaaagctgttgccacgactcttgcacctctcgaagagatcaaagagtctgtctttattttagttcatcgtgttgctttggtcgatataactatatgaatataataataaacatagttcatgattgattattttgatagatacaagcttccttcatgggccatgttcgagatgggtactgctcctgtgtactggaaaaccatgaatggtcttccaccaacctcagtaagtttctctagctattttcaagtgttgaggctctttaactcaattaacttcttacaaaacttttttggattagggtgaaaagttgaaacttttctataatccagctgcaagcaaactcactcttaacgaagactatggggttgctttcaacggtgagtttctcataaaacatctaattaaattaacttgtattccgagttgtcccaacgagttggcgcggttagggcggctgtttaatggggctaccacatactgtataattgttttcgtacaagtacttatagttagcagtctaatcgtggggtttagtcaagtaattatttctaagtgtggcttgcaagtgatatattttcatttccaaattaaattagtagaaagctacatagaccagtcttatggagtacttataacaaaaaaaaaaatgaaaatattcaattggttactaaatggtgcaggaggatttaaccaaccaatcatgtgtggtggggagccaagagcaatgcttaagaaagatcgaggcaaagccgattctccgatatacactatgcagatttgcattcctaagcatggttcgttttcttttataatcaaaaatcaaatcatggtttgtgaccaaatagttatttgtattaatttgacacttttatctttcctatgaatcattatcagctgtgaatttgatattctcattcactaatggtgtcgattgggacggtccatacagacttcagtttcaagtccccaagcgatggcaaaacaaacctattgagttcttcaatgaggtatgtaatgaatttcttttcaaattttcacaactacttatcatctatatatgcaatatgcaaaacttatcatttatcaattggtgcaaaaagggtctagcgaacgagttgagccaagatggagcctgcgaaagagcaatatttcctgactcgaacgttgttccaactcgttgcacgatgatcgccaacttgacggtcgaaggagtaagttctcgccaaactatgtcctataaaatttgaatacactaaattttaaaatgtatgaacaaatttcagggagatagatgcaacttggatctagttcctggatgcatggatacaaattcagaacatttcaacccatatgctaatgttgatgatggctcttgtcccctcgagttatccgattctgatgaatagaactaatttttatttatgtaaatatatacacatatgttaatatcagtatttgaataccataaaa

SEQ ID NO: 37245 - DNA, 1376 bp, Arabidopsis thaliana landsberg
tcccgggccatatgtataggtaccaactggggtatatggtcatggctataaaagatattcttagagcgctcataaaggtctcatttacagggccaagggccataagaggcctatatggaaattctaacaacatcatggcagtgctcaattaatctcttaagcctagctgatgttgagggcgctttgaaccattgattgtaggctgcaccatatgtgattccatggcccccttatccatatctagctactgactatgctacacaactgtcattgttcacacatcacatgtggattggtggatttctgataaggggtgctgctgcgaaaaaccacggttatgatcaaaagaaaccattctgaactaaccacaaaatagaaccactaaaagaccgaaccagagagggataatttaagacataccagaaactcccctggcagactcgacaccagtacataggtaccgtagctgcatctcaatcttgttcaagaaacacgttgcctcgtcaaacggtcttgctagatccgatttgtatttcactaatatatcgcagtacgtttcctgataataaattatcttcttaagtacaaaaatttccaaaaaaaatattttaacaaaaataaaaatccgaaaacaaatcgagggaaaaaaagagagagaccataaattcatcaagctcaggatcagctccaaagcaagaagaaggaacaacctcttgcttataaacatcactctcccgttgaatctcctctagtaaacacgctatctccggtggtgctccgacctgtttctaaattatgaaattgttaaaccataaaattataaaaaaaacaatcaaatatcaaagcttctcaatcttatctttatctttaaaaagtaaaacctagattttatctaagtgataaaaaaagaaagagttaacgatcaccttttggcaatcgatgtaagcttgaagtaagcgaggatacgaaggatgacaagcgattttagctttgatgacagttagagaaacgttatcatcatttcttcggatctccggagcgatcgaagccgcctccgacgacaaagcggagacggctactgagagtagctcgtcggatccgaaaacatcagagacacgattttcaccggcggaggaacatagcaaagcttggtaatcggaaggaaacatgagactctccggtgacatcatcagaaccgacttatctgaataatcaccggccgaatggaaattgtacattccatccataagtataagatctccggtaagaactcctccgtcttctaaatcgctttcttgaattgtcttcttgcaaaatcaagaatcgatgaagaagaataatatgaaaccgcttataacaaactttttggttcttga

SEQ ID NO: 37246 - DNA, 2584 bp, Arabidopsis thaliana landsberg
gttgcaatacattgtttggtatatacacacattaaaagttttgtatttattattatctcaagatctgttgcaaagtgttccatttccaacattgatgtgtttcttcatacaatattttttactcggaggaagacgaataggtcgatgacttggcaaacacgtttgagtaagaccttttagtatatgtaaaattctttgttggaggcaaaggcgaaacagaagaacctaaactcttcttcaagatctctccaaggtttattctttgcaatgtaatcacatcttcagttccttgccaaacgaatgcaagaagatcattagagcttacgaaaagggaaccaggttttgaaccggggtatcggaatccataaccgtcagcgataccctctcccgtgtaagaatgctcgaaatctcttccatctgtatcaaatggaaacggctcaagggaaggcgtgtcaatatttacaacaaacattgaggatccattaggatgctcagcaaaataactgagtattttcgtcccgaaaagaattctctcactaccctcttcagattctccataagtgagcattaataagaaaagggactcatcttcaatatctttcccagggggccagccaaacgttcctccccacaaacccgcatacacgtcgtgatcgagaggtttcttcattggtagtttatgaagggaaaagctgtctgcgctcatgattggccacccttcatatgaagacatcaaagtgcatgaagctttaagactaaggcaaaatgtattaccagagctgagaaagctttggcgattcgaacgtcttgtctcactgctcgaaggcgaattgatctttgaagaactagactcccctaaaacattcgtgttctccgttggtgtgacctctatcagctcctcttcatcaaaaaaatagtcatcaccgagattttccaacatctcgtttatttttacatgcatgggattgtaacacaactgatcatcctcctccaaattcatgttcttccaatttccaccaaacttgtgcattttaaggagaatggttctgcgttcaaccagcattgcttcatcatatttcaatgtgggaaataacatttcatttaatggttccaccacatgtagacttacatggcttgtcacaataaagaaaaaattttttctatcgctaaaagcgagcttccaaaatagaatctctccctcctttaataggctcctctctcaatctcattgtacgaactcttcttttgcctcggcacaacttcgagatgaaggacattgcaactcttctcaatgcccataacaaaaccagggtacaagcaactgccttctttgtctcttccatggaggaaaaacccgttagagccatcaaacccgcagattatctcaaacaccggtgaccacttaactcggccctcttgaatccacgaaggcgcaaccttttgtggaattatccggcacccaacaacagacaagaaaccaggcatcacataaacaacattcccaagttcagggttttgttgcacccatatcccaagaagcggcttcaccatctctacaagaaacctataaagcgccttgtaagaagagatcccgattcgccagttgacaagttcaatcaaaggaagaacttttacttcttcacattgcacaagccacgtcttctcggaatcgacaagggcacaaagacttttgccgcacaagattagattgcaaatgtcgcttggagaaagaaaacgagagataacagcaaacacatcttcgggaagcgtaagaagcaagcaagctccaaacgaatccttgttcatcatgtactaaaagtccaattcacaacaaaaccacccaaggtaattaaacacacaaatgataaaatataattatgaaagtactcaaaatccaaatttaagagtaaaatagcaacggccttacgaaattcagactttgaaatcaagaaacacagcctttgggatactggttttggtttgaatcagaaaggaaaagaaacgaggttatagagttttcttgaagatcataaaagatcttaaagcagagaacgatgggtttcggtttttttttttttttccacaatgggtttcggattatcgcaaggaaaacgttgaaatcctcaacataacaagaaaggcaaaaagacgacgaagtgtttgataattgtttgacaacttaattaaatgaagttttaaaatgtaaaactacaatacgtgcacatggaatttttcaaagtggattcaaaattattatagtggaagatttatatactagtgtttaataattgtctaaatattatggaatagtatgttgaacgggttttaattaccaatgctcatggttttgacaggtctaagttttattagtttttgacagaagttttaaagctattatttctttacctcgagaccattttccaaaaaaaaatcaaccatcgtttcatgtagtaaagatttcggctctctcatttttcacaaccaaagagctcactaaaactacatataacgatgaaaaccttttatttctttcatgctctaatttaaaccgttttaactagtaaaattttaaagtttgtgttta

SEQ ID NO: 37247 - DNA, 1333 bp, Arabidopsis thaliana landsberg
agaaccaacctaaccgctgcttcgatctccctcgaagacaacgtcctccgctttgtataatcgcttaacctcgctgcctcctgcgctatcctctcgaacatatctcccatgaacatgttcaccaccgtcatcgccttcgacgttatacctaaatccggatgcacttgcttcatcaccttatacacatatctcctatactcatctcccgccaaatcgtctctcttcttctttttcttcttcttcttattctcctgcttcttctcaaccttatctgttttcttcaaagtgccttcactcttggaagcgggagtttccggtggctgaggtgaaggttcatctcgaacctccaccggagtctccggcggctgaggtgaactttcatctcgatcatccaccggaatcttaacggtggtaacgttttctccgacgggaggtgaccgttcgtctcgaacctccactggaatctcaacggtagtaacgttttctccggcgggaatggagaaagtgagatcttgcgtttcttgatcgttcgctgtctcggtggtcacacacggatctccttcttccgtgacggttactttgattgtctcttccactactttcttcttcttcgtcacggaaacaacctttggttttctcggcgccattttcttcgttagaaataaccgaaaatgttatgtggttaagatttaaaaagggcgttttgggatgggtcgtaacagtacttctgcaattgacatgtggtgccacgtgtcgtttgaataccttagcattggtgattaactgtctactacgcggtggttataaaaactaaaaagtaagaaaaacttatccggtgattcgtatctgttttaaataactagcccaaagcccggtgggcatataaatgggcttaaatgactagatctaaacgggtctcaaaagcccaatacaacatccttaaccgtacttaattttacacagtatataatttttgttttcccttatatatttttaatgaaattatatgtgaccaaacgacaccacgatcaccctttcaccagcaccagtttagaaaagaatttcgttcccataaacaatgtaattaggtttcattccatttcattacaaatttgaaaacatgtttggactggccgctaattatctgatcgctaaaaaactttttttttctagttcttattggatttttctttctatttcatggttttgtggtagcagaaaaaaaaaaggatctcagatataaagaacgtttgggacttatgagagagtaattagggacgaagtatattatcataacacaaatatcattatgaatctaatctttaatttataa

SEQ ID NO: 37248 - DNA, 1781 bp, Arabidopsis thaliana landsberg
ctcctccaccgcctttgtgtcctccttggccaccaccgccgcctttgtgtccaccgcctccttgtccaccacctccaccgcctttgtgtcctccttggccgccaccacctccaccgcctttgtgtcctccttggccaccaccacctccgccgcccttatgtcctccttggccgccgccaccgccgcccttcattcctccttggccgcggccaccgccgcccttctgtcctccttggccaccgccgcccttctgtcctccttggcccccgccacccttctgtcctccttggcccccgccacccttctgtcctccttggccgcccccaccaccacccttctgttccccttgtccaccaccgccaccgcccttctgttccccttggccaccaccgccaccgcccttttgtcctccttggccaccaccgccacccttttgtcctccttggccaccaccgccacccttttgtcctccttggccaccaccgccaccgcctttttgtcctccttggccaccaccaccaccgcctttttgtcctccttggcctctcccaattccaccttggttatttttggattcttcttcttcttccccatcaaggacttcatctgtttctacaaaatgattctctccatactgtgcacaatttccatacttgcatgtcgactttgactcctccacttggttttcaccaacttttaaatattaaaaaaataccgttaaaatatatgatagatcatacaaaaagaagtagtaagaatatgactataaccttgttttgtgtcatcgatggaggcaacaaccttgatggcgaaaacagccgacaacaatagaaaccaaactattaaagctcgcgaattcatcttcattgtctttgcaacatgcaaaattaattgacgacctacacacctggttttttgttatttatacttgcaccttactctcaaagagtaagcatctaagaaatggtaaatattaaagaaaacccaagtggtgaagcatcttgagggcacatcatgaccagaaacaacttagttggcagcaggaaatatgtctgcaagcttcgttcaagtctctggaggcaacacgtaggatacgcgtcgccacgtaccaagatttttctagagtacttttaatcactagaggatttttcttatggcaatatacgaacactcttttaaaccatgtagcttccatttgcatgtgttcgtgttgacatgtatattgcgatgttcgttagagttgtgcttgtggacaatggacatagctttaccttgtaaaggtggcatcagatactgaccttgtccatgcatatggacgtaaatttacacttgatacaagaacgtaaaaaaaaattattttatgaatagcagaaatagacgaaaatgagattaaactatgtacatactgtaaacacaaataacatcctcaatattttgtttaatatgaaaatgagattaaactaagtacatactgtccacacaaacaataatttgttaccttttgttcgcttttccgaaaaatatttgtctttaattttttcgctacatggaaaaaggcacgtaaacaacaattttttccttacattgtgcttccttgatcagcaaggatgacatgcacccttgtccgtcgggttctctacggtggatcaggttattttggttacacgtttcttagtggcagagccagaataattagctatggggtcataattttcttttagatgcttacatagttttatgaccataccaaatagtgtagtagtttatgcatttcattgagc

SEQ ID NO: 37249 - DNA, 3492 bp, Arabidopsis thaliana landsberg
ctaagtcattcgaattagaaccagaaaagcctgagaattatgttctgctttccaacttatatgcaggattggggaaatgggaagacgtgagaaaagtgagacagagaatgaacgagatgagtttacgaaaggatgctggatgctcttggatcgaactaaacgggaaggtatttagctttgttgtcggtgaaagattcttagatggttttgaggaaatcaaaagtctttggagtatattggagatgaagatatcgaagatgggatacagaccagacacaatgtcagtacaacatgatctaagtgaagaggagaagattgaacagttaaggggacacagcgagaagcttgcccttacctacgggttgattaaaacttcagaaggaacaactattagagtttacaagaacctaaggatctgtgtggactgtcacaatgcagcaaagttgatctccaaggtcatggaaagggaaatagttgtgagggacaacaaaaggtttcatcatttcaagaatggagtgtgttcttgtggagattactggtaatgcatatggggacttatacatttcaaacaagttaggcttagaaatttcctgttatatatgccaacgaaatctgttgggttcattgttactatcatattgttcttcaataaacaaaaaaaaaagtgtatcactttcattgtgccctcaaattcgaaaaagaaattgtcttcttttttttctttttacttacgcactcaatatttctatttttaattaaatgataaaaaaaaaaatcacacaaacgtgaaaatggaaaaagagaaaagttatagaagaatgaaaactggaaagaaaaaaaatggaaataaacgagttgacattaattagtttaaacatgcagtataaaagaaaacacaagagtctaaaaacataaacacaagagtattcagtttctgtcacacaaacacaagaaagataaattaaagatgccaacggctgcgatcttaattctggcgtattctgcatttgtttgggttttgataagctattgtagcagccggaacaataatgtttcaaagaagattgctaccagaccaagcggcataggattaggaactggaacgattttcttcataacttagccctaatggctatgatgttcttaaacaacaacgctggacgaattcaacacggtatcaatgaacaagctgatgggatttggattcttgtaatcatctttttctttctcttcatgctttatctcaaaggcggtttttgatttctttgttttagtttggattatgtattttagggattaataaaatatacattcggatgtgatcttcttcaaacttgtattaagaatttaattgaggtgaatcaaattaaaaacttgtgttatatcaagggatttaaagagagaatgatggttttttatgtataattttgtcatacgattacagaattttaacttgaaacagaaggaaagagaaaaaaggaaactgtacggaacttcaaaacgacatcgcatatggccttttcaatcatcgtcgatgtagatggtctcttgcttaaacaatcctccgaacactttcctcacctctttctccggcttcttcggacgttcttctttcggtttggatgcaaacggagatgatggtctctgcttcaccactgctttcttgggtggcaagtttctcgcttttgcttgtcctctgaccgtagcaacctgtactttaggcgtctctgaagcgttctgaatcgcagttgcgaactgagagccgagtttattccaggagagacctgagctgatatctttcgccttgttaaataaaccgtccactgtgactcccacggcatctgctttctgctgcgcatcctcagctaagcttgcagcttctgcttctttctcagagagcttttgcatttgcttctcaaactctttcgctgcttctgctgcctctcgagctttgtcagctgcaactttagcttcttcctctgctctttcccttgcgatcgcatctgcgtacacttttctcctcccatcttccgggattacactatcattaattcatagataatgtttcattaaaagaagttaacacaaacgtttatctaagctagaaacactctatcgatcgagaacgcgtttaaatccgaattcgctagttttaagatcattatattattccaatgacttttgaatcaatcaacagaggactcatttacctgaaaagctcgtccactggccgcgatggtgctgatggatctgtagaaacttccaccacctgcaaaaggacacacaaaacaaagccgatgcttttgagttttgagtgaaaacacagatataatttaattcaacggagataattcttgccctagtgtctgcgtttgtatgatgaacaatcacaaacttgactggtaagttacttgtgctatacgctaccttattttctgccacggccgtattcgcaaaaatgtctgcaaccagcgacgcaatcttcaacttcggaacctggtcacaaacagaacatcaaaacaagttaataaaaccattaatcaaaaccaatttataaccaaatgatttcgtttcaatgtaatgtatgataataatccctttttatcgcatacattacattactttgtaggcctcggacgaactactgccactgccgctgttactcccttcagctgaaacgacgacgttataagctttctccggagagaaatcctccgtcaaactcgtctttatgagtgtgtaggccacgtcggtttgagctactttctcgatgaggtcagagatagtcaatggctgagattttgcgaaaagattgccgaaaaacgaagtaatcccgtcgagcacgttgtatgtggacccgctgatggtgccgtcgtagactatcgccacgtggcttacgccggctagctcagctgcttggaccacgagcaatgcgtctgaggtcgaaacttgggcgtccggaccattctctgttgccccgaccgtaacaacaactttggttgcgtttccaatcgcttttgctattgattcagcgtcttggaagggggattgaactgcgtttagcctcttgacttcatcatttgataaaatctgttgaaaagctgatcgtcaaaccataaatcaaagctctaaacgccaccaaattcgtaatcacacgttaatgtgaattattacgagtgacacactgacatacagtacttacataacattacatgcgaagttaaagcaattattaataccaaaccgagtttgcgtatcgctaaatcttaaatccaaagtgcgattgcgaccaaatatcaagatcaacattatcgcgtttagaaaattgacagattatgaattaaaggacttaaaaacaaaaccggaccttgtaagtagccgcgacacgagctaggtcctgggcagctccaaggtcaggaacaccggctcgaacactgaatcctcgttgtaagagcgtttgagctatgcgtataccagcttgtcccgtagcac

SEQ ID NO: 37250 - DNA, 3062 bp, Arabidopsis thaliana landsberg
agacttcctctaccgctaactccagatccgacctatgaaaaagcaaacgttagtagctgaaacagcgaagtaagtaagtttttctaaactctgttttttttttcttacctgttccaccataacatagatgttatcagcactactattgaaagtcttgagaaagtagtcagttccccatttgatgagttctttaacatgttcaagctcgccagcagcttggtactttgcgctgtattcgattacactccagctcaacatagtcatagcataagacattgggaagttgaatttgatagaatctccagcatcatagtaacctcctaccaaatctttgtagcattgtcctggatctcccttaccatcttgtagacaagaatcatgcctccatgatacattataaatgttctttggaagtttcccagctgcaaagcaacatcaacatcacataagaaatcaaaattgagacatgaagaaaaaatctcaaagttttagtgcttacattgttgagcattgaagaacttgagagctgtacggagagcgatagtgtaattatccggtggtggttccttgtggtggtggtgtggcaatgttttaacgatcaaagttatgaatccagagagaagagcagttactacaatggttccaagagtccaaagaaagatcttacggctgactaagatacatccaagatcgacgtactttttcttcttaagcacttttggtccaagaagccaactctgttgcgtttcgtcgagtggccgcgaaggagtcgcacggtcaaggtcttgtaggtttcgactacgatcgtcgtctgtcatggagtccgccgcattgatctctagaggaccaccccatggatcacgtccgtacataatgatcagtcaaaatccgatgagatttgctgaaatttctgagggaagaggaagaggaagagttttggagtgttcctgtggttttagggtaagtgaggcgtgtgtgatgtagaaagtgcaagtgaagaagtgtaagttaactcagtattttgccacgtggaattcattcggtcgtgcattggactttatgtccttttttaaaaatattactttaattattttatagctggaatttggtccgtaggcccactttgttgttttgggtaatgttttaacgtcagaaaaccaattaggtgaattcatgattttattgcagaagaaatgtttgtctgataatacactttgtttttataattagagggtaaatgcatttacgctagaaaccaattaggtaggtttcacgaccttatgttataagataaaagaaaatttcaaaataccatcaaaaattattgtattacaacctgttttattattttacatttctaaaaagattatgaccttaactcgatgcttatgtaattgagaagatgcaaagatgatacacgtaacatgttaaaagatgttgaattattctcgcaaattggtttccataaaactgctcaaattacggtatgaaacaacgaactagactcgaacttaactcgatgacacaaccgaatattcccactgatctctttgctgtagctggttctacaaagtggacgttactagttggattcggcaccatgtactgttgataagactggtagatgcgaagatcagacacttgagacaacaacggggttgcttcaacgatggtttcttcttgttggtgaggtaagtgatgagtagtccaaggaaatgatgatgtctctgggggacaaagactccgagtctcatcgaaccaatacggaagaggaggcgctgtgggctcaaccaacaccgctactgccgtggaagagtactcacaagagcaatggtgaggctgagatgggcaagcttgcttacgtttcctcttctttcttgaccagaacgtgagcttcttcattgctttcataatcttcattgagtaatgttaatgcttaagaaaatggtcactgcgttttgtatcaaaaagatactactattttgtaaccgttgaagaacaaaaagtcaaaagcatcatttcctattaatcttttcggatctccaatctttgtgaccgttaaattatcactatcttgcagaggtcctacaagctttgccactatatgaatgtgacatcgcttttctatatacgtttgttttgtttggcagtcactacagaagattcccagtgtacaaagtgaaattttttgcttgtaaaggttgcttcatgacaaggggtttagttccttctcttcaaagaaaacatgaataattcacttggcaaagctctcaaaatatatatggttctaacatcaaactaaatgaaagataacatcaaaacatattaacatggtcgtctagcaagacttaaatttatatattagttatatagaagctcaactagttatcttgacaaaagagagtagcagatccgatgttgctggtctacaacataagattacttccgaaaagtagaacaagacaagtatctaagggaaggaagatagggaccaagcaaaagtctcactttttaaggaacatattcctgaactcatcatttgattttggtgtctcatctgcgctgggtttaggtgtcgtgtagccgagtggtttaacatttcttgggacagcaaacgtgttcttacccctcacttcgacttcatttcctttcctttcaccctcagtttctccaccaagtggtgctttcgccttctcagaaatcagggaagggtcctttgaattcccagaaccatctactgaagaataatcagactagtttaaaattatttataccagaagtagatacgaattcaatacatggctggctacattatgaggaaaacaaacaagagagatagattctaaccatttccacgccgagtgaattcttttttacccttctttggatttgaccgtgctatgctgatcttcttaccaaaaaacatctttctgttctttgctatagctgctgcaaggtgttcatcatccacagaatcagcatatgccagtaacaggaaaagcacaaggggatcaagccagcttattaagccgccatatcatcatagatcgctacttcaacaa

SEQ ID NO: 37251 - DNA, 1253 bp, Arabidopsis thaliana landsberg
cagttaatgaattttcaacctttatttattcaaccgttgataaataattagtatatagaactattctgacgttatatcgtatgatccatcgtcgcgaaataataattatataatagggaaaattttgtgagaatcgacaacacaaagtgaaaaataaaatgttgaccgcaatacttgcaatccgaataatgacattaaacaccaattatatatataatggaagatttgatgggaaatgagttagattctttttttctgattctctagctctctcgtaatatgtttttcattttctgtcaacctttctacttaaaatttttgaggataatgcacacacaaaaagagagagagagaaagaaatggaagaaaaactcaatccatatttcaaagattatgataattatgatcatgattatattgatgacgacgaaacaatgatatatatgaacagtaatgttgttactgtgttacaaatctgcaagctgcattgtggcctataattgaatctggaacacaattacatatttatctttactactagtacatttttttttcttaaaacagtgacatttagaatttaacataatttaacaaagaaaataaaagttctaaaaactaaaatcactaaatcgcaagcagacaacaaaaaattttgatacttttttttgtttaatcaatacacttggagagtaataaactattccaaatgaggaatcacacatggattccattatatgacattgtgctgatttttctttcatatgcactgcagaacagctttgagatggacttcttgagttactcacctacaagactaaaaccttttacctaaaacaaaccgtagtcttttgatatttgcttgttaataataaagatataactttacacagattagattggtgacgtaataaacgactattttctccttgactccaactcagatgttgcttacaatatgaaatattcttgaaatcatatcatataaaatacatgtgaatgcgcaaatctcttataccaaattcttaaactattttgaagttgttgtctctacaacgatataaatacattttggtatgtgattctatcaagaactaaccactcatgttgtcagatgagatatatatgagcacatgaattaccaatgaacgcgttgcataaagatgttacgactgacgactgccaaaaactgaataaatcagctcgatgtgtttctaccccctaaacatattacagcgatacataatctctataga

SEQ ID NO: 37252 - DNA, 1784 bp, Arabidopsis thaliana landsberg
tttgttttgctcggtttctcgggaaaattctcttcacacttttagagttttctctctcttctctatctcttgtcacagctcgtttagcattcattctcttaatcgtttcttcattcaaaaattctctctttctaagctgagtaacttgcaagtcgtcatttttcaattggggtcttctcctttttacttcctttgaattgaaatcacagagaaagagaggttccattgctggaaaatggattgctcaaattagtttctgtgtctaaataaagacagagaagaagaaaagtagacaaaagctaagtttttttttcagatatgggagagagaaaaatgagttggtgggttctttgaaacttgcttctgttcagaccaaagttgagtgctttgagaagggatatggaaggtgtgagactcgtgctgtggagattaggatttctggcttctgtatggttctttgatatctcttctgctacactttctcctactggtgtaaactatgaaggttagtcttttccttcttggagaaatctcacctttttttctctatgaatttatcatctttggcttcgtctattctgtttagttgctccgaaacttctggcgaatgtttgcgtggattaacttcttttttgtttctttattggataataaatatcacagctttaaatgctcaccagactcatataaccttagccaatagcagctcaagtttacttcattctctgtgaaactatactgcatataagcttactgggtttttcttggataagatttcaatttcgaaaaatgcagctttagcaataagataattcataggagttttgaggctagatttgttctttcaatctgaagtatctttctctttgtttgtctgaaatgagcagtgacagctttggttgctgtgaagaatgaattgaatgctccggtcacagctccaaagaactgggatgtgaattcagttgatccttgtagctggagaatggtttcatgcactgatggctatgtctcttcactgtgagtcttctcttctcttctcgtatattagatttaaaaaaccagatagatctttaagacttgtcttgttttcttaatgaaacagggatcttcctagccaaagcttgtctggtacattgtctcctagaatcggaaacctcacctatttacaatcagtgtaagatttttctagtctttgctatatgtgattcttgttctctgttttgcttcttgttgagcttaatgttttgttgtttagggtgttgcaaaacaatgcaatcactggtccaattccggaaacgattgggaggttggagaagcttcagtcacttgatctttcgaacaattcattcaccggggagataccggcctcacttggagaactcaagaacttgaattacttgtgagtgctcctttacggtttcacaatgattcttttgttgcatgtttataaaattccaattcaattctgagtggtctgttgttctgttcttgtcattttcattttcaggcggttaaacaataacagtcttataggaacttgccctgagtctctatccaagattgagggactcactctagtgtaagtctctaaatcctgctttttctattgttcacagtggaaaaacatacattgggagaatatttatttacttactttttactgattcttaatgtgcagcgacatttcgtataacaatcttagtggttcgctgccaaaaggttctgccagaactttcaagtaagctttactaaacttatacaagaacttatctttccgttgaagc

SEQ ID NO: 37253 - DNA, 1426 bp, Arabidopsis thaliana landsberg
  unsure (1)..(1426): unsure at all n locations
ctgcgtttagtttatcgagtttcaggatctgttgtttctaaattatttttgtataatttgaatctcgctttgttgcagaggcttgaggtttcggtggattttcttgagctcttctaagcttctccattttgtgagcctccgatttcgaacctggtagtgttgtggatctcactggaccacgaagctttcttcactgagctaagcttgaagtcaattcctctgttcgacaatcaatagaggaagatgaattatttcccagacgaggttatagagcacgtgtttgacttcgtagcttctcacaaagacaggaactccatatctgtggtctgcacatcatggcacaagatcgagaggtttagtacgaaggaagcgttcatcggaaactgctacgcgattaacccggagaggttgatcaggaggtttccatgtctcaaattcttaactttaaaagggaagcctcattttgcagacttcaacttggttcctcatgaatggggaggtttcgtgcatccttggattgatgctttggctagaagccgtgtgggacttgaggagctgaggttgaagcggatggttgtaacagatgaaagcttggaccttctttcacgttcttttgcaaatttcaagtctttggttcttgttagctgagaagggtttaccactgatggcnnnnnnnnnnnnnnnnnnnnnnnnaggtaaaggcctttcttttactggcgtttctctaggttttatgttgtttttaaaatgtgttgttgtctttcttattaggcatcttcgtgagctggacttgcaagagaatgagattgatgatcatagaggtcaatggctgaactgttttccagatagctgcactactcttatgtcgttgaatttcgcttgccttaaaggagagaccaatgttgctgctttagaaaggcttgttgctaggtcaccaaacctgaagagcttgaagttaaaccgtgcagtaccgcttgacgcactcgcaaggttaatgagttgtgcgccgcagctagtggacttaggagtagggtcttatgagaatgagccagatcctgaatcttttgcaaaactcatgactgccattaagaaatacacatcgttaaggagcttgtctggctttttagaggttgctccactctgcctcccagcgttctacccaatttgccaaaaccttatctctttgaacctcagctatgcagctgaaatccaaggcaaccacctcattaagcttattcagctttgcaagagacttcaacgattatgggtaagtttgttctcactttctcttttcactgtcctgaagaaactaaactaacttgctaacctgacaacaaatggtttttatggttcctacagatattggatagtattggtgacaaaggacttgcggttgtcgctgccacatgtaaagagttacaagagc

SEQ ID NO: 37254 - DNA, 2301 bp, Arabidopsis thaliana landsberg
  unsure (1)..(2301): unsure at all n locations
ttcaaatgtgtatgaaaactttttttttttttttgttaaagagtttcatgaaaactttatccacataaacgtttttgaaatgcatgtgtttttagttcacatatgcgctcggctgcataattttacggaatcataatatatgctcaattattttactattttcatttgtttaaattaaaaatcaaatgtatataccatttttcgcgtttagtgttttaagaaagctagtcaattattttgttgttccactatttttatgatgcatatcaatcatctaattgtcgtttcttacttatcagtttaccattgtattgtgcgcaatttttttaaatttgcatgattcgccactagaatcttaacttttcggagagattactttttcataaagaaacaattgggtatagtattataatttcttcaagattgtcttttacatttatttacaacaacaaaaattgacctaatctttgaataatatacataaggtagatgatgttattgtacagggcatgtgactttttagacatccctattatttatagttagagcatgtgaggtgaggatcgatgaagacataactactgtcaattattgtaattgttcacatttctcaaaccccaaaatattcttaatataaaataggaagaggcatgtcccataatcccattatatatgtcacccttgtatatattcatgatcattattttattttgaaaaaagatttttttcataattatcaaaactggataagatattcggttatgtgtatgtatccgatcgtcatgaaaataacatgttagcattaaggctatgtaattatgtgcaaacctgccacgaataaaaaataagttatacactaagtaataaaggaacttcaataacaccattagtggcgtcactccaagcgttggttgcacagtctaatgtatgacattaagatgctttttaatttggtttcttgcagatatgtatagattgaatctcaaataaaaaatgtagaagctgaaaaaaagaagaaggaaaatatcacatgcaaagattatagtattgacgatatcgacctgcgactttattgtcgccattggttaggtgttcaaattgcaaatgtatttcaacatttctatgattgttaatatagataatgatatccaaattggtcatgaaaaaagcaatctgattttgaaaaaagtgagatgagattgtatctactttctttttttgttttggcccatgccctacacagccaagcaaatttgcatcaattaaataaaaataacaaaatattttataaaaatgatcacatttgacatttttctcagcaaataaactagtgtgattccactaacactcttttctacagatctctatgttttacatgatacataataatctctaaagtttcacctggagagctttgttcatttgatgttcttgagaccgcaaaactgaactgaaaaacaaaaaaaaaacagtaacaaatcagcaattcatgttagcatttctggacactgctggctggttattgatgtttaacaaaaccgtgaatctgagaaacttacaaatgattttaaaagaaatgggttgccatcaaaatctgaggtttcttcttttcttcttcaatttgaataacagcttctgctttgatttcttcaacctttttatcccaaatctcatccactagtttccatgtgtcatcgctgatgatttgtgtctgcatcaaacatagcacnagagtattatataagagaagaanaaagtttaatcttgttatgatctatgagtggtttgtttctactacatacctccatggacgaggagctccaaatgttgcaaaaccaatgtttcctggtgaaaatgttactcttccaggaagcgatacaccgtgaattccccatcttcccgcatagattaaagctccatactcatcgacaggtctcacgggtttctgttttcatgaatcaaaggatctggaaaaaccggaaaaaaaatcaatacagagagataagattgagaaagataactaacttgaggaatccttggagctgtgttgtaaatgttccagatttcatcggctttgatttctcctttctcaagaagcacatctgaaaatattattacactctttaagattgttgagtgtatggtgatatctgccattgcaatgacgaagcagagaggatatgatattattctaaacctgtgatttcttcaagggctgattgatactcttgtaagattgatgagcatttctcaacagcaaacctcatgtactcatcgcgtaatgcctcaagtttcggaaca

SEQ ID NO: 37255 - DNA, 1718 bp, Arabidopsis thaliana landsberg
gaactaaaaaattgttctataaatttagtatgatctttttattttattattattaacgattatataaaagacataattttttgtttgcgaaatacattcctacatggcggactgatcctgtttgtgttgtgatttgatgtttttgtgtcttgtatgctgataagtttatggcaatccactcaaacttaaggtcagatagcagagaaaacaagctaaatacccacccttagatataggtagtttttttttttttttttttgtatattttgtgatataggttgtcggagctaaaaacttcaaacccacaaaagaacattcttatcgaacaattcaaaaatagaaaaattgttcttcgttggtaagaaaacttggttggtaagaattgaaatcccgatggccgacatcatttttaattgggccggttctaggcccaaaccatatatcagcccaaactctagattttactgcataatggaaattcccaggctggaacttgaatggattatataatttaattaatgataaaacatattccttaatctccgcgtccgcgtttgcttcttcatcttctcgactctgctgcgttgctttatcaactgaggaattttgaatttcatatctccaaagtaatctcttttccaaggaagttcagtaaaaatcttaaaacccccgatcagagtaatccggggacctatctccgccgttgatttcagtctgagggtttctccgatttcagttcgatctgtgtccgggattctctctgtgttgctttctcattgcgtttacgattcttcttcccctttcaaggtacgctcttgttggttgcgttctaatcactctcaaattccgggttttggcttcattactacaaattttccccttttattcacttgcttcgattcaacaattgctgaaagctaatcgatagttaaatgcttttgaatcgtgaaattcgtttcggatttagggttttttttctccgctataagcttcaatccttagtccactgggattcttgaacacctcccggagaatttaggagggaattagctcttctccagatcttgcttagctcttgtacaggtacttacctttagcatttctcttgtttagagtttgacgagtttgatcagaatttagttacgaattgtctacttttgtctcccagaatggcggatttgttacccatttacctcattattttggcatttctatgcactgtcggagccattgctttggctttattccatatctacaagcacctattgaactatacggaacccatttatcagagatatattgtgcgcattgtcttcatggtcccggtgagtattagcagttccaagagttttcttctgtttgtctatcctgatctgtgactgtcaactccattttaatgttgaattctctctggctaacatgttattggttctttgggcatgtcaggtttatgccttgatgtcattcttggctctcgttttgcccaagagctctatatattttaactctatccgtgaagtgtgagtgtttctgattttttcgtattactagtttgacatgggatgtacttactcgagttactatactaagttctcattgactcttgggaatagatgacgaacataattttaacctttggtttcaacaaatgcaaacctcatggttaaggctttgtaatcttttttttctttttctgtttcagttcgaagcatgggtat

SEQ ID NO: 37256 - DNA, 3755 bp, Arabidopsis thaliana landsberg
ggctcagcagtgctctttctgtttaagccttatatattataacaatccaagaaaatcaggatattgcctaagccaatgaatgcatccgtacctctgactggttcctcttgaagtcagaattagtgacaaaattgttaaggttctcaattttcatctgttgctccttgatgcaattttcctgctccttctgcttccttttctcttcttccagttgtgtttttagcctttcacattccaactcatactggaattcaaacaaaagtgtagctgttttgtatcgtgtgtatgcttaatgttgaactcaatgtatacactaagaaaaagcgcaaaaaagctaccttcagcatctgattgcttaaatttaagatctcttgttccaacacttccgcatgagatccctacaaacatcaccaattttcgtattgttgctcctttccaatatgtaattgaaaaaaaaaagtgactatacctgaagcttcatgcgtagctcttctatctccaacttttggcgcttcaataaagcggcatcagtcaagatctgcagcatttaaacatggtcagattatattccgataaagaggaaaaaaaacagtcaattggacacatgtaggcggtgatcctttgtaatgggaagaaataacgtagcgcagtaacatctaaaaacgagagtaacaaatatctccaaataatcaacagaagtttagatgctttaaataaatgcagacctcattcacttgagcacagttggtgatgcgctttgctctgcttgcaaattggagagttccttttgattcctcaatatgatgctacacacatcatcaatgtacctttggtaagtaaacaatctaatcttgcccttcaaatgattacttaaagccaagaaaatacaaaagctaaccacaaagcaacttattttacctcttctggtgcgatagtgcatataatgcaggtctttgcattaccaccaagtgcaggctgaagaattcgagtcagcttactatctcggtacggaatatgtgccctataataataaatgttagaaatgagctgcggtgagctgtattgttgttaagtaaaccaaatcaaaggtaagaaagtaccttagctttgtactgtcacttaatttattgatgacattaccaagaatcattaagctcttattaatgtacttcccttcttgcaagcgtacaccaccagcaccagttttagcaattcgctcagatccagctaaatcgaccaaattctagattccattgaaagaacacccattaaaaaaaaaaatagcattatgtaactttcacaagaaacttttgaaagatgttagctgtagtgaaaattatcactcaccaagactgagacacgaatagcatctgaagaactattatcttttcccctgctctcaatcacctatcacaccagagagattgtatcagattaaaaactttacaagtagaaggtctcgttcatagcttctgaaccgtaccattctgaatatggtgtgagacctgctactatgaacattcatgtttgtctcgccaaagtgcctattaactgttaattagaagaccatgtcaatacacattaggcacaaacaaaatgcaggaacgctactttgtagtttagatatgagttaaaaaccttctccagaatctataagctttagaatctgttcagcatcactaacaatttcttccttaagaccagcaacaaacactccacgctgtacatcaagagaaagcaagtgaactttaacaactcttaaacaaactaatggagaagatatcactaatgaaactgatcccaaaccaacctccaaatgctcatgaatttgcagtctctggttctcaacagctaaaagatcattaatttcttcgttgtaaatttccatgtacgaaacccggatgagaaactcacgatcagatatctaaaaacaaagaacaaaacacacacgaatcaaaagctgtactctttttcttacttcacagatcactgaataattctatgcactataccatatgtattctttcaaacacatctcgaacagatcttcgaataattccaggatcagtttcagagcccgtcatcgtaaacgtcttcccactactagtttgcccataagcaaatgcagtacctaacaaaatcagagaagctccatacatcaaaacttgaaaaaaaaaaaaaaattgagctcacgaaatcgctcaagttttataatttaggttagattaccattaaaaccctcaacagcggcatgtatgatatccttagtaagaagctcgtagacactagcattcgtagaactttcgtcgaacacatgatctgcaaaaagaagaaaaaagtaaacaacaccaaaactaaaaaggaagagacttacgatttcaatcagatctgtagaaattgaaattccagaaactgattgataagaaagtagatgaatttaccaaaagcgtgagaagcggttgtgattggagtgtcgagtgatttatgaagagagatccgattatcttcgactttccagagtgaagctccgttttccggcgccggcggtcttaccctgactgcgacacagatcttttccatcttcgtctcgatctgaaagtgccgtttgaaatttgaatctcagaatcccaccctagagggggagcctttaagcatttgaatgtaacttaaatttacagtaatacccttttctttttgtttgccaatcaaattggaaaaatatcatttaatacccaaatttttcaaattggtaccgtttatacatcaaattcatatgtaagcattttatacatgaattaaacgttgacaagccgtttgaaacatgaaaatgcattaactaggccaaaaagacataccgctatctagatataaacattcagatttcggttcgaattgcgtttggatattgatatataatggtttttactcatttcaaacatgatattagaatggttttaagagtctttttagttcttttcgtatgttttcaagtctttacaggtgcatatccacttttgagagctatagagcaaaataggaaatttggaagctttctagcaaggaaaagcaacatagatgtttttgatgcgatggtgtcgatcgacaccacacttgtatcgggaccaaaggaattctccacgttttaatcaagttatcaagaattgcagaagtttcataagtttcccttatttgaaagatagtctctccacgtttttgttaacttagatatagatttttgaggtcattgtttagacttaaccttttgtgtgagagattttatattcaaggaaagaagaatcaaaacttctcgaagagagattctaaactcctttaactctattctcttattttaattcaatgcaatttttttagaatatgatttgtgttcttttaatcatgtcttagtaatcacgttgttgggtttagggtttctctcattagagatttaaatgaatttgtagatcgataacctgttacgaaatatctttaggttttttcatcttaattgttcttaatgctagttttagattgatcacctagaacttgatcttaggataataggtaagatctaagagggcgcttattaccttaaactatcatagatgagcttaactatctagatacgaatatgtctcgtttagatacttaggtgaactaatcaaacttgatattaatgcatgtttagcaattaagtatttgcaacgaaagttaaaatccttatttattaggcatagctagttgatacaacgagggtt

SEQ ID NO: 37257 - DNA, 2251 bp, Arabidopsis thaliana landsberg
aaagttaaagactattaaacccagatatctccaaacaaaatattgtacaggtccatctgtttcgttctccacatgttcggcggtcacggtcaccgcaggtctgtcatcaagttcttcttcttcattcaaccatcttaaatccacacagattcttctgtgattgtctccttaaaatctcgactctgcatcgtacagtgacttgtgaaattaggatcgttgtgtctgtgttttctagttacagtttgtaagtatctcaatatttgcgtgtaaagtcagattcagtgtcgtcagctgtttggatttggtttgggggtatatatatagcgaggtgtaatcattataggaggttttagtttcccattttttctctcgtgtgaatacgtttaatgctgtatcgtcggcccgagtttatcggagctccgggtctgacgtgagttttccaaatggcggcgtctgagagatcgattgacaaagaagtcgacatgggttcttcctttcttcaaaaattcaggctttacgagacccgctcggtgattattctctattgattctcttctttgggcataatttgataaaatccgtagatttgctaatctgattaacctatgttttgtggaacagagcttctatatgattggaagagataaaaaccgaacgtcttggagggtcctgaagttagataggacagagccagcagaggtcaatatctacgaagattcaacggcttacacagaagctgaatgctttgaaactttgagaaggatacacgagggaaacagatcatctggtggtttgaaatttgtcaccacctgctacgggatcatcggtaatgaaatgtctttgtagcatctgattctatactagttgtttcttcttctttataatctcaattttttcttggtgtaggattcataaggttcttgggaccttattacatgctgataatcactaaaagaaagaagcttggtgaaatttgtgggcacactgtttatggtgttgcgaagagcaagatcatcacgattccacatgcctctgtgctatccaatgtggcttattctaaggacgagaaaaggttttcttatgttacttctgcttgtaaaatggaaaacctgtaccttgctacctttatccttacattacttttcgaaattataaagctttatcacttgtatttagattttaagaccattctgctatctttttttttctctctattgtgaccctctttgatctgcacaataatagtgtcacaggtttctattagacaagttaacagttgttgaggtaactgtgattgaattcgttacatgttcctctttactttgtctatcgctgttggagataatccagcagcttagagtttcaaatcttatttagtctgtagtgggacaattttttgttgcgcatttttgctttttactatttctaggtattcttctcctctgtttgtacagtggacacacttctatttgttgtatttatcttgatatgttatatgacagaggtactatcaagaaagggagagctcatttttattctctcctactgtcatttaatctgttatattgtgaactttgtattatcttgttaacttccttctttttcagatactgatccaggttctaaatcatgtttggtttttgttttcttctgtcttccatggaaattttgtaggtacaagaggctgctctgcactgttgatctcacaaaggacttcttcttcagctattcctatcacatcatgcatacacttcagaggaatctgtctaacaatgtggaaggacacacttactacgaatcgatgtttgtctggaacgaatacttaactcgaaggattcggaataacgtgaaggactgtatgtggacagttgccttggtatatggatttttcaaacaggtatcacttgtactaatttgtccaaaggttctattaattttatctaacattcagagatatgcatattacaaacaggtgtttagatattttaacctcacattgaaaattccgtgtccatgttgcttgattttgaaaatttgtacagcatgagagaagaagctctcataagaattaggagtgaaccccaaaccccactatgtggatgccttctccattcttttttctttctacgcacattaaaatctgttaacctttataatggttttttttgttgtccaatatataagtcaaactatcagtttctgagaagaattttagattgactctaatttctcgcacatctcggcattatgc

SEQ ID NO: 37258 - DNA, 1744 bp, Arabidopsis thaliana landsberg
tcttcttcttccgaacggagagtactagttgttcgcctacggcactagcttctttttctttctcactttcggtaaagtttcctgttttccttcagaaacgaagacaaaaaagtagagatttttatgaagattcattttttttttcattaaatttagtgcgctttcatctgcaaaacgtcgattaaagggaggtccaggaattgaaatttgttgattcgtgtgtctagggtttaagggtccctttcatctgcaagttacgaattgcaagtccacacgtttatgcaattgttggtgttagtcctataatttcaatgtagctagaacttttgtagatatgataaaagttcagacttttgttcaataatcagttgaaaaattgttttgtgtgatggattcagcagctgctgaagaagatgcagagtgaggaatctcacgagcttacgaatggaatatccgaggagaaggagtccaaggaaacaatgaagagtcaaaaggctgatagaaggaaaaagaagttgaaagataaattgcttaaggaagcttctaaagctgacaatagaggtgtttgctacttaagtcgtatcccaccacacatggatcacgttagacttcgccatattctcgctcaatatggagaactcggaaggatttatcttgcacctgaaggtgaggttttttatcctatcgagtcctcgtttaatgtcaaaagcacatcttggtcttattaatgtgtttctgtattgaaaagttagctgatacatttgtctattgctattcagattctgaagcacaagtgcaccgtaagcgggctggtggatttcgtggccaaaggttttctgaagggtacgcttaaggatatgtgtttcccccgctagttattggcttttcccttgtctgtttgttgtgttcaaaacacttctccacattgataatttggattcttttaataatagttttcgatatattattctgttcattaactgcaggtgggtggagtttgctaagaagagcgtagctaaacgggttgcagatatgctaaatggagaacaaatcggtattcctaatgaatcatatcagtatgcatagtcgacaggttaaatctataagcttatatgattgttaatgtttgctgttttctttcctcaggggggaaaaagaagtcatcagtatactatgatatttggaacatcaaatacttgaccaaatttaaatgggatgatcttactgaagaaatcggtattgttaaccgcacaatatctctgctgaaattcttgacaattttctatgatatgatctctaatctacaaagggattgctttgtgcagcatacaaaagtgcaatacgggaacagaaattaaatatggttctttctgctgcaaagagggagaaagacttttatctatctaaaatagagaagtctcgtgccatgaccgagatagatgcacgaatggaaaaggtgctcacactttctaatattgtaaattcagaagtactctatcttacttgttcgatgtctgcttgtctgaaatttatagcttgtgatctttttataaactataaatccatgaagtaaatgctaacttttagagttggataataggccttcttgtttggaggaattcaattcttcgtttcttcctttgtaaatctcactactctaaccagatgtttggtttgtattcttctgtatttgcggtgggcagaaacgaaagattcaagaagaatcgggtagcaatgctgaagc

SEQ ID NO: 37259 - DNA, 2909 bp, Arabidopsis thaliana landsberg
cacgggaccaagcgttccaaggcagcacataaagttgctaggttttctgcattcatctctttaaaccttgaagaggcatgttccaactccattgcatcgcttgaagaggcttcagagttcattgtagaattaggattcgaacagactagctcagtcttttgctcgctgtcatgttctggaatgaacagtcttaagtgagatgtctcatggacaacagaatgatgacgatgcgtgtttgtctcgatcacgggccaatcaccgttggtttgaagatgatgaagagtactgattgaaggttgagtggaaccagaaaaggaagaagtaggagaagagagtgtgagtgtttttagagatggtcttttgtggattgaatcacagattgagttccacttcaccacaagttccttaatagaatctgaatcctgccaagtccaaaaaccacaacatagacgcacttataagaagaggcaaatgacataatgtaaactgatttgatgtttatacaactcacagtgtgactattttgattctccttcttatactgctgaagccatgccggtaatgctacagtggttacattgctattgctactctttaagaatcgagcttccgattcaaacttgacggaacattcctcacagaaactgagctgatccgatgattgctgcagctggagagacacgttctctgatttcttgacttcaagctcactgatttgaaacaaaatggtaattatatcagttagtagtgttaaaactgttaaatgaagtaacttattatatgtaacttttctttagtatttctccaaagaaagcttataataaaaagctataaaataatagagaaaaagttaggaaagatgcacgttggttcaccgttcttttagatatgatcaccaaataaaaagcaaaaacactataggtaaaattgtccttttcgaaaaagaggcaaaatagttggcacatatccaaccaaaaaaatgaaataatagacagctttgttgattgcacattcttgactgtttcaaaagatagaagacttttacctctcggagtcgagactcaaccggagattattactagtcgccggaatagtaagagtagtgagacaccagagagattcaatgcgagggttgaccagacttgcatctcacgtaagtctgtgaagtcgcaagacccattaaccaaaaccttccatgatctcccatgactaacccacaagccaacttcccaatctccattatcatatgctccacaacacagtagctatcgttgttgttatacagtgaagaacctctggttcttgactctacgaaccagtttagatctcccagatttagaatcactcctttccctacacagctcttcacgagtgtctctagctcctctagcttacgttccacatcggctctacttggttgcccgaacgatgagaacgataaagttatgaactttacgtcttttaaaacctcgggcacgtcttttttgtcgactttttccatcaccgtcttcacaactccgtcaatagtggctaaacactctcctacgatcacgaaatttcttctctttttgtcgacaagattgttgataacgttcataacatcctcgttcctgacaggagttaataacttcccctctttgggtttactcgaagaggttgttttagagcaaatctctaaagaaacagcttgctcgactttagtcttcacttgaggactcgagaaaccagcttctctcatcactctactcacgctaggatcatcgaggatagatattatgagctgctccacttcgatcttgactgctaagatcggttgttgctggctctctatagaaccacgtcgttggtgagcttgtgcgcgtttgaaagctgcaccgagagcgttggagatagaagggaaaagggaagttggaacccctaacataggactccctgtagaggtcgggaggcggttcaaagctacgttgaagcagagctcgagggctctgcattgaagagggtgagtgtgagattggagacaagctgttctaagtaaacccgtgggagcagagagcatggtgctagctacatggagaggtgtgacctgagcatgtcctctccgtctagccaaccccatggcttgtttcaccacgtttgcagcatccgccgtgagggcttgctccaccgtgcagcctccagctctcatagtgacaaaacaccctaaaataacacaaggtggggatagtactaatactcagaagtgagagctctatggtaaaagcttcaagaatcttggcttcattccatttatcttggacaacaaaaacacccaaagaagaagggtctaataacacggcgtctatatggaaggtggggctaagtcttaaacctaagaaaagagtaaggatatagagagagcgagagagaaagagagagagaaagaaaaatggactttggtcttcaaatatatgaggaaggagaaggaggaaaatgtgtatgcttttcttgtgagagaggcaaaaaatttggggggttttttgagggtccaaagtggattttgtagtgcaaagtggaatgcatgtgatgacaaagcagtatcaaaaggcaaaggtaactcagctttgcccatatattcttttctttctcaaatttcacaaaaattaagatgtaatgggtactgcagctaagtgggtctctctcttttctgcaaagtgtatcacttatttagaaaagaacctaattaaagatgcaaatcatcattcacttatataatatataaataaataatagccccaagaacattttatggaaaattggggatttaatcactctccctttgtagcaccttgaagctatactactagccaactcccaacacttttttcagacaacagacttttactctagatccagtcaagtaagcttgaact

SEQ ID NO: 37260 - DNA, 2065 bp, Arabidopsis thaliana landsberg
aagatgagctaagatttcaaaaacagtctttttatagatcaacttttaatagtttctttcttatatacacactgtcacacatgttatgtacaagtatagttctaatgcaaccatagaaacaagacatgctaattcaaatagagggtctcgaaactgatgattcttgatcatttgtaatctgtcaaactcaggatccaagtgtgtactatacactgattgtgttgcggaaagattagtttgactttgaccaaccaatatacttgctgcaaaaaaaaatgtcaattgtttcctaacatttttttaaaaccaaggaatacgttgggttggtcgattttgtaattaacatcatcggtatagattttgacgcatagttcgtcttattacaattagtgaattagctgataaatacatcttaatcttgagcttatctacaaaattaactggtcttagtaaggtcttcatagcaataatctttggtcaaccttatttcataagagacttactggataatagacaaaggagatcgtcagaagttttggtattctttattttattttccttttcttttcgaaatttcactttaattttttttcgtatttccgtttattttattacaaatattaaatttccaagacggacgtggatctttccctaaaccgaaatcaatactttgatttttgtaattattatatcgattttcaactaattaaatccttaatattcctattaaataatacaactgtctacatgatatttttttatatatattatcgtttcttttcctgaaattttccattttatttatttctttgcaaaaaccctaaaaattcattcgtctaagagagaaaaattatcttctttttcttgtgaatttttttttggggatattgcatgtaattttttggggatttttgaggtttaatctccattgaaagaagctctggcatttctctgctacagtgttggttttcagctgcagaattggtgaaaaagtaaatctagaaactgtaatcaaatttctctgctttgatctttggtccttttgagctactatttcatatctcttgttccttttattgttcttagttattattacaaagaagaagaagaaaaaaaagaaacctttacttcttcttcatctgaaaaagctcattttttttttttttggaatcagagtttggtgaatttcaggagcagagtatttaagtaattttggggaattagtgagaaaatggaggagaaaggtgaaataagtccaagtggggtcgtcacagttaagggagatgaagctttggttccaagaacagagtttcaacaaaaccctagttttctccaattcgtgagtcccacaacggtagtgactcctctccctcctccaccagctccgtcttcggctccggtaccaaccaccgtgactcctggctcagccacagcatcaaccggatcagatccgacgaaaaagaagagaggaagaccgaggaagtacgcaccagacggaagcctgaaccctaggtttttgcgaccaactctgtctccaactccaatctcatcttcgattccattgtctggagattatcaatggaaacgaggcaaagctcagcagcagcatcagcctcttgagttcgtcaagaaatctcacaaattcgagtatggaagcccaggtaattaaaagttgagatatttgtgtttgaactgtttgcattggtttcagtgagacaagatctgatctgggtttcgagtgattttatgttgttgtgtggatttttgagatgttgggaagtgggaccaacataactggattttgctgggtacacttttgtctgaagaagctattacactcagaccagttagagacagagaaagggaatctgctgatgctgaccaaacaaaaacagaaataaaaagaagattttgtctttaaaaaaaaaaatacaaagacagaataatctctgtctcttcctttttatcttagaagataagtatgtctagttgtgattataagttgtttagcagatcttacgatttctcattatctgttttaattactgtgtgaataaaaagagat

SEQ ID NO: 37261 - DNA, 3329 bp, Arabidopsis thaliana landsberg
taaggaaatcatcaaatcataaaagatccatttaagttagaaataaatacacacttattgaatatcatttgataaggcttatctcaaactaataaaacaagaatcgagattcgagaatctcactaaacaaatggattaggtgaatccgacaaaagccaatgatgccgtcacgctcataaaactcggattccacaagcccaaaataaacaacatgttttattttattatttgtttaccgacttaaaatattaatttaagatcgttaaaaaacaaactgtacaagtttttgatttcagagtccaccgttgagcctgttcaattaaatcgttgaatctcgcggtgcgttttactttgattctttcgatttttttttatatggatgttgccgcgatggcgagatgtgtgggaaggtgctacgtttcgccggcgttcggtgagtctgaatcgcaccggttatcggagcggcggtttctgaaattgtctagctccacgaattcggatcccgccggtagtaaaagtttgaagcttcgcgggataattcatcggagaatgagctacttccgtcggatcatggcaaaagatgaatccatttcatcgcggtccggtaataatcacgtaatccgttctggttcatctctaatcctagtttgggttcctatgattcgtttttaacatttgggttcctgagaccagaaatttccatagttttagcataaagtttggaccttagtagacagatcaatgatgtatatctgaatagatctaatctcagataatctaaccaggtgaaacgaagcaaatcaatggaaagcaaaagaacattgtctggcatgattgtcccgttactaaatccgacaggcaagaattaatcaagcaaaagggatgtgtgatttggattactggcttaagtggttcaggtttggtcctttgtttctgaattgatctctaactacatcttgttatgtttctactggattctttcaaatattctcgtatttttcaggtaaaagtagtctggcatgtgctcttagtcgagctttgcacaatcgtggaaagctttcgtatatacttgatggtgacaatgttcgacatggtttaaacagcgatcttagtttcgaagcagatgatcgagctgaaaacattctaagagttggtgaagtggctaaactgtttgcagattctggaattatctgtattgcaagtttaatatctccttaccatatagaacgagctgcctgccttgcattattaccacaaagagattccattgaggtttctccaaattcatgaattagaatcccagtctcaacatcaatctgactatctcttgatactcttgatacgtatttatagatgtgccactccatgtttgcgatactagagatccaaagggcttatacaaacgtgcacgcgctggtaaaatcaaaggtaactttgctttttctctgcatctgttttcaacttaacccatgttctactgattttcattaattatataaccttcttgatctatccatttgattatatgtaaatatattgttccccaaaacatttcttctccaggttttacaggagtagatgatccatatgaagcgcctttggattgcgaggttcatataatatccaatttttgttatataagttggaatctagctcatctccgaacttgaatctaatgttgtgtttccgactactctttgcagattgtaatagaaaacagtagagacaaggggctttcttcttcatcttcatcttcatcttcaccttcatcttcgtcttcttcactgtgtgaaatggcagatattgttgtgtcgtacttggaccaaaatggatacctgaagaaacactccacaaaatcacgtaattgtatgtaaatgtaatattaatatcattgttgtaacgtttcttaaacctattttacctatggacgattaaattgtgaaaacataaatgtaattcacaatctgcaaagagttggtaagaaaaacttgtttgattgattgagagaatgagattattatatggccgccaagttggcgccaactctccggctttttaagtaatcgatcatttgggcctaaaaatatacggcccagtgttaacaaaacaggcctttttaatatccgggtcggactctattaaggccggatctggttctacggcggcgactcctcctcctgactataacaaaaacaacacgcggtggggagggcggtagtatcagacagatcgaaaatcgcagcggttaaggttccagctactgaaatctatcaacgtcgaagaagtgaacgatggggaagaaacagcacagcaaagatcggatgttcataacgaagacggagtgggcaacagaatggggaggcgctaaatccaaagagaatcgaactcctttcaagagtcttccttactattgctgcgcgtatgtttcttccacgattccactactttcaaattgggtttcaatctctcctaatttcaatctgtttgttctgattcaggcttacgtttttgccattcgaagatcctgtgtgtacaatcgacgggagtgttttcgagataacgtgagtagtttgtttcatagtgatttaagcttttacttaaggcattaagggagcttaattattgacttttgggaatttgcagaacaatagtgccttacattaggaaatttggaaaacatcctgttactggagctccattgaaaggagaagatctaattcctctcatctttcacaagaactctgaaggttctcttctttcttctctctttacctatgttatctgatgccttgtgatttctctcatctttgatatgtggctgccattgtaggagagtatcattgtcctgttctaaacaaagtcttcactgaatttacacatattgttgctgtcaagactactggaaatgtattctgctacgaggtttgtgttttttttattttgctttgcttatttttggtttcgatgattcttattgttgctgtgtaaatttaggcaatcaaagagttgaatatcaaaaccaagaattggaaggagcttttaactgaagaaccatttacaagagccgaccttataacaattcaggtaactaacctctttctctctgcttgaagctttttttgcaatgggttagtgtcttaaagcattttttggtaacgttttgcagaatcctaatgcagttgatggtaaagtgacggtggagtttgatcatgttaaaaacggtcttaagatcgatgatgaaggtttgatttcagccctaccccgaccaagcaatttatcataaaaaaagttaagtttaggttggttacgactccaatatatgatgtttt

SEQ ID NO: 37262 - DNA, 1667 bp, Arabidopsis thaliana landsberg
tatttttatatatctgtctctgtgtttgtgtttatatatcttcaataaacttttcttttgatgaaattagaattgtgggagaagtagcttcaaccggaaaccatcaatggctgttctcagacacattgtttcaggtttgttcacttcttttttcttggtgtttgatatttctcatctatgagctataatgtatgtcccattatagtgactgcatagaacatttcatgatgaagaagaaaaaagatttgatattcgtgcgtttgattgttttgcagtgggaacatgagtttcagaatcagtttctctgtggcttcaaggtaatttatattttgtcttctctccaagtttaaggattcatatatacattttgaatcagattcttatagggcagtttacttatacacagactatcgcaatcattccactaggatccagcggccttgttcaactaggatctactcaaaaggtttgcatatataaatgtataacaatgttttcttgttgtgagtcatggtctaattacttactgtctttgaatgtatgtgcctatcaatctttagattcttgagagcacagagatattggaacaaacaacaagagctctccaggagacgtgtttaaagccacatgattccggtgatctcgatactctgtttgagtcactgggagattgtgagattttcccagctgaatcttttcaaggatttagctttgatgacatcttcgctgaggacaatcctccttctttgctcagccctgagatgatctcctctgaagcagcttcttcccaccaagatcttagcaatggagatgattatgggttcgacattctccagtcttactctctggacgatctataccagctgctcgctgatccaccagaacagaactgctcttccatggtgatccaaggagttgacaaggatcttttcgacattttggggatgaattctcaaacgcctacaacggctttgccgcctaaaggactcttctcagagctcataagcagcagtcttagcaacaacacttgtagtagttctctcacgaatgtgcaagagtactctggtgtgaaccagagcaaaagacggaaacttgatacatcatcagcgcatagctcaagcttgttcccacaggaggagacagtaacaggtcggagtttgtggattgatgatgatgagagatcaagcattggagggaactggaagaagcctcacgaagaaggtgttaagaagaaaagagcaaaggcaggagaaagcaggaggcctaggcctaaagaccgtcagatgatacaagaccgtatcaaggagctgcgagggatgattccaaatggagctaaggtaaattaaataataatatagtttagttttgggcatccaaattagagattaacaaatgcattctctaataaatttcgatatataattcaacagtgtagcatagatacgttgctggatctgaccataaaacacatggtgttcatgcaaagcctcgccaagtatgcagagagactcaaacaaccatacgagtctaaggtaatgaatcaaatatatccattcagtaagtacacaagtgtttgagtattgatccctgaatgatgtttatcagctggtgaaggagaaaaagagaacatgggcgttggaagtgggggaagaaggagtggtatgtcc

SEQ ID NO: 37263 - DNA, 2654 bp, Arabidopsis thaliana landsberg
ttgcggaatcggatggttctcgtgagtagagagtattaagttttttttgagttgaagtcaacgcagcttctctatattcagtttagatttacaagctatcttcttgttttgcagctttctcttgggttttgtgttccctttcttatggtactatgcaacatttttatatttcgggaactactaccgcaaggatcctagagaaagagccggccttgctgcttccgcaatcactgtaataactctttttctctatctcatattactgtatacgtttttggagagaatgatgaaaaattgaaaatctggtgatgttgcaggcgatgggattctccctcttgctactagtgattgttgttttctggtggctctaatgggttctctgacttatacgccataatcttgagatatatatgatggaaagtctcatccttgtcaaaggaaaaaggaggggacttagatatatatataaaccctatatacacagattatagttatacctctctcaagctctgtatcattttcttctcaaaaatctgcagtgtgtacaaagaacagaaaatacaataataaatgagtaaatggttgtttctttcttgagctcgaatgaaatgtttttacattttttctgcttcttatgaaaccagtgtttgttcagtattttggttgaacactgattacatcaagaataaagatgattatttatgacaaatgcagtagaaattggattgattaccattaattatgaacgattttgaagcaggagtactttttatcatacccaattttataagtgtaaattaaattatttaacaacttctatagactataaatgaaatcaagactgttactaatttcctgatttgcccaaagcaaaaagaagaacaaaaaaacaaagcatcgaagagacaaaaagatgaacaataaatttggcgggaagaagccgacgggaacaccgtcactagcgtggtcgacagtcgtagttgtagcctctctgctcgccggagcctccgtcgttcacaatatatacaagccagatctcgtaagttgtctttctttacaaatgtatgtaaggtgttcgatgaaatgtctagctgaaccaaaaaaatatgttttgaaaatccgtggagaatggagatagatgttctgataattcatttcccttttcgttcactttggttgcagacattacctcagatcgaaaacgatgaaggagacgagaaggaggagtctgcaaacaaaggttaattctattttgtggtttggttagttaaatatctggcattgatttctcaaactactttgggtttcagttattatatacttactacttagacctctgtgttatgtaataagctcacctacggatcaatacattttgatccatccagtgattggttgcaatagatgactaattgtagaagattggttatcaatttttgattgttaattgtggaatgcccccacagattttagtggtagccaatagatggctactcgttatagtaaattattcgtactaattcgtactaaactgtacagtaaattggatttggtgaaacaagattagataaagcacacgagctcttgagaaaataacatgagctatgtatttttgtaatgtgatgttattttatcagctagcccacactttttgacgagatcaaacctatctatgaagttcctaccaaaaaaaaaaacctatctacgaagtcttccaaaacaaccatttctctgcctatgtaacaaacattttgatgatttgttattttgttctctcctcggattatcttttaaccggatcaatgtcaggactcaagcctatcatctcatttggggcccatattagctttctacccaaacaaaggctgagaaggatggtggagtactttcaaaaatgcgattttacattatatacatagtaaaatattaagtgtctatgtaatattttacacatgtgtacaacaaaattgaactaacatacaacgaattgagataagccatagaaaaattctatgagacagggaaaaaaaaacgtatacacagatttaattaaattttatcctcacaccaagcatgcagaaaacagcgtagaagaacattaacaatttaacactacatggatgtaacagggaaaacggcatggaatcgtgtgtagaagatgaaaaaaataaagacagacaacacacctaaataagctaatacctaggttgagagaaatacgcggagagtggtgacacggggcgtggcggtttgaagagggacacatgtcgcggcgaggcgattccgtcgatttggcaggaatcagatacattgaggaggccttccttcccgtcttcacggacggtactcctccccggagaagagctcaggccgtactttacgagcttaccaatgccccaagactttttcttggtcggagttttcttataagactcggccatgttctcgctcatatactgcttcaatgcttccaacccctgtttcacctgtcataagatttaaactatgtcactaacggatgagcaagaacaagacattttagtttatatgtctcaaaagtttcgcgtaccatgcttgtgatacaagtcatgatctaattccgtagatcataaggcttgtgatacaagctatacctttgattatattattttttg

SEQ ID NO: 37264 - DNA, 1810 bp, Arabidopsis thaliana landsberg
  unsure (1)..(1810): unsure at all n locations
atggattttcttttttttgatatatttggggaaaaaaacaaaagagtagaggttttagagaggtttgttggattgttttgctctcaaaatttctttctcttcttcaaatgttcattggaagaccaataccttatcttctactatcttcaccttccttccatggcttccgctgcggcggcttctccttctctctccttaaacccaacctctcatttccaacaccaaacttctctcgtcacctgccttaaacctcctccctcctccgccctcttccgccgcaaaacccttcctttcttcgaacgccactcacttccgatttcagcttcttcttcttcttcttcctcttctacttccctctccgttcacgagaaacccatttcgaattcggttcatttccacggcaatctcatcgagagcttcgagaatcaggactcttcatacgctggaaccattaaaggagcaagcttgattgatgagcttgagaatcctgtcgaaaggaatggactttctggtcggagaagactgtttatgcaagacccaccatggatctctgctttgtttctcaagggtttgagtaaaatggttgatcagactttgaaaatcgagcggaaagatatcgataagaggaaatttgattccttgaggagacgacaagtgaaggaagagactgaagcgtgggagaggatggttgatgagtacagagatttggagaaggagatgtgtgagaagaatctagctccgaatttgccttatgtgaaacatatgttcttgggatggtttcaacctttgaaagatgtgattgagagagagcagaagttgcagaagaataagagcaagaaggttagagcagcttatgctcctcatattgagcttttgcctgctgataaaatggcggttattgtgatgcataagatgatgggtttggttatgtctggacatgaagatgggtgtatccaagttgttcaagctgctgttagtattggcatagctattgagcaggaggtatgaatgagtagtaagttaatttgtttctataaagaaatgatgtgttgagtcgtggttttggttgatctcttaggtgaggattcataacttcttgaagagaactaggaagaacaatgcaggggactcacaagaggaattgaaagaaaagcaattgcttaggaaacgtgttaatagtttgattcgaaggaaaaggattattgacgcattaaaagtggtgaaaagtgaaggtaccaaaccatggggacgagctacacaagctaaggtctggctttgataattcgtttgagtgaaattatagtatttgcctttggtattgacacatttcatctttgttgttgggcttatgctaaatttcagcttggaagccgtctgctagaactattgatcgaagcagcttatgtgcaacctcccttgacccagtctggggactctatacccgagtttcgacctgcattcagacacaggtttaaaactgtgactaaatatccagggtgagagaaatcctcaaaatgagtacccatctctttatttgtttttctagtcagttgttttatgtatagaaccgtctattgcaagaaagttgtttttttctcaactgggatatatgcttatggtgtagagtttacttatcactggaacttgcaggtctaagctggtgaagaggtatggagttattgaatgtgactcgctccttcttgcangactagataaatctgtgagttaagatgtcttttttatcattccattcatgagctgttaggtgatcttttattggttttttggctcatgcaggctaagcatatgt

SEQ ID NO: 37265 - DNA, 961 bp, Arabidopsis thaliana landsberg
gtcagtcttttattgatactacccttttacttgttctttttcatcagttgtgctcgtggtagccccaaacggcaggtattgcttgagaaagctggtcactttcaggtgagttagagaaatacatacctagagaaagagaggagaaggtttaaagtatgttgacactgatggtcgtgttatgttgttataggtgccttacctggaagatccaaacactggagtcgcgatgtttgagagtgcagaaattgttgagtatctcaagcaaacttatgctgcctaagtgttcgtcttcctcactttataccgtatagatatatgttaattgttgtgtgtatgttcagcctactttctgttccaacaataaactgaacgcagttatctgtagaggttttaaatgaagacatgtacttatatataagtaaaggaattgtgacaataatcctccaagttttgattttcggtgtacataatttgaaggtgatgatgatctatcattttaaagctgattttttggtaaaataaataaatagacaaaatcatgggatggatgaaaagagactggaagaggcacatgctgattgtccgagaactacaagtggtccgagtccgattatatatgattacaaaagtctatcaacagtcaacacattgtggtccgttttatttaaattttaatttggatcatcttttgtttctttttctgtgtccttttgtatatagatttttccaaaattagttatttaaccaataaactaaaacaaattcggaaattcaaatctaaagtttcgaaatatggccatataaattgtttgtttgttgctagtggctgaattgtgtcgttttgtgcacttttagttacttgttgttatggataatgctagctaattgcttgttatgattacattcttatcgatatcttaagctaagaaaattcaatttatacatcaatggagggaaatat

SEQ ID NO: 37266 - DNA, 1982 bp, Arabidopsis thaliana landsberg
aggtacaaaaacaatcgaatgtgggaagatatttcttcttgagggcatttaatctcataggaaacctcatgttctcgagagatttgcttgatcctgattcaaaaagaggatccgaattcttttaccacaccgggaaagtgatggagttcgccggaaaaccaaacgttgccgatttcttcccgttgctaaggtttcttgaccctcaaggaatcaggagaaaaacgcaattccacgtggaaaaagcgtttgagatcgccggagagttcatcagagaacgaacggaggttagggagagagaaaagagcgacgagaagacgaaagattacttagatgttcttttggagtttcgtggtggcgatggagtcgacgaaaaaccttctagcttctcatcaagagatatcaacgttattgttttcgtaagttatgcataccttaattaattattaccaacattcttacaatcatatgtacaaattaataaagtttattgataggaaatgtttacggctggaacggatacgacaacgagcacgttggagtgggcactagcggagcttctacacaacccaagaacactgaccaaactccaaaccgaactccggacctacttcaagtcctcgaaccaaaagctccaagaagaagacctaccaaaccttccctatctctcagctgttatcatggaaaccttaaggctacacccacctctgcctttcctcgtcccacacaaagccatgtcaacttgtcacatcttcgatcaatacactatccccaaggaaacacaagtcttggtcaatgtatgggccatcggacgcgatcctaaaacatggatcgacccgataatgttcaaacccgagagatttatatccgaccctgacgcccgagacttcaagggacaagattacgagttcttgccgttcgggtcgggtcgaaggatgtgtccagctttgcctttggcatcacgggttttgccgttggccattgggtcaatggtgagatcgtttgattgggctttagaaaatgggcttaatgcagaagaaatggatatgggagaaaggattggtataacattgaaaaaagctgttcctttggaagccattccaattccttatcgagggacttaatttcttttcttcttttctctttgttttctttacatgcatgtgtacagtgtacttgaacacttcaaatcatcaaagcaatccgatatttgtacccaaaagaaaaagaaaaaaatatctaagaataatttggcgttattgtgggagatttgattcggtaaactgacatagccgatccagtagtgaagctgaccacatttgggctttattgtctgttttgttataaaaaaaaggatataaactaaagtttttcgctatttgtgcatcaatgcatacgttagcacgtagacgtggcatccaactagcaaccaaccccaacgtcctttccaaaagtcaggattgtagcttgttggtctccaatctcccttactctacatagatcaattgaaaaggtaattcattatgctccttaaacttaagataatcatatcaaagatgcaccgaggaaaaaaaaaggatcatgtcaagtagtataataataaaaaaacgtgcctttaggataggtctttgggttggtatcttactaatgttttaccaagaggatagtatggtcggaacctctccatatcataagacttactccggaccaaatccctgaccgaccggtgatcagcaacacgtttcagagaacccgacttcgataagttaactttttctagaaattaatagctctatttcatgaatttttaagtggaaaattttcattacatgtttatattaacttgtcactgtgacaaactatcagtaagtgttaggttaatacctaaactcaatcaaaattataaaagtcaaaagagaaaaaattaaccaaaagtagtaacatccgaaaactaaacacaacgcttttctaaaatgttcacaaac

SEQ ID NO: 37267 - DNA, 3752 bp, Arabidopsis thaliana landsberg
taagctgatccgacatggttcctctttcacaaaccataacatttggattcccagccagtctgatcttctcagctgaattctccatgaccttagcatatatataaccagtcatcaaaagtattccagccaaatattttgaccagcttgaaaacggaggaagaaagaactcacagaaggagcacagaattgtcctttcttaatattgataatttttccggtttgtgctgctgcgaccagaagatctgtctgtggaattacaattaacaacttaaatcatcaaccatagaacagatatcaatccaagatcgacagtttgaaagctacaatcaaaagctttgaggaaaatacagtttagagtctcacctggcgacataagaatgctggaatctgaattatatctgcaaccttgccaactgcttcacactaaggaaaataaaatcacacattagaaggtactaaagacttgctaaatctcaatcttttatgtgattacgttcatttatacctggcttgattcatgaacatcagttactattggtagatcatatgctaccttcaccttctcaagaatctgcgttggagaaccagaaatgtgaccatcattattcttgttcagaaaaaaaaaaaattaaagcaatttcacgttcaagtatatggtagcatcataggggagagtaatgcaatggctgctatcaattagtttacatatataagatcgatcaatactctgtgaaggttctcatatccacagtcctaacatccaattcatctatatttagacatcccaaggcataaaaagagtgattaaaggtatacaggggaagataccttcagaccctcggccatgccaggaccacgaaatgactttgaagaagttctgttagctttatcaaaacttgacttgaaaaccaggggcagcccaactctacaccattcacacacacacacacaacaaaagtagcataaggatcttgaaaaaagaaaacacattgttcaaagttcatctctcagttgagttctctactgtaatcaattttcatatagagatcaatacacattcatacaaagatctctcagggggaaaaaacggagtacaagaaatcatactttgtggaaatgtctttaatgtgctatgccattcgaagaatatgttcctcggattcaatcacatttggaccagccaacaagaagaatggttcagcagcctatatacgatatacgtattagaatcaaactcgattttaccataagaagccaatattcaacattctgaaaacaaaaaggcgagactcaaaccttgagctgattgtacaatagtgatgttgccgccattcttatcgccaagccaatgatcgcaaaagaaaatcagaatcagaatccgaagatcgggaaaacctaattcttctctgcaacgaagcaaataagaaatggagaattaaggaatctgacctttaacttgatctcgaagttgctgcagagtgagtgaagaaggcaagtgagatctcctctcacctttagcgcgtcgtgtaaattggagatattaactgagaggtgatgtttggatacatggacagattaattcctatccaggataagaacgtaggaatactcgggacagattaattcctatccaggataaggacgtaagctttactcggagacaatgattcaaagacgtaaccgaacaaaaatgaactaacaatgatttaaagacgtaaatatcatttccattatattttcagacaagtattaacaatgagagatctgaaacagagaacccgcctacaaaaacccatgacttttgtctcccctgttagaacgctttcgatgacatgagtggtttgggaggtgacatagatctaagctcaggagccgagcttgggaacatcacgttcatcttatgcatcaatatatcagaccgtgatgggatctcgttcagaagaaactgttgcacgatcggtttcttgaaccactccatcaccaactctcctggtgccctcaagacgactttgctgacttcaaaaggcgactcaacagagctcagcatttgagcaattacaatcttcaatgtcggtcctgtgactagctttatacgtctcgggactactccgtagtaaagcattcgttttctgaacctgtggagagtgtgaaccacggctatgagcgcagctccgacagataagtttctcacatcgagagaccaagcaatgtgttgatcaaagacgatggcttttggaaagagtttgttctcgtacgctactttccagacacatcgagctcggtttatttgacccatcaagacaaggtagttgagaaggacattcacaaagtacctagcagctccttcttcgagttcgtaatcaatcccttggtaaaactctctgacaaacgttagaactggttgtttcctctgttctggacctgtgaagagaccacacataaaggcatgagctttatgcttggtagcgctgaggattgacatcaattgtctctctttatcttcgtcttggcatctgacaagatgggcgagaatcgaagtgtaaagcaccaagtcaacttttccagcagaatgcacgagtgtctccagcaaaggcctagctgaatcgtatagaccatttttcatgcatgattcaaataactgcctgatgataaaattgtttgttttgatccctgaagaacccatgaacctaagccatttcagagcaagatccacagaagcatctttgatatatatcatcaaaacatcgctagcgcagacatctacggaataccccattgctttcatctcgagtagtatcttcccggcaacatcgacaagtcttttgttggccagaagtgtaagaagagaaatataactgctcaggccaggccttaacccagcattagtcatggagttatagattttcattgcagagtctacttgcccagatccagcatgcatctccaatagacacgaatatgtggatggtgtcggtaaaaacccagctttctccatgtctttgaaaaccgtcattgctacttcaagctttcctgattttgcatgagattcaatgatcattgtgtacaatccaaagtttggcctgaaacctgacttcttcatctcatcccaaagcctaagagcagtatccagcttaccagctttagcatatgaatcaatcaaggaaacaaacatagttgctgatggcctatggccaaatccctgcatttccatgtaaaccttcattgatgtgtccaatcgaccagcttttcccattgaagtaacaagcgaagaaaacacactaaagcttgggcggagttttttttctttcatttgctgaaaaagctgcaaaggtgcattaagacggccggatttccccaagcttggaattatcagctcataagttgacccatccaacaaactatcagttttctccatgctctcataaatctcaaatgccttatacgggagacctttgttcagaaacaacatcattagattattatatgtctgcgtatcaattttgcatcccgactcttgagcctttttgaaacaacaaaaagcaccctccagtttctcagctttagccaatactgaataacttggtataggcgttaaacgacaaaataccgtgactactcgagtcttgaaccatttccttaaacaacgactgaatcccaacaaaatcccttccctggttcaacccatcaaacaacacgacataacattcatccaaaggcatataccaaagctgcttcttagcccacctaaacaa

SEQ ID NO: 37268 - DNA, 2343 bp, Arabidopsis thaliana landsberg
atccatcctaatactctacataccgatttatcaccttcgagccccaagaaaaggcaggacttgctcgcaaatgggattcatgagaaagagtgttgcataactgtaaacccacaacctcctgttatcgaagctcaccagaatgagctacctacttggtcaaacgagtttactggggccatgaaaaacgtttatggacctgttactgctgcaaaaacgatctatgaggacgaagaaggctacttgatcataatcagccttccttttgtggatttgaacagcgttaaagtctcctggagaaacactctcacgcatgtactcataccatgtgaaatgcctcagcacatcgagggtcccttagaagtcaagacatgatagaacatccatgttgtctgattcagcctctgagcattgcccgccaggtgaatttgtcagagagatcccattatcaaaccgaatcccggaagatgcaaacattgaagcgtattacgatggacctggatcagttcttgagatacttgtcccaaaactaagagctggcccggaagagcacgaggtgcgggtgtgtctccgtcccaacctcggtggaaacgatcttatgctgacttaaaaagagaaacaactgtttagttttcttgtttgtagaagcttattataggagtcatctctcattgatattggccactcatatataggcgttttcactgttttaatgggatttttcacacattgcaatcttgtgtacgttgtgttggaatcaaccctatccatagattcaacttggtgtttgtataaagaaagaaaaattgttatgatctctgatagtactaccacaccatgattatataataagagctgtgagtgctgactataacattcaattaaacatgtaaactgtgtgaactataataactcgttcaagcaataaaaatgaatcatatcagaaatacaatttcaggctactgattgagatcaagcaaaagctgtcgaattgcatccgaagtgagcggtatattcaaacactcttgaccatcggagtttctcttggtcttaaccagttcgtggtctttaaattccgtgagatgagagtttaaagtcacttgactgctcacaaagaagcgttcccgagacgctgaatacagatcatcagtgggcatcccatcttcatctgggtgtgaaagttggtactcagcaagaatcttgaagacattctgaccgtttggtgttaaactctgtaaaacaatggctgatgttttggcggattgggctgtgctttcctgtgcaagaaccaacggggagaatacaccttcgacattgcatggtgcaaatgttggaacatggtgccatagccagttaaactgtttgtgcaccattttcttgtcccacactgccaatggacacaagaaacatagccttaggtcaaataagcagtacataaggtcttagaagtctttgacagatagcagtgaacagaatttttttgcaatagaccttagccatgataagcaattagcaggagagatagagaatagtgcttacataatggagcgttgacatggtcaatagaggcaaccaagcgtatgtgtgaacaagaagaaagccgggcaagagtttgttgtgattcgggatctattagagcagggccgtcaatgttatgaacaacaacgcatatgaagcagtctttatctccagactgtggaccatgtagaaaggaaagaatatcatccatggagcgtgaaggaaatgtttcttgacctttagacaaactcccggaactctttcttttacatttcaaaagctcggatagaagttcagctaatgccaaaagaacctaaatttgcaacacagaaaagaacaattagtcatcatttaaaactacttcttttccaacctgaagaacatagagctgcgcaagagaaaaaattgctgcatccaaactgacaaaagagtacctgctttagatttacggaagggaggtagccattgatgaccacaacagaatagtcagtcaaagaagcagaagcaaaatcttcaactaaagctttcttagatccaaagccatacattagaaggccaaagccacacctggaagcagcaacaagaattgagaacaccagaagtatatagacaaactaaaatattcaggttctagcttcaaaagtaagagcttttctcacctgagctcaaagacccactttgagtacatagtcttgtaatcactcataagctcagatatctctttcgagtgcttcatttcaattgtagaagccgtttcactaagctcctgtaaacacacaatgcttctccatcaacttgtcaaggaaagtatctattaccaaaagcata

SEQ ID NO: 37269 - DNA, 589 bp, Arabidopsis thaliana landsberg
  unsure (1)..(589): unsure at all n locations
cgaaacacatttaatatgaattgaggtttttgacacgaatttcttttatcatggtagtattatactaaaagtaatacaaattctaatacactaaatgagaatcgacaagttctctttgaataattgaaatttagttgcggcttaaatttgttcccggcgggtccaagtcgttgagtagcatgcagtgacgacgacgagtgacgtgtgtcgcggccattaaatcttataagagctagggtctnnnnnnnnnnnnnnnnnnnnnnnnnnnnnacaaatttacatatccatgtgcgttaggtggaatcatttatccatgcagatatcatgcgctattaattcgtcttaaatttctcaataatactttggtacgtaactaaaaactatctctcgcatccgcatatcgtttaattggtttggaatacttaactttagatcaacaaaaatgtttacaaccttaactacgcattagctgataattagctcaataaaaagagaaccctaaatgtgaattttttttccacggaaatatatatgaaacttcttttggaatngaaactctgattcaaatatcgatataacgttctaaaca

SEQ ID NO: 37270 - DNA, 3728 bp, Arabidopsis thaliana landsberg
tcttagttactactaagactagtagtccaaacagaaaggccaggctattatttccggaagtaaacacagtttacaaagggagttatagactctaaacaaaccagaaactgccaaaagtcaggaacctcttgttttcttccctcacatctctcttctctctctctcttcacaatagtcctttggacagaacaaaagagagagaagatagtgaataatggaaggctgcttttcttcgtgaatctcagaatcttaaaagactcagatttgagaaaacgtttcaatatctaaatccatttctctccctctctctttagccatttagaatgaagaaaagtctcactctactcctcctcctcctctgttctctcctcttctccaccgtcttgagcaacctactcgtcgaaccggtccaacccaacaccgtaccagccttccccgtcgaaacccaagctcaaagctgccgacttgacctctccaacgagctattcggtggcgtcaacgaagcttgcggaagaaaccttgaccggagtcgatgttgccctgttttagcagcttggctcttcgcagctcacgctcgctctgctctccagttaccagctcctgctccgactccggaatcttctgatcccgacgaacccatgaagcctgacgattctcagaagtgcgtcaacacattgcaaagcgctctcttgactaaacaaatcaagatccctcagcctaactctagctgcgatgcaatcctctgcttctgtggtattcgtctccaccagattagctcactctcttgtcccgccgctttcaatgtctcctccggcttcaaaaacgcaactccgaccgccgccgtgaagaatcttgaaaaagaatgccagaactcttcttactccggttgtaccagatgcctcggtgctcttcaaaaggttcaatttttataacttaagttcaaatttttcgcattccgtcacattaaattttcattctttatgtccctagtccctacactaaggattcacagagcatttaatgaattttttttcttatccttaaaagcataataaatgttttgatttcatttgcgtgaagtcttcttcagaatgttcaagtagctgtcactctctatccatgagtaacatgttcaccaaactcacaataacaaattttactgttaattttagggtttatgttgaaagagacacacacaagcacattgttggtttttctttggctatccttttaggttgcaaacaattggagatgtgctttttcagaaactttcttttttcgtatagacccaaagcactgcaacactctgaaacccttcactttcacacgcaatctttttgttttccattatattaatgaatcttgttttttgtttcaaattttgatgggtggatttacagctaaaggtaagaggaggaaacaagaagacaacaacagagagagggactaagatgatgagcaaagattgccagctcatgggactcacatggctactagctcgtaacaaaacggcatacattcccactgtttcggctgtgttaagagctattatgtatagtccacacccacctcacctcaacaagtgtagtcctgaccaagagaacatgcctttagcagttgactctctacagtttcaaaagagcttctcttcatcatctcatctttttggggttttaccgtttttacccttagtcctttgtatctttctctttctactgtgatttttttctgtattttttggtcgggaggggtaaagagagtcacgtgaagctacaagacagttatgtgtatgtaaatgctgtgctctttttttggttctgcaaactcttaaccctcattttttggttttaactgtgttttgtcccatttaacactttgtacgaggtcttgaaattttaaaaaatcatcttggcatttagaaagttgtcatattggactatataagaaccatatcatgtgaacttaataaacaattacaaaagagagagagcctttggtagtcgtcgaatcccaaggactttacttacttaacattttggtcgtggccacttatgtgaatgtattccccccaagtcaaatccaaaaggcattggaattcctcttattaatctaatactaatttataaagtggggtgttatgtcccccaagccttacctttatttttgacaaactatttttgcgaaaatttttttgggaaccatgtcaatgagaaccacctttctaccataaaagtttgaaggttttttaaactgatctcactagagtaaaattaactgcttaaaataatacatctcaatgaagccctgaaacaacaagtgagaatgcaacagtcaccataataggaggtctttaaatataaaatgaatatcaataataataaaaaaaatcattgagagaatcaagaagagatttgtggctttgtatagacacttaagactctttaccacttatttaaagacactacttttcatgtgtttccttttaattggtcaatgtgtttttgacattaaaatattaaatcttttgattttgagacactcaaaatagtggttcactaatgaggatgctaatgggcttgctagataacttttttttttcttcttttacaagaaattgaatgatacacgtaataagttatttagcttattgaaaagcttcgcattagactttaaagacgtcaccgagtcaaatttcggttactacaaactccaaaactcatattcaagctctctcttctcactttttcttctttggcctcctctacattaccaaagtttcatcaagattgagtatggagtggtggttaaacggaggtgtttggatgatgatgatgacgacgaccatcatttcttttgttaaagctgaagatacccttttttacaactggagggtcacttacggcaagattgctctagacactttgcctcgaagggtacattttcttccaaaacggcttcttgcttctcgtgtgtttgattgatcatgcttatattaatatttaaaaacacatagggaatcctaataaacggacaatttcctggaccggagattcgctcactcaccaatgacaatttggtcatcaatgttcaaaacgatctcgacgaggccctttctcttatcttgggatgatttatttcccattcttgaccactttctgtttaatattagcgagctttatcagcccttttcaatagaagtttgagttatattagaagaagtattggagtttggtaaattgtatgaagaacccaatttgcatgcacatgcatgcgccatacgtttcttcaaaatcttgttaatttgttgggtattattagtgaacacgtaaagttttcatgttaattataatatcaacgatctaataaataaaaaaagtgataaatgaaggaatggagtgcatatgaggaaaaattcttaccaagatggagtgtatgggacgaattgtccaatcccaccaggcaagaattacacttatgactttcaagtcaaagatcaggtcggtagttacttctacttcccttccctcgccgtccaaaaagcggccggtggttatggcagcctccgtatatacagcctccctcgcatccccgtccctttccctgaacccgcagaagatttcaccttcctcgtaaacgattggtatcgacgtaaccatacggtacatttcttaattatttactagtcatgtttaattagtatttttcattgacgtatatatgatgaccat

SEQ ID NO: 37271 - DNA, 2104 bp, Arabidopsis thaliana landsberg
  unsure (1)..(2104): unsure at all n locations
gtgaaaataaagaagcgtccacttattgttgtgaaggttaaggttcataaatcacattctttactacactctagcaaactgttaattaggattcaatttgagttaacagcttcatcttttccagcttagcacaaaggaggaggaaacagtgtatagtatcatcttgcagaacgcagaaacagttgcattagtcactcctcatcaaggttcttggtcttgagtctcaccctcattgcagtttgctactagttattagttaacatctaatagtttctttttgcagtaaactcatcaggacgaaccgctgttcccgtgacctcgctgaaacccggggatcaagttttgatcagattacagggcggtgcacgccataccggtatagagattcaggaattcattgtcgagaactgatcaaaaactttcgggtaacattgaaacatatcaaataaaatgtgtctatcaaataaaataggttatgacatgtattctatttataagactagctagataggttatgacttgttggcacattatttctttttatcattcaacaaaatagattgaccaggaaaaaaaattaagtgaacagccatgaatctctctgtattgtgtggtattgtctgttcttgtaactattattaggatagttgaaaatgtatatatacccttcaaaggcctcaatccaaagacgcacttccttcattttcctttctagttttatatttcaagttcttttttttttaaccttgccatcaatacaaccatggcaaggatttctctgttgttctctttagccttagttctagccatcgggtccgtcttggctcacccacctacccacaagaaattacaaaagaccttgtgtccatctactttgtccaaagttcaagctttcccttaccttgaagtctctagcttcgtcgagaagaaggttcagttcgcaccaaaaaccattgcgttcaagtctttgttctccatctgcaagagctacatcgactttcttgggggcgttaagttttctgcctccagagatgtgtttcacgtcgttcatgtcaaattcactttgatgaccaaggcgatggttattgcacaagcacacattggagttgaaggagacctcgctgttaagttgggcaaaagctacaccgtgatggctgaaaggtttgtcaaccttttggagatgatgtctacggtctcggccaagtataagttcgatgctaatgctaagataagcgctagtgagagtgctgagattgaaaatgtgtgatgaagttgaagagtgccattaggtcttacgtgaaggtgatctctcagtgcagcacgaaattctctgctggaaagagtattggtttccccacttaccccgttggtttcattggaggtatagctaaacaaggtctcggatatgcgggtaaaattgttggagctcatggccaagttggagccggattcgaaatcggagctaaagctaaggttggagttcagagtgaaaaattcttggagtacggaccaataactaaacccaaaggtagggttggagttcaaggtgaagttaaagtcggaggtcaggtccatgccgcgggtaaggctaaggttagagctcaagttgaagctaaagtcggaggtgaaaccggcagtggatattatgatggaatcatgaagtactttggaaaaggtcacttcgatgccgcaggtaaggcgcatgtcagtggaggaagcggatnnnnnnnnnnnnnnnnncctcacaagaagcacttagattgaacaaagggcacaagtttatacaacagatgaaggagccatgagttcatctcttatttttatttttactattatatgaaggagggaaacgccatgcgatattaatctctatttgtaaccattttaaaaacaaactatatttgtaactcatcattaatataatatcgcatgttttcttaattacactatcgttagtattttcattagaactaacatataaaaatagtatactagagtagtgtcaataggtccacccaaagttggattgttttgatatcggatatttttctcttttctactaaaattcggattggttttgtgttaccaagcgaaccgatcaacc

SEQ ID NO: 37272 - DNA, 2050 bp, Arabidopsis thaliana landsberg
tcatcatcaagtacattcatcttcttcttcgtgtagttgttgtttaatgttaatggtgagaatatatatagagctggtgaagcttataaaaatagtaatggtgcaaaagaattatacttattccgaaggtttaatgcttctggaacaaatactcacacagaaagacaatatctttagttgtccatggtttcttatatgttctcatatttatctctagactctagttcagcatatagatagaccaatataaaaatatatgatataacatgtacggttgacgtggctagtgtctaaggttgccactatatgtattcatgaataattcaagaacaaatcgaatagtagctctattgtttttagaaatttaattaaaaaatttacatgaaacgtgtggagagtgtttttccgcatccacataaaggagacggattgtgagagatcaaatcatgagaaattgattctttgtagtttgttctttaggagccaatgatggcaccttcttaaatttattttttactttgtacctttttaatatacaaatagttttttgaaaaaattatttgactgcttttatattcttctctcggctcattacatgaacctcttctcaattattgaatttcatataattcaaaacatatttgctaatacagtttatgtttacatcttattctatatagacataatccaagaatataaacaaaaatggtgtaaacaaacaaaaaggctgagaaatggttaggatcggagaataaattctacaaagaaaaagattcacttttttcccatgagagggaaaggttatgtatacatatatctttcttgttttccaaaagcaaatgcaaagttatttgaagcaacaaaagcgcaattttattttcaatacttttgctctcatgtgatcttcaaaagccaacgtattagtacacactgaacattaaaccgaactcatttgttttgtgtgtttgaaatcggctcaaacttcttttatgagtagaagaattcaacaatgttgagcggatcggagtcaaaactgcatccgactcaaaaagataactcaaatagtctgaaatatttcaaggtttagggtttgaaaacatgttgtttagtcaatgtttactatcaagtaaaacaagatagttcaaaatataatatcaacgatcaatgataaacatcttaatcgcgttcttcaacgataattgtgacatacataaaaaaaaaaaagcaccatgttttgaatcatgccaaaatattaaaacaatgatagatgccttttatatttcaccaagacatagacaactctaaagtctaacccatgtttttaacattggttattgaatccaatttcatttcttaaaaagataccatttgtgaaagtaagcaaacaacaaaaaaagaagaagaaacattctaatatacacatcatatgcatttcaattcccccatatcttcttatacatacccaaacgtcaaacatattttttcctttccacacaaataatctcaacctacaaaatcatgtagaaactgatgattactaccaccaataaaatctctcccaaactgacgattttgcccttcatacccaccaccaccatcgccactaccaccatcaagaccaaacctctgagcagttgtcatcggaaaaggctccggtaacccaatctgatgatgaagccctaacgtcaaagacactcctccgtttgtgctgctattcatcaccggcacattcgacgacccaattccatacgagaaaccaaccgcactaccgcagccgctcccactgtttacatagctgttgttgttgtttgtgccatgaacgtcgtcgtttcgtgcccgtctaggcggagatgagttgttaggtctttgctgtgccgaggacgaagatgggttgttgttgttgttgtcagggaagacggtggtgctagtacgttcgtctctccaagaggaagaagaagatctctgagattgtcgagtctccagcatgtgaatctcttccaccatcggcttacaaaccctaactcttgcgtttatgaaccaattcgatacc

SEQ ID NO: 37273 - DNA, 1069 bp, Arabidopsis thaliana landsberg
gaatttgtagatactcctacatgaaagaaaaatgaattacgatatcaaggaccagcctaattattttattttgttagcctaattttcatttctacaaaacatatctccatcacgattttattaaaacaaatcccataattcgattttattatgtggatgtcatgtttacacgtgtcatattacaattcgttaaaatacagtgtctcttctctgtccgactgggcatgacagatcatccaagcaaatcaaatacccaactctcacacgttctcaaacaaaaacttcaaagagagagagagagagagttttgtgaactcaagaaaataaaaaaagttatagttaatgggattcggcttagagagtatcaaatcaatctccggcggatggggcgcggcggcgcgttcctgtgacgcttgtaaatcagttaccgccgccgtgttctgtcgagttgactcagctttcttatgcatagcatgtgacacaagaatccattccttcactcgccacgagcgcgtgtgggtttgtgaagtttgtgaacaagctcccgccgccgtcacttgcaaagccgacgccgccgctctttgcgtcacttgtgatgccgatattcactctgctaatcctctcgctagccgtcacgaacgtgtccccgtcgaaactttcttcgactcagccgaaaccgccgtcgccaaaatctcagcttcttcgacttttggtatccttggctcatccgccaccgttgatttaaccgctgttccggttatgggtgatgatctcggtttatgtccgtggttacttcctaatgatttcaacgaaccggctaaaatcgaaatcggaactgaaaacatgaaaggttcttctgactttatgttttctgatttcgatcggcttattgatttcgagtttccgaattcgttcaatcatcatcaaaacaacgccggaggagatagtcttgttccggttcagacgaaaacagagcctctcccgttaactaacaatgatcattgcttcgatattgatttctgcagatcaaagctctctgctttcaccttacccttcggtacgacaacca

SEQ ID NO: 37274 - DNA, 4619 bp, Arabidopsis thaliana landsberg
cggcttatgttttgcgcttaggctttagtaaacacagtccgagaaaacaagcaagaccatagaaagaaagtgcagaggaagagaaggttacatacatctacttgagacgatgtcattctaggaatagctactgcggcgttttcttcaccagcctcttcgagtgacctttttaactcggtcggatcaacctccaacaaactgtacaagtaatcaaatggcgggaaaaggatttagaacttgatataaatcaacatttacgagactatttcatacttcttggagaaagggacaaatcacctagaagtgcttccttctttcaagtaaccaagtgaagcctcaaactgcgattgagaaggtaattcgatggatgaaagaggcagctttctgttctccttcaaactcatattgactgccactgacgtttgatgctctgagaagtcctccatataaaagccgatggctcgatgtacatcccagttgcagactttaaggcaatagattgcctcctctctagtcgctgtactagccgcctcgcagaatgaagagatccattcatttttcagtagagacggttgctctggcgaattcggcggcgcctcagcagatttctggctcgccgaaaccaccggcaaggttttactgcgacaagcctccacagcccgactgaaattccacttggatccctcaaggtaatagaatgcttcttctcgagacactttggtttcatggcagattcgatcaacccaagttttcatcggcggccaaacactagtactttcctggttttcttgagtctgaatggagaaaatgtaagcagtgtatgcgtcaacattgagttccattcttattaactatcttaagaaaacagagaagtccatcaagaaatgaaactaagattctaaatttagcaaacacaattagagaaaacagcaagacaataaccacagagtgcagagaaggagaagattacagtacattgacttgagatgacgccattagaggtggtatagcttcagggatctgttctcctgtcgagtcaacttccatcgagctgtcaaaggtaagaaaatggctaaaaattacacacaaaaaaacccttactcgagaaattcaccagaatcagaaagaaaaaccctaaacacttatatacgaaacaaatccatactcagaagaagatctcccgattctgagtggtttcgagtaatctagaaaccgcgattttgaatctaatcgtagaggattcgacttcttttgaagaggcgttgcacggcgctcgaccaagaaactgtcgacggctaggtttatattccaattgcttcgctcgaggtaagcgcgtgcctcttctacactaactccagcaaccgcgtagcaaaatcgtgcgatactttcatttctcgattgttcatccggcggattccaactccgaagaggatcgatcattaatggagttgtcaacgacgcggagttagcgttcaccggcgtagattcaactgtgagggacggcggaaacggagaggtttggttgcggcaagcctccaacgccgaatcaaaatcccagtggaatccatcaaggtaacaaagtgcttcttcttcacatactccaagttcagcgcagattctatcaatcagatcagccttcgccgttggtgaaaggtgttcgtccccaatttgggcgggacttctactttcttccatccagaattttgccaagaagacgatggagtttcttgcttaaaacagcgtcgtttggagtgaaagtgtaagaggacgtcgtataacgcaattaatccacaaaaacggcaggggtaaaaatggtaagtgtaaactgcaaaacagaggcaaaaagaagagaccgttcgaacttcttaactaataaaattgacaaaaatctatattgataattgatattttatacacactttttatttaaaaacaaaacaaaaaaaaaaagttgagaagaaaaactctaacaatatagaaatggcaaaatgggtgcaaaataaaaccacattttctttcttttttttgtattgattaaataaaaactatctcttataagttgcaaccaagctcacatcttcttcttcaagtttttgctcctcaagctctataagtctcgcaaacacaccgaccaaaggagcagtattgtacgtacaagcctccgtttgaacgtaattacccctccggtcatcaaaatcatcctggtgatccggtcctccaaccaaagccccgactaaaacactcggatttggctcggaccgtccataccaattatcatatccttgagtacatcctataaaacctttgtgctctttaaaagaagcgatagacgcgcctcgatgatgaaccctaatcgggtattttggaccgtacccgactagataacttgtttccattggatttgatcctaaaatgtaatcgatttgagatttcgcaaagccaagcatctcgtcaggagttacggttccttcgtgacactcgagatcggtgtttgattttcggagatgatcagaatatacggttaggaggaaagatgctgtggatacgtattgcatattgttccattgtcggacgtagagtaaaccggcaggagttcgctggacgtttgtgccgttgatgttcttgttgagaattgagcataggtaatgatccgcctttgatttgtattgttgtaggactttagaatgttgcttgtgcttttcttcttttagcaactgaaaaatgaggcaagtgttgttagtgcttaaaactcaagtaaatttcgtagactagttcatacataagaatatagcttcttcttttttgtcaatcagaatatagctaatttatcaagtaggtttagaatcacgtgccataaaacagaaccatttaaagagacgtatccgcttagacttagaggaacaaaagcacgtgacctttagttttgtttctgcttcataactaaacttttttctaaatgctagtactaatatttagttataaagtatttcatttgcatacaaagagaaaatatttgaatagttgttgtacatatgtaacgcggggtggggaataccttacttttggtaattcgacgtgagaatatttaaactcgattgtcactgcacataaggcaattataagattctacttaaatcttaaattagactactaagaggttagtgctataaatatttcacttttaccacacacaaaattgaacaatatgtaagtactaaccatggaagctaggagttgaacaccggcgaacttgacgtcccagctaaactcggacatggcccaagaaaggccacctagttggtgagccatgtcaaccacataactcatatagtgctcattgtcggtggctcgataaagccaagtggcaccccataaaagctcgtccatgtacccactcaccgaggcataataacttttcacaacttttagactctcatcgtattttcctctgtacttgtctccaaactcaaacaactacaaccaaaaccataaccataacttatttaaatgtcctacccaaaaacattaaaatgtctgttccaactgtaacattaaattaaatttaaaatgagtatgtatgtacttgttgggcatggtgcaagagaaggtgagagtaatgtggatttgttgaacggaaaacgatcgaagctgccgccatagccgccgcagtttctccagcgatatctgatcccggattattctcatcgatcttgaaagctctccgtgaagtcgtcatgtcctccggtctttgccaacagtagtggtcagtgtcaccgtcgccaacttcggcccataagacatttgggcttgtgtgtgccttgatgaagtagtctgttccccacttgatggcttcaagcgcgtgagataactctccggtggaagcgagtgagtcaccgtactctattacactccatgacaacattgtcaccgtaaaagccatcggaagtccaaatttaacatggtcgccggcgtcgtgatatcctcccactaaatcaacctttataatcaaaaatttaaaatcaaagtcacatcacaaaataaaacaaataattaatttcaatacttaattcacaaaaggttttcaagtctcattccaaaccaaagaaaataatttctttaaatggaaatctacaataaatttatgtattaattataaattaatacaaacaataaatttcaattctcttattaaaattcaaactaatgatagtaaactgaaattagtttgaattcaaaaataaaattaattaaaaaataaaatgacaagagttttgaacagaaaacaaaccccttgttcaagaccatcggtgagaccagagtgatcacgccaagtcacgcgctggttgtacggaagtcttcctgatctctgagcttcaaagtagagtaagcttttagacaatgcttcaccgtagtcaaaccctccgacgtctgtttcggaagaaacaccatccaacgcggcggagaagacagtgatcagaaggaggaggagaaaatgacattgcttgtgtcggtgattcatcacagtcatatttgtgaagatctttttctctagaaagaagtctctgttggagatgaagagagagcgagagagagaaagaaagaaagcgatggactctctc

SEQ ID NO: 37275 - DNA, 2528 bp, Arabidopsis thaliana landsberg
gatacagctagttgtatataacatcatcaaccacctagttagttttctatctgctataaaaaagttctcgggaggtatctaacatgtttcaattcagtactcacaaacttgtcattggcatttctctgttttattattgtaaagattaaacttaccttaccgatacaccaagccacaagtgttatagacagccacggggaatcctggacctaaaaagatgaatgtaaaaacagaatcacactggtgaaaacacttttgcttaacgagtaacacgctctaaagagtaaaaaacacacaaacctccttgatctgtccaacaatagccaatatgaagtgagttcttccactccattgcatcagtggagacaagaatccactcgggacaattccttaaatttcacagagaatgatcaatgaatcaatcactgtttgaattcataattcatataaaaaggaacaaaacattcaaatacattccaatatttaccaatagctccatgaagaacttcaagaacagcagcagtttgaaacagacctgaacggaatcataacaacagagatcatgttcacaaatcgatcaaactttggagtacaatttaaccaaatttgactactcactaatcaagaatccagcagaagcgtaagcagaaatgatcgtcttgttcgataaaaagctgttaagaataatcagaagcgaaatcgccctgcggagaacaacaacacaaatctgatgaacctaaacgaagaaaatggcaagagagtgaaaaacgaggaaggagagaaagagtgagatataccatgcagaagcttggagaaaattgtaactgaagagataaaacttcacaaacggcgacatctactgttaaggaatctggatctacggcggctcgagtagtggttggtggctgcttcgtctgaatagcatttttgacggcggatttaagatttcgagtgacgtaacaactttgtgtggccatgagtcactcgtacagtagtaactacatatggttaggccaattaaataaaaacaattattattatttcaaagctaaatattaaaatctatgacacattttatatattttatagtattattttctacaattacagtaatttagttaaataaaatgaaaaatgtttcaaaaataattatgcgttttaaagattaaggggtgtatttaatcatgtattttgagtgatttgtgttaaagtaacaaatctaatgttatttaatcataaattttaaaagttataatgaaattcaatgttattgaaatagtgatttaaaaatataccgaaaattttcattttattgacaagattttaaggacttaatttttgacatacattccaattcggttaaagagtttgctcgattggcagtaaaaacctacgaatttgtgatctcatttttttttgtaaaaaatacttcttttattgaattgagctgattatcaattaggctcccttcttctacacttttaattgataaatagtttctcggttactttaagcagccatccttttcttcttttttgttttttttttttaattgaaattttaaagacaaaaagttgaagttgtagttagtggtacttgttcatcatataacaaagaaaaaaaaaagatatcttaccataaagactaaagagtgggaactgatcttttatcatggattcatttcttaaacagaaaaaaaatcatactcgatttgatcaataagatgataaagtagaagaatacattcttttttcacaaagttggcttaagctttacaagtcaaacctattctcttgattatttagcaaatgaatatgccttgttcactcatgcatgttgatacttgcttattccatttttcttccttcactcttcatggttttaataatgaatgaatactcaaagacttttctcatccatgactttttgatgaatcaacataatttctaactcattatatatgttttcttacaaactttcacagaaacttcaaaagtctatttattttggaaatatttgttctgacttgtattacacatcttttcactcactctacaaactaaacaaaggcataagatgatgactacttatgagattagtacagtgggtggtgatttttgatgtaagtcataggaaactactacagtcgtcgtttgataacatatatatgctgcacatataaacattccaaatgaatcaaatcctagactaaaggcgaccactaccatgttcaaaacttagaggaaactgatcaatagcaaaagaagacatcttactttcatctgcatccatgttccatatagattccaaggaactttcccatgttggagaagccagaggagggaaattcaagtaacagctttgctctgagtagtagttgtcttttaccggtttaataacgtttgctccagactgatcaatctctctccatatgtcatccatggagtagtacccgtcttcgcattcttgattcattttcccgttggagcctacagtgtcttgactagtagtagtggtcatagatgatg

SEQ ID NO: 37276 - DNA, 1365 bp, Arabidopsis thaliana landsberg
  unsure (1)..(1365): unsure at all n locations
tattgtttttcatcattttaaagaatattattatccactattatgtgatatgtcaaagtgatagtcttctcatttggccggaatgttaagagccaacatgttttccaagttctaaagggcaagtaaatgtgatcgcaagccttagaattggtaagttttataattaaccatcaagattgtcacaaatcatctctaaatccaaatctaaatttttcaatcaaattcgtgacaataatcaaattttttttttttttttttaactatttatttagcatcattctcaataggaaatttatgaaatgttaatagttgacaatcgactgaatttaactaaattttaaactcatctactgaatattttaaaactatgattcgatgataatatatgatttgtagcctagtgttttggtttgtgctaattaatgcatgttgatgataataataactatggtcaatattcaaaatcaatacaaatcaatttataaatgtgatcatgcatgtattatcaagaannnnnnnnnnnnnnnnnnnnnnnnngaagatcacaaattcacaatacaaaaatcttagttttgggtattcaaagtgatatccgtccaatcttcttcgtaaacgttagttacaagctcccccaagtccccaactatatatgataaagaacttaaatcggatctaacaagattctgtaatacatggtcaacacgaattatcctttttatatacattacttaatctaatantgtgtaccatactaccatctttagatactagatattcattgcgttcacatgtccgtcattttgtttgtcaatactatttttcttaagaaaaataaattgcctaatagatgagttgctcaatcaatacagaaaagactagcaccgataagctccagtattaatgttactaatcatagagatagaggaggcataattattgatagacatgcttcaacataaatcacggatattgattttgcataatagaaatacaatagaacctaaaagaactaattataaacatatagaattcactacaagggtgactacaaagtaatttaacttaaacaaatgtttgatagttctcggtctttagtcgattcactttgatctcaatatatatgtatatatatcttcattcttcaccaatcttttggaatctctcggtagttctttaagctatcatagcttcggtatgcttcagtatatagcacataaaagagattaatgtatatagatgcactcactagtaattgagttgcataaacaagaagacttacaattattctatttatcagacattnttatgaagtagatatcaattaacgaggagatatatgagactcaacgtgggattttcacgtgg

SEQ ID NO: 37277 - DNA, 4927 bp, Arabidopsis thaliana landsberg
tgtgggtcaaaatctaaatttttgaaaaaggtttagaatttggtaacaaaaaacccccaaaaatggtttcatatttagaaggaacttgaagattcttaaccaacttaagtcaaaaaggttaccacaacacgaaatccttactatccagaatcttaaatataagaacttgaaacaaaacaaaatgaaaaaaaactcttcaaccagtgatgttctgagacttgttgaggataactccttcatacttaacttggaaccacttcatggcatcatccttggtaactctatgttggatacctacgcgagtcttgcatctacggcgacgggccacacggtatcctggacgttcaagaacaacgtagaaatccataccgtagataccggtagaaggatcgtacctaagaaagaaatgcagaacaatgagaacattaacctcagaaatcatttaatataataaatcagcccatattattatcacaacacttacttgattccaagatcaatgtgctcctggataccgaatccaaagcagccagtgtcactgaagttcctcctcaacagctcgtattccttcactttcaaaccactctcaagaagctgcattgccttctcacctctaacagtgacataacacgcaatcttttcattacgcctgataccgaaagacctcacagtgtacctcgctgttcacattcaagacgcacactaaaattgagctctacaatccttaaatcatagctaaaacatttaagagaatctacatgaagatattcacatacccttagagaagacaggggtttgaccactgagctgttccaacacctacaataaccaaaactctcgattcaacacctatgaactatgtaactaaccaacccatttcagagtagctaagacgtaaagtctcaaataaatttcctaagccatatagtgagtactcttaaggggaaagaaagaacgaaccttggaggcacgagtgagacgatcaccactctcaccaacagagatgttaagaactagcttctggaccttaatatccctcatagggttcgagagcttcttctccgatgcctgcaacatcgtaaatacaaagttaaatccccaaaacgaggaacgaatataaccatagatcaaaaggatgaaactttaccatctcaagattaggggttcgaaatcgagggagatgagcaaatagagtggcacacgaattgcgtcggctgcgtagtgtgtgataattatatgaaagacactagggtttcttcaaatgaggtaatgacgaaatcacccctgacttagggttaaaaattataaaaaactccgttgccgggactcgaacccgggtctctcgggtgagagccgagtatcctgaccagctagactacaacggattattgccttctcatgatattacattttattaaaccaaaaatattaagaatcatcattttctgacttttctcagctacctttgatgaatatgataaggaccaaggacaatgaatgaataaatgagagaatctttacgcagaaatacaggaaaaaagtatttaagattttgcctttgtaagaaaatgagtcataaacaaaccatttcataaaatttggtaataatagaagacaaacattcaaaaatactatatgaagaaaagaaaaaccaaagacccttaactgcacaaactcttatgaaacactttggtgatcactttgactagatttttcaccttctgctcaaaacttctgactaaactcatttacatatgcgtaaaagaaacaagaaaagatgagattgtgttttcaccaaacttgaaaagtgaagagaaataagccgattcaactggagagcttttgttttgccgatttgaggaagtttgcttgctagcagctggctttgaccattaatcttgttcgaaaaggaaaaacttcgaagtgtgtcctccacgtttgccttcaactaccttgtggcttgtgtaatggtacattatatataaagagttgttgtctttatgttccagattgattcaagaaacttagacccatttgtctcttgatatggtctgcaatcaacttcttgactagttcaagtcatgaggctccagctacttcttgtttgaagttgaagagaggtgggaaaggccttccatttagcaaacgagcgtttggttctctcagttcatcaaagaacggatgtgtacaagctccgagctgtaatacgagtcaacaaaacaaaatattaagcattccattggatgactgaagaaacctcaagagcgatgcttaccgctgtgcatcttagacttggagagtattgaagcagccttgatgcaaaatcaatcgcttctgggggcatccttttgtggaagatctaaaccaaaatgtaattatgatcagctgatgtgtgaagaaagaaactgaaacaagaatgcatgtaaaaagagaaaagacactaaccttgtgccacgggtgagctttgatttgaggaaacttgaactctgtgtaattcggattcatacaccgtatttcttctcttgtaggcgtcccaagaataaggtagatgtacagatgagtaaactagtaaattaaatatagaagagagatgaaggaacacgagggatcaggttaagtaccttgattatctccaccagctgatcaatgccactttccccgggaaacagtggctacgggtagaaaatcaacagttgttatcagattaaatgttatttcgaagtaataatgaaaaactgatcaatcaaaataaaatggttcatcataaccgaaactctacaatgtataatatacttacttgaccaagtaaaagctctgccatgacacaaccgccggaccacatgtcaatggcattggtatactctgtcgccccaaatataagttctggggccctgtagtaccgggagcatatataggatatgttaggttcaccgggtacctgagacgcacagggcgttagccatcattattcaaatgataactcatctccaagaactcataaaaaaaaaatgaacataccaacatctttgcgcttccaaaatcgcatatttttaattgatgagtttggggattaacctatgaaagccacatcataagagaatcaatgaattatcctttcatacgtcttaccaacctttaagcagaaattattcacactataccagtagattttgtggcttaatgtcacggtgacacacgccaaccacgcgatgtaagtagttcagcgcacggcaaatctgatatccaacaaagcaacagaaatgacaaaatcagcataagtgaaattataaatttcctatgtatttgtagctttatgctacacagattactagaaacgagtaaccggagagctaatagaactcacctgataagtatagagctgaacaaagataattggcatatgctgattcattttggtatagtgcttcgatgctctgtatacagtttcgggaacatactcaaggacaaggttgagatacagctcatccttgtcagttgttgaaaagaaagaatgcctcagccgcacaacgttgggatggtcttgcaaacgcatgatctgaagttctctgttcttgtatcttttatcctgcagaaccttcttaattgcaacttgttcacccgtttccaggcacttggcctatccaaaaatcagacagaaagtcaaattctgggaacacaaatagttaaggattagttatgttcctgctataagaatttccacctacctggaacactactccgaatgagccggttccaaccactcgctgggccatgtatgagatagtctgaaacaagaaataaagagtaaattatagatacacccaacagaagtgaaaagagaaacaatcttttcataaaagaaatgactatcatgattaatagcttttctcaaacacacggcaatcagcagatatgttagttgaatgacctgctttggctttccatctctacccccaactgtcgtcgtaataacttgtcccgtttcggtcccactgccgtttacaacagttgtttccatatccttcacaagccaaatgaagatgtgagcagtggctaatggagatcacgacgacatatatacattgattaagcaactcaccttatcctcgcggttggcatttcgctcgtctctaatcttcatttcgatcataacatcgggaagctgatcatccacgggtttttccgatacagcaggcacatttgacgttccagcaacactttcttgtgacaaaacgtcagctttcatctcaaaacaagaactattttggtcaacctgcattggatcaacacacaagttgtcgttctcttgatccagcttagctctcttcaacgcatagtccccaccctaaaacaaacaccaaaaacacgaaattagtcaggtcaacatcaacatactcatccaaaatcaatgaaacagcagagataatcaaattcatacaaaaacataagcatttactagaatatctaaaactaaagatctcaaaagcttaaatttgacttgtaacaaactataaacgacatcaatccgtaatttctggatgagaatgagagaaaaaaattcaacaatcagaaatataaaatcaatctgatcttgaaacgagagacattgaaaatggatacttacaggatccgaagaaatggaggtccgacccgaagcaatgctcttgagacgacgcatcacgttcatcttcgctttattcaccaaccaaacgaggaacaactcagaaaccctaaatctccgaaaaacttcaccaacacagcttcatgcggagaataaatgaatcaacagattcagatatttcaaattcgaataactccgaaagcaaaaccaaaaatctaagtttttcgattcttcttcaaacgaaaaatctggggaaaggaagaatctccttcgttcttcttcgagcttcttcggggtcttcttctc

SEQ ID NO: 37278 - DNA, 2329 bp, Arabidopsis thaliana landsberg
tatctctttttttatatataacaattcatgaagttgatcagctttatacacatcatccaatcgaattgctaatctagagatggaaatatcaggatagagccaataagatatcaaatccaatggacccattttctccatgtgctaattcatacaatctgtttttgtctgctttatttgatgatgatgctgagcgtttttaagtgtgaactaagatctagctaaccaaacaaaagatggtctcttctgtctttgtcgtataagagcaagagagtggtttgattcaatttttaaaattctaaataaaactccaaccgtgaatccagccatgaaactctttttagaaaatccttttttataacaaataattcctctgcttcttcttcttcttcgtttatttcaccttttttggtttctttagctcagaaaaagcccattctttttttctattcttgtttattttaatcatactgtgcgtttctacaaagtttgttcctttcttcttcaactctctcactcacggtcacagactcacagagatctgtttctttcttttatttttgctttcactcttctcttccagtgagagagagtgagagaaaacaaaatggtgaagcttttgttagtagcgtttgttgtggctggtataatactgggaactcaagcaaatgggtatttagagttcaatgtcactgaattagatcgcattgaggatttagagtttggtttctccaaatttagttccaatttcaatccattaatggttggtctcacacttatcagaggagctggttctaaaggagctggcactgtctctttctctctgctttttccttcaacaaacttattttcttttgtttgctcatcatatattactatattagtatcactcatgtttcttagatagttgcattatacaataagttactttctgattgtgttatgtgaaactgaaatgtaaaaacagaacagtgtttgaatctaagtcttatgtgtcttaattactagtttgtttggatggtacattgcctggatatcacttacatcgtggacatggatctggagccaatagctggttaattcaattagaggttagcgaaagaagtttctgtttttagtaatgtttgttactaaaaattttttgaatggtgtgttgaaattggaaatgtggaaagggaggaggatggtgtgacaacattaggaactgtgtataccgaaagaagtcgcgtcgcggatcttctaactatatggagaaacaaatacagtttacaggaatacttagcaataaagctcaagaaaatccaggtctttgtctttccgctttaggctcttattagtaataatctttaagaaactataatagctcatttcatctctatttgcagactttttcaactggaatagagttaagcttcgttactgcgatggcgcttctttcagtggagatggccagaatcaggttgaaatcaatcattttttgagttactagagttcataagagacccattgttgtgatttggaacaacttgctagtttctaggcctttggaactctgtagtctataatcgtcaaggctgttattagccacagagaacgcttgatgtgatcttagttctgtagaattgagcagccattggttttgtgtaacatctgtgaactaatgcaaataaaattctttaccttaactttttcaggctgcacaacttcagtttagaggagagcgtatctggagagccgcaatagatgatttgaaggcgaatggaatgcgatacgccaatcaggttttgacacttaaccttctataagagtctgtatctcttccatagcataatatcaagggcaggaatggatttaactatttatattctgtcaggcacttctctccggatgctctgctggtggtttagcagcaatcttgcgctgcgatgagtttaggaacttattccctggatcaaccaaagtcaagtgcttgagtgatgcaggcttgttcttggacacgttagtttatttctcccaagtcaaagattgtattaaagctagttcattttcccttaccttagtaactactactgactcctttgtttctgtaattatagtgccgatgtttcaggcggccgcacaatcaggaacttatacaatggtgtcgtagaattgcaggttggattcctctttcttcacttgaaagtttcttactttacatttaaagagcacaagaaacttaagaaatcttcttcacaatttacagagtgtgaagaacaatcttccacgtatatgcacaaaccatcttgatccaacccggtaatcttatcttttgttctctcattctgatgct

SEQ ID NO: 37279 - DNA, 2215 bp, Arabidopsis thaliana landsberg
tctataattatcgttagtcatgattttttctcttttagaaattgattactatatttgtctgccattgaaaattctaataacaaccggcaaaaattaacatacatcaaagatcaaaacttccttgactagtaacttttctttcctttccctttcacattattaggcttcatatcatatttactttcttttgtacagctaaaaatagatgccatataaataaactataaaaagtcaaaatgtcaaatcaactctatatattattaatctatttttggctcatatatggcccatggaaaattcatgagtttccacttatatatatctgtcagagaatgtatggttctaattgtcaatagtcacatgtatatactatatactaagggtcagtttacaaaaataaaataaaaatacatatactaaagtatctccattgcacaatgcacatacaaggagagtatttaaataatattagaaaactgtaattacaaaatactaataattaaatatgaggttatttaaattggagacacctcttttcaaaatttcttccccaaaacatttaagacatatgtcttaagtttaaagacactaaaacattataataagatattttctttacatacattatattttaattgtgggaagacactctcttttatgtgcaatggagttgctcttacctatttgacgtttgaaccacacaaatccataaactctttggtggatcatattcttcatcgtctcttttgattgtgtgtaagaatgtcaagcatgaaactatatctataaatcaaataatcaatgagagatgtctttggagtagttctagggtttatttcttgagcaagaaactgttatcgtcaagtgttagtaatatgtctggaaagaagaaggagcttttctcctcagccatgaagagaactggcgaatggtttgttcctcactttgttccaactttttctcattttatttcttattttttacaaaataaatttcaggatttcttctcaagaaattcctagtgacgtcactgttcatgttggagaaatttcgtttacactccacaaggtgatttctattttcaagatctactaaattatacacaaggagatcactttctcatatacatagtctctgtgataatctgcagtttccacttgtttcaaaatgtgggtttataaagaaacttgcttctgaatcaagcaatgattccaacattatcagaatcccagattttcctggaggtgcagaaggatttgagctagcaatcaaattctgctacgacataagcttcgagataaacacagagaacattgcgatgctactatgtgcagcagagtatctagagatgacagaggaacactctgttgaaaacctagtggagacaatagaggtttacttaaacgaagtgatcctcaggagtttatcaaaatcagttaaagttatgcgaaaatctcaggatttgttgcctatatccgagagagtaagactcgtggacaggtgtatcgactcaattgcttatggaatttgtcaggtgagccagagcaatgaggatatagttgactggtgggctgaggatttagctgttcttaggattgatatgtttcgacgtgtctttgtcgcgatggttgctagagggtttaagagatactcacttggtccagtacttaaactctatgccgaaaaagctcttagagggttggtgagattcttgaattttttaacagaacaatgtgtttgcttactttaaagaataatgtaatgtcggtttctctgtgggaaatgcaggacatttttgggaaagaggcaaagaagatggaggcagaacaagaacatgagaaaaggttgattcttgaaacaattgtgagtcttcttccgagggagagaaactcagtgtcagttagttttctttcgatacttttaagagctgcgatatacctcaaaaccacggtagcttgtaggcttgatttggagaagagaatgggattgcaattaagacaagctgttattgatgatctcttgattccttcttattcattcgatggagacgatacaatgtttgatcttgacactgttcaacgtatcctcatgaactatcttgagtctgaagttgaagaaaactctgctgattttgcaagtgatattggtgaattgatggagagttatctggcggaaatcgcttctgatagaaacataaacttcgcgaagttcgtgg

SEQ ID NO: 37280 - DNA, 1773 bp, Arabidopsis thaliana landsberg
  unsure (1)..(1773): unsure at all n locations
tgtttcaggtgctgagcatggagattcaaattctaaattttgtgcactttatattatcggttcctaccaccaaagcatttctgaggtaaatactaaagggcagaactatgaatcatcatatctttccaactttgtttaaaaatagtaccactgagttttcatcttaccaatgttttttcaggcggttcattaaagcagctcaagcttcgtacaaggtatgaaaccatgatccatttatcatcaaccctcacttctacagaaacttggaatctgaatgtagtgcgttgtttcttataattattttgcaggtnnnnnnnnnnnnnnnnnngtatttagcaaactatctcgccgaattgacactggtggaatatagtttcctaaggttcctgccatcactaattgctgcttcagctgttttcctagcccgatggacactcgaccaaactgaccatccttgggtcagctcatgtttcttgaatcttgaaaaaggttgtttttgtgtttgcctcttttttgtgctgataaaaagaatgatgtttggttatagaaccctactctgcaacactacaccagatatgaggtagctgagctgaagaacacagttctcgccatggaggacttgcagctcaacaccagtggctgtactctcgctgccacccgtgagaaatacaaccaaccaaaggtacatttctctacaaaacaccgttaaatcaaactactgattgttgaagaaaagtgaatgaatgattgaactggttttaattctgtatgactttgatagtttaagagcgtggcaaagctgacatctcccaaacgagtcacatcactattctcaagatgacaccaagcaacatcgaaaacagagcccaagtcaggtgatcaaaatacctattttcagacattggatgttatgtcgtctctttgccagttttgtctgtctgtaattctgtagctattgtgtggcgccttaattgtaggccattacttgtcacaccacttagctttaaataaatgttatggaatttttctaatcgcattgctacaactatttactatcctgcgggattttgtacctaggagcacttggaaaacgaatacaaaagtgttaattaatataaatttcactgttcatggctggattgttatgttgtttgttctgatttcgcaatgctatattcatatggaaacatttccatctacaattaacgtctcccgtgtaacatttggtatcccctttttactgattcctccatgcttgattttattcgtcaaattagtcttcaggtatacttcaatgtatgtatttccatggcttgaagttcttcaatcttccacaaattcaatcaaatcctaaaattcgaagatacgccaacacttttcctccttaaaaactctcaactatacccacttcagttccttaagttgagttatcacagctacagttccttatatagtcctccactaaacaaacaagaaatccctaagtctgtagctcgacttaaaaccgcttcagatacttttctcaaagtcgacttacctataattttctgtatggcaatagcctctaccgccgtgattgcgcacgagattcatttacaaagatcaggacgcctaaaccggtaacttctcactataaaatggtaaaaacagtgttattgtttacatgatcacttattctcttcttatgctagtcatccttactagtacaactgttgctcctgagttttgtttaagcgtgaatttgtgttggatgatttatataagatttttaat

SEQ ID NO: 37281 - DNA, 2409 bp, Arabidopsis thaliana landsberg
agagtgaatactcaatatctttaatatgatttgtctacaaaaaaaaaaaaaaaaaacttcagtaattttgtctatttcgaatataaatcaaaatattttgtgtttttcaatttgttagagataaaacaaaaaattcaccataaatcgaatgccattaattgaaaaatacaaaatactttaacaataaaatataaatataaatattaattttataaatatattccgatattttctcatttaccaaatataataaattaagtacatatcccaaaaaatatgcgacatacattccatccaaatattttgtttttttgtcaaattttaatatgtaaacaattaatagtataaatgtaaacgttaaattattagcaattatactaaaaccacctatttttgtttaataaatcaaatatatagtactgctatttcttcttcttctcccactaaaacgagatctttgacataatagacaaataattgttcgagtattagtgaaaaatttctctcccaagcgcggtatccaaagaggatattatcagtatgtctcccgctttaaaccagatgtattttacttttacatcccaaaagtagaaatttttaacggttattacccaaacatgatgaactccgttgagatattgggtgattactacgtctcctccggtaagtttatgttcttggatacttctgctttcaatcctaacatttgtttcacctttgtgtcctcactacaagaatgcttctcaggtagcttttctcttcactgagtttaggtgcctgtggtgttctgttgtgtgttaactagcttaagcctctacaactttttaaaccttgttaaaccttgttgcttctccgagagcatttattgagtcctctgaagatctgtttttacccatcctactaccccacaatcattactatacttaccagcttctggaaactcctaagctcattgaagaaaatgatttaaccctcatgggtagactaaccaacccgtctgccgaaagactatggtctttattcctatatcttactaataaatggaatctgaaaaggaaagccattggcttacatcttggaaaatgttgctttcaatatccttttgactatgaagaagattttcagaaggtccttgacaatagaccctaccactatgatcaatggatggtcattttacaacgatgggagccaataatttctgactctttcccatcatgattcctttctggatagagcttcggggcctccctaaacactattggcagtatgagatgctgaattctatcggcgaagaacttggcaaaattatggatgtggacatcagcccctctgctgcaaaacttcgtgttctcattaatggtctagaaccattaacaaaagacactgtcgttgaattccagaatggaaatgaggctctggtaaccttggagtataaaaaccttaaaaaccactgtcaccattgcctaagactgtcccatgaaaccaaaaactgccctggagtactagcctcaaaagggaaacctttgtcttccccccaggcggttagttctactgactcaaaaggagtatccagaaattactacacgtctaaggataacttcactgcccctagaaacgtcccattgatctctgcaagttcaggattatctcagaaagctacaaataatttgaagaggaacagggaaaacttaagtactggagggccttaccagtctgcagagagatctcagaggcatagggagactagaggatactttgatcgtccccgtcagtatgacagaccagtgcatagaactcaaacaccatcgagatcaggatcccacagggatagggctcatacacctgaaaatttccaatggagagaaaaatctctacctgagaacagaacagtccctgcagtttctgacctttcccagccaaggagacctcctcttgaaagatctcctgtgcccctggagatccaaagtcagctcccagaccctttagggagacaagaatcccaagaagtcttcctaccaacccctgcaatcccctcaaaagatcagatacttggtgaattaagagatgttacagttcaatacatcacttgtgcagacccaactgagagtgctgctagaagacaaagagttctacagggtgaagcaaataaccttatgagtaccaaggctgataaaattattgaagcagttgtagcctctgcacctgcaaccccttcttcttcaacatcccctggctcaaagagtcccacttcacttgtggttactctaatcaaagatttggttaaacaaccaaaaagagggcgtgggaggccacctctttcaaaacaaatgggtaaaccacccatcaacctgaagggagcaaagtcccagaaaagaaactttgtgaaaggttcccccaaaaagccttatg

SEQ ID NO: 37282 - DNA, 1030 bp, Arabidopsis thaliana landsberg
gtatcatattttacattttcaacaagagtaacaataaaaaaaaacaccaatccatataatagaccagacgaaactcaaaaagtcagaagagaagagagacatcttcacatggccgaatgaaacacatatccaaacgccaaggacaaagaagaattcatcactttcttccatttcttctctgcaacttccgtaccaaaaaatacataaaagccctaactaatattatttctccaccaagtttctttatcttttagtttcccggtaaaaaatctctctgtcatgtcttatgttcttccacgtcgttcctaatctcccaagacagaatctctaaacttcattttgctccttttccacacaaaactttctctccctccaaagaccacaaaaaatgttcttccttccttcaacttcaagtatctctctttattcacacgtatagcatccaaaaccaaaaatctataaccttttcctctgtaaagtttcttcctttctaaccttcccgagaaaaaaacaaaccctttctgttagaaaaccatgagaggtctcgcggcttgttacagtgaacacgccattaaagtatcagatacatattgttcaggtccatcgaatcattcctatatatctccgacattacctccttcaatccccgacacagtaaccaccacttatagatccaatctcccatcttccgacaaacccgtctctgtttcactcacctggtcggataatctcaccgtcgtcatctcaacgccgccgaaatcatactctgtttcactcagaaaacctaaaggatcaagaaagttgacttcttcctccggttcactcaacgccgagatcctctgggatctatcggaagcagagtacgaaaacaacggacctgaaccaataagaagattcttcgtcgtcgtcgttgtaaattccgagattaccctcggagtcggcgacgttgaccacgagcgagacacgtcatcatcgtcgtcgtggcgagtctcaaaaacggagagaatctctgggaacctgttgggctcac

SEQ ID NO: 37283 - DNA, 868 bp, Arabidopsis thaliana landsberg
tttgtagccaaagtgacctagtcgaaacttaaatgcaaaaaaaaaaggctaaataaaggttgggtttcatgaatggcttgggtaccttatggagtaaaaggtggcacaaggctctacatttctaagatgcatggtgtcatcttgtgacatgcatggtgtcaagtcaaagatttttttttctaattaactatcacatatccttcttctgccctcctgtatatgttaaacgacattgtttgtactgccaatccccacacaccgaatcgtcatgatttgactgactaaatccaatgtcatatgtgaggaattaatctgatatggcacatccctaccggaatcgctgcctaaaaacactcgtcaaagtagcctttgccgagtgccacacagctagcactcggcaaagaacccgacaaagggaccctgctgacagattctttgccgagtgctggccggcagacactcggcaaaggtgtcgtctccgtcaccccggcgtcgtgacggagacttttctttgccaagtaccgcctggcactcgacaaagtctgtgtcgagtgtccgagaaaaagtactcggcaaagaagcctttgtcgatgtactgttcgccgagccctctttgacgagtgcgacactcggtaaaacctttgtcgagtgttttttagggtttgctgagtgcttcaggcactcggcaatgcaccctgttccggtagtgattacgttgcacagagcgatggtatacagtcacgcacgcgcatacgccgctctgaaactagttgtaattgtttctaaaatgcctctaactattaaacttgtttgccatatttttgtgaactattgttgtatgcttgtagctacagctcatatttatttg

SEQ ID NO: 37284 - DNA, 2246 bp, Arabidopsis thaliana landsberg
aataaattgttatgtattagtatcacttcattatgtatatgagtatagcaaaggttttaacctcaaaagctttgactcgaaaagctctttctttcgtgaagttcaaaattttacacctctttcactttaaagtttaaagaacagtttgcttttaacttttccttttttttttgtgtgttgttaaaatactttgtttcttaactttaatacaagtgagaataagttattcattagactaactctgttttatactacttgtttaatatgttcccaactttgctttctatatttcgattcgattttaagcttctaagtttgttatgcaattgttgctttcaatgcagcaaacctatgaaccaacaaaccaaacttattaactttccttggttacattaaagcattctttactaagaatttggtttaaactatataatagctggtgacaaattgggaaaacggaaaactattattttgttttttattgactattacaatagttttctaaggatagcatggagctataccgactaaagtgcttatactgttagacctaaatatgattaatagaataatacaaaagttatgcctattcattcgttcggaactacttccacgcaattgtcatggaatgtgtgtatgcatcatcacattttatagaattgtttattaggagttgaacgaatttttatgttttcgcctataaaaaggtgctcataaaaataaattaacagcataacataaagaaaacttgaagatataattcaatagtagctcttcttatcataaggaaatggtcctcaatatttttaaaggaccctaatatgggtttccacgactaattatcactacgttactcgtataatatgtatataataattaataaacattgtgtagacttgcattctttacacactagcttactcaacttcctcaatatcttttaaacatatacatacgaattcattaatcaatttttcttcaatgaatctatgatcgacaatgagtcacagagtaattaggttttcaggttttcaactttcaagcattaataaacttttatttctgattattctgattaccattcactcttcactgcaacattttattcttcattccttataaggaggctacagattttttcattaaaaaaaaaatcaaattcttaaattccacttattttggtagattattatactctttcgtaaattcaagtgttattagaaaagtagaaacttcttttagataaaacacaatattaccatacgtatccgcaaacaaaaagctaatcaagtaggcttgaaactacacaaacattcttagtaaggccaaatggtccaatgaggtaccacaagcccatatagggccatatatttctctttagtgatttacaagtaatcaggcacgtaagaaagtttccatagtcgtccaggaaaggcttcatcgtctgattcgctttcatcatcagaactctctatccccagcaaatagttgacaacctgtgaggtaacaaaaccaccaaaggcagataaatagcttgtttagcatgtatatataaaacgagacaaacatttgaagcaagaatagcttacctggtgagttgttatgaggtcgagtggcttgttgcctgatttcaaccgacattgtttgttcagacatctcaagttttcgtgccaaacaatagaatcacagtaactgcagtatccccggccagatctcaatgcctccgatgaattagccgctgcacggttacacaaactctactttagaaattacataatagagaaagcagcggtttctgaaaggggaaaagataaaaccgtggacaaaagctctaaccgatgtatgctttcttaaaggcttctctccagtcaatatcggactgcatacgaatcaagactttgtgattgaagtgaaggtcaaattgtgattgccacagagagttctcatgcgttgcttggttccaagagctacaaacagatgaaacaaaacagataagtagaaggaaaaaaaaaagaagatgcaaaagactctgtaatgtggaaatatagaggaggaagtaccgagacacttgagctgaggaaactaaggacgatatctcgaggaaactgaagatgtgaataaggatatcttgtggaagtgaaggtatatctgaaaaaaggatttgcacatggtgaaggattatctcgagatattaaaaagaaagataactagaaaaacatacctatatcttcttcctcacggttccg

SEQ ID NO: 37285 - DNA, 1010 bp, Arabidopsis thaliana landsberg
aggtctgtatagtcccttgtgatctcctcaataatacactttgatgtctaaaatttaactaaaaattgcattgtgcggtgtgaaatctggcaggacaagaatgattgttggtgttggatcgagaagcattccaggtagttttctggaagttgtacagaagcaagggtggcaaggtctttgggctggcaatgaaatcaatatgattcgaatcattccaacgcaagcaattgagttagggacattcgagtgggtaaaacgtgcaatgacatcagctcaagtgaagttgaagaagattgaggacgccaagattgaaatcggtgattttagtttcagtccgtccatatcgtggatctctcctgttgctgtggctggtgcatctgctggtattgccagtacacttgtttgccatcctctcgaagtcctcaaggtaatgtcttagtcaatcaaagtctgttttataacgctatgaattttttttagtctagagttgaaagagagtgatgttctctgatctttaccaggatagattgactgtgagccctgagatttatccaagcttaagccttgcaattccaagaatttttagagccgatggaatccgtggattttacgctggcttaggaccaacattggtcgggatgcttccttacagcacatgttattacttcatgtatgacaaaatgaagacctcatactgcaaatccaagaacaaaaaggctttaagccgtccagagatgcttgttcttggagctttagctggtaagtaattgaagaaaccactccctttacagtatttccttacttaaatcatgtttaagactcattgagttgtgactggggtcaggtctaacggcgagcaccataagcttccccttggaagtagcgcggaagcggttgatggttggagctctgaagggagaatgcccaccaaacatggctgcagcaatagcagaagtagtgaagaaagaaggagtgatgggactctacagaggatggggagcaagttgttt

SEQ ID NO: 37286 - DNA, 1457 bp, Arabidopsis thaliana landsberg
atgcgccccagaatcaacagcggtctttgcggatacaaacacaagaaatttgccatctttgctgtgagggaaggaaacaatgtatggtgactacagtaagtttaaacaggtcataattaaaatgaacattgcaaatcaacaccactatatataagggaaacgtttaacaaaagttgtgtaagaacgctcagttagaaacagagtaacaaggacaataaatactcttagtaaatacataacttagaaagttaaggaaaaaattcataagaagtaaacctgaaccgaggacaaaacccgctgcttatgctcttagtcaaattatgaatagggaattcatttgcgtcatcatctctgaaacacaagtaaacacaaactttataagatattttttcggaaattaggaattattaagctgtcttttagtagttatagaagttgcaaacttactttggttcatccgatgtgaacttaattgcgtatatggcacatggtctgttgtagcagtacttaataccaaactttcttttatctcctaaccaaccggcaaaaaccaaatattgagctgatccgttactgtttggactccaaacaacctgtccaacacttattgatctaggaattcctttgattggctcgacctctccactgttaacagaaaaagagaaacaaccatcataaaaagtactgggtagttgttcttttcttatggagatattgatagaaacctgtcaacattgataacaaacagcgcaggctgcctttttccggcgtatgcttctccccattcctcttcccaatccccttcacctttccagcttccaatatccttgtccaaagaatttcctttcttgtaataaccaaggtgatcaaatgtaggcttgggacgagatggctcctcggcgacatacgcaacatgagtctcacctgaattccaagagatcccttcaaacctacatcatacataagccttactcatttttctacttctataagaacttgtctttaaaatcagccaaaagaaaagtgccaaaccatccatcaacgtatacagagccatgaactttctgtggaatatggaactccttctctacctgagaagaattccatatctcaaactttgtaggagattcattttcaggatttcgaattacaaggagcttcaatcccgatggagatgggacaaaagccgatgcaccagtcatctcgatgggaaatggcgcccagtgaaagtttacagattggttactttcgttcgagatatgacccgataacataaacttcttctttttattagccaaaagatttgcttgactcaaggcaaacattgcctgagaacctgtagtaagagcatcaaagtgaaaacatcatttcatttgggaagatgattttcaacaacaaaagactaaaaaatcttaatttacaaagtcccaacttgaatatgcaaaagtgatgccaga

SEQ ID NO: 37287 - DNA, 1732 bp, Arabidopsis thaliana landsberg
taaaataaagagtgatgagatggttttgttgttttaaaacacacatgtttggtaattggcatattccttttagaagatccaaattctcccaacatctttacatggacttccccatttgcatcatctgcttccacttttttcccaaaataatataaaaaaatgataatttgaatcgatgtaatgagtgtattcaacctcttgtataatttgtctccatgaccaaagacaaagagagaagccataaaaaccctaacaacatccattgttgaaactctctttggcacaacaccaaacacacaaaatatggccatcccctaaagaaactgaagctcaagaaccctctgaatctatcagaagatctcaccaataaagggttttgagaggttcaagtttctctttatgggatggccccaaacacaagagtactcacaaaaggtaagaagaagaagagatctcttggagattatgattgtgaatgttcgtgtgtgggtgttgtgtaaatgatcatcatcatcatcatcatcattatccaatatcataattatcaatatggtgatgatgatgatgatgaggattgtgtgtgaatggagcgatgaagattgcatgaaggttgatgaagacaagcttgatgtgtcttttgttatccctcgtttgggcaacttcgatcctttggcaagcttcggttcccctcggaatcagcagattatgattactatagctcttatatgtttatgttccgtgtttactttgtttccggtttagtttggtttattgtctttaatttcgtcatgtttgtgttgaatgtgtgtgtgtgtgttgttgttatcccgtgtgatgcaccattcaggtgtgttcctatgtgtgtgtgaggaataaaagaatattcggttttgatatctaaaatcaaaccccacttctacctttcattaatagtgagtgtcttcaaacaattttgttttagcaatctgtgtatacctttagcaaaaatacttttaagctggcccattcttagcccattaatagtccagttttagccaattgaaatcgggtaaatttaaacacattcattcttctaatatgagcatctatgaagaaacccaagagagccctaatcaaaccgtgtctgacaagctattaaataaaaactcgtataaagtaaaacaaactagaaaacctactacagaaaacgtaggggtatctaattatgttttttttccgaataatacatgattattgtttctagataaacaatccataataataatattaaaaaaaaaaaaaaaaagattagataaccctaaataaccattatgttattctaaagtgttttagaaaaaattaaaatatagtcgcccatcttttgttgcgtgtatccagcttggttgcttcttcaacttcttcttctcctttttcctctcactattgagatcagtcgcagtcatcacgagtttcttgacctctagtttgagttccagaatccgttcttcagaagtcttcttctccaaggaaaccatgtcaagctttgactgcaaccaatccaggttaaaaccggcttgtgtcagatcacacatatcctttgaagctttgctcaattctgcttcggtgagataaccaagaggcgtgtggtaaagtatcccgatgatgtcgcagagaaggttcatgtaagtattcctgaaagcttgattttgcactttgacatgggctgtagtttctggatatgtctgaaaaatcc

SEQ ID NO: 37288 - DNA, 3259 bp, Arabidopsis thaliana landsberg
taccatatagtgaccttaaccaaaaaagttccatcgttacagagtatcaatctatgtttcaatgtattatgtatttctttgaaatattgatgtcgaatataaggtggattttctactcagaaataagagaaaaatcccatattccaagaaaaaagtgagttgaaaaaccccgcactgttgaagaagaataagattcaggagtttgttatgtagaccaaaggcaaagcaagatggtcaaaaaaatatttagaaaggagaaaaacgacctacttaatcaattaacaagcaaaaaggtgaaattcaataaattaatacacctaacaaaaaaaaaaggctacattggcacctaacatgggcaggtcattggttctccaccacgatgagatgcacatgatacccgctttaatatgggctaagtatgcttaatgaccatcacctaattgttctttttagttgttaaaatgggttaagaattccacgtcgttaaatgtgagaaatgtataattcaatacagaataaaaagctcggacgaaaaaaaaaaaaaatacagaataaaaagctcaccatggatttttaacatgacataataatgatgagcagttctatatataccacaatgaaaattctttgtaaacttctttctattagtctgctttatattttctagtaatcgaatttcatatttagacactaaatagagatcatgtgagtttcaactctagatcaaatatggttcggttttaataataacaaaaatatatacatataatatattttgttattattcggacggtaattcgatagtgtaaatacattaaacttttgcttaatcaatagagcaaaaacctcccactttttttttttttttgataacttcttgtttattattagttgattttaagatgaaattttatgtatttttaatgattaacatcaagtcatcaacccaaaataaatatattcgatctttggatccagttaaagtaaataagatatgagaggtacgtgcagagatatattcagaactatacattagtaaatataagaggcaaaataaatgatgctatgaataaagatgctatgaatgtttaactaggaacagaactagtttttgtttcattgttgaactcttatttattctaaatccttcacataataacgctgggtttagaaaaaataaaacaaagaattctttttttaagaaagtgaatcgcatgccatttgggaactcaatcttttttttatatatatagtcttgcacatatcaaatccagcctccatctcttggtgtagaatgtaaattgtaccaaattagattgttaaatatatttggatattgtaacaatagtgcatgtcaggtcatatgtcacatcagatgtaacatcaatcaatcaaaaagaaacctaggaaattatactacaagctagaggaggaagggatagtacaatacaaaccccttataataacaaagaaagacggagctttcgcatgtaaagctatatactattgtatgaatgcatacttaacatataacgtatatgagcgcatacatatataagggaaaatgaggctgatgtggaaaaggtgctttaagaagcagtgaagttagtgggagaatatgataatggagattatatataaagccaagaaggtggcatgagattggtaataacttcacagttgtctccgaagaaacagagaaaccaaagagttaagtggggaacctcgaagctagttcaaactagtgggaggttgtttcacgtttcaactttcaagtcataaaaccaaatccaactctaaacgtaaacccaaacgtcaaatcatcagatagaaggaaatattctgattgagagatggctcgtggaaagattcagcttaagaggattgagaacccggttcacagacaagtgactttttgcaagaggagaactggtcttctcaagaaggctaaggagctctctgtgctctgtgatgccgagatcggtgttgtgatcttctctcctcagggcaagctctttgagctcgctactaaagggtacgtattatatcatatatatatcttagtgttcatatatatacatgtgactaaagagtaacatatattatatatgtaaatctgattataaattcagaacaatggagggaatgattgataagtacatgaagtgtactggtggtggtcgtggttcttcttctgctacttttactgctcaagaacaacttcaaccaccaaatcttgtacgtctactttctctttcgttctcattaattagtatctactttcatcgagtttttctttatttttgggattgattatcgtatgtgtttgtttttttaaatagaatttttgggttgatattaaaactagtgcctcgtcgtcagtagtttcacttctttccatttcattcttttaaggggtagtttagtctttttgttccataaacattattttagtgtgcaacatgctaacacgtgttgacatgcagagggaaaatctgttggacgttgttaattgatttgaaattaaaatactcagggaagttaggtagggcacctgattctgattctatacatgaaaatagttagtgaagtacaacattcattgcacctagctctccaattctccgaatttttaatttgttgactactgagaggaactgacattgttgtggaacgttgtactatcataaaatagttacgaaacaagtcaaagtaattactgttaaagtaaaagatgcttagagacaatgtattacactttaattaatattttatatctctggttattcaatcgcattgtgtttcggaatgaagtagtattattggtttataatcagcacaatcttttaataaaagttgatctgaccactttataaaggttgccctaaggcctaaactatagttattgacacgctttgaactattattttatatattgatgcatatacgtatttcatgtttgtgtgtgtgtgtaccaacatgggtcactatttgtaattcgacatcttcaaaaaaattcacccgcttttagatatgtttacaaataatgtatagaaacattgaaataaaagtttataattctctaggatccgaaagatgagatcaacgtgcttaagcaagagattgagatgcttcagaaagggataaggtatactgattatttgcatgctatctccttacttatgggttataaatttatacatatatgagtaaatgcatttaaaatggatttcagctatatgtttggaggaggagatgg

SEQ ID NO: 37289 - DNA, 946 bp, Arabidopsis thaliana landsberg
gtccttgagagtcggtttgttcttagttattgctttatcttgaattgttggtttatatattcagggaccattggggttggagtttgatgcagacatgctcaagatacgtaatgagtctgcaatcagtgctttatatggggatctcccgaggcaatgcacaacctgtggtctacgcttcaagtgccaagaagagcacagtaagcacatggattggcatgtaaccaagaacaggatgtccaagaaccataagcagaacccttctcggaaatggtttgtaagtgctagcatgtggctcagtggtgcagaagcacttggagctgaagcagtaccagggttcttgcccacggagccaacaacagaaaagaaggatgacgaagatatggcagttcctgcagatgaagaccaaacttcatgtgcattatgtggtgagccatttgaagacttttatagtgatgaaaccgaggaatggatgtacaaaggtgcggtatacatgaatgctcctgaagaatcaacaacagatatggacaagtctcagttaggtcctatagtgcatgcaaagtgcaggccagagtccaatggggtaagccattccatgcattttcattagcttcatttgtgtctagttgaatccattttcattttcgctgctagacatttatccagtgacgacctcttgatttcccgatcatggctttttcagggtgatatggaagagggtagtcagaggaaaaagatgcggagttagatcccttagaccgaattttaggtctttttcttgactacatttaagttacattcttatttcttcatcatctatatgcacttagtcacagaataccaccaatgaagagaaatgatggagagagtcttctttctcctaaaactgtaccattgaaaaaaagaggtttacacccacatatattatcattctttatgcctctaaatt

SEQ ID NO: 37290 - DNA, 2111 bp, Arabidopsis thaliana landsberg
aaaaattggtgacttggacttgcccaacataaacgatctagactcgaaaaagaaaataaaacttaggcgcgactttgtattcctattcttgtatggcacgtcacaaaattgatcgagtacaagttactccttcgtcactacaatacactgatcggtaataaatggacaccgttattttagaccaagtacgttttaggaaatctaaaaagatttatcgtggtacaataaaaataggttggtggactgtcacaattacaagcataaatacaatttgtacactaaaaattaattactatcccaccttgaatcgaagatcatacgaattcttgtttctttttttcacacgaccacgagtattattttattttatgaaaaggtatcagtatcacttggaaggaatatgtactgttaatagaaaaaattaaatcaaaacgataattgttgtctttatttaatttcccatgtgtattcgcatattctttggttgatatagaatcatacgcatattctcgtttatattctttgccgtaacgtgtgttcttgtttttcttgacaattttcttctcctgtttcttgtctgtctgaaggttacaagtaaagtctcaatgtgaattattaagctgcaagaaaatgaaacttaaaaaaaaaccatttatatagctaacactacgacaaaattctctatgtatatatacaatatactttttaatataaaatcaaaatacaagctaattagaaagaactacatagatggtctaaaaaaagtgaatttcttgacacagaccaatttcaacactagtaattaaaaataaatgttgtcgtaagaatatcaaccttgccacaaattataaatttccagcttatgggtgctggtagttgcgtcaattactatcctaacaaatttagtaaagattttatttccctccaactttatttggggtagttgacgttataccaattcagtggataaataacccatgacgatgtgcatacttatgatttgctgtttacgtcttcttcaaatctccaatgatcactacgtatatatttatataagtataacccccacgaattatttctacccaaaacgtttaacactcgaaaaagaaaagaaacggaatgatcgagacgaccaagggcgggtcaggttcgtatccgatcaaaaccatcgtcgttttggttcaagaaaatcgttcttttgaccacaccctaggctggtttaaagaactaaaccgggaaatcgacggcgtcacgaaatctgatcccaaatccaacacggtttcgtcctccgacacaaactctcttcgtgtagtcttcggggatcagtctcagtacgttaacccggatccaggtcactccattcaggatatctacgaacaagtgtttggtaagccatgggattcaggtaaaccggatccaaacccgggtcatcctaacatgtccggatttgcccaaaacgccgagcgaaagatgaaagggatgtcttctgcggttatgaacggatttaaaccggacgctttgccggtttacaaggaattggttcaaaatttcgctatatgtgataggtgagaccgtttgacctgtataaattacatctgtataacggttcggttcatccaactaaaaccgaattggaaattggttgtctagcaaaatcccgctttatagcaaatttcatgtattggacaggtggtttgcgtcggttccgggtgcaacacagccaaaccgattgtttatacattcggcaacatcacacggaacaacgaacaacgagaggaaattactgatcgaaggttttccacgaaagacgatattcgagtcactcgatgaagctggttttacctttgggatttattaccaatgttttcctactactctcttttataggtatcttaatattttacgagttgcaaaagattttagtattatatattgctttgcgatattaatctttattagtattcttttgtgtttggtttttcaggaatttgagaaaactcaagtatttgacacgtttccacgactacggactacaatttaagaaagattgtaaagaagggaatctaccgaactatgttgtggttggacaacgttggtatgatctattgttg

SEQ ID NO: 37291 - DNA, 2454 bp, Arabidopsis thaliana landsberg
tgtcatggactaggatcaaaaatgccgaacagataaaaattatattatcaatagttggacttattctccacattataggccaaacaaaaccagtaatcaataaattatagggcaaagatttggaactataggtcaaaaaaaaaaaaaaaaaaaaaactgaatcttagcattaaacattagacaatcaaagtaaataacctaaatccatgatttaccacacgtccacactactaatttcacatgtggagtattgtactgtgtggtactcacgtggaaagtgaaggacagtgaagtatctatttctgtatattcttatgctattctaacttgatatgatgaagatgcgccgaccgttttatgaataaggacaaacattatcaaaggttggtgcttgacttgagacaattatatggtctaaataacttggaaactctggttgacaactatgtagactttttggttacattattgaggtgtttcccttcttttttttaatccattcacaaattttggataaacagtgaaaaaatatccgtggaagaagggtagttgagaaataaaaagagatcaacaagggtaaattaatcaatacgaaacttagatataacggttgccattaacttaaaagcacatttattaacatgagtcttcttcgcttcatctccaagaaacaacactcatttttgcgtttaatctttctctctctcttgatcgatttagtttctttatgaggacgaaccaatgaaagttgaagacgaagcaacttatgagcttatcaaagacgaactgatgaaagcagaagacgaagcaacttattggctaatcaaagaagaactgatcaaagcagaagacgatgtaatcatctcacgttatctgaagcgtatgatcgttaacggggattcgtggcctgatcacttcatcgaagatgtagacgtgttcaacaagaatccaaatgaggagtttcattctcagagccctagattcgtgatcgttaaaccacgaacagagaattgtggtagaaccgatggatgtgaatacggttgttggagaatcatcggtcgtgatagagtgatcaagtcggtgacgaccgggaagattctagggttaaagaaggtttataagttctgtgaaactgatcggaaaccgaaatcggtttttaagttcttggaaaaggagaagagaagagtaagagatagacgaatctgggcgatggaagagtataggtttgcaagtacgtggaaacaagattacgtgatctgcaagattcgacgtctgtatccacaaccatttgactacatgttggcccagcacattcgaggttactataaatgaatttttgatattctgatcctggatttgaacactcgattactgttttttggtttctagttattgaacccgttgtttgggaattttcatgtgttctcattatccagtttcttgatttctctcattcatctttgttcaatctttttgtttgtttggggcaaatcgtctctgtacaatctttatgttactagaattgaaaagaaagattggtggaatcgctttaaaactgtggcatctttaagtgttatttttggttatgcaattgcattgattttgtgaagaaatatttagatgtctggtgattggtcggtggatttgttatccagatccatatttgaagtgtttcgatttggaattcttctaagattagatttctctatccaaaggcataatttcttttatacattgatactattgctaatttgctctcaaacatgattctcaattgacctaacaaaaaatatatatacagtactaaatgtagacattacctacgattaaataattttattgttgcgtttacacaaaaaaaaaaattgttgttgctatcttaaatatactgcaatattccaaatttagtttgcgaaaagaggagatatcacaaaatgataaataaatcaaagtgtaatcaaagacttcaaaaatagatttcattgtacatttgaaacataagcaaaaaatacattttcttgatatacacaactaaaattctacaatgtcttaactctcaataactgtttataatcttaagttaaatgcttctatttacaaaacagaacatgacaagtagaaaattccatcaaataatgaatcttcaaaaaaaaatatacaccatgaaaaagtaaagaaagattcacaaataaaaaatggtttctgataagtctacaaaagtagctttaatatcacccagatcgaagttaaatttctattacgtacgaaatgcaatgtgtatattttgagtatatacaaaaatggttcatgtacttttatgaaaattgaaaactagctgggtgttatacaaaaaaaaaaaaaaaaagagagaaattttgtgcctaaatattaaagggataataaaaattcaattttgtgattggtcgtatgtcgacgacaatgaggcgtcttgga

SEQ ID NO: 37292 - DNA, 2788 bp, Arabidopsis thaliana landsberg
ataggaatgctactactgtaatcttttaattccaaacgactttgttatgacgtttttggtccatttttacattgttagaagtcagagaaactttttcagattatatgctttttcaacacaactacaatagatttgtacttttgtacgaattttcatgaaagtttgtgttaattttttattcttttaatatagtaataaggtctgattttatgattcgaaccctgttttaatatgtacgtactttgcataactaaagtaattcactagtagttacgttacaattattttgtcctaaaaaaatagtttcgtgtaaaagatcacaggttagtgaagaaataaaaaattattaaccaactttaaggccggtaccaaatatattaataaattatacttagtcatataaatttataatatattatcttttcacacacgttaaaagtaactaacataaattaatttcttagttttcagcgaaatattcgtctttaactatatattatttttttattacaaaaatatataactaaaaagtttccaaacatggtattaaaaaaaccaggctgtgtgagtcatttgattagtatggaacataaaaaataaagatttctttttttagaaagaatcaggttaatttggtaaaattatttctaaaaatcgaatctctggcataatgatgcaacaaaatctcacgattgatatatatataaaaaaaacaatttaaataaaaatagtagtaatactaattaagaattaaaagtcaaaattgtttagaatacatctcggatccagtagagggaaacacgtacttaaatcttgaaacttgaattagtctgagaaatatattctaaaatataaaatattgttattttcttctttaacaagaaatatatatatatacaaaaaaaaacaactattttcaactcattctcataattgtaatgaagttttttaaaaaaaatcgtcaccaaccacagagagccagtttacacagtgaacagagaagaatcaaatgaccaaactttcaaagaatatgctttttcaaatgaacaaaagaacaataattgtttctggtaaaactatatagaaaattctggatccaagaaaaaaatatacttcttttgagaattgtgaagtttttttttacttacctgaatcagtgatatcactagttggtgaatcatcttcaacgtcttctacatctccggttacgtcattctccgttactttctcgccgttaaaacactctttcttcacttcctcttcctccgtcgccaccacctctttcagatcttcctccgcctcctcctctgttttcttctgtttcagatcctccgctttcttagccgccactttctgaagctcgatcgctacttcagcgattgaatgatacttctgcatctgaagaacagggatccaattcagtcgccggcgatggattgccgcgaaaacagcttcgtaccccgatccagataccgcttcttcagctatccttagatgcgagcacatcgcgtcgattatcgcgttcgccgccgcgaattctcctctgaaccatgagatcaacgcatctttacctaatccttcggaaaccacagtcgccggaggaacctgaaccggaacgctcaccgccttcgccgtcgtgacgtaagcagggttgaaaccagtggctgatcgatctgtctggcgtgctggcgctgccgcaatcgtcatcgacgtagtaatccggcgaagattcagttgttatctctttgttcgattattccgatcagtcggcggcggaaacagaaaaggctaaattgggtttaaaatgtgggccgggtcgggtatagggtcgggtcgttgcacatgcaagtgtaatgagaaggttttttctgaggagagagtttggttccaatttatattgggagggatccgtacaggtgggagaggcttatggtgatgatgtggcactctcttgtagctgacgtggctaaacttctggcccctctttgcccgtttcttattccacagagttttcttttttgaaattgttttggacaaaagagtttaatttggtattatacaggaataatctgatgatgtttttgtgtggttaaattaggtagatggcaagatttgacgatgaaatttaaaaacaaataatgatgtttttgatcgccattaaatactatattgatttttaatttttttgtaactttaatttaattattatcaaatatgtgatttttaaaaatatactccatataacatgctattttgttatgtggatgtctaatttaattacctaaacgattatgttggtatgtagacgtctgctttattaagtagatttctaacaaaacaaaatttaaacgtgaaatcacaaatcataatttttatgtgattttgcaatgttatttgatggagttaaaacttgaattttctcaaattttaaaaatgtaaaagttatcaaatattagttttgtttttcttgtactctttatataagtttttttgtggggtcaaaatatgatgttatattattagcgtgcaattaagcgctgtattagttgtattcacttaatttaaaactcgtaagtttttgtaagttctttcaaaaagttgtgacatggtatgcatttttggggttgatgtttacgcacaatagttccttgggacaacaaaaggacggcgctgaacaaaagagttatcttgccgtatcacaaaaaatgactacaaattatgtatttattctgaactataaaagtactaatatcgttttctttatctataatcagacgattcaaagggt

SEQ ID NO: 37293 - DNA, 2311 bp, Arabidopsis thaliana landsberg
  unsure (1)..(2311): unsure at all n locations
tgatatgttggtaactagtgaccatttcatgattctcaaagaacacttttttttcgtgttgatagatttgtgtaagcttgtatttggttatagtttcagtgacttgtaatctgaataactgagttttntgtgtatcagtgtgacaatggacatatagcttgttcttcttgttgtactaaactgaggaacaaatgcccttcttgcgctttgccgattggtaactttcgatctagaataatggagagagttgttgaagcagtcatggtcccatgcccaaatgtgaaacatggttgcactgagaagttttcttatggcaaagagttgttccatgagaaggaatgcaggttcgctttgtgctactgtcctgcaccaaactgcaactactcggggatgtataaggatctctacagtcactactacgttaaccactatgacacatggaatcaaatcgggtgtggcaatttcgctggcgcatggctacgtatcagtgagaagattttagtccttcaatatggacagggtccattgattgcggttcagtgtttcaaggagccgcaaggaatgtatgtgactgtgaacggtatagcaccttgtgctccaggagttggggagttctcctatgagctctcgtacaagatgccgaggggagataacactatgacgtttaaatcagaggagatgaataggattcagaaagtgagtttccaaactccggagaaggacttcatgttagttccttattatttcttgggtgatttcactacattgaagatggaaatttgcatacgcaagctaaaaaaagatgaagaagaagctgatgaagacgaagaatctgaagaataagaagaagatgatgatgatgatgatgatgaagaatatgctgatgaatatgattgatcctcatcatatcatatgcatcgtggggcgtgccgatgataacttcatctaccctttaaatacatttctgatgtttttctgcagctactttagtttgtcatctatgcactctaaacgaataagtttcattgctctgagaattttacagggctttatttgattctgcaagaataatttctcagctttaaaaccttaactctgttttggagtttcattagataatttagatgctatactttgcacaatgtgtttttctgatgatccatgattttgaggatctctgcattgataatagagatttggttacattactcattgctaataaagttaggaaccaactattgtcctctgctaatgaggttatcaatatgttccaagatatctattttttctacttgtatatttttagtgtataagacagtctagcattttcatgcatattcaagttctttcagctatgtttatttttacatctaaacttgaagcagaataagtaacgtataagaatctaaattactaacatggacctgaaaagaaggagcataaaaggctttataaatcaaaagtacttgctgtcaaaaagcatcaagtcggtaaaatcaaacgcctagtcaccattgaacaaaagctcgttaatatcaaattcttcgttcatgttaaggtctgtgttgtttgtcctccatggtaagtgcttgttggtcaattgttgcgacttgcgagatgaggcataaacgattcagacacagtttggtctaattgaatcatttttggaaccgtttgtgtcatcaattcatcaccaactgcaaaagctgcagctttacatgtatgtattagatgacatgaagtaacgtataaaaagatatcgtgctacttcacacttgatttttgagttagaaactcatgaactttgtttattacatatggaacgagtcaatgagagtttagctttttgctagtaactcacttctttgatgatctcaggacctggcatgttttgacaagaaggctcatggttttttggaggactaggagaattaacaaaagatagagcaagtgagaacgaatcaacaatggtgctcataattggttctgttgaaactaagcttatttcgaggttttcgacgaggagtgatgcgacagccttgtatacaatgttggaaaacatttttttgttagtctttgagttatgtgtctcattttaattttatgctgcatgtcattattgtagtagaaaggaaaagtttgatatttcaaactctggaaaagtttgatatttcaaactctggaaacgtttgatatttcaaactctggaaacgtttcagcgggaaaaataagagaaggtaactagggttaacgcaccttttctttatatacattgcgaagcgagactctttggattccagacttaacacct

SEQ ID NO: 37294 - DNA, 1466 bp, Arabidopsis thaliana landsberg
gaaagaaagattggaagaagatgctccattgttgcatcctgaaatgaatatcaatgccaagttaaaagctgcaaaatccaactaaatatcttgtgtagaaaaacatagtgaggttttcttatatagattattgttgcgagaaccttccaggcacagttaaaaaaattcctaaagatgacagtgactaggacgaagaagatatatagatggtttcaaataaaagaaaaaatctttatctctaagatgctaaatacatagaatattatgagcttacactccaaactatagagccaaatgaatttttgtatagatgacagtattcatgatatgagaggcaaattgtatcggtttttaattctgcttaccttacccaagactggagccattcccattataactgatgccaatgcagatctgacgtgctgagaagagtctgatgataattcctacgtgtagatttataggtaagcttagcaaacaccgacagtattttggtcctttgcataatatgaaatcaacacactcttcttaagtgtgtacctttacacagggaagaatgtgctggatagcgagttcagggtttaaaatgcgacaaaacttggtaacttttccagcagctgctatccgaacttctgcctcattatcacgaagtagacgagcatatgcaggcaccagatccgtccttaatacataaggcacatgagaaagtataaaaaacgactcacagaaatttattaagacgactcaacaaacatggacttccaagtaccaaatacctttgaagtcagtaatctatcgtttgatatagaattgcatactaaaggtcaatacgtacattaaaccataactaactccaaccatcactgcttacctagttggctccggtcctacagcttcacaaagttcatagagctgttttgctaccatataacgcacacgccaggacttatcctgctcaaagacgaaaaaatcaagataaagcagctcatacatatctgccttacagctttcccataaagctcatcaatagaattttttaatcatattcacacatttatttacctgcgagaaattgacaatcacaggaagaatgtgtgcaacacagtcctggggctccaacaatttcccaagagcagcacaaccctcaacagccaataatctaaccgaatcttgatctgatatcaatgtcaataagatacttaaaatctgtaatattataatataaaaagacactgaagctgagatgtagacaaccgtaattctgcttaacttcagctaatggtcagtgttcaatgcagtaaccctaatacttgcctattacacatcagccacccccataactagggcttgatgaaaattgtaagagtatatgctggaaaaacgaaacatataataagggagagcataccatcttgcgtaagatcctcaaacatggaccatatgtctgtcttcaaatgagctgattc

SEQ ID NO: 37295 - DNA, 1193 bp, Arabidopsis thaliana landsberg
gtttacgaccccaaaggtggaaattgctttagtcaggttgtttcctcgttttattgaaccatccaaaagaaatttattcaataatactgggtatgtattgatatatcatgttatgctttgttgcagataccatgaagctagtgagaatgcaaaagctcgggtgttggaactgttgcgcgagttatccgttaaattgcaaacaaaaataaatgttcttgtctttgcatctatgcttctggtcatttcaaaagcattattttcccatgcttggtaagtttgcggttaatcaattctcattaagaaatttctgtagttttaatctaagtactgtgcacaactacagtgaagggagaaggcgaaagtgggtttttccaacgcttgtcggattcagtttagatgaggtaactgtgcttgctagtcgttgagtttgtagacagatgcgtgcaatttctaagaaatcacaaaacatgctgggctgtcttattcttatatatctcatgcacctattttgatatattttaatatagggcgcaaaaccattagatggtgccagtcgaatgaagctgacaggcctgtcaccttattggtttgatgtatcttctggaaccgctgttcacaataccgttgacatgcaatcactgtttcttctaactggacctaacggtggtggtaaatcgagtttgctcagatcaatatgcgcagctgctctacttggaatttccggtttaatggttccagctgaatcagcttgtattcctcactttgattccatcatgcttcacatgaaatcatatgacagccctgtagacggaaaaagttctttccaggtatatatataagcatacaaatctagaattcaccaaactgtttttttttctttaattgtaatgtttgatatcctctcaactggttctgtgccatcaggtagaaatgtcggaaatacgatctattgtaagccaggctacttcgagaagcctagtgcttatagatgagatatgccgagggacagagacagcaaaggcacctgtctcgtggagtgtggtagagagtcttgacacacgtggaagctgggtatagatctactcatctccatggatcttcagttaccttttacagggaaaaacatcacatattaagcaatgggagccgaaaatgtcgaatggcctaccacgccaacttggaaattgacagat

SEQ ID NO: 37296 - DNA, 2500 bp, Arabidopsis thaliana landsberg
ttctttgataggtcttacgtcagcgaaaaaatatatattttggttttggtttgtccaattgattttgccagtagcggtaaatataatgataaaaatgtgagaaatctacttaaaggatacgtgttgtttcttttgatagttggggaaaggaacaaaacacacgtaatgttgaatccgacattaatgtaaaaccaacatgcattttttttatagtaagtttaggtgaagatttttcacatttataataagcataactctttttcatgtttttataaacatttaatttgttagttcaacaactttggtaacaagtaaaccaaacctatttattgtttgacgtatgatgtgtatatatttatgtatatacttcgcatttaacgctagaattacatagtgcaaaaaaaggaaaagaaaaaaaagtcattgttccacatttttcatattaaaaacataattaattgtgccatgtacatatacattgaacttataacaagtcaacaacgaccattttccatttataaaattaaatatcgcaatagtcaagaaatatctagcatcataaaccgaatacgtaaccttttgatgaggacacaatgacacatccatcatttatactagctattaatccaagtttaagatctatttttgtaatcacccgttgcaaagaatcaatattaatattgcttagttttctacaagaattatccatcgttaagcagtcaatattacaaatgaagttaaggatgttttaaaaacataagtatataggtttcgattttatgaacatatccgttcattgtggattaattcaaactatcaataaatgtggcaacaaattaaggaaaagaaaaaagaaagaaaataaaagaacatccttaatttaatattatgtattttttttttattttttttaactagtgctcttcttgctatggtttcctgtgagaaaatcaagcaaaacatggctgttgcatctagggcatctagggtcattctctaaagaagtgatgatgtacatgatgcaattagggcagccaacgaccaccattgatttagcctctcctccaccaccctcagcttcctccgagcataacgatgacgatgaactctcagtgagcaaagatgaatccaacgacggtgaaatatttagtttcagatcaagtccaaggttactcgcagcttcttgattcatgttccttgccttccaagaagagtatactatgtgtgttgatatattattctacaagaatcagaataagaaacacagtaaaacaaaactttagatggagatccatggtttataaaacatgtatatatataaaaagaattgatcaattgaatacttatttttctatcgatcaatcaaaaagtgaagatgacaataacaaaatttcaacatatgagaacaaaaaaaattcgatgagaacaaattaacttggttctcgggttccaaagtagctttaccttggtgaagactagtagtagtttagttcttgttcttgacatttaaagagaggtagtttgatgtctgcatgttatgtggcttgtatatatattttagatagaggagaagatacacgcaagatgagagagggtctcattgaatgtatattaatgaattagtaggattagtttcatctagctttcaaaataaatattcttgtagaaaataattataatatgaggtgtttgtaagcaataaatgtaatttgaaaataatagtatgcaaaagattgagtatatgacttgtgctttgaaattgcatttattaccaaatagtatttggataattacaaaggagatatttttgtccattttcataaatcatcatattattagtatgaaaatcgaaattcaaattgagagggaagaagtagacaatgcatttgtttcaaacttggaaggttgtaatgtagttaaaatcggtgttgacaaaaacaaattgtagtttaatgggtagttgatattattagatttctaaagtcgtatatgatgatacttttattaataaaccgaaaattattgttgaaaaattgataagtattggtgaatatgaatttggatagcttgacggctagacgcacggccaacaaatgatagaaagattgaccaaaaacagatgaatggcttttgactgttaatattattgacttttagaatgccaaatagtaaaatggaagaataataaatgagtatgtgaaaattcatgggagatttggttttgtttgacttagaacaaatatggagttgtggttggtgtctaataagagatttatttaggctctgactagtgatgaaatcatggaaagaatatgacataagattgcttttgtcatcttagactttcgttagcctcatcagtcaaagtaaaaatctaactacacacaaccaaagtttgactataccaagacatcgacaatgatagaatcaatcaaccataactaaagatattacaagtaccctaattctcaacttttatacaagtacttaaatatcgtta

SEQ ID NO: 37297 - DNA, 1008 bp, Arabidopsis thaliana landsberg
ctttttggatttataattacacatattatgtgtatgcaatgaataagttagtgcacacacatatatacacataaatgtgtcatctttaatgagttcaaacttctccacaactggcatttccttgaaattgaaccaccaaaggctgctttatatgtgtgtgtgtgtttggtattaaaaaacaatagatttatgagtttgagatgtttggtggattgttttttaccttttgaagtagtgagaaaagaggagagaaggaagagttgtcaaagtgtactctctgcaattctccagaaacagaaagtgccacagcagcagcaacttcagaaggtctaaactccaaaaagtcaatacctgctcactcgacacaaccaccattttaatccaaaatcataaaaagcaaaagtgaaaaaaacaacaaaacccaaaaaagcacaaaaacaaaagtggtcaagaaaataaaacataaaggaaagactttttttttcacctttggttgtgctggctatcacttgtaatgatctagatatcaatgtgttggatggttcttgatcacatttactcatctttctcaagaaatatcttatgtatgagcatggagttattgctctcaatctccatttcaatctgttcaacaccaaaagctccattctttggactgatttagcctcaaacacaaactgaggatctccaacctgttccgaaatgtgatcaaaccgcaatcgattcaagacattgtcgggtcgaatagaacatctcgacaatttaacgagtttagaggagaacctgaagatctatcaacattggaacttcagtttcttcaattttggctgccaatgataaacaagccacagccaacaactgcaatatccaacctttgccactctacaagaagaatcacaaatcaagaagcgaaaaaatgagactttttgatgatgaatggctaaaaacattatcaatcttttagtttaaccaatgtgaacttacaggcaaatcatgaactgataagaa

SEQ ID NO: 37298 - DNA, 5223 bp, Arabidopsis thaliana landsberg
aatatttaacatcttccgaatatttgattttgttatgttctgtgtcctaacttaatgtaatgacaaggtgggtttttacgtaacgcatcacatttcacataataaacgttttatcatttttcctaataaatgctataattgttgcagttaaagcactgaaccaagcacagttagaagcaaatgtgagggtaaccggagaaaccaatttcaagaataaatggccaagtccctttgcggtggtttccggcatacttctcctcctctccttcttcaaatacctttactctcccttccgttggctcgctgtcgcagccgttgtcgctggcatttatccgatattagccaaagctgtaacatctcttgcaaggtttagaatcgacatcaacattcttgttgttgtaaccggtaatctttttcttcttttttaactcctttcaagctaaaattcgaataggctttagggagtcactctccaatttatatgatatggatcacatttctcacaatattaattaaggtcaatattaagatatatactaatggctacagtagatataagtatgtgtctataatattttgatgggtcaatttagacatattatggtcaacacaaagcaattgttctgtagttttttttttgtgtcttttgctctgcatttggcatttttatgctactttgagaccaaaagagaaatcaaaaaataaaaaaagatttgaaatatttttatgttagataatgtttacaactttttgttatagtatcttgttcaagagttcttgatcatgttgcagctaaaatatgttaaggaaaattgattaaataattactcaaatccgatttaatagctcacttgatgctcttcctttgtttcaatcagtgggagcaacaattggcatgcaagattacacagaagctgcagtagttgtcttcttgttcacaatcgctgaatggctccaatctagagctagctataaggttttgcaccttttttccatctcttttgattcatgcgtcaaagattttgttagtgctcaagtatttatttacattttcaggcaagtgcagtgatgcagtctttgatgagtttagctccacaaaaggccgtgattgcagagactggagaagaagttgaagtggatgaactcaagactaacacagttatagctgtcaaagctggtgaaaccataccaattgatggagttgttgttgatggaaactgtgaagttgatgagaaaactttgaccggtgaagcattccccgtgcctaaactgaaagattcgacggtttgggctggaaccatcaatctaaatggtataaaaaaggctcaagcgttacacttttttcttatgaccttcaccttcaatgtttgatatttccagctcctctgtttttcaaggttacataactgtgaacaccactgctctagctgaggattgcgtggttgcgaagatggcaaaacttgtagaagaagctcagaacagcaaaaccgaaactcagagatttatagataaatgttccaagtactatactccaggttagtatcagcacctgactttttttcttcattacaactttttttgttcttgattgagaccttaaatctttttgcttgtatgcagcgatcatcctgatatcaatctgttttgtggctatcccatttgcattgaaggttcacaacctgaaacattgggttcacttagcactagttgtgttagtaagtgcttgtccttgtggacttatcctctccacaccagtagccactttctgtgcactcacaaaggcagccacatcaggacttttgatcaaaggagctgattaccttgaaaccttagccaagatcaagattgttgcttttgataaaaccgggactatcactagaggtgagttcatcgtcatggatttccagtcactttctgaagatataagcctgcagagtctgctttactggtgaaacatctcttctaaccttttaatactttactaaagacacttgtggttttgtggacttgtctgagaattgagaaatatgacttgtatcagggtatcaagcactgagagcaagtcaagccatccaatggctgctgcagttgtggactatgcaagatctgtctctgttgaacctaagcctgaagcggtcgaagactaccagaactttccaggagaagggatttatgggaagattgatggtaacgatatcttcattgggaacaaaaagatagcttctcgagctggttgttcaacaggtacttgtaatataaagctcaacagaatgttttgaggtcttggtattctttagtctgagcacttgattgttctttctttacagttccagagattgaagttgataccaaaggcgggaagactgttggatacgtctatgtaggtgaaagactagctggatttttcaatctttctgatgcttgtagatctggtgtttctcaagcaatggcagaactgaaatctctaggaatcaaaaccgcaatgctaacgggagataatcaagccgcggcaatgcatgctcaagaacaggtgagactaatataaaccatatttttaatcactctcttaagcgaagacgttgtttaatagtaccttgaaatgttttatgaaacagctagggaatgctttagatgttgtacatggagatcttcttccagaagataagtccagaatcatacaagagtttaagaaagagggaccaaccgcaatggtaggggacggtgtgaatgatgcaccatctttagctacagctgatattggtatcttcatgggaatttctggctctgctcttgcacacacactggtaatattattctgatgtctaatgatgtaagaaggataccacaagcggtgaagctagcgagaagagcacgacgcaaagttgttgaaaacgtgtgtctatcgatcattttaaaagcaggaatactcgctttggcatttgctggtcatcctttgatttgggctgcggttcttgttgatgtagggacttgtctgcttgtgattttcaatagtatgttgctgctgcgagagaagaaaaagattgggaacaaaaagtgttacagggcttctacatctaagttgaatggtaggaaacttgaaggcgatgatgattatgttgtggacttagaagcaggcttgttaacaaagagcgggaatggtcaatgcaaatcaagctgttgtggagataagaaaaatcaagagaatgttgtgatgatgaaaccaagtagtaaaaccagttctgatcattctcaccctggttgttgtggcgataagaaggaagaaaaagtgaagccgcttgtgaaagatggctgttgcagtgagaaaactaggaaatcagagggagatatggtttcattgagctcatgtaagaagtctagtcatgtcaaacatgacctgaaaatgaaaggtggttcaggttgttgtgctagcaaaaatgagaaagggaaggaagtagtggcaaagagctgttgtgagaaacccaaacagcaggtggagagtgttgcagactgcaagtctggtcattgcgagaagaagaagcaagctgaagacattgttgtcccggtgcagattattggtcatgcattaacgcatgtggagatcgagttgcagacaaaggaaacctgcaaaacaagctgttgtgacagtaaagaaaaggttaaggagacaggtttgctgctttctagtgagaacacaccttacctggagaaaggagtgctgattaaagatgaaggaaactgcaagtctggcagcgagaacatggggacagtgaaacaaagctgccatgagaagggctgcagcgatgaaaaacaaaccggggaaataactcttgcttcggaggaagagacagatgatcaagattgctcctcgggatgttgtgtgaacgagggaacagtgaaacaaagcttcgatgagaagaagcattctgtgttggtggagaaggaaggtttggacatggaaactggtttctgttgtgatgccaagctggtttgttgtggaaacacagaaggtgaagtgaaggagcaatgtcgtctggagataaagaaagaagaacattgcaagtctggttgctgcggcgaggaaatacaaaccggagaaatcactctggtttcagaggaagagacagagagcacgaattgttccacgggttgttgtgtggacaaagaagaagtgacacaaacctgtcatgagaagcctgctagcttggtggtatcaggcttggaagtgaagaaggatgagcattgtgagagctcacacagagccgtcaaggtagagacctgttgcaaagtgaagattccagaggcttgcgcatcaaaatgtagggacagagcgaagcgtcacagtggtaaaagctgttgcaggagttatgcaaaagagttatgcagccaccgccatcatcatcaccaccaccaccaccatcaccatgtgagtgcttgatggagattgattgaataacttaaactcttgatgcatccatctattcacattacgtttagtctcattccgtgaatgccgaaataaaaaacaaaatgttccagcaaaggcagtttattagattaagcaactgtgttattcataaagacaatgctagtgatttttttttagtactttatgtattgcaattcctaaagtattttgaactttgatcttaagagtcttaaaatcaaacaaaccaagcagttgaaacagacctggatcaaagttagtgttaccaattaccatccataagctgtcctttcgtttcccaagtagctggaggagtagaaaccaaggtaggacatgatctaatgacttaagataatatgatttttcattgatcgatgagataaaagaacactgatcacaccaaaaaacaaagaaagtgagttttataatgaagcagattaaaatatgagatgataaaggattatatacaagatgctaacacaatgcgagttgtgctatatgatgatactaatatggaagtgtgaagaaaactaacaaatcttctaagacctgttttcatttatactctgaactttaaattccctatttcacagcattgctgatcattatcttcttctccttcatgacaacaaaaaataatctggaagagagaagcaaaatccagtacatgtcctgggacaaaaccgtcttgagagtcttcacatcgtgggtattatcaacaagttcgttcaacgtcattttgtgcatatctcagcatttccaatacagcttcaacgtgt

SEQ ID NO: 37299 - DNA, 2721 bp, Arabidopsis thaliana landsberg
aatgttttattgttttggaaaggataaaaggtgggaaaactgtagatcagatggataactattaagatcagacccaagcgtggaacatactccagaaaaaaagaactcgttgttaaattcattccactttggaaacaggtactctataatttactattttccaaactctattttatttattatgtttttcattttttcccatttatattcgttcaatttgtttttatgcactgtatcgtataataatgatatcatgtcgaccaagtaagtggagattcggtattataagacggcttaattacgattattctctctcttaaatactataaactttagcgaagcacatttttatggttggaaaatttgatttaaagtcgaaatggtaaaataaaaatactattttatcgtcgaatgagaaatagttatttcgttgtgggtcttcctcttaaccattggggtgttagactttttctcttttagttgagacaaactaaattgtacctcattttttttacacttcgtatattacataagcattaataggaacacagttgatataacacatgtgcatctgtacaacaacactttaaacaaaatacagtcacatatgtattgcaagttttcaacatgataaactagtaaacatgagaaaaaaaaaagcgaggatctgtttatttaaatttttaattattattactcaacgttaaacaagtatatgtgattcatagtagtgtccgctaaaataaatccaatattggaaatcggacaaggaacccaacgagagtagtacgaattagtcatcgtcactcattactgacattgctcgagcgatttctagtatatggttttattgtactgaataataatagatttctagaaaccatgattaggtcagcagtcatatcaacatggcaaatcaaatttagaacactattctattgattctcattgggccacgaggttctcttattccccggaaagatatttaattttatcaaggttgttccaaattgtgaatagaggattaatataatgcaatgaacagagggttaattattgattaatgcaatgcatgtaggtggtctctaatcgcgggtcatctaccagggagaacagacaacgaaataaaaaattattggaactctcatctcagccgtaaactccacaacttcattaggaagccatccatctctcaagacgtctccgccgtaatcatgacgaacgcttcttcagcgccaccgccgccgcaggcaaaacgcagacttgggagaacgagtaggtccgctatgaaaccaaaaatccacagaacaaaaactcgtaaaacgaggataacgtctgcaccaccggagcctaacgccgatgtagctggggctgataaagaagcattaatggtggagtcaagtggagccgaggctgagctaggacgaccatgtgactactatggagatgattgtaacaaaaatctcatgagcattaatggcgataatggagttttaacgtttgatgatgatatcatcgatcttttgttggacgagtcagatcctggccacttgtacacaaacacaacgtgcggtggtgatggggagttgcataacataagagactctgaaggagccagagggttctcggatacttggaaccaagggaatctcgactgtcttcttcagtcttgtccatcggtggagtcgtttctcaactacgaccaccaagttaacgatgcgtcgacggatgagtttatcgattgggattgtgtttggcaagaaggtagtgataataatctttggcatgagaaagagaatcccgactcaatggtctcgtggcttttagacggtgatgatgaggccacgatcgggaatagtaattgtgagaactttggagaaccgttagatcatgacgacgaaagcgctttggtcgcttggcttctgtcatgatgatattgattgatccgttatgtaatcttttttgtgcattcacagtttgaatctattccacgtcgtatcatatcataaagtttaggatctaaatattagtccattagttaaaattatctaatgcaataaaacccatgggatgtttggattgtacgtaaggttaaaatattgcagtcgttgctttagtggaagaattaaactaatatgatgtttttctttgtaacgtatttactattttcatgtaatttaataaagagggtacgaaatgtaggtgtacatttgtttgggctgtatatatttctattgacattaaatacgccaaattagaaaagaaaatctttagttggaagcatctattatatgtacctctttcggaatgtaaaatcacgtttaatatttctgaactggtaatcaatctcatctcctaaaatttaatacatatcatcattgtcaaacaatcggagtagcgacgagaactatcattgtttttctcttgtgatattgccggccaaatattattacctcaatcattttgaagcgagtaaacatagtttttttcccccttttttttgttcttgtacaccaacataaagctgcatcacatctgcgaatcatcacgtgccattcaagtgattactggaacgtgacatgaacgaatcttcacattgagtgttccaactctcctttgtacgaaactccaaacaagtagatatatattcaattattatggatgttggaacaatcaaattaactcttgtgcttctttatcgagagacatgaaaataaccca

SEQ ID NO: 37300 - DNA, 1966 bp, Arabidopsis thaliana landsberg
  unsure (1)..(1966): unsure at all n locations
cggagacagccccgttgctcaaagttatgcgaagaacatgggactctatggataacgttttggagctctcagcattgtaagaacctgttgcattgcaagaaatctatttaagaaacgcgtaagaaattctttctgacataaaagaagttgttgtaggtatgcaaatcagcagatgttgcggggagagttgaaagccaactgaaactagtgataaggccaatgtactcgagtcctccaatccatggtgcatcaatcgtggctgtaatcctccgtgacaagaatttgttcaacgaatggactctggaactgaaggccatggctgatcgtatcatcagcatgaggaaacagcttttcgaggcattacgtactcgaggtaagtaaggtcttattgatttgtataaggaatgtaaatggacatagctaatgaaatgaaattcaaaatcactgtgacaggcactcctggagactggagtcacatcataaagcagattggtatgtttaccttcacagggttaaacccagctcaagtctccttcatgactaaagagtaccacatctacatgacatctgacgggtaagcgcctgcctctcttcttcatctattaattttcttgaattttgtctaacttagtgtgtgatgattgatataaatgaaccaaaggaggataagcatggctggtctgagttcgaagactgtacctcaccttgcagacgctatccatgctgttgnnnnnnnnnnnnnnnnnnnnnnnnnnnnnnnnnnnnncaccaaagcttcataataaagattttgttcttttctttctattatagcatttccggcagtgacaagataaatgtcgttactattattattgtttcatcccagtatcaataaagtacgcaagaaagcttttgtgctctctcttctactattgcttacaactcttttttggtttcttatagagtcaaatgtttaagagaaaacatttgagatttaagctggtgaacttgaatacagttcatgtagaatctgaggttttagcatatgacggaattgcagaaactatttagattaaactagcagagaacaagaataagttactgcagttagttcgtttcacagagtatacggacgtgtactcattgcaggcaaatgaaatatgtatatatatattgaacacagaatctacataaattcactccaattgatccattaaaaagaaacagagaaaaaaaattgatccagccagggataattcataaaagatgcacatacatatttatacattgttcatgtatggtgcattttgcatattatgtataagcttttggcattttacctacatcccttcaagaggtaggatgagacttcttctgttgctttgattggagactcgcaatcgttgaagtccagcactcgacgctccgcctatagattgagaaatgttcaaaacacaaaatcaatggagcataaaacatttttctttgtttctagaactataatctcaaaaccgtctacttagagagtgaatgatttgtagagtatgtatatataccagtagaggatcattattctctttatccaattccttcttctgcctcgcatcatcattagtaggtgaaattgaaacctccattgcatctgcaaaagctgcaaatgcacttgtatgttcatttatctgtgtcatcactcctatgctctcgtagcttctctccccaggactgaaaatgtagcccatgtcctgaaaaaataaatacaattaagttgcctaaggataacatgtctatatattaaaagaatttgaaattatgcacccatgaagtaaaaatgttgaatataggatacaaggatcttaaggcattatcaagtacctcgatagttaaatctgtgtcaaaccttgggctgaacaagaaaaagtttatgtaaaatggagatttccaggctgagggagattcaagacctctcctgaatggagttccgcag

SEQ ID NO: 37301 - DNA, 2047 bp, Arabidopsis thaliana landsberg
  unsure (1)..(2047): unsure at all n locations
cggaaggacaccagctgcggaagctcttttcaagtgtcaacattttgtgtttagacgggggcgactataatctcagcgacgtgagttgctcttaagagttacaacttacaacaatgtaactatgactttaagcgacatacgtggagatacatatttatatatatcttactattatgaaggatctgaactattagaatggccatgaattctgatttacatattaatagtggacggcagaggcaattgttttccgactatcaataaaaaattgtctcttgattaaattatatgatgatacagattgtatgaaattgatttgtcccttgcttactcaaacgtcacaagactcgcaacttgatgtcttctctttttttgccaaccaactttatgttcttatttgatttttgtgattttaccatatatatatcctcttccgttttttttcacaatttttatttacatctaaagtaagttattgaatacgtttccacattttacaatatatagttgtaaacattaactatccatttgttcgaagtcaaccaaaattatcgacctaatccgatttcgtcatacacacaaaaaataattctcgaatattttattttgttaggaacggtaattgacggctgacaagcgatgttggtgaaaacaggataatgcatctgacgccacgtgtaaagaagtctcaggttttctcgtaatttacattaaaatcggtgtcgtaacaataaaacgccttctctcgcctataaatatatatctgagcctactttggttctcatgtttaaggagacccagaaaaaccctcttttgcggagaaaaatcacagagaaaagtagcgaagtttgagagaaattgaatctgcagattctctcacgcattttcccagagactgtttatcttcactacctgattcgtccttcagaagtgtgaattgaacgaattcacgatgaatcgtttgggtcataaatccgtggtttatcacggagatttacgtttgggggaacttgatgtgaaccatgtatcttcaagtcatgaatttcgattccctaacgatgagattcgaatccaccatctatctccggctggtgagagatgtcctccgctcgcgattcttcagacgattgcttcttttgccgttcgatgcaagcttgagtcatcggctccggtcaaatctcaagagttaatgcatctacacgcagtctgtttccatgaattgaaggtaggtttgagatttccgaaatgacatttagctgattttggatgttttccaattgttaggagtgattcactagtttgattttgtgaatacagactgcagtggttatgctcggagatgaggagattcatttagtggcgatgccgagtaaggagaagaagttcccgtgtttttggtgtttttcggttccttcaggtctttatgattcgtgcttaaggatgcttaatactcggtgtttgtctattgtgtttgatttggatgagactttgattgttgcaaatactatgaagtcatttgaggatagaatcgaggctcttaaatcttggatttcacgtgagatggatcctgtgaggattaatgggatgtcagcagaacttaaaaggtatatggatgataggatgctgctgaagcagtatattgataatgactatgcttttgataacggagttttgttaaaggctcaacctgaggaagtccgcccaacttctgatggacaagagaaagtttgtagacccgtgattagattgccggagaagaatactgtgcttactcggattaagccagaggttagaagattcatctctgttgtggctggatatttattcatttcatcttatttgatgctttggatttaccttctctggcatgtgataggataaggtcgcttaagtatatttgagtgatttagctntaatattgttggaactgaaaccaagttattgctgatgcagatccgngacactagtgtgcttgtaaaactgagaccagcatgggaggaggtaagaatttatttgacagccaaactaggaaacggttgaagttacg

SEQ ID NO: 37302 - DNA, 1126 bp, Arabidopsis thaliana landsberg
ccggacagactcttaagttttaaagtagtggcagcattatgttcatcttacaagagacagactcgtgaacttattagcttgacggccaaattttcttttccgaaatttggtagcaacttctttttcttcccttagcttctcttttaatatatggttatacctagttaaatcacccatactatttatcttatgtgttatctactatctgtgaaccactgttgtgtcattatagtatcatattttatgttattgagatgtttagatgtgtgactgcacctaaagctcttgtagcataagcatcttcatgcagctgttgattgcccctgtgtttgttatattgttttatgcagctttcttgaccttccaaacctgtcagcgtctatatatagcactgatctctgtaatagacttcgagcatttctcgttgcttgtccgccctctggcccttcaccaacagttgcagagctcgtgattgcaactgcagactttcaacgtgatctttccagctggaacattaggtaggtcgtttagattatttgatttgttgattgtctgttatttttgactggtatcatatttcaatttacagtcctatccaaggcggtgttgatgcaaaagagttgtttcatctatatatcatgatttggattcaagataaacgccttgcattacttgagtcctgcaaacttgataaggtatgtatactgaaatttccgagtggttttcttcagatatttttttttctctatattttcccttgctctttgttcttctcagcctatgtcgtatcattaaaactaacttctttgatcattacaaaacctgtcattcaagcaggtaaaatggtctggagtcaggacacagcattcaacaactccattcgttgatgaaatgtacaagaggctgaacgaaaccattcaagactatcaagttatcatttccagatggccagaatatatctttgttctggagagtgtaagtttagctgttccttcataacttttgattttgggattgtgaatatattgcgtatacattccactgcatgttataagcgtacaactttactgtatttatggtgtgaatttggagtgaaaaggctgacactgattgtgtttctttaggc

SEQ ID NO: 37303 - DNA, 2284 bp, Arabidopsis thaliana landsberg
gaccttgtcctgactcaccttcttattaatctttggcaatggctcagccattgcgtctaggtcatccccgcttgatccaaccgctacatacgaataggagcctctgaacagaggatcacttccccatttgctcttcaagacctttgtaatcttcatggcttcatcatcatcattcaatgagccattggtcaagggctttgcggtatcattcttaacttccttgcctgtcaagcaagagatagtggtcatgacaccgtctttgatctcctcatcggtaagtttctcaagctcgagagcttctttgcctgcaaaccaagaaagcaagacctttgaattgctatggattggggtaatggtcgcggttcttctcatccaccatggaattttcacgaacctaaactcggaatcgtcccggtcaaacacaagctgcaaagaggggaactttccttgagacatctcgacgaacagcttgttgacaactccatagcctagtcttctaatagcgtctgatttgaaatcaggcaaaggaggactaaacaattcagcatcagtctcaatctctgctttaagcacacctaaagagacagtaacaataacatgatctgcaaaaacaacagacccatctgagaaatgcagcttcacttcattactctgccactcgatcttcgtgacctttcgattcaattggataacaccttgaggaagcacagatgccaaatgatgaataacactaagatagcctttagctatagtgatttcttctcctggaaacatctgatactcactctccgccgcgaaatcaagcgtcgagagttcatcagcagatgtgtaagtcctctgtgtgttactaaacatcgtaaaaatggcttcttcaagtgacttcctactccatttcccataccctttaactccttcttctcctccattgctgattgaatcccaataagcatcaaacccagatttcaaaaacgacccaacactagtactacttcccttagagcaaaccctagtggcagtttcgtaaatatgagccaaacgactcaaatcggcgtcggattgagagatctctttcccctgagctaattccatgagagcagtgaacaaaccagagatggattcaacaatggaaggcccaatctcgaacccaccttcagcaaaggtcttagctttatcaatggtggaatccatacactcccatggctcatcagagactaaagaaccagtctctttagcgattctataaacagggcttccaccgattccgtggatccacgtggcacccatctcaatcttctctgatgagaactcagaggtattgatcctaccgccgattctagaaccgccttcgacgactgagagctcgaaggtgttgttggagcttgtgtagagcttgttcgccgccgtgagaccagccattccagctccgattataacaattcttgctttcttcgccatagttaaaggaatctccttgtcggtgttgtgttatatgcttcgatgaaaaaaggagagatttttatctgtgtgttttggggattaggggaaggggacggaggaaggtgaatgaatggagagagattgctttggctcaacatttataagggagagtctgtgtgtgtgtgtgtgtgagccttaagcgtgtggagagattttagttacaatcatcggttaagtttaggtttttgatctattaatttttagttaatcatgaattagtgattgacaatgtcataattaattattataatacttcaaagttaggttaattatctctacaaagtactgtgttttcaacatcctctaaatgctttttaaagaaatcaatcaaattattagcatcagtatcacacaacacacatgtccaaaaatgtgtacatgtcaattagatttcgagtcacctcaagccaaacctatcctctcactgactaattgatttattgtaagagaaaaaaaaaatgtatatatatatttgttttaatttcacttgtatttgaataaaaatgacacacttgtataagtgagcacaaaacaaataacagaaaaacttttggatcgttagaggcggttgaactgcctcaaacgcttttttagtgaaaaagcaatgtgatgaaaagatgtgcatgttgtgcaacatgctccaaacgtaccaacaacgtgtcgctatttataccttatgtgtttacattattacaatttgaatggttatgatctatgataataaataatagtaatagtatcatgcttataagacactaaaactaattgcaagaatctggataaccaa

SEQ ID NO: 37304 - DNA, 1286 bp, Arabidopsis thaliana landsberg
aaattaattctagagtgatcatttttaggatagttaaacttatggtgacttcattgagtttaatctggattttggggggggacataagaaatatagatgcatatgtaagtgtacacaaatgaatgggccacttgacacctaatgatacaaattttcaaagaaaactcagattgcaataatggaagcatatcaatagtagtatgagatctcaatctacaatcttcaataacatttaaaaaataaaatccaacaacaactgtagcgtataggaattgttcatctcttttcatcaaagaatattttaaattttgttagacaagaattaattaatgatttatatggttgagaaaactttttaaaaagttgtaaaactcatcgaataataaatcatttttaatggaaaatatagtttttatttttattgtgtggtattgctcggactcaaggatacatggagagagaggcagagtcaaatccaatttttcaactatcttatatgatattcttctgtgctttttatagtttgcccgaccataataactggtcctaactttcattttttttgtttccatagaatatgtattcctatgattttttttttaatagaattaattgtgttacgcaatgccaaattaagattcttttttttaaaatcactttatgaagaagcacttacaagagagttgtgtctagaatagattccagatggaaaagctgtcacgaaaagacggtttaagcttttgccttgacgtctaatccaacggtcgatcttcgttcatatcaagaatccttatgacgtggaccattctcttccctccatctgtacctcttcccaacctctattttttaatttacattggcaaataaataagaaggattgcaaaggaaccaatagaaaaacatctctctggccttctttcttcttcttcttcgttgtaagccattaccatttcttctccctctctctgtttttctttgctgcgtatctgtactcagttttcaaacataaaaataaaacatatctttagctgatgccggcttcttcttgataaacagattttctacagctttgtttctttctaatataataattcttgagactttttaaaaccctctgcgaaacagatgattctggctttggatcataaatctgtgatttgattctttcgccttttattcttagccaaacacataaatgacttttactactcttcgtatatgacttctaatgttccaaaacatccttgtaaatgaactctttctctctgtctctcctacaccacacg

SEQ ID NO: 37305 - DNA, 1988 bp, Arabidopsis thaliana landsberg
  unsure (1)..(1988): unsure at all n locations
gctgatgaggaaaggctcgcattctcggttatttgggtatgctttatccattttcaattgtcattgcgaggcatattagcaaattggtaaacggttagcttaagcataattcatatatttaggaaatgagccctgacgctgagattatctcaacgagattcacaaagagtattatcaagtcttctgcagcattgtcctatattgaagctcaggctcggatggatgacaggtacattctattttaccatagagttagagggtcattggcttgtttgcttacctttgctactacaataaattatttgattttatgctctctagtcatttgacagtgagaaaaatggtagcaaggattgtcaaaaaattattgtagaaaatttaatctttctaatttcatgaatttttatcccattattttgtattgtagagttgtttcagattccctcttttactttatgccgaagattgacaaatgtaattaatttcttgtagccgattgacagactccctgactacagatctgaggaatatgaataccttggcaaaggtttgagacaccttcctctcacaagttgccatatgttccagaaatcatagaaagaacacaaccattttgacctgttttttgctcttgaaacctgtagataatgaggcaaaggcgtatcgataggggagccttaactcttgcttctgcggaagtcaaatttgatattgatccggagaatcatgatcctcttaacattggtatgttatctgagcaaaatttgtttcttcttgatgaatacgaacgatgttttcttagtctttttcacccaaacacccatgaaatacaaccacctctatccttctgaaagatgtattcaatttattcatctgtttttcatttgtcatcatgactctgttttgcgcaggtatgtatcagattctcgaagcaaaccaaatggttgaggaattcatgcttgctgcaaatgtttccgtcgctggacagatcctgaaactattcccttcttgttcactattaaggtaaagtttgtgatagttcttttcttcttgaaggtagctttttcttacatcggtggtctgtttctcaaagatagcaatcattctgtatttgttgatgggttcctctgcgtaaaacggattttattttttctgagatgtgacaaattagctttcaactgttgctaaagatgcatatatacactggttcatgaattgtttagtcttctcgtgaaatttggccataggtggttagattatataattttgtgcatatttagcataatgaatattatgggatcccaagtagctgttgaggatgtgtttagtttttacaggcaattattgaatttctgttcacttttattatcaatagtagttcatcatatctctggtttcgttcttcatgcaggcgtcatcctactccaacaagagaaatgcttgaaccactactgcgtactgctgcagctattgggcttaccttagatgtctcttcatctaaagctttggctgattcactggaccgagctgtggtgagtatttctttttgtctgcactgtctatatggcagccactgagtacctccctggtttctttctattcataatcaaatgcaattgtcactttctttgatgctatataagtaacttacttccttgtttcaaattacgttctttttattcgctcaatattaacaaattcgtaattcatcagggtgaggatccatatttcaataagttgatcaggatattggcaactaggtgcatgacgcaggtgatgcttccgtgatgactgagtagtaatattgctggtgattttgacaggatatcgccatatttaacattttaaatttattactacgcaggctgtgtacttctgtagtggggatctcagtcctcccgaatatcatcattatgggcttgcagcacccctgtatactcattntacatcccctatccgtagatatgccggtaagtgataactgctct

SEQ ID NO: 37306 - DNA, 1449 bp, Arabidopsis thaliana landsberg
aaaactgtttggccaacgttgctacttgcccctgtctttaaaaaaagtgctggctattttttgttccattagtgttgcttgaaatacttgggcaattcttctactcagagataccacgacatgatcttttgttgtagacactcccctttcagtcggtgcattgtttcaggattttctgcggaaagccacttgtcatcaaatcttcccttgtgtaatccattatttatatagaaataaattaatcaacctcttcgtttttgcagtgcagatcagttagtatccatgagatttcttgtttgctattgtcggggaactatattgccattgcgttagtcgaccaggacaagctaaggttgcttatctcttttgttcttcttctcatatattcgctctagtcagatcccttcatcaaaaaatttggatgtgtgctgcttctttcatgttgttcacaaaatttgctcattgacagtcttagcctttttccgaaaatgttattttcccttgattaagggtgtatgtgcctttcttgtttcaagtgcttttgtgcaagagtatgataaagaagttgcatagagttcatgctcgtcttttactgttgcagaaagtcttggttggaggaagtgcttgtctctggtcttcactccagcaattcttgttacactggtgagaattgtcccttagccttagacttttctcttccaaaatggtaaccccagtttcacatccttgattatatcttatgttgataatctctgttataatcattggaactccgggaacttatgaaaccaagatcagacaaaaggaccgttctttaactaacgaaagcttaaatctagaagcacaaacggtaaagactacattagcaaaatttcttacatcaacttgtttccttcatgttttccaataggtcactatatcgtgatatgtggctatgatgctgtagggatgaggtcgagatcaaagatcccgcagttccaagtaatgttgtgttatatctcattgctccaatacttacaaatcggtgctctacagcattttcttggaaatgttatatctggttgtcatgttcatctatcagcaatacacattgaaactgtttagtaatgagttaaaatctaaacataatgggaagagagatttaggttggtttatactaagatattccatcttttagatgcgagttctcattactatttaagaagagagattcgctaagtaagaaagagcacgtatgcatcatcttggaactagtaagaattgacagggaaatgttttgcaggatacatgagaggatctcgtcaaaatgcctggagaatgcccggaaatcgtttggcacagacgaagatcttctcctggtaatctaaggaaacattcatagttggttttagtttgtgttgtaatggctttgttgttgatgtgttggtaaattggatttgtgcagataaa

SEQ ID NO: 37307 - DNA, 2023 bp, Arabidopsis thaliana landsberg
catttttatttaataaaagacgactattatcatcattattattttgaaagtggagaacaacggacctacttattttgtgagatgatactcctatatgaatatgatgatttaagaaacgtagcataaaaataaataaaagtttaccaaattagggagaagttgaatgggaagggaatcagagagagatacgacgtcggatccggaggtaaccaaacttgccagctccaggtgacgaaccttcgaatatcagcggtaaataccctgtcgcagctttgtatctctgctgaatctgaacattcaccaccacaccattagagcttttatatataactaagttcctactaacttggaatctcgagtgtgtttacatacctcgagaatttgttggctgctgcgcaatgagttacggcctacgacgcagactgttccacctgatccaccgcctgtgattttggctccatacaatgttccatcctcagaattagacttgttatgctgcatcccttgtactaactgcaccagcctgttggttccatccgatcctagtccgcatgcgctgtaactatagtgacactgaacaaaacaagtgtagtaaaagagcatcagcaacatgttaaatccatgatcaagaaactcaacaactcttggtctcacagtagtttgaaataatacctgataaagaagtcccccaagagcagtaagttgctcatctgatgttgcagaagtcaatagggctttaaacgtctacaaaaagaagtacttcacaatcatctcgattatacgttaagcatagatattaaccaaccagaaaaggattaaaaaacagaccttgaccctgaagttttcgtatatagggtgtctggcaggagctttaacactgtaagaacgcttttcatcaatcactgtgacaggatcatcatgatccgagtattcctcaatgaatgtctgacccagcatgatatctggaagcttatctgcataacgggcttcatatctgcaacataaccaaagctaggcgggattagctgatattttgctggtgtgtgacttacgaaacacttttacttcgacttgtgttctcacctgtgaggcgacaaattgcacaagtaatctaatgaagcttcggcctcaagtaggtcaatcccttcatcctctagttcttccgggttgcctccattagcacttgacgctgatggtgagagaatagaagacgccattgacttgatcatctttctccccatgtaagcgccaactctgaccgacctatagtctgcacctccaacgctgcaagacaaagctaattattcaaccgaactgagatgatacgttgagggatgagatagaaatgctcacgtgaatatgcaatcttttgagtaaaaggagaaaatttatgtctagtgacgttaaaatattttgtgtgaagcattatatgcatacctattgagaagaaaacagaatgaggaaaccgtttacctgtgtcgaattccggaatcaattccccaaaatctgacatggttgggaatctcaacaagcccaactacttctgcaggctacatgttttttaaaaacatttataagagaaatgagtggatcaaatcttgttaagaaaggagatatcaggaatggtgatgttttgcttctagcttaggcgttactaagacctacttggcagatcatggccaacagtttattggcttccccacaggaagaagtcatatgatccataacaccacatggagctccaacaatgtgattctccacctacaaggcaatataagagaattagtaaaccaaaacattgcacaaagtcaggaaaggagttagtatgatgctgaacatgaaaccttttggcatgagtattagcaggatctcttggggtccgatacttcagtccttgcacatggtatatcaaaataaatttggtggggaatagaacagaaacttaaaaatgcattggaattcaaaaattttcccgtatattctattattggggggggattatttccaggcttattcttaaaaa

SEQ ID NO: 37308 - DNA, 3263 bp, Arabidopsis thaliana landsberg
acaaataaggaacccattcctgtagaaagcttctacatttatatttccatgcagaatcaatagggaaagggaaacatcgtataagcacctccccccacgatggatctatctcagtagctcctgtgacgaaaaccataggaactgttaagagggtttttgaagaatattcatcgtaccctaaattgtacataaataaaagtaacaatacagaaaagcttcacgcattacgtgttgcagctttgagtgctttccatgcatcaccaagctcaagtaacacttgtgctttctgttcatgcaggattgcatctttgggaacaagattaagagcagcttcccatttccctagagccttctggtattttccttccttcaagagcaatatcacgatgagtaaacaagataaaactagaagagaattcactttagtagttccataaacaaagttataccattacaagaaatggcatgaatgatgaacctgaggcctttcatatgctaacatgttgcatagaaaaatgtctcaacttttctggaagatacaaacttactaaccctaagtctgatataattgtttcatgatcgtaacgccaagttcgttactaaatctgactcttttcatgtgtattctttccattccacattcactaaagcttcccctttactttaggggcgtcttacttttctttgataaagtttgcagtagcatagtagcagaatatcattcgaggtctataaacccctattttaaaggctatttctaagtcagtcttaatttcttcccgcctcattttttctatcaaaaactaacggatcatccaatgaaagatgaatctgctgttggaaattgaggcaagaagatttcagaaaaatgacaacttttcaaaaagcagatataacagaggtttaataggcctcgaatcatgaaaatatgggttaacaaacaaaggaagactgccactatgcaactcaaacttatctaccacgatcacatcaccaatgtgatcacaacaacgtgatgctaactccttccgatgaaccaaagtacacaaattgctgaaatttaaatacctaaattttatagattttagggtttatttagctacagctggtttacctcagcgaacttgtctccttgggctctaatggactctgcgagtttcttagcttcgacatcgaaattctcacgaggatgattccctccaacctccgacgagtccaattgatcggtagtttgtctacgatcaatatcatcttcacgaaaatgaagatgagattgagactctagagaatcatccttctcgaaaggaagatccgggaaattcgataaaaccaaacgagatcgtttcttagggttcttgttccacgttagcttcatcttctctactctgttcttcgctccatgaacaactatttaaagcggctctctcaattagggctaatctctccccaaaaaaaaaaaaaaaaagagtcggccctgtcacgatttgggctcgaatataatttagcccattataaatcgaacttgggtccgataagaaactcttaccatcttgtgttaagttggatcgggtacagtttcttcgggtagatgagctttaggacacagtaaggtaaataaaaaaaaacttaactctttgttgtgggcagggttcagaattgagaacaaacacaatatatgagaagatgtttcataagatattagtcatgacaaatttgtattttattttatttttgtgtaagaaactgtcattacgagatacaaatctaacttctcaataaagtttgtgtaaaggtagaggaaaactagttagtagcatcatctgttgttacctgtgtttaaatccagcagagtaagcatcatcccataaatctacaacttctttgttagatgtgacgaagatgagacttccacaaaaaaggcatcttcagaattgtttcagcttcgtttgcacttgcaccaccttttgtttttcttaccttcgcattctagtccacaatcccgagactctagactggtgatgccgatttgtgcttcccaaaccgctgtcgctcacactccctccatcatagaggttttcatgaacatctgagaattctttcgcccattgattcagtggtatcacatatgaatcatcctttgttgttttcttctgctgctcaaatcttttcacattttcagatatctgatggaatgttctgtttattttcgctattcctctttcaaccggttccaccacatgtgaaactgtgaatctcatgtcatccacaatctagcaacataaaattaaacttttggttatgcatgagaaaacagttaagaaaataaataaattcgttatagaagaaaccagcttacgatttcaccactcccaagcacaacatcacggacactttgtgggaaattcaagcgtttctctctatcgtcatgtctaccataccgcgttctagttgttcgttcactatctttaacctcttctggatcaggtggtacatctatagaggcataatctgacatgactgctacattacgaacacatctttctccacgcttgtaaggcgctgctggaaacacatagagatggacaacagcagcaatacccatctgtaaaaacataacattttaagtttatactttcacaccaatctgaatatggatacttaaaaggaacaattagttttatgaaaactacttcgatacagatgatgtagtcttgtattcgcgttttcagttccttagccaaagaccctttgacgagtcccatagagaagaggaacgcaacaataataccttgccaccaggtgaggaatacaatagacttaaatgttagaaacttggccagtggttttatgggtgctagcttatctttgatgacattatagaactgtacaaggcaatacaatgcccatgtttgactgaaattgagcactacagccagatatggatatctgcaatgaggcaacattatcactaaatcagatattttgtcgatgaccatgttaaaatcaagatatagtaaatacatttcaaaagggaggaaacaagagattacccataattccatgcgaacttcccttctccataaaccccaaaggcttcgaggatcattgctaacagagcacaaatcattttcagtatcatctgcagcagaatatttatgtcagtagaagcacagaaatacatcataggccatagtccagagaaagtattgactacacataaaaattgaacgatgccaattttcacagcatgataaaactgagga

SEQ ID NO: 37309 - DNA, 2145 bp, Arabidopsis thaliana landsberg
tctacgaatcgtgtatttcagctaaattcaatgacgttccaatgtttatagatactgagtgataacttgagtacaacttgctaatcagagttctggtttctataaatcggttcgaatttcccaaacggtttgaattttgacttcttacctctgaattctggcgacggccgtgcgacgatcctcccgcgcgattctgatcctcctcctcaccggaaaccacctgcgaccatgtccaaattccagaagaagaatcgttcaacagaaattcaaaatctctcaacaataaataaaaaaaactgataacgcagaagaggaattgatgatgtacgaacattagcccaagtagatctggatctctcgtccctcgagttgccttcatcatcaccaccatcgtctccgccgcggcgttggtttcctccgatagccacgtcgaccaaacctctgatcaatccgtccattgtctctaacaggaaagagatattttgttttgatttaaaagagtgtgtgggagttgtgatccagaaatggtagttgaataacgacgtcgacgatttacttcctgttttttcatcacgcgcgtgacgtttagatttctttattacggcatttattgtttaccgatccactagtagcactatgctctcataacggtttttcgctcctaccgacaaataatagttgattcgtaaattttagttaaaaaaagaaggttatggccaaaattgattattcttttcagttattttagtggagggtaatatagagaaatatatatacatagtgatcaacctgctttctataatcaaaaacaaaatctaaaatattgttttctcattttagatgcaagagagttgactcaatgaatcataagactcgtctctgtaaatcttgatcctaaaattccgtccacgcgggccgtttactctcaagatgtaaatttgagcgatgtaattgactcgccaaagtagcgcgttaagctctagtagtgcattggtcgtgtattaagctttgcacgttcccgccacaactaaaggcttttaaactttatcaacaatcaacatgtaataattaaaaatcaacctaacaatcttataatattagacgcaattgtgttgtgtagagcaccacacgatattgatacttctgttcagtaatcgaaattactcaatcagtagagagctctgaatgttaccaactagtcttggttcaagcttttttacatataatgattaaaaaaagatgtgagctaaaatataccaaaacaataaaaagaaattagaaatagtcttctgttttcttaattataaattaaaatcttctaacaatcttattattattaagactaagacaaatttctgtaataataataacttgtacagatacatccttcctagaaagcacaagtaattttatccacaaatgtacaaaaaatatcaacataaaagctctcttttcacgccaaacaaaaaaccaacaaaaaaacactctctttgtgtgcaagtctacttcgttgcatgaagtaatagtttcccaaaagcccaaaaaaaaagaagtgaaaagtttcattctaaacgcaaattctttcccgattcagattctatggacctgtaatcatctcgaactctaattgctttccaatcagagtcctctttggtctgtcgcagagccataaagtggagtgcatcacttcgaacttggtaaatgtgacaagcccatggacccgagtcaggtgcagaccaccccttctgatattcaaactcacgctgctcggccaaagacgtccgcatgcaatacactgcgttgagctctgattcgatgaaaccaaccactgcaccacattcaaaagagacgactccctccggaacccgttgatgccagatcgatgcaggacttatgtaatgatctaaacaattactacacacctgacaagtgaataagacatatatgtctcatgctaaaactcacaaactcaggtctgatctagattgcgcttgctcaaaatttggatgctcagcacttaatgcgtacgatgagtacaaagctgaaaatactgtgcggctacatgcaactgataacggctgacataaactgtactagatatactgacaacgtcataacccacaggaagagcagacactctattgc

SEQ ID NO: 37310 - DNA, 1244 bp, Arabidopsis thaliana landsberg
aaagcacatagagacaagtaccgtttctcctagtgcattttctagctttcagagtaatgtcaacaatatctcttccaatggctgtttcaaagctattaaagcgtgaatcagggttaaggaaagatttattttacaaataaacgtaaccatgaagcgaaaatagaagaaaaggaagtgaaacaactgataacaaaggatattcccttgaattactggaagcaagaactgatcaagctgcaaatttaagacaacataagaaagaaagggtaagaaattctgcaagtacagaacaaggggatgtgatatatttaaaggacctcaaagatacacaccttattatcgatgagaacttccaacatgtaattgttccaaagaaacctcggttcagcctgtaaaaaaagaacgaaccaccagcagaagttattttcagtttgcaacaaggaaaaactaatgaacgcttccaaggaagtttaataaacttcccagaagtagttatatggtcacctgtctccacagaggaagtgacttagactcatcacccatttcatgcaagcgttgtgagctgaaatcgcaaaaataaagatcaaactaaaaggaaataactactgaaattcagactaatgtcagctattatagctaaattggtttgtacatgccttagtacagtaatacaacataattttcaacatcaatgagtaaacataaaacatcacaaggaaagaaataaaccattttacctcaatgttaagttaacttcatatgagaaatagagaccagttgtcttttctgctacacttaagagcttggagaactcggtctccatctttttctgccggaaataatacacaattctttgagattttgagatccatcattactaccaatatattccacagaaaactggacaccacagaatttacctgttcttcaggcgagtttttaagtgaatgatcacaaggaagaaccttaagcgttgtaactttgaatataggatgccccagaaacgatccaacacgttcactctcagttacaaccaccaagtatgatccttaagtaaataaatacgcaatctaatcaaaactctcgaatatgtctcagatctaaaatggaaatagagcagaaacacctgcagcatacacaaggctctatctatatacagtatttgtccacatgataattgttactaaccctgcagggagctttaaacattcccaaccacacccaaaaaatggaacgggattttt

SEQ ID NO: 37311 - DNA, 3351 bp, Arabidopsis thaliana landsberg
aatcttttatgctaaaatcttcatacataccaagctcctcaattatataccttagagagcatctttcctaaatactctgaacccattctttcagttaaatgtctgtactctgggctagtctggaagtaatcacgttcacgccgacgagcagcaatcatatcaacacttttattaatgtcagcttgagaccggtttacaacaccaacccaaggataccttaatttgtatccccttccttcaagtatctgaaatctccaaacatttagaatacttagggactgttaaatattcactaaccattctttagtgagattctcatatttatcttcattgcgtcctttcataatgcagttagagatagattgcttgcagattagacgataatcttgactaatgatatgtagaatgtattactatcatctgaatgtaaacttacatcaacagcattagtgccttggtccatgagatcaatttttgttaaaactccaaaagtcctgtctcctgatagcataaagtgcagcgaagcaaacattaaacaacaagaatcaatcaattcgaaatactatcatcatctaagcattgatgatgctaatcaatcatatatacaatgctccatagaacttaaaccatatttaccatgtcctagtcgcttatatctcacaaaaaagaagctcaaagtgaattcagaaagcagttgtatcaaaatataaaaaaggaagaatctggcacctttgggatcaacttcacgagagatcttaatggcatcagatgttgcaagatcctgatttgcaggggaaatagcaagtatgatgcagttgggctgtcaaaaggtgaatgatcaatctttgttatttgcttgaacacacgacctttagaggatagtagcatcatctttccacaattgaattctgctacatacttgtaatttctttcaaatcatagttaccttctcaataaacgatctgaccatgttctcgatgtcttgaacaatgctttcaggctggccatctacaacataattggcaccatatttcattaatctttcactaaagaggacttggggtgtgggatatcatccgatactttttccggcgccgatgattcttctggccttacacttgagcagggggtacctggaacatcaaccatttgctatcatttctccaagcgtaacctcgccgtctgctccgagagggtcacaaaagcaaaatgtatgtttttttcttctttcttttagttgattgcttgtcatgttgtttcccccattaagggttttgagattttgaattgattttgggatggaaattacagctgaaggaaactgctacgtaccattgagtgagctcttagtagaagaatcatggcttaaagctcttcctggggaatttcataaaccctacgccaaatcactttctgatttccttgaacgtgagatcatcactgacagtaaaagccctctgatttatccaccgcagcacttgattttcaatgctcttaatacaactccttttgatcgagttaagactgtcattatcggacaggtacatacaacatttggaattagctttggtttcttttctggattctgtttttatgctttgacaagtttttttactctctttgatttaggatccttatcatggacctggtcaagctatgggtttgtccttctctgtacctgaaggagaaaagcttccttctagtctgttgaacatctttaaggagcttcataaagatgttggctgttccatcccacgtcacggtaatctacagaaatgggctgtgcaggtaaatggatcatctctacttgtttgtgcaatcaattctcagtttacttggagaaggtaaagcaattcacttttttttttttttttagggtgtgttactcctgaatgctgttcttacaggtaatgtctcctatcgtgtgatgaccttatatgtataaaactgtcaaagtcctgcaattcttctcacaaatatgtcggttaacttgctttctaattcagtaaggagtaaacagcctaattcacatgcaaagaaaggatgggaacaattcactgatgctgttattcaaagtatctcacagcagaaggaaggtgttgtttttcttctctggggaagatacgctcaagagaaatccaagtaggtttggttttatgaatgcgatacagctgataagaaaatgagtaactgaaattctgtttatgacttgcaataacactagaacctgctagacttgtagatattgcagcatatgcatcttcattgttttttgtcttttatgaatgcaggttgatagatgcgactaaacatcatatactcacagcagctcatccatctggtttgtcggcgaatagaggcttcttcgactgcaggttagcttaagcttaataaaccttttcgtctctcctgcctatttacatgcataatgtaattattgcttctgtggtctgcaagatatggcacgacctgcagttatatgagtgttgtgcttatgttgtaccaactgctgaatatatgttctacctttggacaggcatttctttcgcgcaaaccagctactcgaggaaatggggattcctcccatagactggcaactttaacttgttaaccgtagtcttaaggccaaggcgaagtgtgattcatctcgggaagccttgtgttttttgcagtcctttttggtgaagagagtttgaagttcttaacagttctaatgtcctttttttgtgaaatatgttatcacggaaccctagcataagctgttgaagtagttggatctgagtatggctcagtagtggcgaactgtctttatgttgtagttttgaagagtggtggtgtatcatattttgtatggaaagtgcatgaaagaaaaccagaagctttaagttctgttatcaatgactcaagtcactggcaagatccaaaaaagatttatgtatggaacgcctttgataatgttatccttgagttcaaaggcatgtcagggatacaacaaatttacaatctttaagcaaaatttacaggagcagttgctcctatattctatgatcatgaattttcacaaatgaggtacaaactttgataatctgcattacctgttagctccaagtactgtatgatgaatgtttctgaattgaccacaacaagctccaagtgtaggaggaaacagaaaaaaacatacttggctcacattcttctcttcttcttcttctcatgtcttatgtctcttcctcaagttccttatggttggcaagtgcctttcaattgaatgtggacacccgaaaaaagtcaaaagattccggcagcttttttcacccacttctcttgttccttgagaactcaaatggcaca

SEQ ID NO: 37312 - DNA, 2168 bp, Arabidopsis thaliana landsberg
ggctaaacagagaccggcgacgttgtcagtctacctctacattcccaatatcgtttgtcggttttttgctacttcctttcttctgtctttaaaaatttcatttttttttaaaccatatgagattagtgttgttacatgcaaaattggcagggtacatgagagttctcttgaactgcattgccttctctgtgtgcttctccaacaagacactcttctccctcttgtactttttcaggtgactttatccttgtggtaccaacatcatgttcttctccttttttgatcttgtgtgtttggtgcttcttctttcatatgttagtcactctttacccaatcttgtttccagtttttgttgtgatgctgtggatggatggtgcgctcgtaaatttaaccaaggtgctcttttcattctccccatctcttttcttagcttcaactaattcattacttatgcttcctctatgatcctgacattgattaaatatgacatttcatgtcattgtctcattgatcaatatttttagtcccatacacagtttattcttgttctacattatcagaaacgattgaacgtaacacacaactcttttcctttcagtctctacatttggagctgttttggatatggttacagataggtgaatcttccgctacatattcccgagtttcaacttgctcattcttttaatctcatttaacatttttgtcatatattttggggtctgcgcatggttacagagtcagcacagcctgtcttctcgtgattctctcccagatatacaggtgtcagtgttctctacttctttacactgacatctccgtttcatggacttatctggttttctacgtaatctttgtttaacatgtagtcttggactttcacaattacaaacaggcctagcttggttttcctgtcattgctggctttagatatcgctagtcactggctgcaaatgtacaggtactctttgttgctacataaaatcttcattcaacttcttagatgtattgttcttgtacatagcaaaccaggaatttaatacttgattcgcagtaccttcctatcagggaagaccagccataaggatgtgaaagatagcacgagctggctctttagactctattatggaaaccggatgttcatgggttattgctgtgtttcctgcgaggtaattggatcattgatatctgagctacttaactttttttcaatgtatttctattgggagatattgtaaacacagagtttctcaaatagtcaaatgactacaggttctttatataatccttcttctcatagcaacgaaccaaaccgaaaacttgatgaacgtgagcttctcttctattctctttcccctttaatctcttgagcttttcctactgcattattcatggttccaattgttttcaaacctcaggtggtagtgaaatcattgatgcagatttcaccgctctctttactcttggctttgagcatatttggttggtccatcaagcagatcatcaatgtgattcaggtaagtctgattcacaactattcaatccctctaatagactaggcatctctagttcttattgtgtctttttttctgtgggcgcgtgtgtcagatgaaaacggctgcagatgtttgtgtcctgtatgacatagagaaacagcataagaagccttgacgttatgtgcccatgaatcgtgtttaactcttttgtttcatgttgtgtacgacactgtacatacggatccatcttgtttagtatgtagataaactcttgtctttaaatccattcactattttcagaaatttcatgtcttctaagttctttagcacatcatgttttgattgcaaccataaaaccctatctctgctagctagcaaaaccaaaacaaaagcataaggttggtcaaaagacgttctctaacagagattccccctcaaacttttccaccttggagctcagaaacgccaagcgtttctccaaacgcgctcgcttcatctccaattctcccaaacgccctgccatttccatgactcctttacgaaagtcctttgcctccttctccttcaatctcacctccttctgtatcttctccatttcttctctttcaagcagcatatcccgttcacgcccttccttctccaccaccgttgtctcgtgtcatcatagtggtg

SEQ ID NO: 37313 - DNA, 1564 bp, Arabidopsis thaliana landsberg
gagcacatcagccagaataataaatttcctagtggtgtagtacatgcatttcatcgatcaaaagccaacattctttgacttttttctaggattgcattcatcaattctacaatgtacttgtttttaattctagagcaagaaacttatccaacacctacttgtaggaagctggtcaatttcttcggtttagtttggttcatactttatatggccaatttcctttgggtttgcttaaaacaaaaatttacatcaggcccaactctttattatccatgcttaattgcttatgcagttaatgcttatcttttttgtttaggtccgtaagagcaaagccacgtgtcataacacaagataagtggaacccacatgaatcgaatccttcgtccacctcacaatccgaatatccgatcctctctccctccaccaaaacaaaaccactccaaagtttttttcaaaacaacacagaaaaaatggcagcatcggccgcaacaacgacgtcgtctcaccttcttctctcaagctcacgtcacgtggcttcatcatcccagccttcaatcctttcaccgagatctctcttctccaacaacgggaaacgagcaccaactggagtgagaaaccatcagtatgcgagtggagtgaggtgtatggccgtagcggcggatgcttctgagacgaaaacggcggcgaggaagaagagtggatacgaacttcaaacgttgacgggctggttgctgagacaagagatgaaaggagagatagatgcagagctgacgatagtgatgtcgagtatatcattggcttgtaagcagatcgcttcacttgttcaacgtgccggaatatctaacctgaccggagttcaaggcgccgttaatattcagggagaggatcagaagaagcttgacgtcatctctaatgaggtctctttctttatacacatgctctgcttttgttggttggattgtgataaattagtgtagaccacttagttgatacatgggaatggatggatgtataataaagattgagtggtggtgagtgcaggtgttttccaactgtttgagatcaagtggaagaacgggaatcatagcctcggaggaagaggacgtgccttttgcggtggaggagagttactccggcaactacgtcgtcgtgtttgaccctcttgatggttcctccaacattgacgctgccgtctctactggttctatcttcggtatctatagccccaatgacgaatgcattgtcgacgactccgacgatatctcagctgtatactactcttcctttcacttctatatagctttaggagatagagatcctacaatgaaaattaggtgacctttttggcttataatgttgttcaagttggggtaagaggaacaagggtgtatagtaaacgtgtgccagccagggaacaacttgttagcagccggctattgtatgtactcgagctcggtcatcttcgttcttactctaggcaaaggcgttttctccttcacgcttgatccaatgtacggtgagtttgtcctcacgcaagaaaacattgagatccccaaagccggga

SEQ ID NO: 37314 - DNA, 1078 bp, Arabidopsis thaliana landsberg
actaacaatcactgttaattttgtaatgtaaattgcagcttttatgtcgaaatttctttttggacatgtttctctgtttagtgtataaaaaaagaattccttttggaagagtaggttgctgttttcaaattttttttccaaaaactattcttaatgttccggagttaatgatcgttattgattgatacaccaccgactcataattaattttagaaattagggatgcatctttatttgtataccaattaccaaacactctatatatcaaataaaaagaaacactctatagagaatggcgaccaatctccccgttcattcattatcttcaataacctaacatgatatctaacactgtgttagccatcatgttaggttaagccaagaaatttgaacacataatagaaagaataaaacagaagagaagagctaacgacattttagacattttaaatttccaatatatcgcggcaaaccaaaaaaaagaagaagaaaaatacatgcatgacaggcattttttgaaataatttatcagagtattgaaatagtattttttttgctgaaatcatgtgtaaaaatgaactcgtaatgaaaatatctgacaacacatgcataacaggttaaagactttacacgtcgattgggcttataagttcaacaggataagagatatgaaaagcaacgggagaaatggagaagtagaagattgagcgaggccggtgggttgcatgggctgatctacgggtcgaattcctgatttagttgtgggtcccgttggtccatccgcgggagtatccggtgcaggtgcctgtgttggtgttgtccccgccgccttggacgctgatcaagtgtgtccaaaagaaaatcaaaccctaaaccttaaacgcataacaataaatatgattgtcgtagctaaattacttacctcccgggctaaaagcagacacctgaggtggtggagcaatcaaaaatggaacctgacctgcccaatacatatatgtatataaatctatgcatggaatcaactggaacttatatacacatgcaaatagtttgttttgaatcttagatacacatattg

SEQ ID NO: 37315 - DNA, 1475 bp, Arabidopsis thaliana landsberg
gaagtagcgctagtagaatctaagtttgtttctgactaagagacatgaagtcatgggttgttatgctcattcatattttgattgagatacaatttaaagaaacttagttccaaagattctgaacattcaccggtacagtgtgtctgcaaatggttattctgtctcacttcaatgtctaaacacgttgtctcaaaatgtatcgtttgttagatactcctttcaagacatatgatttagcctcgcatgtgttcgttgatccaagttttaccggtttgataagtctccagtcttagcaataaatccagaccggattcatgaccaatcgcagatttaccggtccgggtcaagttttaaaacattagtagaaatgtgtttcaccgaacaggaagacttatctgatagcatctcgttgcagtggataaatggcaaaatagtaatatacgtagattctgcttttatctgaaccacatagtgcagatggatatcgaacagaagaacatgatatcgagaagacacgtggcccaatgaaaaagccacgcaggctctgtatagccaattgcaatctggttttagattctcatctcacaaatcttacttatacgatcagtctcccacattcacacttccaccaaacacctctcgtccacatctttctcctttggtggcaaacacaacgacagatagagagaaacgatggcgtcgaactcgcttatgagctgtggcatagccgccgtgtacccttcgcttctctcttcttccaagtctaaattcgtatccgccggagttccactcccaaacgccgggaatgttggtcgtatcagaatggctgctcactggatgcctggcgagccacgaccagcttaccttgacggttctgctcctgggtacgcttcgaacccttttactctgttttgttgctcagtttggaatcagaattgtttgttagattactctgttttgatgacatgatgcaacattgtacgttttgtgaaagattcaattttttttatgttattgggtattcatatttcagaaagttgtctcctttcagaatttgaattccctttagttgtgtattcagagattctagatagattactggaacctcttttgatgacttaagggttctgatttcaacattggaggttgtttagaaagtttcagtttttctaagttattgggtacaacattgtgcagtgactttgggtttgacccacttggacttggagaagttccagcgaaccttgagagatacaaagagtcagagctcatccactgtagatgggctatgctcgctgttgtcagtttcaatatccaatctttgtcttatcataagggtttagtcttgttaagtttaatctaatggacttggtgggtggtgttgtagcctgggattcccgtaccagaagcattaggatatggaaactgaattaaagctcaggaatgggcagcactaccagggggtcaagccactt

SEQ ID NO: 37316 - DNA, 2514 bp, Arabidopsis thaliana landsberg
tctgctgaatactcctctgtgttgtaacggtatatctcgttgattttcttaatatccacccaatagtactctctgatatggaatgataaagcacttaggcgattgttgactgcagtaactaagctcttggttccatcattcacaataagcatctctcgagcacaacggagagcggagtagaataatgcctgagaatgaaaaaatcacgaccgttaattatcagttatgaaaagtccattctttgatcaatcatggatgatcagtcactttacttggatttcaagtggatgcccatgaatccccattcttcgatcaatcatacatgatccgtcagtgacaagtagagtcgggaacatgtcaaaaccgtcggctagacaaagcttgagtatcaacttgatccctgtttgaacatcaattctctcttgcaacgtgtagtcacccgtgagctttccataagctctcagcaatatgatccaccacaaacctagccaaattaagaaagattccaatcatattattattaaactaatgtttatagtttcacaactttgaaagtagaatgtgatttagtagctggaatgtcaagggtgtatgtttatctatgataaatagaaaatgttagagcacaaagagttaccagagtcaacagggctaacacgtccaatggctgatccaccaaagtctggatctaaaaactcctcaaatgaaccatcatttccctcaagtggcgcagatttcactttaaaactcgctggcattagccccgggccagggctgtgacagtccactgttttctcccagctctaacaaccaagcaacaaaaagctcgattaataaactccggcctagatcagtatatcaaatgccttacaattgcatacacaagaattgaagtcaacggaagcaaagggaaaacacttttctaagaaccatatataacttcgagcttcattaaagctatattagttaaacaaaaatcacagattaaaactaattttatcaaataagcatcaaatttatgagatctcagaacaaactataacacttttctaagagttagaaactaacggaactggcaaggagaggcatcctcttataaatgaaacttggtggcctcttcaagagcacagtattcaacaactaaattatgacaagcaataaaagatttcaggtctaaacacaagaagacatacctggaactggaacaggggagatatatctctaactcttgcctttctcctttaggcaataaaactcagtaaacaaacttgataaattgcccgtttacacaaaatccaatataacttccctagaatgagaaatcaaattccaattgcagataatgagcgtgcatgcaaccaagaaaagcaagaccatgttgaaaatcaaagaatcaagatcattcctcttaaaacgaaaatttacataattaactgagcagttcccaaagctctaaattgttaatatagacagtctaaaaccgatggtattggacagaaggcaaaagcaatcaaataacactcaagagcatcatttcgaacaaaaaggttcaagaaaatgttacctgcaactgcaatgtatgaaggagaaagtttctaacaatctccccttctccatcaagcataaacgcatacgccgaaggaacaaaatcacgaataaacacttgatcatagttcaaagtctgcgtatcccctggatcattagccgctacagtccccacagggaacccacagtagttcaccacggcaccacgaagcagcttccacgcctccttctcaacctcagtctgactcaaacaccgttctgtttcctttcttacacccacatttccaaaattagcatcttttcctcctcccccatcacccctttcccttttcggtatccctaaagaaatttccacttccttaaaaacaagtggcttcacaaacctgctctcaaagctcttatgattgacatgagcatccaacgaagaggacgaatagatcctaaaatctgaagctacatgggttattactaaaacacccctccctcttcctctactactacctctagctcttaaaactctagatcctcctcctccccagctaatggaatcgggatcacaaagagcattccgatccagaacaagccgacggcaatgaataccagatctaatactcctggaatcaatctgggtacattgtaacttccacgaattgatgaatatgccagagttcgggggtgaaaaaccgaaaagcgaggcacttcttacactaataagagatctacaacagggtctcatcgcatagacacagatacaggttgtactgttcattctctcgaataataataaaaactatgcaatcaccaacaattcaacttatccagcttcttgatcgacgaataaatgcgatcgctgaaatagggggatgtctgataggaacaaataactagagcggattacttacaggggaggagagagatgatcagacaacgagattctcagagagttacataaatgaatgcaagatattt

SEQ ID NO: 37317 - DNA, 967 bp, Arabidopsis thaliana landsberg
ctgaagcaataacattttgatctgtttcatcatgaagatattttcttttacttcctccatttccagtaaactcagagggggattagatctcttaccatgaatgctcctcacagtactagccatttgtaacatgagatcacaaggcctcaggaagctggagaaaatatgaacaataatttagagctcatggttgttcatatgatcctttatatataatcaacaaacactagagaaacacacaaaacagagtccttgagaattctaaagatcagatcttggcactacgttagttaaaaataaagagccatattgttagacataaacacctttgacttgtttggtcaactatgctaaatcaagaaacaagattattcaagaaacagggattaggtcaaatctctcctttcaattctagctctttatgcaaaattgagaggagaaaactacacaaacacaaccgatcaagatccatgagacatcaccgacttattaaggaaacattttacatgacttgttgaatctacaacatttcattgaattagagcttgggaacatgcaatgcttacagataggagctttcactggtcgatctgtctgttttgccggaaaatgtgaccgcttcttcggctgctgctagcttcaatggttttattttggcttcttgggtttgaaagcagagaaatacaaagtttttggggctaacgtctatatattaaatataaatatctgattacaggtggctttttctcttttaactgttcttcgggacgtgacggcacgtaaactactacttaaaaaatatatatttaaatacatatatatgtacctgaaattaaaatattttatgacggaataattatagttttcttagaaaaacataataatttcgatgtattagatcttcaagagttagcgtatatactgattagatcgaccattcggtgaatctcctaaatgcattttaacc

SEQ ID NO: 37318 - DNA, 1456 bp, Arabidopsis thaliana landsberg
tctaagtctgacaaaataacaattaaatagcaaattaggcatccctaataacaagccttccacataaatatccaaaagcctcaaacttgacaaattcatacagagacaaacgcataataagcaaaacccaaatttcaaaatcaaaccaatacctgaccagtacgagcccgtccaactaaatcagcaccatcgagaaccatatcaaacgtggaagcctgaatcgggaaaagagcttcaataccattcgccttaagcttctccctcaacggcgcagaaatccgaaacttagaaacagcattagggttatcaacttcaacatcctcaacgcccaacttaaccttcttgctgctcttcttcttctccgagcttgaatcgctcttcacttcatcctcctcctcggaagccttacgcttcttatccttcttcttactcttcttcttctccgactcttcttcatccgaatcagatagtttcagcttctgctccttcttccccttcttagaatcaagctctggggtatccaaagccatcttcttcttcatcttcttctcctctttcttatcagataacattagggaaggcatttagaaggaagataatggagaatcgaatctcttctgcttgttgagagattgaggctatgaagtgcgaaagcagggagagacgacaaaagaggacgacaattgctagggtttaccctctctttttatatagttttgagattttagagaaaccctaatttactctaatgtgcaatctctaatctgccgtttatttattctgataagagaatgcgtgtcgtttctaggtcaaacactcaaaaatatctatctttcctttttttaatcaaagactcaaaaatatcttctttgttggcttttctattaaaatagtaactttcttcatttttcgacgatatgataaaaccaaagctcaaacataatcaattcgttttctatcacatatatagttgatgaactgtcacaaatttctaaaatggatacacactgctcataagatttacagactctgtaattaggagtaagtaacttcatcatagatttatggttaatacttaatacagatctgagacccatttccccaaaacggtacacatttattcttcacaagtcctaatatgtttatacaaaaccggaaacataacagcttacaagagcaatgtggtaccggcgacaacaaaacctaggagtatgatcacgctccttctgagaccaatggcaaggacattagaatctgaggcgctgttgcagtaattgaaaccataccatacactctcaggaacatatgtgttatatgggaaggtgaccgctttagagccatggctatatatctttacactgtttgggatccaaccatctggaccagacctgtagagatatacatagcatatctggtatgtacatggtccgtttatctgacatgtatctgatgaaca

SEQ ID NO: 37319 - DNA, 1359 bp, Arabidopsis thaliana landsberg
atttattaattagccgtttataaatttgaatagagttgaaactcccaagagtaaaacgaacaacatttaagtaagaaatacagtaatatgcattaattttatgaagactctatgcactaattttttttgttttgaatgcaaaataaaataaaaagtcgatttagtaaagaagatggaggtgcgggatatcgaaccccgttcctcccgcatgcgaagctcagtaggtttataacctccgacagaaggagagtgactacagccctgagtaagtttcacaacagaaacaaacctcaacaaatctgtaattctggttttgaagctcacctgctttgatttcgttcttttgcagtgacctggaagattacttgcgtcttctacaaagcaacatgaacaacggatttttttttttttttcatgtatggtttatgttttaagagaataaaatacactactttgattgattggattctcatctaaacggattccttccagaaccgaattgatctatctattccacaagtaacaaagactgattcaaccggcgagtgctcgatccaccgtggtgcaccgttatggttagaaggccactttgccactttatctgcggttctagcatcccatgtaacgacctcattgcttgcttcatctatggagattacaaactcttcagtgtcgttaaaaattgcctgcaaaacacaacagtgaaggccagttagaattagtcgacgaagtgaatatttttgtctcaaaaggttgagaaaacgagtcacctgagaccgcagttttacccgctttgctccaagatattcctttaccattcgacctgagcctatttcccataacttaactgtggaatccttaccggatgagagaacaaacctaacaaaagccatatgatcaatcaattgttctgccatgaactattgggaaaaactagtgattctcagagataattgattgagtctgcattttacctttgatctttagtgaacactgcgcttgtgacctctgattttccatgtgcattgccaatggagcgaacacactttgcgctaaccccgtcaaagagtcgaatagctccatcctttgaggctgtaatgtagatggatcccgtggaagaatatctcacctaaaaaaaccatgaatctcacagccatgaatccttgatcatcttaagagatgtttatagaacgcacaattaacatttatcagataacgtgtgacatacctgattaatggctccacttactccactgtcagggaagtttgaaggaagaaagcaaagatatgtgttaacatcgtacagatgtggaattggatgatcggttcctgcaaaggccaagtatatcagtttgcggg

SEQ ID NO: 37320 - DNA, 1665 bp, Arabidopsis thaliana landsberg
cattgttcagtcttcgatcctctcaaatctcttaactactcctaccttcaaaaaactacttccaatttcatttttggttatggataatatcttatcatatagatcttgtcaaaatcagacagttcatgaatagatcattggttggaaaaattgatatgagaaaagaacattgacccacttggtagcttgaaagctacttttagaaaacatattgtgataaatatatagagagcttgtgtcagcatcagtaacattatacatatcactatagtagcatagtgtagtagattttgtagtgcattgataaagttggaaaagaaaataataagctagaaacttaagggatctttggtttcttcatatagatgcacgaatgttgttggctttgtaaaattatatatgtaggtgcatccgcatgcaaaattagatatattttgaatgtaatgaaaactagagtttgaatgcaatcgtagcatcaacaagacaacaatgatcaaacgtctaaaatatcattctttgaattaaaaatgaaacaaatttaaaacaacgtccgattttatatatgttcaccaatttcataaagaattcatgaatttgccatcactcgagaatccaattttcttatttgttataaaaatgtttactagtgtagtttttaaattaacaaaaatttatttgacactaactaatatccaaaaaaaaaaatagaaatagaagaatcctactcgatgatgttttatttgacaaaattttatttgacacatacttcacatttgatgatgtttgctttttacaagaatcctactcgaatatatggttaatctttagcaagaaaatagaagaataatgaataacctctcccgaatctgtgaatagtcgatgagctgtttccaaacgaaatttttttcttttcttttcatctaaatgtgcattgagagtcatcattcggattcaacatccaaattcaacgccatgatgttggttatgaatttttaaagaatacaatgcaatcttgtatcaaaataactaaagacaacatctgtttaagctattagttttttttcttatgatcgatttaattttacataaattaaatagctagaaaataatttgtattcaatgaataaaattttatgtgaagataaaatcgacattgattaattggctgcctagataccgtttactttgatcatcaaaagtattcttccacggatttataaaaaattatggcgacctaataactctatacccatacccttcgaatgggaacatattgatgggtacatttcgttgacaatagaatcttagatattttattgcaattaccacaagagttttcttagatattcgttgcagaaaaaaaaaacaggaaaacgatttataattttcttagatatttatatatccaaaaaaacatacaagaattgtaattaccacaagagttttctctctttcttctacaaatatgatatatatctattactcctctaaaacatatttatctatctctctatataatctatacacaaagattgatggtgacaagatcattggattgctatctccagttcttctggtttaaatatcaaaaaacaaggatcaaaggattatgcattaaccatatttctaaatcactactttgatgagcaatgtaatacatattgc

SEQ ID NO: 37321 - DNA, 2127 bp, Arabidopsis thaliana landsberg
  unsure (1)..(2127): unsure at all n locations
actttctctctctctttctctctctgttatcaatctttctctgtttctttaccttttttatgttccactttctgatttcaggagggtccgtggtggtaatggctgcaagattggtgatgaaagtggcagcttgtgagttttttttggtgtctttatatccttcctctgctttttagtacaagagagacagaaacagagcagctctgttttagactttctgaaactgtttttgtctgtgatgattaattaaaaaggatgttgatgtgggaagatgggttttgtggtggaggaagaagtgaagatctttgtctggaaacagacattgaaggtcatgaagaagatcttgtcagaaaagctttcagcaagatgtccattcagttatataattatggagaagggtgggtactgggtaggtgttatatataagtaattatggaccaaaagataattagattatataaacacaccctaatcacttaacttatgattaaagatataattatttacaacacangttattatgatcttgtgatgttcatgtgatatatctgcagattgatgggtaaagttgcttctgataaatgtcacaagtgggttttcaaagaaccatctgaatctgaaccaaatcttgctaattactggcaaagttcttttgatgctgtacgttttcaatcttaaattttattttttggttagatgtagaaatttatgatcctgatggctaccttacacttaaaagtcaaaaatttattgcagcttcctgcagaatggaccgaccaattcgaatcaggcattcaggtaaatataatcaaacttcttttggttatatactggtcttgatcttaccttaacagtgttttatttgaccagacaattgctgtgattcaagctggacatggtctgttacagctaggttcttgcaagattgtgagttctttctcttacggtttcatattatcgctttttcgactcggttatgcggtgtgtgtgtgatcagtcgttgttttgtttcttcagattccagaagatcttcattttgtgctaaggatgaggcaaatgtttgaatcaattggttacagatcaggtttttacctctcacagctcttctcttcaaaccgaaccgcgactccatcttcttccacggttccaaaccagatacctcagtctcaaggttttaactggggatcacactcacctttgttaccttcccctagctttcagaaccaactacctgcttcagctagattcggtttccttcaagataacaatgttcctcctcagatgcttcctccaatggaagagcatgaagacgatatcaaatggcctaatggtttgtcgttgttcaatgcgttgactggacgtgcagatgaagctagtaggcttttgtttaaccaggagcagaacccgatgaatgtcgaaaaccagagcgagttcttgaaccttgaaggtcatcatcctaacaagtttagaagaagctatacattgccagctcgaatggattcttcgtcatcatcaacctcgcttgatcagcaacaaccactggagtttaggaacaataactctggaagcaactcgggtttgttccctgacgttatggagacgttcttgaggtgattgacatgttcaagattcaggtttaaggacagattaaactaaaagctctcgatgctagttattagcttatgcttgttataaatacatgaaactctctgttcgttgtttcttccttcttgttgttgttgttgttgttgttgttattgtaccatattgtctgattgtttctccttttatgtcaacactcttttaacatttgaagatactttaaaaacacgttatagatttggcttttaagtcctaacatacagagtagagacatatttttcagcttgaagattgatttttccctttaagagttcctatctcacccactgtcacattctcttcactctcgtcctcgccgcctgcaaccgttgtgcctcctccgtggcaggtctccgctctttttcttggctttatccatggcttgttttaacccttctttcgcagtatccgctgcatagctgagtgaaacatcaggtgccttagcatctgtgcttgttcccatcgcctcttgtctcgcctcgttca

SEQ ID NO: 37322 - DNA, 2172 bp, Arabidopsis thaliana landsberg
tgggggtaatcatgtatattattatatggaccataatgttataaggcaatattaataccgtcggacctgagagtgtccataccatttaagtttgcttttttaaacgatatcagcagaataacttgaaacttataatttagggtcccgataatttattggttttaattagtgtcatcgtttacatttccatagaaatttttttgcattggttatagatttgtaattgataagaaaccggtatcaaactatcaactaaataaaatttgaactcgttagaaactgctgaaaataacaacttctattttgttgcgatgttttatgtcctagaacaatgtaaaatacagaattaaaaattgaaaaccctacttcgcttgaataaaaatcacaaaaaaaaattataaagaaaagtaaatagtctaacaaatggaaaaaaaaaaacaaaacgctagattccaattaaaatccataatatgaaattatgattggttaacttaatattagtggccttaccaaacaaaaaaaaagatgacctgaaatgaaatctaatgcacattcaagagttggcaggattataaatgcatctgtatatgtataataatacaataccctgtcaatgtctattaaattgttccaattaatttctcctcccaaaaataacttatccaaataaacaactataatcaatgaagttagttagcctttattttcatgatgattgtgataataccaaaattcttatcttcataccaaaagtacataaaataattcacactctatagtctatagtataaatttggcaaaatttcaccgaattctcctattttctagcttcggctttgtctttttatatacacgtattaactatagtcaccaataaaaaattaattaagttaaactgattaggaaaaaacactagttaattgtgtaattagtagttttgttcaatgttgttaattaaaaagcgaacgtatcgtcgtttctctttttaactcattctctttggatccaaatctttcgctttggaattcgccattgacaaagtactcaattccaaaacaaagaataagcaaacaacaacaattttcacttccttcaaaaattataaaaatccagtttttatctttgcaagattcaaaagtttgaatttttacttgttttgatttctgggttttgtttgttttttgatttcggtaatggtcacactaagcataatattttcgtgttatgttgacagattataaagtgggtatatgtggttagaaacccagtttatttaattccgctcgaactccggcgagcaatagtccacatccggagtttgaaaccgtcaagccttcgagctcttccgttaatggtgaagatcagtgtgtaacaacaacgaacaatgaaggcaaaaagtctccgtttttccctttttatagtccaagtccagctcactatttcttctccaagaagactccggcgagatctccggcgactaattcgactaattcgactccgaagcgattctttaaacggccgtttcctcctccgtctccggctaaacatatcagagctgttttagcgagaaggcatggttctgtgaagcctaattcgtcggcgatccctgaaggtagtgaagctgaaggaggtggtgttggattggataaaagctttggtttttccaagagttttgcgagtaagtatgagcttggtgatgaagttggtcgtggtcattttggttatacttgtgctgctaagtttaagaagggtgataataaaggtcaacaagtcgcggttaaagtcattcccaaagcaaaggttagtgtttctatggtttgttagtgacgagatctggtgaattagagatgatatttgcagaactattgaatgtgatatgtcctgtttggtgattgtgttgtgtagatgacgaccgctattgcaattgaagatgtgagaagggaagtgaagatattgagggctttgtctggtcataacaatcttcctcatttctatgatgcttatgaggatcatgataatgtctatatagtgatggagtaagctcactttttgctctaacttatcagcttgggaattggcattattaccgaggcttaacaagtgtttctgaatctgttgatttagactatgtgaaggaggagagcttttggatagaatactttcaaggtaaag

SEQ ID NO: 37323 - DNA, 1113 bp, Arabidopsis thaliana landsberg
ttggattgaatgtagcatttgaaatgttcccatgtccatcaaacgatatgctcatacgaacgagcttggtcctggtttggttttacagatcattgtcactcaagagacgacaatctagacgtcgcaaatttacaattcaatgaatataaagaaatcgcattcggagacaagttaggaaaaagaacaagatggagttgcattttgaaacacggcttatacatgcgatattattcagaatttatagcatacatgatggccaacgttcgtcgatgtggtgctatccgtaattggattgctagaaaagatggaatttaccttataagaaatgtaaatccgccagcagtgttccgttatacatggaataaaactaagtaatgttgatgataataatatttttttcatctttgtaatttacatcaagattcttcatatatatatatatatatttgcagttattttgtgaaataaatcctatagttcagacttatttacaatggctgccactggattttaatgtttgtttttgataattagaaagaaaatattcgaattaaatatttgacatttaacaatcttcccaaaatatctccacattaacgacacgattatttactaaaataatacttccaaaatatttaatatcatttaattactacaaaattatcatttttgatattgattttctccataactataacaattcgattataatcatcaaagcgcagagatataatttgatagcatttaattactacaaaattacaaaatatttagacaatgattcataaacatatcataaataagatcaacattaataaaataaatagtttttttttacaggacgggtttgacaggacgatacttaataacatttgtaaactataaaataaaattattttatagatagatacaatttgtaaacttttatatatactaactttaaaaaataaattgttcccgcggtataccgcgggttaaaatctagtgcactttaaatttgaatattaaacatcttcatattaaaaatagagtcatttgaaaatattattaataaaactatttataaaattaaatagtacagaatttataaaatgaaatatcaaaaatttatcc

SEQ ID NO: 37324 - DNA, 2255 bp, Arabidopsis thaliana landsberg
aacaatgaagaaacttcttttgatgtttctcttttctcttgtcattctccaaactgcttgtggatttgattacgacgacaaggaaatagaaagcgaagagggcttatcaacgctttatgatagatggaggagccaccactccgttcctaggagtctaaatgaaagggagaagagattcaacgttttcagacacaatgtcatgcatgtccacaataccaacaagaagaaccgatcctacaaacttaagctcaacaagtttgcagatttaacaattaatgagttcaagaatgcatacaccggttccaacatcaagcatcacagaatgttgcaaggaccaaaacgcggctcaaaacagttcatgtatgatcatgagaatttatccaaattacctgcctccgttgattggagaaagaaaggtgctgtcactgaaatcaagaatcaaggaaaatgtggtaagtattataaagatatgtcgatttgcgagaaatgctagaagtaatgtttcaatagtcaaattatgtttgaggtctcattttcttaaacaatatagtaaacaaaattataatataatctttaatttgttgatcgatttctaatgatataaaattcctgaataattaccaggaagttgttgggcattctcgaccgttgcagctgttgagggaatcaacaagatcaagactaacaatactggtctcactgtctgaacaagagttggtcgattgtgacacttcatacaacgaaggttgtaacggaggtcttatggactatgcttttgagttcattatcaagaatggtggaatcgatacagacaaagattatccttacaagggtgttgatggaacttgtgaccagatcagggtaagtacattggtttttgttttgacaaggaattacatttgattattaacacaacttatgattcttatatcaatcctcttgtgggtttcttgttacagaaaaacgctaaagttgtcactatcgattcatatgaggatgttccaacttacagcgaggaatcgttgaagaaagcagttgctcatcaacccattagcatcgccattgaggctggtggtcgtgcgttccagctctatgattcggtacaaatttaaccatcttctcatagttcttaggtgtttgttagtttttatgcatataaatccatttcacttctgttgttaattgtatacgccaattacaaacgaaaggagaaactctgtttggtgtttgcgtttacactttacaaaagaattctatgaaaaattgaaaaaaatgttgctagtgtttgaaaatgtaaagttttattcatatataaacgcatgaaacaattgcatctaataggtggttgaatattaagtagcttttcactatttttggtctcaaaatgttcatattgttgttagtcacctttgtctctaatgtgttgatgtgatcttttcatctgaagggtatatttgatggaagttgtggaacacaactagaccacggagttgtggcggttggatacggaactgagaacggcaaagattactggattgtgagaaactcatggggtaaaagctggggagagagtggatacctaaggatggcgcgtaacattgcatcttcatcaggaaaatgtggaatcgcgattgaaccttcatacccgataaagaatggcgaaaacccgccaaacccgggaccttcacctccatctcccatcaagcctccaacccaatgtgacagttactacacttgtcctgagagcaacacttgttgttgtctgtttgaatatggcaagtattgctttgcttggggatgttgcccactagaagcagccacttgctgtgatgacaactatagttgctgccctcacgagtacccggtttgtgaccttgatcaaggaacctgtttattggtaagttctaattcttccactttcagtaacaaatatcaaaatggtaaataatgcttgaatctcacctgaccttgtttgggaatgtatcatttgcagagcaagaacagtccatttagtgttaaggccttaaagcgtaaacccgcaacgccattctggtcgcaaggcagaaagaacattgcctaaacattgcttcttcaagaggactctggctcatgagagaagagatctctctgaagggatttatcagatgctttttaatgttgttgtttatgccatacctagatacataaaaaatgcagctgttgggtatcgtgtatataaaaaaaggaccctatgtttcattcagtttcatagttgg

SEQ ID NO: 37325 - DNA, 4113 bp, Arabidopsis thaliana landsberg
ggcaatcagaggagacggaggtggatgagaacagcagaccatcttttttcgatattactaaagatgctaatgctctggataaagatctagaagctagtgggttcacaagaaaggagcagactgacctcgataaagtatgtgagcctatgaccttagttataacactgcttatcaatcttcaatcaaccgtttcttggtattgcgtatatattttgaatcttaggcagactaatttgcagcactggtctctgtgtggttttgtttcctcattctctctggtatatagaatgaacatatggtttctgtcttttatagtttattgaaggtggggtggagaagagtgaagattctgatgaggatgaggaatctgatgatgaagagcagacttgtgaatcaaacgaagaaggaaacctaaatgaaataaaatcattacagttgcaagacaaggtataaaactttccaattcatcatacaactgaaacatgtaccaagtaaagatgtcctctacttacagtatatgcttttggcatgatgtaggagcaaaaaagtttagatggtgttgaggcagaagttgagttggataataccgagaacggtgaaagcaatggagatgaagatgaagtcggaagtaatgaggttagtatcttgtgtgtgagtaactcggagagtgaagtaatgaaatcacttacaaaaatgagttttgctacttcctttgtacaggaggaggaagagaaagaggcagagctggagaaaaatttgggcaaggtaagacgcagagccatggcagcagccaggggacgtagaaagtcacagtcttcaagaaacacatacaaggacaaaggacgcggatcccaaaactccaagatccacagcaacatgagcggcttttgatactccaactgtgggcttgaatgggccgtataatgatgtaaacgggcccataatctttttctagtgactttttctcgaatcgttgagttttccaaatcgaacaccaaccaatgtactgagacagagaaatttaaattataacggatatgtttcttaataaatcaaatctgaaatgttattttgtccaaatttgtttgatgtagttttagcggggctaaactgaaaatacataaaagtcaaaggagtagatgcgaaacgctccccagtaattagcggaaatagaaaataatggaacacaacggctagtgatctcaacggtcgaaaatttaaacctttttataataattgacagatctctctctcttgttaaaaatcctaaccttgttctcacattaatcctccgccgagattccttttgtcttcttcttcttcatcttcttctccttctccgattcaattccaaagatgatgagagatgttttcaggccgactaaatcagccccatgttctcctgcaaagccacttggtatctctcgcactcaatctgaatcatttcatgctattcacaaagttcctgtcggagacagtccttatgtcagagcaaagaatgttcaggtgatttgattatatcccttctatagatctgaatttgtgtttgatttgatttttgttctgtctctgattgttgttttatggatcagttagtggagaaggatccagagagagcaattcctctgttttggaaggctattaatgctggagatagagtggacagtgctttgaaagacatggctattgtgatgaagcaacaaaaccgcgctgaagaagccattgaagctattaaatcactcagagttagatgttcagatcaagctcaggaatctctcgacaatatcctcttagatctctacaaggtccgtcctttatacataaccctgtttcctctgtttcgtttttgcatttggtttgattctgtattgaaatggatttgttactgcagagatgtgggagattagatgaccagattggacttttgaaacataagctcttcttgatacagaaaggactcgctttcaatggtaaacgaaccaaaacagctagatctcaaggcaagaagtttcaagtctttgtggagcaagaagctactcggttactggtaagcagcaatttcaaaatgtgcattatgtttagcaattaccaagtttgtgttaattcttaattggatgatgattgttttgaaacagggaaacttgggatgggctctgatgcaacgagacaactttgtggaagctgaagatgcatacagaagagctttatcaatagcaccagacaacaacaaaatgtgtaaccttggtatctgccttatgaagcaaggaaggatcgatgaggccaaagagactttacgacgtgtgaaacccgcggttgttgatggccctagaggcgtggattcacatctaaaagcttacgagagagcgcaacagatgctgaatgatcttggatctgagatgatgagaagaggaggagatgataaggttgaacaaagaaggctctttgatgcaatctttggatcttcctctatatggcaacctcagccttgtagtgagcagactgtgaaggctaaaccaaagcctggtttaagcaatggtgatggatacggtgatgagaacgtgaagatgagtgtgaatccagtagtagtaaacccattaagggttgatgcaaaaccgttcttctcttcgaagttggtcatcagtaacaacgagaagctgaagagaacgagatcgtcgagccaagagatggggatgttgagtggtattggtggtgatcatgagggagagacaaacacaagcacgagaaggagattgtcaatggagaagaaagcaacggagtgtggattaccagacaataaagactttgaagatgcgatcatggctgctgttttaggaacagaaaccaaagtggacaagaagaggctcaaggtgttccaggatatcactttgtgtctcaatcagagtctctaaccactcttatcattttatcattctaatttataatttagtcaaggaatcaaaaaaggagatgagcttaattcttcttggtaattttattaatgtttttgtcagctttaagttgctgccatttttttcacaattattgtcttcattgaccagtaataaaagctgaagttattattttccttgccattctacaaatatagttattgatcaagaatagtgttgtaaaatgttactaaaatctaatgagatagagagaaacaaagaagatgaagatgacatgagtggttaccatgaatactctctcccattaattaatccatcagaatcttatttactgcgttaccattaatcagatggttgctcttactctttttattcaccactcactcaacttttgtggtcaagtttgtagcaaattaggggtaattagtatccattaaaccaatcatttgtatctatcaatttggactcttctgcttccaatttgtagtaacgcttacccacacttttaattcggccaaaatacatccgttgaaattgtataaagttccggaagtgcccctcttattttattaaccatggcaaatgaaacggtgtaaaaacttgttttttcccacttaatctctctctatttgaaagttatgcatttttggtatccgcattaactcgagtcttttaaactttgactgtcagaaaaaggcaaaaaaggtaaatttgttttgataattccatggtacattttgtaatagaattgagaaataaaggatattttagtcaaatggactgttttggtttttggaagaaaagaaaaaagaagagatttaattggaggaaagggctctctgaccaaagcttaaggagagtgtgaggttaaactgaaaaaagaagaatcccaaattccaactacattcctcagggaagccaaagtggccttcacaatcctaaagttaaaactcttgagtgttttttttcagatcaagacaaagtttagatcttttctttttggtttaattgttttgacacaaacgaggtaagcacaagcagaagaagaagaagatagagtttgagttcaaattagatttgttgagaagaaaaagagtgatttttggtttctgatgcatggtgaagaagaagaagaagaatagtgagtgagaaaaaaagagtgattttttcatttttcaaaccgagagtgagtacttgaagaaat

SEQ ID NO: 37326 - DNA, 2247 bp, Arabidopsis thaliana landsberg
atgttgttttgagaaaaacaaaaagaaatatcatctcatcttatttttcatttttttcaagaatttattgtagcaataccatttctcttacagaagggtctcttgctttattggtatattctcatgagtacatgttttaaggaaatatcaggaactagtgtttgtctcagagcttggaaggaggtttgtaccatccccatggttcatcagagatatactgagtcacctgcttcacactcaagtagttctcaagtcccctgcgacgaagaaaatatgtttcaattcaaattttgttggtaatctattacggtttaagttactatggacacaattccatctagttggagagtgtctttttctaatggtttgataatcttaatacttatagctaacgaaagagactaaccattctcccaattcacggccaaatccaatgcgtttggttccaccccatggagcttggcagaagcatggctgagagcagttgacccacactattcccgcttggaaagcctgcaacacacaatgattacgattcataaaactttagagattaagttcaatcatgaggttattgattgttattgttgatagtaaaagttagatacacaccttattaacacgatcacaccgctccagatcatttgataatactgcgcctgctaatccatatctgcaaatacaaataaagtcaggcatatgatctaacacgtcatcagaggagttctacttcaagataagaagagaaatctacacttactgagagtcatttgctagctcaattgcctcgtcctcactggagaatgttttcacgcaaagaacaggaccaaagacttcttctctccatatttccattgaagtggttacatcagttatgatggttggttcaatgaagaagcccttttccagatgctgtgaaatatagatatgatataaaaggtcatcatcatagtctggaagaaactgcatcaaggataggtaagggagggagatgtaatacctcaggtcgggaaccaccatgcaagatcgttgctccttcactcttggccgttgagataaacttcaatatcttctcgtactgtaatatttacatttgtcagctcaatcagattatatgatcatagaagaaaagcacacctaccaagtaagaacatgataagcgtgatgaaatatcatatgctagatgtgatttgattgatgctctaaaagctaaacggttcagaattagagggacaaaagttaatcactatactacagaactcaattctcttttcctttttagtcctggttgttgtattgcaacctgatgggaaattgacaaataatatgaagacagaaaaaacgatcactgggattttacctgtcctttgctaactacaggaccaagcctgcatccttcttccatggggtctgaaattttaatgttcttgctccattttacaagcttctctatgaactcagatgcgatgctttcctaagatataaaataaaaaaatttagacaagagagtcagcaattgtatccctgttggcatatccaccagaaggtttgatctgaaataaatgtcattgtcattgaccttaatggaaacatcttcccgtatgacttggaacattcacttctccagtaataaatattcgcatgtcatattgggaagatcaggtaaaaccttaaagcaagtagaagattgggacttacgtgaacaagaaggcgggaagttgcactgcagatttgaccatttgtccagaagcaaccgaaaagagcccattcagcagctatcatttgccggcgtcaaaacatacaaagagtttaattttaagattaagcaaatttaagtcatgtctactcgtctcaaagcaacaaaagcattagtactatcttgaatatagcacaagaagaagttattataaaaaaactccaaatccactaaactactttttgtgacattcacctttatcaagatcaacgtcatcaaacacaatgagagggctcttcccaccaagttccatagaaacaggctgcaacaatgccatgagtaatgtgtcattgacattggtgatgaaacaaaaggaggagaaggaatatacagcagaaagttcaaaaattggaattaccttcaccaactgagcagcggctgtcatgaccttacttcctgtggcgaaacttccagtaaatgcaatctgcaaaaaaatcataacttagcattgaagcgtttaagaaacgcagacgttaaactggatgtttatc

SEQ ID NO: 37327 - DNA, 1986 bp, Arabidopsis thaliana landsberg
aaaacatgacatcttcatcaactttacagttagaagaaaaattttacttataggagaaaaaaaaaaccttcaagaaaaggataaatacaaaagaacttataaatattaaagagtaatgttgcaaaaacaaagaagaagagaatgtacaacaaaatggaaaaacaaagatgaatacatatttatctctttggctcactccatgtcttgccttcaaagaactcgttaagcattctctcaagatcttcaggactaaaccttatatacttctgggggttcttaccactctctatcatcggcctgatacacaacacaaccaaagaaacaaaacttttaactctttcttgacaagcgcgaaacaaaatctgtttaaaagtgtttttgatcttacccaaaacgtttaagaaacgatctgaaagcaggtaaaagaacttccgcaacagcaagtctaagagattcacgcaactcgctgtccggaactgtccattggcattgtctttggtgaagctcttcaaactgagaattgaaagtcttgaatctgtcttttactgatgctcttgatatatttgagttttctatcggaccgctcccactcgactgaaccgtgagacactgcaaaatctgcagaagaaaagactaatcagaaaatacattttaaagcatttttaaagtataaacctaaaacgattgagtaaacctttgcccaagaaactctcttgtactgatttgcatgttgttgtacaattcttcgatgtatttgaacccaatcatcacctaataaatcttttgcttctgacctgtgaaaaatgtaactctaactcaggattatgtttaggcttttctggttctgtttaagaaagatggagccgaagaaacagaaccaaacctcctaacagatctcactatatagtgaacattgttcattaggaaaagttgagttaatgctacatctttgtactgcttcgatttaccatccagattattctgtaaagcgtgcatgatcctcgttgttacagctccaagctcgctatcaggatctttactatcaaactcttgaaaaagtagcctcaacgtcgtttggtaactgtttccatatcccaaaaaccactgattagtccaacaaaaatgacaatgtccgttggtctaagtaaagttacttactcgaacaagaacttgacataatttataacgtagctagtaagtggatgaacggttccatccataaccgcggttttcgtagcatccttttcaaccgcttcttcaaaatcagcaaaagtttcttgagctgtctgagctaaccgctttgtcagattcagcgcggattctttcatctcagcacatggtttgcttccaaagagcaactcaatctataaatgaaagacaattagaggggctagctaatacacatagtttctttgacggtgtgagacattaaacgttacctcaggctgaagctctctcattatttcatacatatctaacagaacaaacagtttttcaggtgatctcttgcttttagcaatagcctccccgaaactaagcagcacagctacactatttacagtgacctcaccaaaacattgatctctgagagactcaacaccatcaagaatttggtcgcagattttcttttccgcggcgaataacagtttcacctgtctcaaggcaacaaaagcaagtgccgtgtaaacgaaggaaacagtagcgatctagtaaggtattcttgttttgtgggagagagttttttacggatattctcatgtaatgtatccgattcccaatcttggcctctaatacctcccattgcattctctgaacatcatcttggctaagcctctccactcctaatttcctcaaactctgttccaacaccgcagctcgagtatccctaataaagtaccaaaacgtatatggattacaaaactaatatgtgtgactatagaggttctacttgaaagaaaactgagaagttggacctcgcaagatttg

SEQ ID NO: 37328 - DNA, 1618 bp, Arabidopsis thaliana landsberg
  unsure (1)..(1618): unsure at all n locations
gtttttgtttgttcgcttgagtaatagtaacttaaaaatgaatgttgttttagaatcaataacatacactcaaagattaatggctggttggtgtaatttgtattagtgtcaaggtaatgtcataatttaggttcacacagttaaactctaaagcgtgtgtgtgagttataaacgaagaagaaaaaatgaattcaaaaagaacactgaagttttggtaagctattgagatttattaagctaaaaaaatgaaaaaacaattcctcgtggaaaattttgatttccaaggattttctctaccgattcaatttgattcatacatctagtttactattggaaattcattcaaattaatagaagaataggaacaaaaaaaatggagaaaacaaacttggtcgatgtcacggtcatgattgacatagctagagggatctgccattccatctgagaaaactcgaaagaagaaagccggagagaaggataaagctcaacaagcatcaggtgttttgattcacctgtcttcatagatgcatccgtcttcaattccttctcctacttgatccactactatgctcatccaattctttttttctttttttggaattttaacacacaataatggtaatcaaaaattttaatttttgaaatcaattagaaagatttagggtgagtgtcaataatgatcctaaaaattaggacaatggtcaaaggagaggacaatttctaagggaagatcgccattttaggagtgtttgaagctctcatgcaaattcccttccacatttcactctcagcataattcatttaattaaaataaaataaatgttgttagcatattgtgcatccactttggtgtttgcgcgcatacaaattcaacatgaaaattaaatgcctattttaattcttagaagcacatactaattaaagttcaccaatttagtttaaaagttttggcagattaaacacgaaatcgagaaaatataaaactagatacatatctgcacgatgcagnnnnnnnnnnnnnnnnnnnnnnnnntgatagattcttttttcgagtttcgaatatgttcggataaggagtcgaaaaccatttaggtaccttgcagatcaagtattttaaacaatcaaaatttttctataaaattaaatgagtgaaatcagaatgaagaaaaaaactctagatctctcatacgatgaaaaaattatatactagacgttgccgcatgcacatattttcaatattcttaaaataattatatattggaattgacttttaaaacattaaaatttctccataaattagttaatcatagaattactttatatttcttcatttgctttttttctacttatcttctaattagatataacaatattttgacaaaacatgtttgtagaagtagaactatcacacatacattaggagtctagaggacacataaccacgacgactccaccgaaataagggagttccgttaaagacaagttaaaggcagctaaaacaacatgtctatttcatcacgttaatatttctttggaaaggttggtaaagccaagaagttgaagaacaaaataaaaaaaaatagaagataatgaatttcacatttgagcagttgttaag

SEQ ID NO: 37329 - DNA, 2553 bp, Arabidopsis thaliana landsberg
aacaagatttttgcttacatctctattatcaatatggtgcttgtcctgaagaaccctatcaataacagcaggatcctagaatgcgacgaatccgaatcctctaggacgaccagtagctttctctcgcataacagtgacctgcaaaacctcgccgaaattgctgaagtactctctcagaagattctcgtcggtatcccatgaaatcccgccgataaatagctttccctgatctgattccattgtgagtttttttctctctcttcaaccctccggtgatacccaaaaaccctagatttagtaccgacaaatctccccggtgaagaagaggaaagaagctgtaaaaatttcagtgtcccgagaaaattagggtttcgggtttgtgaaattgggtgagagagaagagagagagattaaaaaaaaaaacagactttggaaaatagcggccaattgggttaaagtgagtgaaagagagatcgacttaccaaaaaaaaagaaaagaaagagaagacttttccatatcagcttcgtttatttatttatttatttttattttttagtcatgtaataataagttccatttagagatttaaaatggttgataaattttattattagtcgttaatatgttggaaaaaaaggagagagatatttgagcaagaatgtaggttataaatgttatagtgattccatgttatataaggatcaatgaccttattatttgagaaaaaatgttagatcattttaagtctttgattttttgtattaaaatttgttactttcatatatatatatatatatatataagcattaatcgacaaaaaaaccatatctcaaatcgagctcatcaaagcaatcattctacttctctcatcgaaatatatcgagcattgatggaagaaatgaaatatctgcaattttacaaaaaaaatcaaacaacgtcgaatgtgctaaaaatcgtacattttcgtattaattcaaatgtatgttaagaaggtcattgatcctaaaaataacaaacacttcatttggcaaactttgtgagggtgtggtattaaagaagaatttatataatcaaagaatacaatgtaatctacaaattcagcttacaagggaaaccaattaatcatgttattttgtatagatgctagtactgcaaatttgaactcttaaatgcaacattatgctgtgaccaaaaaaaaaaaagcaacattaatctctcttttttttctagtcatcaacgttattctcttaactcttaagaatatttttgtcgcaaaaaaaaaattaaattattagaaactctaaaattataaatttagaaaacaattcctattaaataaaaattggatcgaggaatctcaaaagaaagttcttagatagttatagcctgatattttcatattttggtgataactaacatttctaaaatcaaacttaacttaagctgttttcagttttcacatattcataatcatattgcgcaaggggatcaaaatttgtgcaccacttgtttagagtgaacgttgaacttaaaaggcataaacgtaggcctaaatctgtctttacagacctcaaaagtcaaaaagcacattaacaacaaactgtttgaaatgggccgcaaggcccaacattccttggttgtgcatagaaacaaataaatgcttttattttggcataaaatgttataaaaatagaaaaggaatccaataattaattttgtctcatcttcataaagaaaagacggcataaactccgtgagcccaccgtcactttcatccgtttgaaaccccaacgttcctatttctctcttttcaaaacacctcaacgaggcaacaaagtaaacaactaatcatctctcttcttcttcttcctctcaagtatcgaaaccgaaacagagaaacatcaccaccaatgggatgttttatgggttgtttcggtctctcttccaacaaaaaacgcagaaattccattaggaagatccttcctcgagatcaagtaagcttttttcaattttccacaataagtaaaataacactctttcttcttactctatctctttaaagtttaggtttttttccattactctgatttgaaccttaacctttattgcagagaatctgtagctatgagccgctgctttcttcagatccgacagatttcagtactgtttcagataaccctgaaaagatctcaaattcgaacctcaggtataatgtcttaggggcttggatttacataaaaactgaaactttttcttaatctgagttatgaaaagccaaaatgaaacccaattttagcagagattatcaattgaaatggctattttatgtttactgtgtcaggagtgaggtaggggaggaggaggagaagaagaaggtgactaagaagacgaggaagagagtcagatttgacttgaatgtacaaacctatgaacctattgtaccttcaagatatgagaatgcttgcagtgatgatgaagaggggaaaggaggaagaagcaagggatcttcggctatagataagaaaccagaggatctaagcagtaggtctgtg

SEQ ID NO: 37330 - DNA, 2406 bp, Arabidopsis thaliana landsberg
tgtcttggagttgtaatcttcctattaatgattgtgacagcttttataggatatgtcctaccttggggtcagatgagcttttggggagctacagtaattacaagcttagctagcgccatacctgtagtaggagataccatagtgacttggctttggggtggtttctccgtggacaatgccaccttaaatcgtttttttagtcttcatcatttactcccctttattttagtaggcgccagtcttcttcatctggccgcattgcatcaatatggatcaaataatccattgggtgtacattctgagatggataaaatagctttttacccttatttttatgtcaaggatctagttggttgggtagcttttgctatctttttttctatttggattttttatgctcctaatgttttgggacatcccgacaattatatacctgctaatccgatgtccaccccgcctcatattgtgccggaatggtatttcctaccgatccatgccattcttcgtagtatacctgacaaagcgggaggtgtagccgcaatagcaccagtttttatatgtctcttggctttacctttttttaaaagtatgtatgtgcgtagttcaagttttggggcttcaagttcttaggaagagccgtacgaggcagctcacgtacggttcgggagccgagaccctgcacagagtgagatggatacttttatgtcttcgtttaattatggtttggacataattgcatcacctctttagtggtgcttgcttgcaatttgtctttttgaaaaaaacaattgttgcaatattatgcacaacacattacacatatatgtcattgctcttggtcaagtaacgttttccatgcataatttttaaatttgtcaaagttaccttatttatgtatgatctggatactaaaatttgatgcattagatacggctctgtcacccaatttttattgtttcaacttcaaaagtgaggttaaaaagattttggaagaggatcagtagtctaattgtttgtcctacaaacatacagtatcttgttaagatgatcttcttttatttaggtgtaaaagaatatctgctttaagctgcaaattgtggaaagtttagttttaatctaggtgtaagaaaaaaaaatcaaaacaaatcattgtgacgataattagcgcatattgtgggaagttcatttttaatctagactgatactgaagcatctttatctattttaaaattctaccacaaaggttattaaaatcccttaccaaacattcacacttggtaacagctggtctgaatcaggacttattataaatttaaagtttactccatttaatttagttatttgatttgtaaatgaatattattttattttgcaggaaacatgaatctggcgtgatgtataaatattgtttatttgtgaccaaagcaaagaaaaatcttgtttatttactaccattagagattgttgagctacatactcatcatcaatggcgctaaaggtaaccaagatctcccaagtcagcccagcaagtaactcgtccaatgactcagccaactcgatggttcttccactgacgttcttcgacttacgttggttacaattccatcccaccgaaagagttatcttctacaaactcatcaaagactcatctcttcagtccttcctctccgtgatcctccccaaacttgagctctctctctccatcgtccttcgtcactacctcccgctcgctggccgcctcacatggagctcacaagatcctaaacctagcatcatcgtctctccgaacgactatgtttccttgactgtcgcggagagtgatgctgatttctcccgtatctccggtaaagggctacgtcccgaatcggagatacgctctttggtgcccgagttatcgctttcttgtgactcaccttcggttctttctttgcaagtcactttgttccccaaccaagggttttgtattggtatcgcttctcatcattctgttatggacgggaaaacagtgattaggtttataaaatcatgggctcacatttgtaaacatggagccatggatttaccggaggatttaactccggttttagatcgtacggttatcaatgttccttcaagtcttgatgcaaaaatcattgaacttttgtcatatttctcagaagtgaaagatagtttcagatcattgaagctgcttcctcccaaggagatcagcccgacctagtacggatctcgctcgagttgactcgagagaatatagagaacttagggagcaagccaagagggagtcagctcgctctcatcatgagcttcacttgtcaacgttcgttgttccaacgcgtatctgggcaggcttggtaaatacgcataagaactcccccagccggtgcgtttcatgtataagataaaaag

SEQ ID NO: 37331 - DNA, 1992 bp, Arabidopsis thaliana landsberg
  unsure (1)..(1992): unsure at all n locations
agacccaaatacgtgcctgcccccccctcattggttatcatcaacaaagactgaataatctctttatcagcaacagcaaccttagccccaaaagtgatcgaggacttatctttgttgatgatctgccctgttgctttgccatagatattcaggatctcttgaatggtctcacattgagaaacttcagctttgcagacaaacaaagtatcatcagcaaaaaggaggtgatgaatagaaggaccctgttgagaaaactgtacaccatttatccttccatcaagctcagctttattcaacaagtgagtcaaaccttcagtacacagcacaaaaagaaagggagaaattgggtctccttgcctcagaccccttcgcggcttaactaacccaaaagcttgaccattaatcaagatggtgtaagagacagtggtgacacaagtcatgattaagtcaacccaagaatctctaaaacccaaagcagataacaaggccttaagatagctccattccactcgatcaaaggctttggacatgtctgtctttatcgctaagaaatctttggaaatggcgttatgagttctcaaaccatgcacaatttcatgagctattaaaatgttgtcggagatgagacgctcttccacaaaggcagattggttgggagagacaatgtccgttaatagcggcttacgtctggataccaagatcttggagataatcttgtacatgactaaacaaagactgatgggtctcaactccaccatcttagaagcattgacttttttaggaataagacattgttgagttagattctattctgattggaactccccatgcttgaaaaaccgaaggacttctgcaataacttgatcacccactatgtcccagtattgttggaagaaaaaacctgtcatgccatcactcccaggagcactagaaggctttatagaaaacacagcagcctttacctcctcatttgtaacctccgcacaaagggaattattcatctcgatagaaactcttgggacaaaatcctggaagaacagaagatcattcgtcgcagggtaggaagaggagaagagcttttggaagtaccttgctgccacatcaccttttgatgcctcagaacagtgagaagtgccatcatcgtccaccaatgggggcaagccatttttgtttctttcagcttcgactgatgcgtggaaatatttagtgtttttgtctcccgaatgcatccatttttgacgagannnnnnnnnnnnnnnnnnnnnnnnnnctctgtgagctaacaccatatctcttttaagaatggccatcttagcaaaggaagggaaaatagcagcatgctccaactcaatctcctgctgaatactattgatcttagtttgtgcgttagtcacattttctcttttccagttacttagagctttcctgcatctcctcaatctttggaaaattgtctgaccaaaaaaagtagaagaggccatccaagcagttacaattgcttcttttaccaaaggtttgtgcagcattcttttatcaaatctaaaggaacctcgataagtatcttgagaagacacaagacttacaaggacaggccgatgatcagagccttttttctccaaaaaagcttggttagaagcggggaaagtcttaaaccaatctttattgccaaaacaacggtccaacttgcattgaatccataagtccatgcgtctaccactccaagtgaacccatttcccgtgctagacagctcaaccataccgcaagccgaaagcatattcccaaaatcaacaaaagaggcctcactctttctaggccctccaagtttttcaccattgtggagtatttcattaaaatccccaaccatacaccaacaatccttccttagaataccaatcctaatcagcttctcccaaacttgatatcttaagctgctgttcggattgccatagacacaagaaacaaaaaacttgaagctccatatttacacgaag

SEQ ID NO: 37332 - DNA, 2496 bp, Arabidopsis thaliana landsberg
aggcggagctacaggtaagatatttttttctgcattacaagttcaatgctttttgattgaacccacttttgaacctaaccatagatactacatattggctaattttaccaaaatctgacagttttatatctcaaaactaggctgtcttagcccatgaactaggccatctgaagtgtgatcacggcgtgtggctcacatttgcaaatattcttactcttggggcttatacagttcctggtagataccacactcttctacatgtccaagtcacttgtatctactgttctgtgtcagtctgacaaaattatagtgacttcatcccggaaatctatttatcgactcacataagtttcagtttgcagccggcgtgaaactctgttattgttactaaactggattctgttgtttgtagcttttgggcaaatgatagctcgaaccttggaagaacagttacttcgctggctacgttcagcagagctgacttgtgatcgcgcagcactactcgtcgcccaagatccaaaggtaccacttctaaaaaacaagaagaaatcaagcagaatgcgaaaatacctagtgatgtttatgttattgttcttctaatctctcttatgtcgcttccaagaggttgttgtatctgttctgatgaaattagccggaggatgtccatcaatcgctgatcagctaaatgttgacgcatttctagaacaagcccgttcatatgacaaagcttcttcaagccccttgggatggtacataaggtgagaaaattaaaactatacaaaatttagattattcttccttcagattcacttctttgtttgtttacatattttccttttctacagaaatgctcagactagtcaactttcgcatccattgccggttcttcgtgcacgtgagattgatgagtggtccaggagtctcgagtacaaaagtctcctgaaacgggcaaatcgaaaaagcacagtacagaaggtttagtgacgttgttaaagatttaaaaggaaggaagcgaaataaacatgtataggtaagtttcatataagcacacatttgtatatgaacctgagtttttacttttgtgggtcgttttaaggtttgtcttgaattcttggacaggaacaatacagaaggagcaaagaagaaatgagagattggactctaggtctaaataggtactgtaaaactcttgtatttatatagtggcatactggcattgttgtatatcttataactgtaatagataaattcaaatgtatattccggaaaacaaaagggccttagctcaaagataatatatgataaagattgtttgtataactcacctgtctcagtcttagaggcttaaactaccaaactgattgttccaattttcatagattccaagttcgttctgagaaacagaaggccttacttcttgcaatgcgtctttaaagtcctgcataatgaccaaatatatgaaacaatgacagaaacaaaaagaattcgtttagctttacatgtttgtattcacagagttcgcatatcatcaatttaagtttgacccgaaacatgatgataccacaaaaaatcttcattttgattatatgtacctgaagagttactagacgcatgtcatctttagtcaggttagttatatctatgcctcgtttgagagcttctcttaatggacccatagttgcatctttcaccaggttcttcatatctgatcccgagtaccctgcagtgaaatttaatgaaaagctagcttggttatggccgcaaatgtgtatttgcatttttgggttgtgttctttggactttaaagatcaaaaatccagagatttattgtgtttctgaagttcctatgatgaatttaccttccgttaggttgcatatgatgttcatatcatcatccgacagagtaaacaacccatctttctttaggagattctgtattatccatgctcttgcttcttcaattcgaaaacagagaatcgtgtcaagagagtatattagacgaaaaccagagaatgacatgaaaaagtttgtttatcattctttaccagatgaaggaagaggaatgtagagtctcttggttagtcgtcttcttgctgcttcatcgagctcttgcggtctatttgttgctcctaacaaacaaaaaaaattagcagaataaagttactaaaccccatataacccacaaaactcaaaccttactgttcccagttttttacctattaggagaatttgctcgctgccactgtcgaaaccttccatttcaatcaggaattgtgtcttgagtcttctactcgattcatgttcaccatctgacttacgctgtggcaaagggtgaaagttcgtttctttaatagaatgttacataaggaaaccaatacatgccagaaaaattgtctttactgaaccaccctttgtaattttttccagcccttgttctacgctgataggtttgaaagtttatgaacatgtaatattttgagagattaccaacaaacc

SEQ ID NO: 37333 - DNA, 1895 bp, Arabidopsis thaliana landsberg
ctctagaggatcccgcatgtctttgcccagactcccacatcatcttcggcgaagattgccggtatattctcccggcggcaggagatttcatccaaaccggcgtaccgtttccgttaacgtcaagctcgttaaagttcgaggcacgtggtgttggctgcaacgagtaagcatcggaggaagcataacccgagagccttctaggacttgcacctaatccgggtcgagtaaatccgaacccgcctaaatctccgttacaaaacatgatctcgttactaccgttataaaactgaagggtaccgcttcctcctccgccgtgaaagaaacggttattaggagtgttgacggagaaaatctcggcgttagaaagattagaggctctaggggttaagcacaaggaggaggacataacagaatcaggtacggatgatacggaccgtcggatcctgagcctgatccgaccgttaacatcggtttcagtttctgtacggagcggatccatgccgtctaaggaaatgacgtcatcgtcgacttggatcttggcgattgatccggctgcttgacccggaaactctgctcggataagcaacctcgctgctcggagttcaaagaggaatagtagcagagtatacctatacatgtatacacacttagcttatattatcatacgttataattaaataattcaactaataagaagcttgggttagtaaaaacatttgatttggttgaattatatcctagagtaacgaaattcatttaagttttggttacaaaatccatgaaaaaatgtgtggtaaaaatatgtgaaatcacaaaataattccattattatgaggttttctaatcaatcacagggtaaatgaataaagaacggatagtaatttgataacgtaccaaatgatgcattgaagaacaacgagttggaccatgagggtttgagtgtaatctccatacatggcctgaagcaaaggtatgcccataacgagagtgttagggagagtagcgattgagaatagagtgatgagccaatcgagaccaccggctttgaagaaaacggcccatagagagagcaaaacgaagacgaagattttggacaaagtgtcggcgaggatgaacattgtgtccattttgtaagggttgttttgtgagatgaagtggaaagagaggactgggacggcgaaaacggagacaaaacggttgattccggaacattgcgccggcgtggggatcttgcaccactttaccgatccataagccacgaacatggcgaagtagagtggtgccatggcacacatcaccgtgtagaattcgtttcccgttatcatctttttctttgcctcttcttcttcttggtatgtactatgtaggttaagttatgtgccaaatgtttgtgtgttgggttatatagagacttgttgacgagattaccccttagttagcttcgttatgaaattgcattagggagggattagtgattattatatagattggtaaaatactgctgctatacatatatagttggaaatctatatataaagcactttctttttctggacctcatcattattttaatctctaaaattctcattaaatagactcatcacaattttaaaattaattaataagttgatttgttactttttttttttttaattcaacttcataattaaattattgaaaatctaatccaaaccgggaaaaagattttaatagaatatttagaataacttcatgcaatagatttgctttgtaacccgtataatcattctcaatatgtacacgcataagtctcttatttcagaaatctatataataaacaaaatttcgtaattcaagaaaaaagtacactttgtttacccaaaattgaaaattctgtgttttgcttaagtgagctt

SEQ ID NO: 37334 - DNA, 1308 bp, Arabidopsis thaliana landsberg
ttccagaaagcaaaagcatataatattccattatttgcagttacatttttaaacaaaatttgaccaaaacaatagggaagggtaatgaaaagattgatcaatcaattaagtaatggattagatattgtagcacaagaaaagaatgaattatgagaagaaaaaaactataacttaaagcttgaaagcttgcggattgcagaaagcatatatgcttttctaattttcagacacactaatatatataaaaatttgacaaaaaccaaaaaggaagaaaagtacaaaaaaggttaatcaatcaattaattaactactgatttaattaactaaaatatcaatactaaccaacggttgcagttcggaatgtcgtaagaccctgcatgaaattccggtcaccggtaataatcgtctgtcctattccgtcaccaacaagcataatgttcgtcttcttcttcttcaaatcaatattttctttatacacacctttcttaacatatataacatatcgctttgtgctatgattaggagcctcgttgatggcctcattaattgtccgatacttcccttttccatctatcgccacaaccgtgtttggatgcatgacactggggtcatgacgcatcatgaggctctcgtcggtctccgtgagccactcaggacttgcgatgacgctctcgttcctagatgccttgaaaggcaaggcattgagctgcgtgtacatgtctaagacattgctcacaagctgagtgacttgtcttaagctacctttgatcaattcctcgtacttcctctctgttccttcaaacccttctagacacgtgtcttggttactcatggccgcgctaagccaggttttaagattgcctcctgctgcagcagcatcgtgagagccatcgtctagatctattcctcctcctccatggagtttgttcatctccagcatcgaccatgctagctctgttaccgagaagcctacaagctctttgcaatcctctatggcaacttgctcacgcgaacggatagataacatcattaccgttgggattctttccattgctaacttggctttgtcatgtgcttcctttaccgcagcacgtaaaaccgaatgcgggtttaacccgtgacccgattccttgacgtgtgtccagatgttagagacgcacaactcgtgagcatcgataaattggcatgctttcgcgacaagagaccgaaagttatcttctttgtatggttttaaaataatggtttcatacgaggaagtgtgaacggacataagcataactaagagaagagcggtggtaatccccattt

SEQ ID NO: 37335 - DNA, 1074 bp, Arabidopsis thaliana landsberg
gaattcagaaagttattacacgtatgttttcactgagtttactacactggcaatgtggcatacatctcttactgcaaattgcagacaagtggtcaatcaaatcttttttagttgggcccaaaatgtctgttattggatacgttgggccttaaaatggcccccatcagtcaaaaacatcactgcttggagaaggatctagaaaaacttgcaagttagttcaaacaaaataaaggaaaaagaacgatctagaagaaagaaaaaaaaaggaaaagaaacccttatggaggttcccacaccactctatatataataacatccttctcctaaatcccgcatcagtacttctctctgctctcaagataattttgttctctcaatttcattcttaaaccctagttcttcgattttttccgatctacgacaatggcggacgctgaaacctttgctttccaagctgagatcaaccagttgctttccctcatcatcaataccttttactctaacaaggagatcttcctccgtgaactcatcagtaactcttctgatgtgcgatctctatctctctctaccttattgtatacttgtgtatctcgtttgattgatttggcggatggatctgtagatttaggtttggttagggtttagtgttctttccgttgggagaattttggttacttactgaagttgcgaagctttttgtgtacaaatctattgtttaggtttagtgttgataccaaggatttaagtagtttcttgttagattaccaagttttcgattgcttatagttgatttgtatacatattatgtgtattgcttgcttacgattgtgattctattctggtgaaaacaggctttggacaagattaggttcgagtccttgacggacaagagcaagctcgatggtcagcctgagcttttcattcacatcattccggacaagactaacaacaccttgaccattatcgatagtggtattgggatgaccaatgctggtacgtaattgatttcattcaaaagcaaggtgtacttgattacattcaaaaccattatctatgtgtttgatttgtgtctgc

SEQ ID NO: 37336 - DNA, 1167 bp, Arabidopsis thaliana landsberg
actgcggacgcacgctgataagaacattgtcatcatccttattggaaacaagtctgatctatatagatcaaagagctgttcccacggaagacgctaaagagtttgctgagaaggaaggactctttttcctcgagacctctgctttaaacgcaaccaatgtcgaaaactccttcaacactctaatgactcagatatacaataccgtgaacaagaagaatcttgcatctgaaggcaactcaaataaccccggttcaatggctggtaagaagattctcatcccagcttctggacaggagattcccgctaagaccagcacttgttgtacttcttcttgatctgtctcctactcaagcaagattcattttttttcctcctgaaatttgtgatagagaatgctactttcattgtatattctttttcgaatctggcttgtttgctagttcattaaacattggtgtgcaattggacaccgatagaaagtattggaacaaatagcttttgaatgaaatatgaaacaacagtctttgagagtaacgtcagctacaagctgtctcagcagtctttgaacagttctcagcttgttctttttctttacttctatcagaaagcctctggataagttggtgacaatcgactgttgtgaccataaggttaaagctagccttgcccttccagcatccaatggctattgttgatgaattcactctgaattgttctgacccgagctgagaaactgtagcaagcacaaacagttaaaatcatatcccacatgaccaaccaaaagtatcttatataaatccgatacacaccatcaacgagaaccataacgcaagatcccaaggctagttctgctgctttctcaccaatctgtggatgtatgaaatctagaaacttgattgatttctgctgcaggagattcttgaaatccgccattgttgcataaagtatttgcttggtcatgtacggaaggatcacaggcaatccctctgacgttattcggaatgagcaacagttggcttcacattcttttgcagattgtttctcctgcgtttttggttagttaataaataccgcctctgctatatttgtatttgatcaagagagagagagggatgaaactatattgtacttacaaacatcttgaggccaacagaggagatcttgagc

SEQ ID NO: 37337 - DNA, 4879 bp, Arabidopsis thaliana landsberg
agaccttgtgatgaacacggatcatcttaattaccttggctagtactcgtcaatatcagtgagttacatactaattttaatatgcatcgtgctctattgcttatgacactgatcacgtccgcggtttccatgagtgaagaagagcattgcagggacatgttcgagagctttattaaaggactatctatgcaaccccctccacagtattgtagaggagtgagccgcttcaataacgtcctcaagctcacgtctccaattactgtaattgattcttcactctctctctctctctttttcatctatactaaaaccggttgtttaaccgtgattaaccgggtgggataaccgagttactactatatgtatagttgcaggtattgacgaagaaaaaggtgaatgggaagatagggggacggtgtgattgcccggaattagatataatttggaaaataagatgtaaaccttgcgcacaaaacccagacccgaatgtaacagaatctgaatcacaacatgtgttgatgtgagtgttcaatacgtccatgtgggggtgcatatgcattctaggaaagatgatcttataattttctagtatttgttcacttacgttttatcgtagttttctaagttgttgtatagatattgtcgtttaataagaaatgtcacacatgcaaacctttgaacgtcacaaatttcgattcatattttgaacgttgatgttctattgtttttgtttttaacaaaagtttatcgcacttgttcctcgaaattcacattttaatctttaagttatcttaataacataggatggaaaaaacagagcattttcttgtttttcttctcctcttggattcctcttcacttccctttttaccaatgtctccgttgctgtctgattaaaaaatacgattaattttctactaatagtagttttggttatccatgtgtttctttcagataatagtagtattaaaaaaaacacaaaattaaaagtccactttttactgccaaacagtgaggttcggctttccataattaatgatagaataactttgtccttcatttttttttttcaatcaatgacgacttgtacctaccaccacaatttcattacataattacttttttatgaatcaacttggtctttttagtcgtccaaattgacaaggcttgactcggagataagaacacaataatatgcccatccacagaagacagtaaaagcttttcagaaagtctatagaaaagatgtcaaaatatgtggatgttgtaaaagatgatatttgatcatttggtaaaagatgaaaacagagaaaacaatacaacgtacagaggcgttggtgcgaaacatcactaatcagaagttatgttgttcttgttcttgtaacgattgtaaaactctggttttacacaaatctataagatttacagctaagttgtgagttattaaattataacttttgactaatattttgatatataaccactgatccactatcacttagtcttcaatttttaatcgcagaaacataaaaacgtctagtaagtcacgaaaccttgattagacaaatcaccaactctttgacggcgaagtatatgtgtgtgattgggagtaagatctttatcctctctagtcttgctgatcaaattgaataaaatcttgggataaatggggatttggaataatgactcctcccctgagtttccatcactttgaactatatgatcatctgtaatatacatattccttcttttctaaaagatgattctattattatgtgcttgacgtaaacattcaatctaagatatggaaaagtcggaggcttactataaaggacgatctggaaggagccaagaagactctctgaaagtgaatctattgaaagagagccgacaagaatttgtggtgagtaagataatgaaaaacaaaacgatagtgttacttgctgcatttaattattaggaaccaaaatgtacgcactatcgcaacaaaataaaatgaaaagccgaaaaggacattttcattaaacaaagataagattcaggacagttgggaatattgttgtacacgattttccaacaaaattcctaagttttgttttatggtcaattaagtagaattgtaggttataaaattttagaaatgaaattaagaaatggtaatagtgtgatatatagccattattctttttattggtttcaatcatctttcactaaaaatgttacgtgaaacataaatttatttgacagcattaaacagattattattttgtgacaatagtttctagaacaaaactatgtatactacagtagtattaatttataagaaaggggttaaaagggaagaagaaaagtcgtgagagagaacgcgtccgcattggaggacgcagccgataaaatgttacagtcaccgagcatttcacattatttcctcattcgcatcaacgaagtcaaaaccatttataaacccaaaatcttcttcgatctctccataattctcgtttgcgtcattcattcatcacatatcaaccaccacagagacagaggaatagtctcaaaactttctcagaaatggcaggcagtaatattctccataagattaaggtactactctttttatgctttattcttcttatttgacggtactactttgagatgagatctccttgatctgatctcttttgagctcacttttctctgctttggacctggaatcagtttctctgttgttagctctttctgtgattagtaaaaagtttgaaactttttttgagaaataaacaaagttttaagtgagtgagttagtcagataaacgaatgcagtctcaaggttgatcctttagctttatcaaataaaaaaggttgatcctttagaattttatggtttttggctgatccattagcttaacttttgaggtgggttttctctgaagaatctgtgcatagatctctgttatgcttatggtttgttcatgggggtgataaagaacttagatttagatgactccatgaaggcttttaactgatttggtttgaagaatccagtgtttcttgatcttgtgtggattcagtattaactctactgttttgctgtggattagttgaaggctgggttctgtggatctgctcctgacatgggaagaggcaaaagcaagatgtggaagaacatcacccacggttttcactgtgtgaagggcaagtccagccatccgatggaggactatgtagtgtctgaattcaagaaacttgaaggtcatgaattgggtttgtttgctatctttgatggtcacttggggcatgatgtggctaaatacttgcagactaatctctttgacaacattcttaaagaggtaaatctttaatttttgtcaagaaatctctttggaggccaaaaggagaaacctttgtgaattattctgacttatccgtttgtgtttctgcagaaagatttttggactgacacagagaatgctataaggaatgcctacagatcaacagatgccgtgatattgcagcagtcccttaagcttggtaaaggcggatcaacagctgtaacgggaattctaattgatggtaaaaagctagttgttgctaatgttggagactccagagcagtgatgtctaagaatggtgttgcgcatcagctatctgtcgatcatgaaccaagcaaggagaaaaaagaaatagagagccgaggtggctttgtgtcaaatattccaggtaaagctacataatttgttctaactagttatgcttttggtcttcttggattaagtattaacgttcctaaaatgttgcaggggatgttccacgagtggatggacagttagcggttgcaagagcatttggagataagagcttaaagttacatctgagctcagaaccggacataacacaccagacaattgatgatcacactgaattcatccttttcgcaagcgatggtatttggaaagtaagtttaatgactcagtatcttactctgtttctaaccgtggtttagccagtttctggtctacttcttctaacatgatggacgatctttaactgcaggtattatcaaaccaagaagcggttgatgctatcaagagtatcaaagatcctcatgcagctgcaaagcacttgatagaggaagctatatctaggaagagcaaagatgacatctcatgtatcgttgtaaagttccactaatcttctcttcttcttatcaaaagctattttgtctataagttaccatcaagttgcaagatagagaaatatatgctcaagctgtgtctgtaaaaacccagtaatgaggtttcccagaagatgtaatatattatcgaaatcgcaacagccttaagatacaaaagaaagaactgaaattaaaaaaatgaaataaaacaaatcgcaacagccttaagatacaaaagaaagatgttcttcgtagttgttgtcatcttcgaatctcctcttctctgcagaaatagaaaaacaaaggacaaagtatattgtcagctttaacatacaagcaaaaaaattgtggtggatcaaaggaattaatggaacttacaagcgcatgtgtggtctctagacatggggaagtcagaactgaaatgacactggtcggaaagagccaaaacgtctggcttgagtgattcgatggatgtggtcagaaactccatacaccggcaaagcctgcgcctctccttcccatgcttacggcggcactgaaccaacggcaacactctgcggtgggcggagactcctgatggacgaagaacatcttgcactgttctagcatcacgttcgccacgtctacacactccggtggccaaggacggtacactgacgtcggtagttgtggctgcaacaagaagacacatcattgcaaacgctactt

SEQ ID NO: 37338 - DNA, 2692 bp, Arabidopsis thaliana landsberg
gttcttttttgtttattggtttgtccataagttttctgatactaggatgagataaccttttgtggtgttttctgaccctgctttcaatagtcaatcttccaagtcaaacttctgaaaacaaatattttctcagattttaggatcttgtgaacttgtgtttggatcttcaatcattctaatgacaactgtatcacagaggaaaaaatcttgactttggaccttgtaaattttgattatatcatttgattaccattccccaattctgttctatcatgaattatatttgagtaaagatgtctcaagcagagtacttagctacttagcttccaatcttgtgctactacttcaaatgcctttgattgttctttgcttcggtcagccttatgctcctttcagtttttttttttttttgattgaacaatgttctttgctcttcatgcttcttgtaaactctcaagttgcatcctttctggatttattttcaggacatgtggacagttctcaacagtagcatacttcaacaaagatcattgcttttcagcggaacctgataatctccaacaaatattcttcggtttacagtattaacaccagcaggatagtgctgttttcccattcttgaagatggacagggcagatacgtcgggctttgtaagtggcggaagttgttcatctctcaacttgctccaaaatatgcttatagctacaagtatgatgtgctaagtggtactatttcggagctctctttcatctatatccttttcatcttcatatgaatttggacaaaggtgtagttccattctctagtgccattaatatgggtgacaccgctcttagcctgaagtgtcttgggggctctgaaaaccaattttgttccgatgtatctagtttcactgatgatggctgccggttagtcctcggattgggtccaacgtcgacttcatactgttttagtgtcggcgttaataacagcaacaaagattctgcttctggatttactcaagctgattcagttctgcaacttggtcgtcctgctgtaagcatagacactttcagtggacttgataatggtggacaacgtgtgatccctgttgttgatgaaggttcttcttcagctaagagatcaggtggatacatgccatcgcttttgttagatccaaatgttaaaaacccttcacagattcaacaacttaaagattttggaaccggtatccattcacaagtgagccaagaaccatcaccttacacagagttctatgtacagcagaggacaagcaatccgaggaagtgtaaatttatgggatgtgtgaagggagctcgaggagcgtcaggactctgcatcagccatggaggaggacagagatgccaaaaaccaggctgcaacaaaggtgcagagagtaaaaccactttttgtaaaacccatggtggagggaagaggtgtgaacacttgggatgcacgaagagcgccgaaggtaaaacagatttctgtatatctcatggtggtggaagacgttgcgagttccttgaaggatgtgacaaagcagcccgtggcaggtcgggcctctgcatcaaacacggtggtggcaaaagatgtaatatcgaagactgtacacgaagtgctgaaggacaagctggtctttgtatatcccatggtggtgggaaacgttgtcagtatttttcaggttgtgagaaaggagctcaaggaagtactaactactgcaaagcccatggaggtggaaaacgctgcatattttcaggatgtggcgctggaacataagcgaacctacaggtgtgccaaactcaccgagggggacagcgcatgttatatgacctgatattgaaactgaatctgctgcagagaaactcgtctctccaaatctgcttgaagaaaatttatcgtcttcgtaagagttttccactaaacagttttgctgatgatgattctcagtttcaggcttttcaggttcgttgcaagttttgtttggttcttgagaggtcgttgtagaaacagaggaaagcttctcctctccttgttttggctcctctgttttctcaagctctgtttcgatagctgtggtttctaagcttcttttttccttatcctgcagtcacacattagaaagttagaaactttcaatttagaaaaacctgaaacgtcatttgatagtgttatgtattgcctgaagctgagaaggagattgttcttcatgactatcgctgctaatgttgtcttggttgagagatttttgttcatcttcccttgatagaatatctcccaatgttaaacattcctttgagtcattatcctgtgatatagccacttcgtcctttgaattctcatcaggttcaatttcagagggacttagcccatgtgttggtgaagccttgacttcctctgtcacaatcaaatgctcttgattgtaattgctagaagtaccttcagcatcagcaaaatcttctcctgaagattcttcaacatctctgtctgtcttatgatcgttacaaaactcagaatcatcaaccttactgatgctgtcttccgcagacttagtttctgatggattcacatttgttttgtctgctttcaccaaatcctctgttgagctagacttgacagaatccttctcaccaaataagaacttctcctgaacaggcacaccttcatcgacacatatatctttgacgatatggt

SEQ ID NO: 37339 - DNA, 2638 bp, Arabidopsis thaliana landsberg
atgcatgcaactaacattgtgctaaagtcttctaactagtctataatttcttaggtcaaggttctgctcagccagtgccactatttgttggaaacattattgcgttcatcctaaatttggtaagattatttccttatgaacacaaaccgagaaacaagctcattgcataaaaagtcaaagagtttcttaacttgcaaaaccattcttgcttcaggttggtcctaagggtctagaatttgctcggtactcgttggactaccataccatcagaaactatttgtacgtaaaccgcaaatggggaaagcaaaggtaagatctgaaacacactcctagagataaaagtttattgcgatcaactgtgtatttctatactattggatcgttctctaatgaccaaagctgcattaccatctacagagcaaacacccacatgccatcatatgccaaaaagatagtggaaatgtacaacaaaaacggccaaatagataaaatgctctccaagaaatgaacattttaggcctttctcatgtaagtttccaaatgtatatttcatcctacaagtgagtaaatgtacattggtcctactgtttctcaacttgtagtatgttagtaatatccaaaactatttccctcgtgaatttggtaagacaccggcaagaaaagatgggtcggtttggtgttttttggcagagaacagagaataagaaacagtctaaatcagcggctgaatccaaatcaacccatgtgggttccttcctccatatctttaggttaaggtgatgtccgagtaaaaggttgcagggttttgcatgagaacatgaataactgttttaagaggatgggaaccagacatttacacagttggggggaattagcttttaatgtcttttttttgcttggacaaagaagaaggaaccatggttaagcttcactcgctcgctcactcactcactcactaacttactcatcaccatatttcacacattggaaacttcaaattttactctctctttctttctttttttgtctttttgttagtcaagtctctgctctgctggttcaatgactttgctgcagagactctcagacctcaagtgaaactcataaatgtctctgctcttttgcaccatagttgattttttctcaacagaggcattgtcctaatacagagcatgtaaacgttttttctaataatatatttaagtgaaataaagcttactttggtaccttgaattaattttgagttgcaatttgacatataacaatgttagagaattcatttacgtattgcatattttggatctgtatctgtttcagtatatatatatttataactagatccaacatcatatataatatatgatttcactcaagtttttctgagaaagttgtataatgttatatttattatccatctgtgtttcaaattagatacattgttcatccctaatggattttgcatatcctacagaaatgcatgtttcagtattttcaacttgtgttccctggaggttgtaatccatgaaacaactttaatatggactgtccaagacaatcatgtgtaaatcaatcatttgccaaatataatgattacaaaatggctaataattccttaatcagttaaataacagctctaacttgtgagagtattcttccaataatgaaacagcatgaaattagttgtttcttttcctgatcaacaacatcatcatagagataacacaacatgcatcgttgagaaaagaattacaaaaccgtaaaatatatttgtcatattagattaagcaaaacttcttacaagagttcaaaatctaaaatgaagatttaaaaaaaatacaacaacaaaataaagcactcttaaaataaaaatacataaaaaagccacatcttcctaaaaaaacaaagaaaaatccccctattatttttttcttttcacaattctcttttttttgggggtattttcttccgaggagagggcttaattatcttcttctttttttgaatatttttttccctaaatttgataatgatgattagaaatgtgaaatacaacgacgatggcgagtagcgacagttttcttctgttgcttagactcttctttcccgctgtaggcgatgtcctgagctacactcattgcatcgaacgacgcacctgagagtccttttccggtgaatcccaccgcatacaattcggccttcccttttcactcctttggaaatgggtttttctctatcccaatctcgcccaagtcgttttcctgcataacaataaatcaatcaccaatcaacgtcttagtttttaccaaacttcccataactatcaataccgggattctatggtcctatactcctataaaatgttatcttttgagacaaaaatctgaaaaagataatatttttgtctaccttaagccatgaagggacattgcttctgtaaccagtggcaagaatcactgaatcaatctgcagaactcgaccatccacgagttcgacctttcccggaccaaacttagctattcccgctacgattttgatctttcctgatttgatcattgaaatggctccgatgtctagcacgggagttttacctgcggtgttcttcagctctaacggtccaatttcaggcctcttgagccca

SEQ ID NO: 37340 - DNA, 411 bp, Arabidopsis thaliana landsberg
ctttctctctctctccacctttccattcatattaacgggtaatattgcctcatcctcaaaaaaaaacacgctttataaaggttctcaactcaagttctcttctctaaaaaaccccaacaatggcctctgtagacaaactcatacacacacatgtccctgaaaaggacgtttttgccttccacttcctccaatccctctcaaatctcagaaaacaaaacccttttgatactccggaccaaaaaaactaccgtgtgaggaagatcaagaaggctgcgtacgtttccatggccagagcatatcggagggagtagccggctatggagcatagccctcttgcgtagagcagacaaagatgacaacaagatcgcttgattttcaaggaggaagaggaaggtgacgtggaatatatca

SEQ ID NO: 37341 - DNA, 1940 bp, Arabidopsis thaliana landsberg
caaagatatatgactaattaaaaactgtgaggcaaggtattcagtttccattttttttaagttattaactattctggttaatataaattaaatatagccttaactaaaaatatgcaaattatacaactatgtaataatcctgaagtattcatgactttcagttttatgaatctacggtgtaccttagcagtttagcagttattgtgctcatcggctggggattgttaattagtaattaaacgatcctgcatattttgattatctataagtgagttcctcacagaaaagatctataaatgataaaacatgtaaagtagaatttagaaaatgtttgtagtctttcttaccttcccaccagtttcctcttgaagcactttccgaatcaccttcctctccatctttcttatactggacaactcaaaattagctagtttattagagttaattacatagagacttatatatcctaaattccaaatgaatctagataaaatgacaacacataatctagaatattactttgcccatttgcgtttatatatagctcacatatccattttcctctcgaaaacgccattttagtgtattatgcattttagtgtttctgtcgaaatgcaacacaaatatatagggacttacagcatctggattggtagttgaagaggaatagttatcttggcctccatagtatatggatgagctcaagttgcatggtggttgtgtttcttcactttggtaactctttctctccttatttttgctcctttcacctctttcatctgtaccccatcattcacatttctcacctttaataactaagccacgaagtgaactagtatctcattgttaatttctagtatatagtagatatataaaccaaacattttaaggacaaacacgtccaaaactcttcactagagtaagcagtaaactcacttggagtctcaaaatttgtaggttgatacttggcagctccatttcgacttgtcaagttcccttgcgtcaccttgagttgagaacaaagaaaaatttcgtgaaactgatgtatatcttttagaatgatgatgatcatgatatatattggttcatatataccgctgaaagtggtgggaagatggatttgaacaatcctgttgttgatgaagaatacgagtgagagactcttggaccaaaaatatgatccaacgacgaagaggacgatgaagaggaaccagataccgactttttcttgtccatcacagctcttttcaactttttgatgtctacttgttgtttgtgtatactaatgtatttatatgttaaaagggttagttctttgtggctaagggatatatgttcaaatggttaagtagagagcggaaagaaacgagagaagttactttgagaacgatttttagttgtttgtgttgggaggtatgtgacttattcactctcctgtaagcttatttatagacactgttaaccacttatcagctttgagcctttgactataattgaaaccatattaaaatttacattattctaatttggtttgagtaattccgttttataaaataattcccatttttggaagcatttcatgactgaaactaatttggggcattatccaactactcagccgcgccgattaattgccaatcaagtcagtagataacacaattaacttgcccccttagcactagaatgttccaaattttacaaaaattttcctgttatgaatcttccgcatgacaacatgagaccaaaatagttctaacttaacttacacgcaaaaaaaaataaaaattggttacactcttatgcattataccatctattacatatttcttgtgtgataaataaattatgggtttgggcgactatgatacatacttcaaaccctatagaattctttttttgttgatcgttctcggatttgcatttgagattatgtaagattt

SEQ ID NO: 37342 - DNA, 2001 bp, Arabidopsis thaliana landsberg
tgaagctctttccaggcgtcttctcatgcttcctcacggccttttactctgcccattgcccctacttctcctggcgagcttattaaggacatgccaccccggcctctccaagcgccaatcacctctgcgaatgctccgaaagttgcagacccaacacccacagccaaaccatccgctaccacggatgcgccatggcttcatttgtttaaaggcaattcaaggcccttaaccaaaaaaggaacagcctttaccctcccttcgggtgaagcttgtgtgaagattcccatctctatcattgaaaagcatcaaaaagcatgggattgtttcatccttgggcaattctactcggatccaccagctcagggcaccattcacgcgattgttaatggtatatggagtaagtttcatagagatatctctgttaccaaaatggaaggcaacgcgtttcctgtttcgtgttccaaatgctttaacaagaaatcggatcctcacccaaggtctctggcagattgaaggccaaactatgtttgttgcaaattggaaaccaggatccattccacaaaaactagagttgtcttcagcgccagtgtggcttgaattgaggaatgtccctcttcaattctttaacgaggatggttttgaattcattgcaggccttgttggtgagcctaagggtctgcatccttctacagctaatttgtccaaccttgaagtggccaaagtcttcacccttattgatccaaggaaaccccttcctgaggctgtaaatgtgcaattcccttcaagtgaaataagtagagtgcttgtgtctagcccttggatgcccccagtttgcccgttctgtaaagaagtggggcacaaccttaagcgatgcaaggtcgctccggtctcgtgtcacgtctgcaattcaacttgccactcggtttcgaattgcccgagagctaaagctaagccaaccaagaaagcttccaagttaaaacctaccgcagcccctggagagatctcatccgactctccccttgtggcttctgctagctctattgataaaggaaaagcaattgaagttggtccgggaatcaatgcttctcttgttaagcagacggggactgtttccttatccaagagccctactacgagtaaatcagagtggatccaagtgaagccgaattctgctgcaaagaaagacatgcccgcagctgcgtgtagttcctctcctgccacagatagctcctcacccaccgtttttgctatcgataatttgattaaagagcaggattcgttggactcaaagagtcttgcgtctgattcatctgaccttctttcttcagaagatggagttgacccggagattaacgaatctcagttcttaaaaatgttctcacaaagacaacaaagagttgctaggggcaagggccctaaacatacttgatcaatgtataaagacattttttgctggaatgtgcgaggttttaataaattaagtcatcggaaaggttttagggattggtattgtcttaaccgtcctatatttggaagtgtcattgagactcatgtgcaacagcccaagcagaagaagttcctttcagctattttgccaggctagtcttttgaagacaattatgctttctcagatttggggaagatctggataatgtggcatcctagtgtcaaggtgtctgtcttatctaaatcgcttcagattgtgacttgtgcggtcctcctgccggacgcacattcaaacatagacataagggttgataacgcaaggaatgaggagtgagatagaaaagacccttggagagaaattgagggaattgccactggccatcgtatgagaggtaaaccttggccagaccttggtgattttaaccaaattctcagcccctctgatcactgctgcgaccaaaatgcaaatgttgatctggccactagatagtcttgcgactgccctattgatgcggatctctctgatctcaactttagaggctgttcttatacctg

SEQ ID NO: 37343 - DNA, 2415 bp, Arabidopsis thaliana landsberg
gatttgcttgaaagtcgtcatgctcagttcctcctctgtccgatttgatacggaccttaaaggcgagtctgcggcgacaaagatttatttgggcctttatgcttttatgcatttgggcctttatgtgtttaagccgtttgggcctcacaggttagttctttgtttccttttttttttttccctgcagttctttgttgggatttgttttcgtgtaactcgtttagtgaaaaacactatttattcaattttcagaaacttctgtgattactattcaagtaactcatctactcctttgacttgtaaacattgaacatgtgtatttgacaaagaagaaacatgtacactatatatctttctctcctacttcaccttccaaaatatttttttttaaattcacctcagaaaataacaaatacaaaaaataatttttttgaacaatgaatcaagaagaggaaaatacagaattagggttccaaacaaacaggtaatattgaagaactttttgaagttctactacttccaaaagagaagaaacatctcttcatgactctgctattaccaccaccactactgctactatcttcaccgtctccagctaccggaatctgcctgtttctccggctgatttcctcttggaccgccaagtacagctgacgatccactgatgaatccatcgagatcgatcttcttatgggctgaatttcaccaaaatgaccatctttgcctctagtatcgatacattcgtctcccatactcgtcactttgtgaaatttcctttctttcttatacattccccgattatcaaactttataggcaaaggactcaccgatttcgggtagtttccggtcgagacctcattcgaggtaaccctttcttgctccgtaaggaagtctatgtttctcacgctttctctgttgttaccattactggccccaagctctattacgacgaatcatcatcgcctcctagaaccaggccgggttcgagattcctgttccgagaatgagggctattctcccgaggagagctcggtgcagagattaggtcaagagtgaaacttgcttcgcaagaaacgctggttctgcacaagggacaatttgcgttgccctgaagccagatatcaatgcaatcaatgtgaaacacgtggcagcagttaggaataatccttagcttctcgtcttcttgaaactcgtttaaacaaacagagcattcttgagagttcttactctgatcttcttctcctgcaacaacgtctctcttcttgaatttgaagactgggatagctctaatggcggattcgtctagtcctctgtttacctcatgaggagagtaaatcattagagggttttggtcactgtttcgtctgcggcggcgaaagatgtcgatttggtgccaattaagacagcatttgatcacgaagatgtagtaacttacaagtaagaacgcagtggctaagattccaatcactgcgatggccagaatggggaaattggtgccggaagagcttgttcgtgggaatatagggcttgtgaaggtcgtggatggcggcggaggcggcggcggaaaaacaagattgttaaaagggttacgacggtctgttagatccatttgactacagaaaaaatctaaatgaaaagctccctctaggatttggagggaaatattcagtagaaaacggaaaaaagaatcaagaaatgaagtaattattttctattgaatctttttcctccctactctgaaagtgttaaatatacgtatttgcgtgtgtaagagaaagatcagaatagtagaagagatagtggtagagaagaaaaacagagatgaagtaatgaaatgaaagagagagagaaagagttggtgagatttcagaggctctttcttatatgactcatttatttatttaggttatcatcttactttttttttttcatcatttaggttatcattttgctgaatcttttaggagtttttttttttcctcgatctatgtgacttgtttggtgtaagagttttctttttatttaaacattttttgtagtacttatggtgaggaaaacaataaggaaaagcttacttatattcaagtggagtaatttaattgcattttagttggatcttctgatgatagtgaaagttttgtttgtccatgtagattacgtttatattaaagtcgtatgtagtataatgatgatataattggattcgctaatacagtatagtggtcatttttcaattattagaatctgtgaactccagctaaccacacttgtcggttaattaaattgatatgtttagacagactatatattttgtgaaggatcctttgaaaatgtaataaatatatcttattcagaagaatatctgcaagtaatttgctctaaactatggttcaaaatagataatatgatagatat

SEQ ID NO: 37344 - DNA, 874 bp, Arabidopsis thaliana landsberg
agcgaactatgtagaagaactgcgaataaattcagtttctgttccatcaaaattatccctttttatcatgcttatgccaggaataggaatattactaactaaggcagcccgagtatttctattgtaacactcttcatgcatctttttcaaaaggaaccactggcccctatcagggaactccaaggaccaatcttttccacctttccacatcatagcatgtgtaaacctattcactgacccaggttgcagaaattgatgtgccctgtgtgagtattttgttgtccctgagatttttaccgcaagtctccattcattattatcaaaaggttccaggaaaatctgagctccatattctcgccagcctctatcaccaagagtgactaatacattggcatcacataaactagactcgagatctttctgaatacctttggtaacatcagcagtagaccttctaattcttttgttcggcatccccttgagcagggaacctttgtttctagaatcagaacccccagaaggcaatgaataagacacttgggtacgtcgcttcttaggtccatttgccaaattagtgttcaaaaagtctccctttgaatccgaccaaccatgcgagagatggccatttaaagaacttttacttcggttccacatacttcttggggcagtggcctttggacttgagttgctactaccttgaatattcaaggccagattacttgactgcggagtaccatcctcacaatcatcagatattggaacttgaatactaatcccattcaccgaaacattagacctggtttcatgcttatgtctgacaacagaagaactgtatgacatccagttttcagaatcagaccccagctgctgactt

SEQ ID NO: 37345 - DNA, 2278 bp, Arabidopsis thaliana landsberg
cggcaacctatgaatgttaaacctttttcaccttcaagagatagaacatgaaatgcagcaaacttaacagtgcctggagtcaaacgatgccgtgaacgtcgtggattagaaagtcccctctcttgcatcttggcaaaagcattctcagctgctactcctttccttaggttgaaaatcacattctcagagttgttggcctgcacttgaagaaaaccagaagtcggaatattgtagaaaaaccgaaattaacgaaatacgttagatggcccacctcattgtcatcatgaacagacacagtcctaatgttcattttcttcagttgcggtcccaacccggcagagagagcgagttgcctcaagatttcaggccatgtaaaaacattcaagttttttctccagctgcgtatatcaaaaccccacgcgtatgcctaatccaaaaattgcatcatactaaacattaggaggaataggagaaagatttccattataatcaatagagatactagaaagtgggtaacttacaccctccacaacgtgaggatgaccccctccgggattagcagcaacattctggtttgctccaacaccggtcgacagcgttcttaccacaccctcgatatctttgattatagtcttcaatagaacaatgtgtatctctcccattagccgtgggtcctacatgaccaacaaggaaaagttaagagaagcatactgtttagatcttgtatagacttgaaaaagagtgaaacacttacatagtcatggaatgcctgagcaaactcgtccagggtaaatggccaaagaccaagaacgtctgcgaaagtgattaagaatctccacacctacatgttgtcaaccacgttaagaatgttagctggtgactaaaataaagcaaaaactcgtttctatgtatatactgttattgagattcacatcaaagtggaaaaatttaacgacagataagatgggaaaagtcaccataagaagatttgcaacattctcatcagaaccattccatggcttgaccgcaaagggctttttcaattttacagatgttgggggaaatattgcctgcttgtttgaaataatataatccatcagatgaatgtaagagacaattcccataaacagctgaaatgaatcagaaaaatagataaaataaaacaaaatgagttattgattcacctctatattcatcgaggttctgtagagtttcaaagtcaagggcgagcattgaaggcaagccttttgttaacgcagcaacctccatgagctctaagcgttcatcttcaataagttccatagattcctttgcgatcttacgagcaatggccctctcattagcagctttaagcctggcaacctctttttctttacgcatctcttctttttgtcgcattttctcagcctagtcataataagagatgctaatgagtaaacaacatttcaagtgagttctcaagaaacttaaatgaagcgcatatttcacattaccctgattgtttctttcttcaagaacttctctcttcgctgcaactctcgcatctgctctttaaggtacctctcttcctctctctgtttttcacgtaaaagacgttcttcctctttccgtctttcacgatcttgcctctccatttctttccttatttgctcttctctctgcaaaaccaattgacacaatgaacacaaacaacaaatacagttaaaaacgtatgtgcttagcttaaatcagaacaagacctttcgcctcagcatatcttgtttctctagttcccttcggatcctcttctcatgagcctcgacttcccgagctattcttgcttcttcattctacaatgaatatataaaggagaaaaaattatgagtacagttgccagctatttatacaatacaaaaaattcgcacgaaaacctcgtttacaaaccttgcggtgtctctctaattgcagggcatcatcatcctcatcctcattaccaacttctctctctgatttcacaaaaggatcatcatgaacttgtgcagcagtatccatgtagcttttctgatacggtgagtcatattcgaccaagttaggcgaatagacatgccccggcttcccttgatgagttgcaagattcaaatttggtatctgaggtgaaattttatagtcatcccgatgtccagcagacacagctgaaaccctcataaccgaaccatcaagtggaactccaaaatgatgtgacggagaaactcgttccgaatgatcagtcctccgaaatggcagctcaggaatgaactga

SEQ ID NO: 37346 - DNA, 1845 bp, Arabidopsis thaliana landsberg
acttagaaaaccaccacgtgctctcagttcagaataaatggaaagaatgccactttctcaccaagaatgtcacccattccttataatttttttttttttttttttttttttggcacaagtgtcttattaatgttacaaagccaagtgaacaaacccaattttacattgccaaagaaacaaagcctacaatttaaaaaacaaacataacccataaaacaacaaaagcccaaagcccaaataaattcctttgccagaaggaaaagtgacgtgaacagcgcaaagagcacgtgacaagtgaaaaagagaatggaagacacgtgggaagttgaagaggaggagggagtctccgatcaccggaaagttgttgtgatgtcggaagcttcattccaagcagaaatcgccggaaagattattcatcttcttcgctcaaacaaaccaaggcgaaattccaattgagatttgttgcaaatatgactcctccacttgatacaaatctataaatcttcttcatcttcttctttaatcaaaaacttttcaatcgttaaggaaattttgctatttggggcttgctttcattcaaacctacgaacaaaacttcaatcaaatccaaagcatcggtccaaacacaaaataactgaagctaaagagaaacgagagaatgaaagactaaaaacaaatccagacaaaagccagtactagccatctgaatcgccagaggatgaatcgatggagacgtaaccagccaccgttgcagaagaagccaatcagtactggaagtgtcagccaacagtggtaaacagagccaccgatgtcggaaaaaacagcttccaccgcttatacgcaagtgatgccagacgcagagcccaacgacattgcgacataagtctccataaaaactctagcccccaaaatcaggtcgagaacctgttttctctctgaaaggtattagagagagaagagggagagaaaagatcctcccgagaaaatgacatcaataagggtatttagggttgccttgcaacctctatttcacccttaatttcatcttataatctataaatagttttagttttgcttttatttctcaacgacgacgtggttaacttcttcatctccatccttcttaatcttcttcatagctgtcgacgccacgctctccctttcctccgtcggatccactactacttccaccggatccaccttttttcaaagttctcggagacaacgaagaagactaagcatgtcggaggaaactttctgaagaaatttgagggatcaaggactgaaaatcaacctcctccatcaagtaaggtaatgtgtctaaactttctttttaggctgaacaagagaaaatgatgctggttggtttaggcttataggtttggaatcaagaagctagaatgtaatagtttgtcatcgtagaatttagactgaatttccaatggaaaaaggagaagagacattgtggttggttcaaaaccaagataaatatacaaaacaatcacttaaagtagttagagtgattttggtttagaatagcatgggagcacatctaagagagtggaaaagtctacaagtgttgacccaatttgagagtagattggtctagtacctctgagagaacactgttagttctacaagtacataccaaataagtatattgggtaaaagataaatttggatccattagtagagccatagagccactagattcctgagctttttcagtttccttctagcagtattggagttgatgatttgtcgatcaatctcaagaagatagcatgcagcgggattgtagtaaggttaattatggaagacgtggtttctcggtctccaaatatg

SEQ ID NO: 37347 - DNA, 621 bp, Arabidopsis thaliana landsberg
aagagtttacaatgttagagggacaacaaaaaagaagctaacacctttctttcaagctcttcagtaatggtgattgtttgtttatataatatcaatagcgaggcgtgtaagagtaaggtcccatggagtatggaagctgataatattgttgttgttggttttgtccgaaattcatgtgaccttgtcttccacttctgtgtattgatcccacattatttgttcttccattaacaatctttgttttttctccatatcattcatttgcacgtatgctggtggggctacctctagcgacgccgcaaatggatccaccatcaccggactattgtttccgactctgtttccattggctgtcggtggcggcgctggcaatgccaacatcgaggctgcatcatcatttagatcagaatcattcaactgacacttttgaaactaagataaaaattgaaaaatgatttcattttaaatctgttttacctgctgggcttcctgcagaaccaaaagccacactactagcacttccactacttccataagccgtagacgttttaaccgcagcattaaccgcaccgtactgatacattccatcaagcgacaaagtatcaaatccttctccgagct

SEQ ID NO: 37348 - DNA, 1988 bp, Arabidopsis thaliana landsberg
ccccctcccaagaatcaaaacgattataaatacatgttctaaaaccctaagctgaaaaatatcttcacgcagctgactagggtgtttcgcctctttctcaactctcttctcgaaaacctagcagtcgtctctttctcagttctccatgggaaagtctaaatccgccaccaaagtaatcttcttctcccctttatggctctcttctctgctcttcttactctgttttgattctctctgtttctttctggtcttacgattttaacgagctttgatttgtgtttttttatattttcaggttgttgcagagattaaggccactaagcctttgaagaaaggtatgaactttggtttcctattgccttagatgctttggtctctgcttggttatgaaagttcggatttttatttctatgttgctcgttctgctatggctgatggttcaagctgtttaatttggttaacccatcatcgtgcaaggtctctgtattcatttgtttgggaatatgtggtcatagaattcataatagtctattctctttagtatattgacttgttaatactgaatttggaacctttagtgttgtgattgaacgttttattgaatttgattgttaggcaagagagagcctgaagatgatattgacaccaaagtgagtcttaagaagcagaagaaagacgtgattgctgctgtccagaaggaaaaagctgtgaagaaggttcctaagaaggttgagagctctgatgattcagattctgaatctgaggaagaggagaaggtacaactttatccgtctttattcatttgttggtttgagtatttaatttgagtgttttttctaatcatattctttaaaatatatcaggctaagaaagtcccagccaagaaggctgcttcaagcagtgatgagtcatctgatgactcttcttcagatgatgaacctgcacccaagaaggccgttgctgctactaacggaactgttgcaaagaagtctaaggatgactcatcatcatctgatgatgattcttcagacgaggtttatatcttattcttatgcagtttattccctttttcattagagttgtgctaacatacctttgctctttcctattacctttaatttcaggaagttgctgtcaccaagaagcccgcagctgctgctaaaaatggctctgtaaaggccaagaaagagagttcgtctgaagatgattcatcttctgaagacgtaagcttctcataagtatttcgcacactctttacttttgaattatttttgggacaacaattaattttaatgtctattgattggaaaataactaggaacctgcgaagaaacctgctgctaagattgccaagccagctgctaaggattcttcatcctctgatgatgactcagatgaggattccgaggatgaggtacttttgatatcttcagttttgcttatgttgtgtgttttactagtactcaaactttttttatttgcttaatagaattttatgtcttcatatggatctctaactacttctttaatgaaaatagaaacctgctaccaagaaggcagctcctgctgctgccaaggctgcaagcagctcagattcatcagatgaagattctgatgaggtgtgcttaaacatacttgatttgatttgcttatgattcttttcaagcagctttgggttttctgtattgcagtcgttgacataatccatgtgtctgttgatatttgcaggaaagtgaagatgagaaacctgcccagaaaaaggctgacactaaggcctctaaaaaagagagtagtgatgagtcaagcgagtctgaggaagatgagagtgaagacgaggaggaaacccctaagaaaaaggtgcgagcaatgttttcatactctttgatatctatttcgcaaatgtgtgaatagctacaatggtttctttctgtttgcttatagaatctctactttactgtaatatatataaacagagctctgatgtagaa

SEQ ID NO: 37349 - DNA, 2255 bp, Arabidopsis thaliana landsberg
  unsure (1)..(2255): unsure at all n locations
attaaaaagaaagcaagacgcatccaacgcatattttccaacagaaaaaggtatagctaataattaagacatacttttagtgtcactttccaacgcatatttccatgattgtatttccaatactcatggctagcaagaatatactgcaacgagaaaacagctagagcaaaaattacatcattctctagtcccccctccacaagttgcatggtaaattccagaactgcaagggataaaacaaaatcacattatacaatatatagagagtcaagacatatccaagaactgtgagcccacagtcgatttagatttcgcactaaacagaattctgccgcagacttgcctgatatgaccaatgggcagctggtatcattcttctcgcagtcaatcaagatcatctttgcaagtttcccagagagagaccaagaaccgctttttaaaaaaaaacagcggaaagagtaaaaaaaaagtcagatgcagccagagaatgcacaaaacgatgaagtaaaataaatgagaattttaagaagccttgttaaagccttgttactaaaaagagatattcctcaaaataaaagctaagaaaacactaaaacagtactttcgacaatgtgcctcattacaaacaatagaatggttcctagtaattaataggatttgtcggtgatctacgaagcattcttgtgagagtttgtctttttgggagaagcatatcaagtgttggcaatgtgttatagattacttccttatggataaccgatgattctaaataagaagaaaaactaaatgttctaggcgtggtaaacttcaatgagtatattatataattatgggtaggatatatttgaaaatgaacaaacttaaaaaagagccaacctcaatgaaatattatagccactgtcagggacgtctgaacatgaagtcatgtcaaatatatttgactttaagaccatgggagcaacacttgacggggaactgctcaaagagtaaaataaaattagctatcaatgttccagagagaagtgataccgacttccaaactataccatataacaagacattgcacatgacatataatattatgacatgcatttgctagaaaagaaatactgtgaaaaaaattgataaccaagacagcaaaagaataagcattacaacaaaaattaccatcgcagtagtttagctaagatatcaatagccattgccatcacagcggcaccgccagagtcaaaagtcaggcttctgactgaattacaaattatatcaaccaccctggaaaaaaaaaaaaatccctgttcaagtactccggaagagagaatgtaagaaagaaataaaaatgcaaatacttcacctcacatcactttccatcttcccattcacataagattcttgaacataaaagaagtggctgatattcagtaaggagaaacatacggcctgaaatcaaattacagaacctggtcagagaagtaaaaatacggatgcatagccttcattcaaattttgagaacggtcagagaagaattgattcaaagacagaaaagccatagactacttcatggtgtacaaatactaaagcaatccctacttcataacctggataaaaatgaaaatggagcaatgcagttaccttgttaaatgtcaccatccgacgaagtagctccagagtcacaaaagcttcacgattgttaccaatgtagagttcattggccaaacggatgatcaacacaattatgccggatagcgaatacttggaaaggaaaatgtatttcatgaatcagtaagaccataaaaaatataacattggaggagtctatgaataaggttttcaaagaatgatgagatcacttacctcccaccgtacaaggacagtattttcactgattactctcagaattcgcccacgagtattactgggaataactaaaccttcgagacctggaatatgcaacggccgggaagtttcaacaagttgagaggcatcatccgctggagagtcactagtaatatcaaataaggttgataccccgactgatttatccagaaagttgtatctgcacaaaaaaaaagaacagcagattgcaggagggtgatggtttgcaaccagtaaataagaaattctgtactgagacaagaaaagaagcttagattgatgaatgcanaacattgctctcgtctacatagaaaagttccatataaaagtacataaacgcagatagtatattgtccagttcatacttacacacattcagcag

SEQ ID NO: 37350 - DNA, 1760 bp, Arabidopsis thaliana landsberg
ataaatgttgcataggtgcttcgactaacatatgagtccatttttgtgagtcttgcataacttttgcgccttcgacagtatgaatttcatgcataactgctttgactaattgatatgtatagactaagtgatgcgacatttcgactaaatgatgtgaattgtgtcattcgtcgtcgttgtcgcatccggaagcgtgtttgtggttcttgtgtcttacttgtcgggttatgaagtcctttgtttcgagagatctgctctcatcatgatagaagatggtagatgttatctttggattgccgcgggttgaattgtcgcgggcatccttcttaaatctcattcacatgttcttttgaggaagagttttttttgttttttatttatttattgtttcccttaagatttatactttattccttctatttttagtttatagcatcgtcctcttttgattcaaattttttgcttagtatttctgacgtttttagcttctcttttatagaacttagtttccggggaaattatgtcttccgccggttttagtttctgaggacttttattttgtctgttggctttagttttccttgtttggacatttgtatttttgcgtcttgtaacaactatccttgtgaaaatatcaatataagaacaaccctcctcattttaattccttcttgtctacttttagtttaatattttccagccgcgatgggcccattatcatcaacaccggcctatttagacggcccgttatctcctctttgccaattttcaccttctgcaatgatattgaaattgaagtaaatgcaaacaaaatagtatgttcctggtagcagatatttatgttccattgatgtatttcaaagggttcagagttttatcgttttacaaagaaatgatgagtgttcatgactgtaaaatccaccttcatcttccactttcagtttaacggctccggctctggatccggctccactactggtgctatgcaatccaccttatatcgaagagtctttcacagaggaaaagaaacggcccaatgcaaagatccaaattaatgaacgcaatggaaaaatgggttactgatttactccgtctaccccaaaatgtaaatatcgccctacctttttgaagaaagttgaatatgaattatcccaaacaagtttgtagtttccagccattagcgtagagaagtctgccctgcaggtataaccacagtggatccccaatacgattaccttcataacaacaacaaaaaatacccaaaagcttccccacaaatgcacatgggcactgacctggtcagcttcataccgacggtaaggtaatatcagctgaaatacgaaaaattcatgatcaaccctcagaaatacactatctggatgaatatttgatagagtacgagattatatatactatgcgaaagtaaagtttaaccacagtttggaaattaatgagcagactcacagtcttttcccctgaagcatttatgtactccacgctaaatccgatatcctggtaaaagaaacagaaatataaacggaggacaaacaacagaagctgagaacctaacttagatcccgtatcatgtcaagaaataaccattcttgtccttttacataaaagattcatcacagaccaagataacgctgtatactatgtatgaaaacaaagataaccagagtctggcaaaaatagcaaaagatacaacaataaaaatctaatatacggcagctagagagagtgtgatgttctcgacatgc

SEQ ID NO: 37351 - DNA, 1330 bp, Arabidopsis thaliana landsberg
gacatccaataatttcctctataatatcattcacataattgatagaaacattatgttagaattgtccacatcatttgagctgtaatatattctgttttaacaaattatatggtagttgcttaatcttatgtccatcttcttctatgcatcgttttcgcgcctagttgtccagtccatttcaactacctacctctaattcttatcttaaaacaacattttttaatttaagtattatgctcaaagactaactagaaaaaaccgttattaaacattaaacgaattaaaagtcttacatggaaaatgtaggtttataaaccacgagttatgattgacaataaaaaaaaatgcaaatcatcaatcaaaagagacttgagttcgactctatatcaaccattgcaattaaaattatctatcacaaaaattttagacagattaaattaatttagtctaaattcactaatttattttctatcaaacgccagtaactatacttattaataaacacattttctgataatttagaaattcgcatgaataacaaatataagattttggaaattagtagcaaatttaattaataattatttttgcctaaatgaaccaaactataaaacctccacatacaccagtcatcaaatttacagagacaacaaactaaagttggtggtgatagagtgagagagaaacatggaaggcaaagaagaagacgtcaatgttggagccaacaagttcccagagagacagccgatcggtacggcggctcagacggagagcaaggactataaggaaccaccaccggcgccgtttttcgaacccggcgagctcaaatcttggtctttctacagagcagggatagctgagttcatagccactttccttttcctctacgtcaccgttttgacagtcatgggtgttaagagagctcccaatatgtgtgcctctgttggaatccaaggcatcgcttgggcttttggtggcatgatctttgctcttgtttactgtactgctggaatctcaggttcaggatctgttcttgctctgaattttgtttaaagttttcgaatttaggttgaaggaatctggaattagggttacttggttgtgagaaacttggatataatgaagaaagtttgatacttaaaagtaatttcacatttaaagattgaaactttgagtaattttcttcttaaagtttgaaactttggttagtttgccccactttgtttcttctgtgtgaagatcataatctgattttgacttgtgtgtggcgaattggtttggtaatgagcaggaggacatattaatccggcggtgacttttggtgggtttt

SEQ ID NO: 37352 - DNA, 1510 bp, Arabidopsis thaliana landsberg
atctcatgattactcaggtttgtgtgaaaagaaaaaaacctttctcttattacaacacattgtagaccaaagcactcaatgtcataatatatgaatctcaggtactgagcgctgatgctgagccaaagaggaagctgaaacaaattgtgatggcagctacaaggtaatgaacaaaagaaacagaaacaggatttattttgtattagaaagccgtgtgttctgttttagtgattgacgaataattgattttgtgtgtatatgtatctagggagctgaggattaagagggtgactaagaacttaaaagtggcaagagtgttcaacactttggtagaggaaatgagagcaatggggctcgcgtctgtggatgactcgcagtgcacagaagttatggcaccagtggctcacaaagacagaagtccagtgctactccttatgggtggtgggatgggtgcagggaaaagcactgtgcttaaggacatactcaaagagtaaataaagatctcattatataattatcacttctactatacatatagagaaacgtatatatctatgtagctgaagcaaagaagctaaccaaatggttttcactatggaagcagagcattctgggcaggagcagactctgtggtgattgaagctgatgctttcaaagagtctgatgtcatttacagagccttaagctctcgtggccatgtcgatatgatccagacagctgaattggtaagccatccacaaacatcttcaagaacctgtcggagtcatgaaaatgttgattctgaggtttgaaattgttttgtgagaatatataggttcatcagtcatcaacagatgcagcttcatccctgctagtgacggctctgaacgaaggaagggatgtgataatggatgggacactctcttgggtaccttttgtggtgcagacaataacaatggcgaggaacgtacaccgacaccattacagaatgggagctggatacaaggttggtgatgatggagttataacagagaactattgggaacgaattggtgaaaggcaacagattcaagaggatggtcgtaggagaaaaccgtatagaatagaactagttggagttgtgtgcgatgcgtatttagcagttataagaggcattaggtgagtacaaagcaccatcttatctttcaatctatctttcaagtttgtctcttattaacttaaagagtgtttttggctgagattgtaggagagctatcatgtgcagaagagcagttagggtgagatcacagctgagatctcacaaacggtttgcggaagcatttcctacatattgcagccttgtcgacaatgctaggctctactgcactaacgcgctggaaggctctccaaaggttagttttgaaattggaaccgatatacttatactttaactcaatgcaacaaaccacttagccgatttgatcaagagaaatttaaaactcaagaccaatgcgtaagccaagatcctagaccaacttaggaagccccaact

SEQ ID NO: 37353 - DNA, 719 bp, Arabidopsis thaliana landsberg
aagcagctaagattaccttcggaaatctgattcagagactgatgaagggattcgagcaacgaagatcctcgtcactttttttgcaggctgtctcatctcttcctggcaagaataaaataaccttgaacaaagattatcgggtaaaaaaactaatgtcttactgaattcacacaactccatgtaacgaacctttggtgtagccactttaacttccaagatcctgttccctaaaaagtgttcacctttcaaagcattctacaggtactcaaaggaaacaagcaactaagacagattttccagtacaaacaataatatccaacgttcattgaaactaataaatatacctttgcatcttcagctgaagcgaaagtgacatatccaaatccacgagatcttccagttgatcgatcctaaaacatcaaacatatcaaagctctacgtgacgttgcttaatcaatgctcaaattcaaataagacaaaaacaaatgcaaaccttcatgacaatacaatcctccaagtctccaaattttgacatgtaatccttaagcccatcggaatcaatatcccacgggattcccaaaacctataaatcaattcaaaattacatataaaagcatcgtagttacacaattcaaacaaaagctaaaaacttgagctcaatgcgtgtgaaaaccaaattaccacaagcttccgttccatgagaagagataaatgtagat

SEQ ID NO: 37354 - DNA, 3005 bp, Arabidopsis thaliana landsberg
atactgaaagtgcacaaaagcatattctgctacaaaagaaagcacacggattacaaaacgcaacacaaagagggacaatcctgctgtccattaacctgctgcatatctcgtttaccctagaaaataactaaatagatatacaacacctgcatataagtgaaggctggtgaatatgagagatgtagaggcattccatgatgtagtagaaaaacaagatttgtagcataacacaggaattcaggatttttatttttaaaaacaccaattttatatttaaaaatatgagtgatttgccaggcatgcttaaacattctgagtggaggagttcagatatggaaggcaaggcatggcaatgatggattcaatagacttccatctgaagcatcgatgattggtaatagacagacaaattccaaagtttctctagagtcagtgaagattggtaggcacaagatgataaaggcaggtatgaaaatgtagaaatgattttgcaggaagaagaagaagatggcaaatcttgttcctttgaagaaaagttcctgcgaacaaataaacactcaatacaaccatcctctctactgcataaaccccctaccacacttaacacattcgggaaaaataaaaccaatcttttctatgtaacggtactatatataaaccttcaaatcatgtatgaaactggaactagttctaagtatccagaatcctaggtcaagcagaaactaaacctaagcaaagatgatttatcaaccagaagacgaattcgaattcgagacggacaaacaacaaaatttcaccggcgtataacttagaagacactttaccagatttcatgtccactcggtcgactctcccatacttgtcgaacaaccgttccagatccgactggcgagtttcatactcgaaattgccgacgaacactggcctcatctttatcttaattcgcaattcctaacgatccaataactcgaaattagtaacatgtaagggataaaataaggtatatggacatgagcaagtataattatcggagaaaagttacctctgaacaatcggagaagaaacgaaaaacaaaccctagacgacgacgacgactactacgctcgtcgaagaaaagcagagcctggttgacttaaaaaagcccgtcataccatcatgggtacattcggaaattcaaaaatcataatgggccttctttataaataggcccacaataagttagccccataccgaagaactcgttggagtcttttcttatagaattaaatttatacatgtttatatacagacccattttccgtcggtgaagaagaaaagaattaaagtttatgtaagtgtccagttttctgacacgtggagattcaacggagttctctgatctgtcatggttcgatcattattgcggtttaggatgtctctaatgtttcttcttcagtcgttttggcacaatctctgatccgagaaacgcgagtattgagacgacacttcatcgtctgaccaaactgcatccgctacctctcagtcagcaccctaaaactcctaaactctctcaaaccagtcaccatcgcatcgtgatcatgtgcgacccctgtaatagcgtctactgccaacgctgttaagctccttaagtcaacctctgtggctcgcgcagtcatcgcattggagatcgtcgtcgacccacaggtgatcatcgagtttcacatctgccccagtagtgacacattctacagatatagccgagatgatcaggaatcgagtcttcgttgcaatttcactaggatgcagcagcagctggaggagaactcggtatattagaagggagatcatttgcgttgatacacccaattgtgatgggaggtttatttgcatacactctttggactggttacttaggttggcaatggagacgtgtccgtacgatacagagtgagattagtgatctcaagaaacagcttaaaccaactcctgtttcccctgatggttccacagccgttgattcttcgtcgcctccttctacgactgagcttcagatccaacggctaactgaagagaggaaagagttggtcaaagggtcttacagagacaaacactttgacgctggctctgttttgttaggtttcggtgttttggaagctgtctttggtggtgttaacacttatcttcgtactggtaaactcttccccggtcctcatctttacgccggtgcaggtaccttaaacctatctctcgtcttatttttcatttccttgattttaggttctaatttatcaaagtgtgtaatcttgggttgcttagtcaggttttggcttggtctgatgtggtttaagttttgatcagaactttggattttagttatattggtataaatagtattgtgccatttcaaaagttaccattcatcacaactatgagaaaaaatgtggtttatatttgttattggatgtacaaaacgtgtcacattttgtgttcatggtggtggtggtggcaggaataacggtgttgtgggcggcggcggcagcattggtgccggcaatgcagaaagggaacgatacggcgaggagtctacatatagcgttgaatgcagtaaatgttcttcttttcatttggcaaatcccaacaggtcttgatatcgttcttaaggtctttgagttcactaaatggccatagatattaatatttggatgtgttatttatgagtttgtgactctatatatgcaaatattcttcaactttttttgaggtttgtagatgatgaattgtaaaaatcatgcaattagagtggatattggaataatggtggaaaaacgatcaataatactcttttaccagtcctttgttttcacctgattgtgtcaaatataaattggatacgctatgattgtgtcaaagattagtagattactgacatttgtctcacctaaaaaaaaaaagaatactgacatttattatatcttaaatgtctataaaataataaactttgtcaattttggcccatgcatatagat

SEQ ID NO: 37355 - DNA, 2486 bp, Arabidopsis thaliana landsberg
  unsure (1)..(2486): unsure at all n locations
aaactcaaagcctagactcttttcttcttatgcttcttcttcacgtcatccttcacaatgatagcatcggctcatctgaatttcaaatgctggaacaatctgactcctgcatttagtacactggtacgtaccaccactactctcatttaacaatcctgaaccagtcctcaactttaacatgtgatatttttgcatgtgatggcaatacttcatgtagtaaaccaagcattatgaagtctacatgtgtgactgtgatggcgtctatttgttagctgactatcattttccctaatcaattttatccattcatattgcttcttctcacaactacaagcacaaaatcgtcaaaagcttttagctccaggactgtggaaccgccactatagctatgttgacaaaagagagagattttgaacgagagaaggaagaaagaagacagagcatgaatagtatttgacaattaattagaaaatctaaatctgttacaaaacaaagacaacatctttttatagacgtgaaacagatcttgcccgaaacaacacaaacaataagagttgtatagtaactcttcagtcatgactcttaacatataacaaaacaacttttacgattgtataaacaaacaaccaaactcaattatacactaacaagctattgagtcttatagaacttctagaagatcattacaactttttggatctgtggttctttttttattcatggccttattttttaccttgggttacatttcaattttgaatcttatggatttggatatgattttcttcaaaataatacaatttacttttcattttttatatatatattatgattcttggcttttattcctttttttttttttggggggacactatatatgggtaataagtactcttcttctactactcatgttacatatacttccttctcatgcttctttatccttctttctcttcaatttttccattaaagcttatggagatttcttaaaaagctctctaggggattgaacttcttgaagaagtcaccagaggcgattgaatcttcaatttatccattaaagcttcaacgacgtctgacgatttcttcaaaaagctcaatggaggcttggattcatcatcatcatcaacaattcatcaccatcttcatcatcagtattgtcactcttagtctttttggaaggaagacttcggggttttcactttcacaatgtatcctctcatgaagatgaagaatgccttttctgtattcggttgtttgattcaaaaaccttcttgcatgatttcaagatctttggcatctctttttccgaacaattatccttatttggactcatatccatcaaaggcttggactcctcatgagatgtatgctttcagcatcctcagagacagccaccaaagatcttaaaaaccaaaaaaggaggtttgtgaatcaaagaaccctaaacacanaaagccttcattttcatcaaaacctangaattactcgaaaaaagatcaagagaaattacaccaatgacgaagaaggtggtgatggtgatgatacatctgatgatgagtctaatcccaaggccttgccttttatatattttgtgatcgacatgatgtaaatgttactgtaacgtttataattaataaaatatactgttttcctttctcatcgatatggtttctttctttacatgcattaattataattaagtcgaaaattaacgtaaaaatctctaactcgtaaataattccaaacgtatgaaatttttgtactactcgtttataaaacatctttgtggcatataggtttaactggacatcaaaatactgtatagccagttgacgatcattatggatcatcatgggcttaagaaattaggcccatttaaagttttctcgacggggttagacacgtggcggaatatgaatggagaagaacgatgttacagaaacgaagcaataacggagagagaaacaaggatctaattcatagtgctgcttcttcttctctctgagactctcacaaaatagaaacacaagatcgttaaaaagcttttagctccagatctgtggaaccgccatagctatggagttttatagaagttctagaagattacaaattcttggatctgtgattcttctgctctctattcatgtcgctcactctttttaccttcctggtgttgctcctcaggatttcgaaaaggtaaaaatgaattcaatttcgaatcttattgatttggatctgatttatatctcttagatctggtttcgagttttggttttaggattcaattagcgaagcaatcgttagtgttgttgccaccgacactttaggctcgaatttcgcattctcattacgatctcttgatctataacaatgtcgcattttcaatacagttacacaattagttatctataattgtcatgattagcttctaatcgagaacaaatcgtagtggtgatttgaagttttggtttatggtgcatgta

SEQ ID NO: 37356 - DNA, 2206 bp, Arabidopsis thaliana landsberg
tatttgaataaagattccttagctttattcttagtaggtcctcatgagtcatattcgtgaaattgaggtttttgatctaactcggggctttgattcgaattcgaaagtttggattttatattgtgatttctaagtcgaaggatgtgttactttggtgttttttttatttgattttttaaaaagaatatttgatagttgtaaagagtttttgtatatgtttaatttttaaatagagaaatggtcaacgtagcacaattaacttgtaatagagaattgctcaacgtagcacaattagtgtagatctttaaaattaaatcatcgagcgaattttagaattctcccaaatagatgttatatgcaaatgtcatgttatttacaattcttgatacataaaatagttagttttccatgtggtaaaaacaataaaacatacgaccaatcgaccattgacataactcttctaaatccacgatgagttatatatataaacttataatactaatcacaattatagttattgaagaatatacatcgtgtgtatcatcaaatctcgtcatcgcactttgcttgaacgtgccagaaacttggaaacgcgtttagagcaaacaccgggacaccgaagtaccgtttattgaattcctttttttgtgtgtgttgttcaatacttaaatcgactaaaaaatcattagcctaagattcacatatcagaacgtgcttgggccaaaaataaaataaagaacgtgcatggaccaaccaaccatatatatatcttcatagtattattgataatggcgggtcccattatgtttgatatattttcagttttcaccatggaagcataatctcaagaatatgcctccaataaaattcgtttgtacatgaattccttaagtatggcagaatactacgtataccccacataatagtttaatctaatttaaattagtgtaaattttccaccaatcaatttattaattacttaaaacaacaaaagtagtgaaaaacaattaaaaacacatatctccctcaaaatacccatagtaggctacaactgtagatttcttgtttcacaagacacaagaaaaaaaaacctaacttagaaatcattagaaggaagtggttcatgtccattactaccgataaagatagtatcataaacaatagctgcaatggctgcaccgataaaaggaccaacccaatagacccaatgattcgtccaaatccagctaaccacggccggaccaaatgaaaccgcggggttcatcgatgcaccgtcgaaagcaccaccaaccagaatgttagctccaacgattaacccaatcgccaaaggcgcaatgattccaatatcacctttcttgggatccacggcagtagcgtaaaccgtgtaaactaacccaaacgtcatcacaatctcgaaaaagactgcgttccagggcgtcactccatatgatagcgaaaacgcagccgtttccatcccgccagtgcttaccttgagcaacaagcaagctacgactgctccgagtaattgagcgatccaataaagaatagctctcaacaacgttatgtttccaccaataaaagccccaaatgtaaccgccgggttcacatgaccacctgaaacgttagctccaacggaaaccgcaacgaacaacgcaaacgcatgagacaaagacgcggccacaagaccggcaggtgtggctggaccatctccagttagttttccataagccattccagagccttgacccgcgaaaacgaatataaccatcgagaaaaactccgcgaaagctgctctaatcgcatcgggacgactagcttcccccggcgttccaatcgcaattctgttgataggcatcgttacaaaaaaatttgctttcttgcttcctcttcattttgcttttcatcagtaaaagtttaaatagttaaagcgttagtgccaagtgtgtgtatgagaatcgttcaagagactgagattagtgttttacggtgggccctaggttataagaaatcgaacggtgattataaattcatatttaattaataacttacttaccaattaattaaatcttaatccgcttttctcgctttctataaatactattatgggtagcaattgaagaacacgcgctttactgttttctcatcatcgtcacttttctttcttcacactttccgcaagattgttctgttcttcaaacgattctaa

SEQ ID NO: 37357 - DNA, 1433 bp, Arabidopsis thaliana landsberg
gattgcgtccgaataggtttagaaaaatggctcccatgtaatcattcccgtcaattatgtaaagtatcgcacaagcaagtgtatcatgggcttttgatggaacatgaggacgaaagaggtatatggctcctttaatgtcacgttcatgcgttaaaacactaatagttttaaaatacatggcagtcggattgccagcatccacacacctttagaataatgttcgatgtcggacttcttcttgtgggtcggatggatgatggctgccatcaacttggtagtcgtcgggatcctcacacatgctaaaaatattagcacctttcaggacatccggacggtaaacaacatctctgccacgtctgcctgaccgtagtagtggctgaaggtcccaccagcatttgtgcgccactgtcttagcaatctttgcaagtaaatcgtcaggaatagtggggttgaccatgttagaaatgagatactccgaagaggtcagatcattgtccttttaataaccgaggagggagggtaacggatggggagatagcggttacaataaatttgtcaataaatgtacgtatagaggaacagtgtacgtacatatataattctcatatttgcggtctaatccgaaggaaatttatattaaataattgatatatgtacgtctaataaggagttacacgtgtacgcatatttgctataagactaaagttcttgcaattatgacaagtgggagtgtatttattaattaacgcctgacacgtcaattgaataagactgacattcttattcaatttactaacatatatccttacatttactattacatttatagttagaatataggtacttgttagaatgcaagtacacctaccagtttagtttgacaacagaaatatattatttatgaccgatagaaccaaaccgcatgaaacagacacagaagttgtaaatagggaatttaaaggaaacggaaataaaacaacataataggaaatttcaatgaagcaaaaacaaaatacataggaccaaacacctaacaaacttgaaacacgtgacagtgtacgtacaccaaacacacgtacaaatgagagacctagagcattcggctaattcgcctagcacacgaccataggtaacacttgttgcaaacgttctggtatgcactagaaaccatgaaacaatggtaggcgcattgtggcattttaattccatggctgctcggataacagaacgaacgagcgtaagtattattgtacggcgggttaaacttgtttatctcctcgaggaactcctcacacaaatctcgggtgaaatcggaatccaatggatgatggttgcgtctgtaaaggacgagaaacaactcacccatataatcatacccagcacatatgaatatgatggcgcaggcgatggttgcatctgctcggacgggtgca

SEQ ID NO: 37358 - DNA, 1389 bp, Arabidopsis thaliana landsberg
acaaccccattcatcaaacaagtaataaaagggaagtaattaccttttcaaggcatccacatgaatcaagcattgttgttcgtgatgggtactcgaccaactaggtcagattttgtccaaaagaggacgagtattacacattgacccaaaatccttataagatggtttaaaaagggaaatatatagctactcacaataaaagtattttccccaatcgctggtgacttagcaatctgatccatcagaacctcataatcaacctccatgtaaggtggcgtaacgctgatataatcaaacactccatccttacctgatagtaaagaaaagtcttaatataggttctatttaaagctgaagttaagtggtgaaattgacaataacatcttcaagactagacatacctactaatttatcagcacgttccaggaagttttcaactcgagcagtgtgtataaccgaagcatcaacaaacccagtgtgttccaagtttggttgtagaacatttgaaacaacccaaggatccatctcaacaaaatgtgcctgttgagaaataattcaagtccaagatggaaacacatgtttagtgatcacttaaagtaaaagagaatccaacaaagatcatacaatcacagttctttatttctttgctacctcagaacatcctcgactgattgcttcaatcccaacagaccctgtaccactatacaaatccaaccacctaccaggacgcagagacgttggacaaccaccagcagcctaaataatgagaagaatcatgttaactcagacaccaacaaacgcagaagctcctaaaattagttcattactcttacctggagaattccaaaagctgctcctttaacaacttccatcataggtctcacatccattcccttaagagaaagcaatttctttcgtttcgccgttcctgctagaacctaaaacaatctacacattatagatatgcaacaacagtaacccccaaagcaaaacacaataaaatgagagcatacacacccgctgggacctatgagatgttcttgggtgctcaacaacatcttcttctacttgttgactattccttgcactcattaactcttctttccttctcgccttctacaatgagaactaaaagtttcatctctcaactattcatcacaaaccaaaaaaaaacaattatggcaaaaaaaaacagaccttagattgagacccaaagtcatcattagcatcatcaccatatcgtaccagcaacaatttcttatcctcacttgccaagccagttcctgaatctgacaacccacacgacataaactgagagaagacagaactttatgaatgattctgagacagatgcaaatattcacactgttacgactcgcgacgacgaat

SEQ ID NO: 37359 - DNA, 1779 bp, Arabidopsis thaliana landsberg
tgaaaaggcgaaagaccgggtaacgggctaagaaggtttatctatttggtgctccttaagcacaattggcgaatggattattgcaagcagagttcggcatattttcccttactctcagtctcagaccaagccgacacaatcgcaaaacatgttattttttgtaacttatgaggctattttgtcctccgaagtaccagtttggtttcagtctaatgtaatagcggataaaccgcaaaacataagatagttcgcattttaaaccaacgttgaaagagcctttcaagcttatgtggaatcttgtaatgcaaggagactaaacttgttttactagaaatatctgactttctgactaatgtaagagagaactaagcggataatgtccaagacatgtcttaaaacaaattggtgggtacgtatgaggaatataatgctatggttaattataattttttggaatgtgtagagaaatgtatgattgattgattggttgttggttaaataaataattattagctcaacagtcccaatccaataattaggttcattagtctttatccaataaaattatgggccttcccttggtcggatctcacatggtcttagcttcatggagcataacttaacattttcaatgtttctttacagaacttcaaaacaactcggattcatacatctttaaaagagattgtgaagaaatttagttaaagaaaaattcttaagatgtataaatttattttcagagtgtatgaaaataaaaaacttcctcatgaaaacgctttaagacctgaagatgtgcaaaaacaacatgcccttttttaagccagaatcaaagttttaaccatccagagtaagctaagagaacccactttttgttccctactttttacccaaaagcaatagcgttttaatattttaatcgaagaatgaaaggctcgtagcaaaatataaagcatttcttgacaataatacacatttggccaaacctattttttcaaaaaaaaaaaaaaaagaaagtaagtctctgaatggcttcgttgcggcaaaagaagaagcaaaatccagcgaagagggcatggaaaaactttacaaacatggtcaagtcgaaattcagagacatggagatcgcttcatcggtcagagaatcaacggctcgtgtcctccggttcatttctcgccgtctcatcgttccttttagaacaaggtacctccaaaacaatagctacacggacaaatactactacagccggaaccaaagttctcgacagtttctcaacatcatttctcggacaacaccaaaccaaagggtcgtcagtatggatatgacgatgaatactctcaaatctatcaataccaaagccaatcacgcggtgaagggacaagtgggagcaaagagcaagttgtgaggcgaatagaggagcaaaaagaagaagaagaagaagggatgccggagattgctgattcgatggaagatgcttggaggagagtggtggctgcatcgccccatctgcaggttaacgagagagccgacgagttcatctacaagtttagagaaagtatgaagatggagaaagagaggtcgtttcttgaattccaagaaaggctaaaacgaagtgcttgattgatcgatcactcatgagtgtgttccatgttcttcttctgatttctcttggttgaattttctaaagaacttggttttctcattctttcttctttgttacaaaattcgggaatttttagaagtgttaacaaacttttttttctacgtttatggtttttatt

SEQ ID NO: 37360 - DNA, 1874 bp, Arabidopsis thaliana landsberg
agacatctacatttttagttatatatttaataggtaatgatttttattacattattttgcatagttataacgggtatggaggtgatgaattctaacacagttttatatattttaggtgatgaattcgattttattaagaaagaagataaataaacataatttgttaagtaaagctctttcttgtttgatttgatcattgtaaattatgttttgtttaagtcattttaaactaaaaatgtgactttttcaaataaacattccttacattgtattgcatagagggtttgagggatagtaagccaatgagaagatttaaactaacttaaaataaaactttaattgaatacataaaaaacaagttttgtacatgaaaaaagttatactgtggatattttgtggaagcccctatttagacatggttatttttgtttttaatatttcattcaatcggtcgtaagtaagtgtattatatctcatgcaaatagtaagctctatgatgaagcttgtttctcatgaaacaaccttaatgaagtgagatctcaaacggtgagagggacaatcttggtaaaaaattgcatcaaattcttttgtcgctaactacacttatattcttacaaaagcatatgttatgaattcacgaaaataccttgaagaacagctatgagaagtaacttcactcttaatggaacatatttccaagttagcgagggtcacgcaacaatttcaatacatgatctttaaaatttataaaatacgtatgtataaggggttttgatccggagacaaaaagactccttgctgtggcacagtaatcttacaattaaaaacacaatgtgaacttatccatattcaatatgttcaattgtgttttgagtctaaagattgattttaattttattttactttttttgttttctttatagcttgtataaaccaatgtcgagaaatattgttacttatgttattacttgtgttaattttgtttcatattctttaaatttgtacttatctctgacttaattagttttacgtcttctttttctttttgccggcagttgtttagtcttctacatccactattttagagcaatcagtcatctattaattaataaccatcatcagcaaaaaaatacaaaaagaaaaattcgctggcatcttaaatatcatcagcgaaaagtatacgacactcattcttacaagccacgtgtaacctatcttcttcaagaatggtgccaatcctagtcaccaccttattcctttaaccctccactatcattactactcacacgaagcaaagaatcacccaaaccaatccaaatgatcaagacagtacacagagatcgaaacacaaaaccaaaccaatgtctctgcaaaagtttaagcttctcgcaactcattgcagcaccgtcgcagagagtccgacacgtagtccagtcatccacctccgccgtcgtaaaacgctgcgtttgttactcactcgatcatcagaccgatggagattaccggagatccaaaacaacgtagatgaatcgaagaaaacggataagagaggtaagatccgatctagccggaagcttggagatctttttgtttcgtcgccaccgtttgaggaaagtggcggtggcggcggcggagataaggggacgaagatggaggtggagatggagagggatgtaccggttaacggcgttagtaataacgcaggttttggagaagagataacggctcggcgtgtgggctttaacgggtctgttaggcccatgtcatctgttacacttcgatgtagattacttagacgatcttggcgtcctgtacttgtaactattcctgaacaataaactctgaaacaaataaattatattaacatttttcta

SEQ ID NO: 37361 - DNA, 1728 bp, Arabidopsis thaliana landsberg
atgtttttgagattaaagtttgaagtcattccgcaatttttaattagaagtgaccaatgttgccactagaatcttatattaaagctcaaaaactttctttttcattttctttgttttgctcggggaagaatataagtgagaaaggaaaatgctttacatgtgttactaaaaaggaatataaatggaccgatgagttaacttaacgtctgatgtgtcattaccaaatcctacgtgtgagaaaaaatgtaatatctattgtgccaaacacacaggaacatgagcaattgcgagactccatagaggcatgcctgaccacagagtgcgtgcaacacttgctttacctttaacttccacctataaaagcctcatcagtctctcttattatattgaccagactcacatgaacactaaaacctgatgacacttcttcactcggtgaatctttcttcaggcctgttcataacagaaaaaaaaaatgatgtcttacggtgctaacttggtcatcaagagttttgaccgtgcttccgtggtgtatgttgaagatgtggtggatagctctcgagcgacatgtgttgagaatggtggtgacgacgatgacagtggctatgattatgcccctgctgcgtgattgtctcctattagtataatgtaatttagaagaaaaaaagagagagagagagatgataagataatttagatattagttagaccatttatgtactagattgtgtctcgagttttcttgtcaatgagcaaacatggtttccatagatgtttacttgtggattgatattgtctcttaattttgaaagttaatttaacttaataatattgctagtttccaaaatttttacttttttgatattatatttcttttaatagatttttgtgtttctggtttttactattcatttacgcaacatgaaactttccaatcgaaaaagtcgaatttaaagtgtgagcaaattggtttagactaaagcgaagtcacacatgtatgaacaaaattcagaatatgaataagactaaagggaggcgacccatgtatttagataccagaaagcatatgggtttgcttggtacaccaatttgtcgttcgctctaaccacagtggcacgtctagaacggcattattgaattggtggtacttgttggttgtggtaaattgaactcgcatcctcctcgcataggcgcttttcggatggttaacatgataagccatgtcgtaatacatatagatattttattcacatgcatatcccggaaggcaaacatcatggtgtcagtgttacgagtcacaccaaattgactgaccgttcatattgattggtaaaaagttgagataaatgtaatgagtctcataaataaatgctttaacgttgcgtcatctgtaaatggatgcatatcaatttcggaagataaatagttagtatgctatcttatatgcattaatgtcgtctatgatgaatatagtcaattttatcggtctgcaataggcaaataaaacatgcaattactttggtcgcggtcaaattatttttatggctattgagaccatctttaagtaacaaataaaaaatacgattatccacgaacaaagtaatcacctgttttatttgcctattgtagaccgataaaagtgactatatatatcatagacgacataaactattaagtaacaaataaaacgcagtccatctttaagattcgagttaccatatctcttga

SEQ ID NO: 37362 - DNA, 2383 bp, Arabidopsis thaliana landsberg
ggcactatggtcacttaatctcctagactttttctctaagaaattttactctttttttccatctcacatgattaatatgttagtgataccagtctttctgatgtgttacagcttccgtcaaacaaagcaaggtaagtttgtgaataagatcttacccatcgatatcaagtttcctaagcagataaggcccttgctttgttttcgagagatcaactttcacatccaacagttcagatgctatggcttcccttagtgtcaaattacatgcatcgaagcacttctcaactgtaaatgaaccagacgtgtgtaatgagagctcgccaaaatgtccacgtaatctgtgacgaaatcattggtgaaaagaaacatcatcaaaatatgaagaattgcttgaaaaaaaaaactgacaagcagcctaagagactgaatgaagaaaaaacagaatgaaggaaatcatataaacaagctactgtggaatctatcagtcttgagataaacatatccccatataaaatcaagaagcagtgcatactttataattagtctgcgtttctgttttgtagcagcatctgaggcaagaaaggcctcgatgacacgtgctccactggaatcttttgccgtttcagtgatatactcagctttcatagaagttaagcttgttatgtatggctgtatatgatcctgtgaaattgagaaaaagttgggagttactgtgaatgcacatgaaaagccaaaaacttggaagttaaaagcactgaagctatttttgtcaacacaagaagagaaggaaacatacactagaaaacttaaaaatcccctgaagtatcaaacaacccatgacatgcatctttgcaccaggtgcccactcccatgtagacttatctcgacaaccaaagtagtaatcaagaaacagcaaccgtggaagaatggagatacgggattcatttgtggagcatactgcaccaacaagggcctcacaacactgtcaaatcagtaaaaaatcagctgtataagacacaattttgaactagaaaagaaatcaatttcatctaaatttagaaaacatagaaaccttattttcatgactttgaagcctttggctaaccgctatcagagaagccacaacacctgacttcccttgctcaagaagatccttgaatcttggagctaattcttcccacataatacccatcttgtaaacaaaatcaattgaacgtaagtttactggcttcacggaaatagcacaaataaattcgaagttaagaagacctggaatgaaattttgatgtcacagaaaaagatgaagtgtatgataaagatacctgctcttggtctcttgcatgggagattaatgcttgaataacaaaatttgcacaccgatcaactgaaagctcaaataaagaattcttgaaaactttgttgaacatttcgttatacaaactttcaggggccacttccaaaataacctgaaaatggcatgcaaacgcatttaaagagatgactaagaaaattaacactccaattacagcatggaatcaaacagagaactagcaatcattatagataatattttgcatggtctaaagcaggcaatacgtccatcatcaattgttttatgcaaggtacagaatcttggtataaacaactcagtcagagcagccagaggttagactcagttacctccaccagatgactgaatgaattatccttcatcgactctaaaatttctttggcaacattagtctctatatgaaacccttctacttttttattagtagagttgcagcgcataataagcggaatgatttcaagcaactgctcatcttgtttcagcattagtctgagagccgtctgtcaagagaagattagttagaatcaccgtgaatcagggagagagactaaataacagtcaatactaaagaaattgcttgaaaatgacataaacgattagacagggacataaaacctacctgtaagaccaaactgctatactgatcgacttgaagatacttcatgtcctctctgctacaacttaatagcccagataaaaggtacgtgagcatacctggaaacccttgatgagggatttctaaattattgtcatctagctgagacatcttcagattcaaacgtttggccagagcttttgatgattttgtgccataaagctcaggggaatctaaagagactcctttgcaaagacaaagaagccttcgtagtacatgcgaaccatagcagttgcacatcatatcaagaggattatccacaatcacctgaccaggggaaatatttcaccatcaaaattgaggtcaattactagactagaagcaataatctggataccttaatatgattggcaaagcccagtaaaaattggataaag

SEQ ID NO: 37363 - DNA, 1981 bp, Arabidopsis thaliana landsberg
  unsure (1)..(1981): unsure at all n locations
caaatcacacccatattttaaatataaacgtgaaaattgacgctattattggttacatataatggaatcactattacgtactcaatttaaaacagtcatgaccgctagaataatatgcatgtgtttgtatagtattaattgtatattttggtacaatttattctggttgttttctagtggtctatcataattaaaaagtgagaagggaacaatttttcggcctaaggtctgtgcatgctgttttgtttttcttagaaatagtaaaaatgtatactctatagtctatacaaaatagaaaacaagaagaaaacaaaaacatatagttgatgtgttccatattcgattctgaggcaaatatgtcagaagatgataagattataaaatttagtctaacaaatttcacgtgaacaaaactagcaaaataaacgttaaatcaatcaaacatacaaaacacatagttatatagtaattatgagtaaaattgatagagtttagtgaatgatatcaggttagggttcgtggtggagatattgtcgcacgcggcgattgtagggttcatgggaggagccgcaacagtggtgtgtctgcagcaactgaaaggattacttggcctccatcatttcactcattccaccgatatcgtctctgttctccgctccattttttctcaatctcatatggttcgtttcatcatttgtcgaaatgtgaaaaaagagttttaagtaatatgtacatatatatgaattagtattaatatttgcagtggagatgggaaagtggagtgctagggtgttgcttcctaatcttccttcttacaactaaatacattgtaagtttaacttgttaatttaatctatgtatatacgtactgattaagatacgttttggatttaaatttaacaaagtatcaattatgtaagtgaagagcaagaagagaccaaannnnnnnnnnnnnnnnnnnatgtctccacttgtttctgtcatttttggaaccattttcctttacttcctccatgaccaattccatggtatccaatgttggacgtttttcctctccttttcttttgcctctacggctaaatactcacacttagactcgaatatttacctttgcatatttacgttcttatatttaataaatctatgaaaaaaattataaacaaaatcgagaagcttattcgcgtaaggcggagcaaacaaaactgaagttgtgcattataagactgtaacgccaaacgaaatattcactctgagaaaatactacacaacgtactaataattaattttgttgaggatgaagatcggtgaactaacgaatgggattaatccaccgtcaatcacacatttggttttcacgccaccttatgtaatgttggctctcaaagtcggcattatcactggagtcatagctctcgctgtacgtattcattaaatctcgaccaatattgagtccttaaattggttgtaataactgttgtttaaataaaataaaataggaaggtatagcagtgggtagaagctttgcaatgtacaagaattacaatatagatgggaacaaagagatgatagcctttgggatgatgaacattcttggttccttctcctcttgctatctcactaccggtaattttatatcattttcatgttctttaccaatcatatatcttcattagtaaagaacatttacatatgtttgagtccgactaatcattcaacgttaacacttaacactacgtaaaaggttactaccaacattattggtgatgaaaataatcaatagttatagttttgagatgatatcagtttttggtttttgtttttagagacttatttggtatcaaatgatgattatattctcttgaaacataatgattagtattaaactcttaaagatttggaaaaaaaagcacgtaactatgttgatatataagccaaaacattatgttgaagggccgttttcacgttcggcggtgaactacaa

SEQ ID NO: 37364 - DNA, 2923 bp, Arabidopsis thaliana landsberg
accttttgtttctttacacactttttagttggaatctctaatgtataaaatataaatatatttttatgagtatgtaagtatagtatcagaaaaagttaaagattacgtgtcctcaagtatattgatagttggatttgagggttttcgtcaaaaagttctcagtttcgtcaatgggcaggtccttattttcagctgctccagtctttagtctttctctaatgtatttcaaacattattataataataacacataagtaaatcaatggttaaatgcttgcaaaatccagcgatcagttttgaaccatcttgaataaatcgaatcaactaaaacaacaacaaaaatatcattccttttctatttcttaaaacaaatccaaaccaatttaaaacacaccttagtgagttagtgacccatccaaaattatataagtttggattattatgctctgtataaaaggtacagtgtagatgatgagtaaaatgttggaattcttacaaacaaaaaaacaagaaagcatcatgtgattcaaacattgttcttgtcagagtctctgaagtttcactttcaagcacaaacccaacctccatgtactgtatagaagaaacttatggttacaagtcagggcatctaatcttgtttcttcttttttggatttttctctttcttatttttggcaaagaaaatatcttaacttcattattactccctcttataaagtacataattagtttggatattaattaaaattcaaacaaaaataaatttcttttaagaagttcaaacaataatttcttcattctcgatttcacattaagtccttgaccatatcagcaagaagaataagatagagagatctcactacttcggctgaatcatattgactgcctttttcgctatgtatgcgtctctaagagggtatacttatgttcttatttaggttcttgatcagcaatctctagtctaatcatattgatgatgatctgttctcacacaacataatggttctgaaagggactctcacttgctatgaatggtaattgcagggtgtgtccactatgtcccaaacatgatccccactacccaaaacaacaccgatgacaccgctttctgataaaggaaatccaacaagcattcaggactggaactgaatcaaaacgactgtacatgctgatatgacttgttcaaaaaccaattgattaagatgagataaaatgaaaaaccagttatcgaaacacaaagatccttcacaaaacatagtcaaagcttgtttacattgataacagagaacaatgtaaatactcgtgatttcgcaaatgatgatgctagaagtttttccgactcagctgcgatgcaaactgatcagctgcagccatagcttgggaagctgaaccaattgatccatcatatctgcaaatcataaccatcttatttttgaactgaaaatgtaagagtaagatatgcacttgagcaaagtattcagtgcactcacagagcaaccaacacgtaaaccgcagtctgcataacaatagctccttcaccagcaggctgggaagtgtttaaacacctagcagcgaaccagttctcatgaatagatgttattatgtctgcagattccaaatcatattattaaaccacaaatcatactctccaagcgaataagattacacgcgacgaacgagctgttacattggttggagccaagaacgaaagtctcagttggaagataggcacggctcatgaaatctataaattgctttagatcaactggatagatatcaatcccttcttgtttagctctgccaataactcaaaattaagcatacatcaaagtttcgatcttttactgcaaataaccaatctaaaagaacaacctttaagtagaaacagagagcagtagatattgaaacttgatgaattagcttacattgttgataagagacgagaaggtcctgtaggatcatagttaatcaaaatagcagccttcaatggattacctacacaaattccaacaatcaaatcaccaaaaaggaagattcttttactctctttctgggttcttcttcttcttttcaaaatctcccaaataagaagaagaagaaaacaaaaaccctaatcgagagtgaacctacctgaagagccaacgttacccgcagtaacccatttttcccaagctctgtccacaaacgccgaatccatcgatgcgttttgaaaactttgataaagcaatgacttttagggttcttcacttcactaaaaatgagagaagcagagcaccgactagtacacagtctctctctctttctctctttggattcgtataaagttttcacttttcagataaactcgattataatacaaagattaatcttaaatcaaagtaaagatatactctttattcaaattgcagtgattattattgatccgatttggaaaacaaatccaaaatgtttgcgagctctttcaatttcaaattaaaaaaattgaacatgattctagtcttcagtagagatagcaggacaagtaggattacaagtcggcgacggacaatctatcttctgaaatgcactccggccataaaaccagtttccgactgctttcgcaattctctgcaaaaccaaataatcaaaatcagaactaaaatcgaattgaaaaggtttcaaaagtattggaagattgaatttaccgtattggcgacttgggggcctttgtcaccggaccaagaggcggcgcttcctccttggcaatgagcgtgacacgagtctaagaacaatcctctcgacggtgtactatgaaccggtgataatgctcgcatcatctgatctctaaaccctgaatgttttaaccacccgggttaattaattatcgctaaccaaatactttgtttcattcactcacacaaccatcaaaccgttagaaaccaac

SEQ ID NO: 37365 - DNA, 1333 bp, Arabidopsis thaliana landsberg
tttgacactcccatgccgtcgggtgcggttaggtctctttagcaatcttgttttggcgttagttttcggagaagctgtatgcagtctttcttgaggtttgtggactgcttcggaaattttaatgctcgtggcaacaaggatgaggattagagctccttcgagctgcgacaattacgcaaatgtccaagtttctcggttcggaatcggtgtttcctctacttatctctgctaatggcttcactaatgttttcccttgtatttgtaggtctctagagcatagtttttagttttcctttcttattaattctctctgtatacggtcccaaaattgaaaatgatataaatccttcaccttttaccaaattaaaaaaaaaaaagcactcagtaaattctatatataacgtcattcccgttgctttcaaaagagtttacaaagtcatcgtcgtacagcgattcataggtaatgatataaccttcctttgctaaacgattttgacatgaatttcattctctcctgataaaggtgacttcctaactttggataaaactctaaaagtttgaataaaacagggtgattaattagttttacacttgtgccagtagaataaaactttcttaagcattttttacatcttattgaaaacgaaccatttatcaccattctccgaaactgacaaaaatctctgacatgaagccccatcaagccatgtgggtttttttcccacgtacgtacacccaaagttcacatgcatgcaatgctaaaaaaataagatgcctctagattgcttcaagaccatcctcacgttaaccatatcgatatcttctcagtctctatataaacaagacagcctctctttctgcctcataacttcaacaagagctcttatctataaaacattctaaagaaaaatgaagatgataatccaaattttcttcatcatctccctcatttcaaccatctcttttgcctctgttcaagacttttgtgtagctgatccaaagggtcctcaaagcccatcaggatactcttgcaagaaccctgaccaagtcaccgaaaatgactttgcatttaccggcctcggcaaagctggaaacacttccaacatcattaaagccgcagtgactccagcctttgctcctgcttacgcaggcatcaatggccttggcgtatctctggctcgtcttgacttagccggtggtggtgtcatccctttccacactcatcctggtgcttctgaggtccttgtagttatatcaaggcaccatttgcgccgggtatatctcctctgctaacaaagtttacttaaagacactaaacagaggtgattctatg

SEQ ID NO: 37366 - DNA, 1895 bp, Arabidopsis thaliana landsberg
tcgaacaagatatataaaaacaacaaacaaaaaaaataacatatgatgctgaaatgtcagtaggataagattctcggacgatccgaaaaactttggtacaaaacatcgtattccttcttcttcatcaatatcctattattaaacaaccggcttagcagttagcagagctgacgacacctcacttattttctcttaagataacattaactatctctattactatacttcatgagtgccttttatggacttcacaccaattttaatctctctttttttatgcctctcccaccaatcataactctaatcatttgtattatattaagtaatcccactcctatgttatgatcctcccatgagttgaccaaatatatgtacctttaaatcaaaatgcttctgagagtttaagatttggttgaaccaagtcagcccaaaaaaaaagaaactgtttctttcataaataaatatcctagaaaaagcagagtgacgtggatttgattctgctgagcataagaattttaacaaaagggtactactacaatagggaaatttagtgcaggtccaagcaaagactgtagcagtgttgggccatgaaaaagacctgacctgtgaagattagccataaagagcacgccacggactttcttcttcttttgatgtctttgatgcgctccacttgattctgtctcttgagaaagacagtcctgtccaactagccacgagctcccctgtttcatggatcacctgtgatgacaacaacaacacaaactcgttattcagctgaaatcaaccagcgaaaaacaagcataaactgagacaaaattactaagtaaaattacctgaagctcttcgtctagagctttatgagttaggctattgcttctttggcctatgagaatagcggtaggcaggcgtttaacacgagctagatgaagcaagcatgacaaaggttcataatggatctgcatcgatagtggtggtttctcgatgcgagaagcaaataacctactggtctctgtttctgtagcaacttgaacgtaatgaagactagcttttctgttatttgcttccagggatctgttattgaacttgagcttagatgcctccacaaagaaaggagctatgattgtgggtagagttgacgatccccttgtaattaggtccagcagttcattcatagcacacactagtactggaggctcataacttcgaagaagaaaaatcgagaccttaaacaatataagaaatagtcagaaagttaagcaatgaaatcatagtccagaaatacacattcaacagagaaacaacaaaacatgatatcaagtcttgcaagttgcaagataaccaatttggggataatattatcatcaagggccaaaatctgaccaagcttagaagacagtccaatatcataagttaggttccatttagctgacagactgaagaaaaggcatttgttattgctttttcactagccaagtcaacacctctaagcactctaacttaagcatatatagagacttagttttttttctcataaggctttagtttcggcaaatacaatttaatgaagacaaatcatagtaacagttgcacatccttaagaatccaatcatcatatcacattttgcaggtaaacagagtcgactaatcagaaagtaatcaatcttgtacaaattaaggagaccactattcttcagcttaactatatcactgaataaaatttcagttctaagaacaaacaacgactataaataaagcgagaaacgaactcaattaaactatgaagattaatagaatataaacgcgatttaaagaggaggaacctgataaacttcattttcatctacgaaatgaacgatactcccgccggtttccacaccttcaacgccatactt

SEQ ID NO: 37367 - DNA, 1788 bp, Arabidopsis thaliana landsberg
  unsure (1)..(1788): unsure at all n locations
attgccgaaagcccctaaataatctatcgatttaataagttttccatttttctctcaaaataaaggccttcgtattgaaaaaaaatgacaagtgcatcgtttatgcaaaatatttgcttgtttttttctaataatatattctgatatttaaaattcctaaacatggaggaaacgaaccataagaaacggcatctataaatatttatatatttatttatacatgtttatgaaacataaaattttacaaaattcactaaaaattgtaaaacatagaactacaaagttttcactacataacaaattaagtaccccgcttgatctagtataattgtataaattatgttgtaaatgtgcctgattgtaaaattttgagttgacgaccataaacgtggtaccaccagagagatcacccaaaatcggactttgcagtttcatcattataaaattgtaacgtatatatgcgttcaatgattgatgttacaggatccctggaccatgcagatgagtttatttgttttacggaaaatgcaactactctgatgcattcgagatctattattgcttgcttcttaccgaattcaaatacttgaccccactaatccgataaggctaattaatatgtgtctcaccctcatgagttattgccgatcctaacaaatttggaatcctgaaaagaaaaataaaagagtgtttctttcaactagtaataaagcttattttaaaagacgttaactttatccttctaaatagagtcttagaagtataagagagcatgattaatgtcccatataagcattatgaacggctggttccgagtctgaagacaaactatgagcttagaattagaacttcctgagttataaaaattatttttctttttttttgcatgttttaaattgtttttttgtagtgtaaaaacagtagttttttcccagaagataagtaaattagggtttgtttatctgcttccaattctatggctaattaatttggatactaattaaagcgttaacagagaggacgtatgtatttcttaattagactccaagtttttcttggcccatttggatcaaaagaccaattgtatgggcccataaatgacctattctgattactagagattgagtaaacggctccactttttttttatgagcctgtctcatgatctctcattctctcttcaaaactctatcccatatatgtatgtttattagtttgaatttcatttaaaatctaatttgaaagtttaaaatgttagtaaaattatttggtgattgattatagtgttagtcaaattattttataatttaaaatgccatccagtaaaattttgaaagtaaaaaaatgtgattttccatatatattattatataccaacattatttgtcctcgcgatcattatgtatggggcattattataccgtatttttcctcgcgattaatatgtatggggcatgaatcatgaaccgtgattatcttctaaaggatgctgtgccaactacccacgtaaataacgtggtccaacattaaatataacaatttaattgaaagctcttcaacaaaaaagttaaaaaacaacacacatctatcattaaatagtgtttgagttaaaaaagaaacagagaagattttaggtatgcactatcaaatgatttaaagaaacggtagaaaccttgtttttaaccgtcacggtccctatataaacctatgagctagcgacgacaagtattcagtataatcnatccagaaacnagtagaaactttaaaacgagagagagagaaagaaat

SEQ ID NO: 37368 - DNA, 1794 bp, Arabidopsis thaliana landsberg
agggccacggccacatacgctaaagagacgaaagagatgttcgaaatgatggtttaagtcatcttcgaaagtcttgaaattgatggcggtgatgaggcggtggaggagttggaagagggaagtcaagtagtggtggtgaactgttatccaccgtgtccggagccagagctgacgccctcaaactacggcttcttgactcttctccttcaagacgacgtcgaaggccttcagattctataccgtgacgagtgggtcaccgttgatcccattcctggcttttttgttgtcaatgtcggcgatcatctcgaggtatatatcaattatcatgtttctatctatttttgcttaccaaacttgcttcatagatttggttatatcttaaattcgaaggatatgaatgaaaatattctaaacatactgtaaaatccttaattagaaaaagctttttaatacttgcgctacaaaatagttaaattgggttgattaagattaaaattttaaagtgattagaacatcaaaataattttctagaatctgtctcatctttttttctcaattttgtttattattacatgtagatatttagcaatgggaggtataaaagcgtgctacatagggtaatggtgaactctacaaaacctaggatatcggtggcgtcgctacacagcttccctttgacttctgtcgtaaagccatcgccgaaactcgtcgataaacataatccatcacagtatatggacactgattttaccacttttcttcagtatataacttctcgtgaacccaaatggaagaattttcttgaatcacgcaagattcaccatgtatgataaataaaatacctttttcctgatagtgataacataaatatgaatcaaaattgtgttataaatttaccaaagctatatttttctttatgagtatgattataattttcaaaaattttaatgaaagagcatagagagagaaatgagatttttcatccttcctcccaagtctttgtagctctgttatctaaatcgttttatgttccaggtggacatacaaatatattatatatctaaccaaaccaaattaaaagatatttgtaatctgattgattttataagagaaaatctcttccaatgaattgcatacaataataacaaaattaactccttttttggaaaataatatttgtgatatgattctctcaatggctttgtgaaaaggacacgcaaagtcaacatattttttcttaaaataaaataagatattaagatatatgttgaccataaaaaatggaaagaaaattaacaagaaatatagaaacgaatgctaaacaagggaaaatcgaagaaagtgaatcaataaaagaagatgtatatacataaaagtaaaactgttgtccataacattactgtaacgtgtcggtgtttttttatggaaaagaaaattaacatttattagatggattctctcctatttatataagagtctcaatgacttcgcaaaagtagaaaacgcaaacaagtctaattgtcgcataagtcataagaaagttgatgacgatggcttgtaagaatttggttgccattctcataattgtctctctctttggtcttcaccaatgtcagaatttgtgcatgttttttttttttttctgtttccccaaaaacctaattccacaatagatatgctaggtttaagcatatgtttaatttgtcccttttctatgtattttgttgtgtttacacataagaaattgtatgacacatggttaatttgtatatcccttcatttatgattacgaca

SEQ ID NO: 37369 - DNA, 1359 bp, Arabidopsis thaliana landsberg
agtataagccatatatctattcctgcattttgattcaactgatgaaaatcaatatactttggtttaatactcttctacaagactacaagttcaaaaataactgaagaaaaatatttcctatatcaatagcctgatcatacctagatcctcgtgaaaaccggtttacatctgatttcgaccgatatctttcttgaatcacaatgcacctttccaaacttcggatcataagcatatactaaacaataaggaagtagtcaatttttatgtaacatcatctaaagtgtaatctattaaattacaagttgagggtaaaataaaagtacctgaagacgcccacaaccgcgaggcgagaactttgaaaccgcgtagcgaccaccgagcaattcaagctcattttctcggtcacgcaaaatcatcttacaaacatcttcacttgcttgccgtcctcttatcctaggagtactacaactagccagctcaagaaaacatcttccttctccatcattctcataagaatttgaaacattattcatatctgattgaggaaaccaatctatttcttcaccactgctttcgttgctttttctcgcctcgtcgttgagaaagtcggagagacttgattcagaactcgtcctgctatcgagtagcgattgacttagactcgagcttgactgctgcgaccgagcttcccaaatctgaaccagagaagaagctcccatgctgacaccatttcttgacgaggtctcaggttgaccaggaatataaaatggattggaattggtctctagtggataagaagaaggaatcttccaagattcccctgtttcaaaaacagaggatcttgaagaacattcaataacctctttacgcttcccatcttcgttacttccagaatcatcgataggcaaaacacgaaagctgttgtaacgatctctgacaaaaactttgagattcttttttttcttgttaccatccctcgaagccattttctcaataaaaaataaagatcaaaacaaaccctatgctctgtttttaaacttgctttgttttgttacactcaagaataaggaaggagagaaactgtaatcgcaaacgactcctaaaaaatgatttgcgttctacaaacgcttagaacaaaaaaacaattgagtagaacatgggaacaaaaaaaagaatataacagagaaattgataaaatcgaataataattgttatgtttttcctgttctttagtcctctgtttctcgaaaaacttttggatattaagataacagaaatttactttctgacaacttgaaacagaagaacaaaacgatggactatcaaagaggcaagaacaggataagaagaaatatatct

SEQ ID NO: 37370 - DNA, 2532 bp, Arabidopsis thaliana landsberg
ctctcctaggttgcctatatgataaatttggagagagaggttgcatcgatatggggatcccaaaagatagtacattaagttcagctataatgacaaccaggagaagaaagcaccgacaacctttgttaaacgcagtggaaactgagatacaaaagcagaaacagagccgcatagtaacagagcgagacgttgcgctatggaaggggaaagaagatggttttcatccaacgttcctctcgaaagaaacatggtcccagatcagaaacacacaaccggagatgcaaggctacagggggatttggttctcaaatgcgactccaaaatttgctcttcttacttggttgatggtcaggaatagaatagcaacaggggagaaaatggggctgtggaatcaaaacacagacactagctgcattttctgcaaaaatccaaacgaaacaagagaccatctattctttcaatgcgtgtacacgaggaaggtatggaatggtctcataaaagggttgcttctggacaaatactcggacagatggcaggacattattctgatgcttacaaggaaagattttgacaccacgaagagctttatccttggatatgttctgcagaattctattcactcgatatggcgtgaaaggaatgatagaagacatggagaagacccatcaaatgaggagagacttatcaagtttatcgacaaaaatattaggaaccgtttgagcactctaagaagaggagatgaagagaagtatgtgaatggaatccaagtgtggtttggatcaagaagaacattttagagttctttgaaatttttaaaacaagtttacatgtatacgtataaacgtttatttttcttttgaatataatttaacattagattcaaaaaaacaaaatagacagaaaaagcgttctggtttatacgataagcataccatatgtttttcttcaagctcatctacaaactgatgcgaataactggcagaagctcaagaggaactttcttatcaacagtgagatcaccagcttcttccatgtccatatctttcttctcctcaggcatattccaatcaaagaagtagagcaaattcaagagccccaattcaatggttgcgatcgccatagctattcctggacaaattctccgaccagaaccaaatggtaacaactcaaagctatgtcctttgtaatccacatgacaatcaataaacctctccgggttaaactcttcaggatttttccaggattccggatctcgtcctagagaccatgcattaacaagaagagctgttttccgaggaatgtcgtagccttgaatcttgatatcagccattgtttttcgtggaagtaaaagaggagctgctgggtgtagacttagaggtttctttcaccacaagcttcaagtattgaagcttatcaagatcttcttccatgattcttccttcctgtttgattccaatgcaagttcggatctcgtcttgagctttcttcattacccgtgggtttctaacgagctctgccatcgcccaaatcaaggtgatggcgcttgtgtcaattccagcgtgatatatattctagctcaagaaaaaaaacattacatcattaattaaagatataaaaaccataaagtaaattaaagaaatttgtttgcttactgagaggactcctttgagatgatcaacggtgagcttgaaagatgcatattgttcttgattatctatcatatctaagatagcgtcgaccatatcaggacgatcttgagttgctttcttcgagtgatgatcgtcaactatatgattaaaaaaattatcaacctcggtgaagacgttgtgaaggcccttatgttggcctgacaaaaagcctataaaccatccaagaccaggaataggaaaaagatcagaaatttgaaagttaaacttttctgagcttcaaacaccggtacttgcagctaggcaaaatagggttttggtcaaatccaccggagattgcttcaaagccaagtctctcagtttcttgtccatcaagtgattctcttcctccctaacatacctgaaagattgtaccttttttacgctcaaatactcacgaaccgcaaccttacgcagctctctccattcatcactgtatgccccaaggccgatgtttttgttgttacgggagaaaacccttgcggcgttagtgttaggtcgtgtacaacactcaatgtcatgtgttttaagagcctcttcagctgcttcactcgatgagatcaagaccagtgggacaaaccctagctggagatgcatcactggtccgtgtttcttggagagctcatgaagacatctgtgaatcatcccttgtatctgatgtaggtttccgatgatcggaagctttgctggacgaggaggaagattccgtttcgattccttcatcttcttggtgtagattaacgtgaagagaaagggaagggatagaagcaataccaaagatagaagaatcgccattgttttcgtttttctgattttttggaagatgaaatacaaatcaacaacgttt

SEQ ID NO: 37371 - DNA, 6910 bp, Arabidopsis thaliana landsberg
  unsure (1)..(6910): unsure at all n locations
acggataatatatgttaacttgtatgtgggaccctcatttgtctctcatggaggctttcaagccttgtgttgaaactgaatagttacatatgcttccaacagaaactagcatgcaaattcatatgttttcctattctactaattatgtattgacacactcgttgtttcttttgaaagatataaagttggacgaatcgagcagctagaaacatctgaccaagcaaaagccagaggtgctaatactgtaagttttcttggataggtcaaggagagtgttgcagactgtttttgatcatttctttttttgtacattactttcatgctgtaattaactcaatggctattctggtctgattatcagataattccaaggaagctagttcaggtattaactccatcaacagcaagcgagggaaacatcgggcctgatgccgtccatcttcttgctataaaagaggtttgttatttacttatttatcttatcatgttcagttcatccaagtcctgaaaaattacactcttctttaccaatcttccatcaagctgtgtaaaggatttggaattagaaaatcattatttgatgctttgttttatatgcaagaggttcccttgaaaagatctgtttaagattctttgcacttgaaaaattcaatctttttaagtgaatcccctactttcttacaatgatcatagtctgcaattgcatgtcaagtaatatcattccttgttactgcatccccctctttcttaatgaccattgtctatgttgtgtttgtctcgtgtgctggagaaaatgatagctgatccaagctgtacattatcatgattaagtagctgctcaggaattgcctttggttacattgcctaatggtttgatgtcaatttttcttctgaatctttattttagatcaaaatggagctacaaaagtgttcaactgtgtatggatttgcttttgttgactgtgctgccttgaggttttgggttgggtccatcagtgatgatgcatcatgtgctgctcttggagcgttattgatgcaggtaagcaagtgtattctgtatcttatgtgtaccatgtgacttcctgtgcatatatttgggttgcaggaactaattctgaatcaccatttggtatgttttttccaggtttctccaaaggaagtgttatatgacagtaaaggtaaactgcttgtatcgccagttgttttgttaaacagaatttaaggtaaatgacactggttaatttaaagtgcatacatgttgaaatattgcagggctatcaagagaagcacaaaaggctctaaggaaatatacgttgacaggtaccatttcagtaggcaagctaactgacaatttaaccgctcaccgaatgataggtctcttaaacattgctaatgtagatgatgtttatgtttcaatctaatagggtctacggcggtacagttggctccagtaccacaagtaatgggggatacagatgctgctggagttagaaatataatagaatctaacggatactttaaaggttcttctgaatcatggaactgtgctgttgatggtctaaatgaatgtgatgttgcccttagtgctcttggagagctaattaatcatctgtctaggctaaaggtgtgttggcttgtttagtttttgcttttcacaaattaagcaaaggaacttttcataacttacagtttctatctacttgcagctagaagatgtacttaagcatggggatatttttccataccaagtttacaggggttgtctcagaattgatggccagacgatcgtaaatcgttggctattgggcaataactgttatggtggtccttcaggcaagtgcatttgtcttttatagtaacagcatctagagggcagacatagaaggaaaaattctcagccttagcatggatctccagtaagtaatatccgatttttgtttacctatgtagggaccttggacaaaaatcttgacaactgtgttagaccaactggtaagcgcctcttaaggaattggatctgccatccactcaaaaatgtagaaagcatcaataaacggcttgatgtagttgaagaattcacggcaaactcagaaagtatgcaaatcactggccagtatctccacaaacttccagacttagaaagactgctcggacgcatcaagtctagcgttcaatcatcagcctctgtgttgcctgctcttctggggaaaaaagtgctgaaacaacgagtaagtatcaatcacaagttttctgagtaatgccttccatgagtagtataggactaaaacattacgggtctagctaaagactgttctccttcttttgcaatgtctggttattcattacatttctcttaacttattgcattgcaggttaaagcatttgggcaaattgtgaaagggttcagaagtggaattgatctgttgttggctctacagaaggaatcaaatatgatgagtttgctttataaactctgtaaacttcctatattagtaggaaaaagcgggctagagttatttctttctcaattcgaagcagccatagatagcgactttccaaattatcaggtgcccatctatctttcatactttacaacaaaatgtctgtcactactcaaagcaatgcatatggcttagatctcaactcacaccccgaggatcctaaagggatttgctttttattcctaatgtttttggatggtttgatttatttctaacttgaacttattaatcttgtaccagaaccaagatgtgacagatgaaaacgctgaaactctcacaatacttatcgaactttttatcgaaagagcaactcaatggtctgaggtcattcacaccataagctgcctagatgtcctgagatcttttgcaatcgcagcaagtctctctgctggaagcatggccaggcctgttatttttcccgaatcagaagctacagatcagaatcagaaaacaaaagggccaatacttaaaatccaaggactatggcatccatttgcagttgcagccgatggtcaattgcctgttccgaatgatatactccttggcgaggctagaagaagcagtggcagcattcatcctcggtcattgttactgacgggaccaaacatgggcggaaaatcaactcttcttcgtgcaacatgtctggccgttatctttgcccaagtttgtatactcgttagataattactctattctttgcaatcagttcttcaacatgaataataaattctgttttctgtctgcagcttggctgctacgtgccgtgtgagtcttgcgaaatctccctcgtggatactatcttcacaaggcttggcgcatctgatagaatcatgacaggagagagtaagttttgttctcaaaataccaattcctcgaactatttactcagattttggctgattggacaaggtggttttgcttttttttaggtacctttttggtagaatgcactgagacagcgtcagttcttcagaatgcaactcaggattcactagtaatccttgacgaactgggcagaggaactagtactttcgatggatacgccattgcatactcggtaacctgctcttctccttcaacttatacttgttgatcaacaaaaacatgcaattcattttgctgaaacttattgatttatatcaggtttttcgtcacctggtagagaaagttcaatgtcggatgctctttgcaacacattaccaccctctcaccaaggaattcgcgtctcacccacgtgtcacctcgaaacacatggcttgcgcattcaaatcaagatctgattatcaaccacgtggttgtgatcaagacctagtgttcttgtaccgtttaaccgagggagcttgtcctgagagctacggacttcaagtggcactcatggctggaataccaaaccaagtggttgaaacagcatcaggtgctgctcaagccatgaagagatcaattggggaaaacttcaagtcaagtgagctaagatctgagttctcaagtctgcatgaagactggctcaagtcattggtgggtatttctcgagtcgcccacaacaatgcccccattggcgaagatgactacgacactttgttttgcttatggcatgagatcaaatcctcttactgtgttcccaaataaatggctatgacataacactatctgaagctcgttaagtcttttgcttctctgatgtttattcctcttgaaaaatgcttatatatcaaaaaattgtttcctcgattataacaagattatatatgtatctgtcggtttagctatggtatataatatatgtatgttcatgagattggtcaagagaaatactcacaaacagtatattaagaaggaaatatgtttatggattaatttaagtttcaagataaactgcaaataacctcgactaaagttgcaaagaccaaacacaaattacaaaacttataagacttaagttctgaattccctaaaaccaaaaaaaaaaacagaacatattttgttgcatctacaaacaacacaaacctacatagtttataacttactcatcactgagattaacatcagaatcattctccatttcttcatcttcactctcatcatcatcaccaccaccatgatgattctcctcctcttcacgtaacctagcaatctcactctgagctctatcaacaatctgcttcttctgcaactccaaatctctctgaaaatcagctctcatcttctccaactccttcatttgctctttcttactcttctccatcttctcataaaccttcccaaacttctcaacagaatccgccaacatcttatacgaagcagcgtcattaaccttcttcctctcgtactcaacctcatcatcctcatcctcctcctcttcagaatcaccaggactatccatcatctcatcaaacccattagacttatctaaataaaccttagtgttcataaacacaaactcacctgaatcaacaccacaagctaaacctaaatccgacttgggcgaaacacaaagcaacatatccaacttattgaaaaacgaccatttacttgaacctaaacctgatttctcaaccttaatcttctcttttctatacttcctcttcaagtcatcaatcattctcctacattgcgtctcagatttctccatccttagctcctcactcactttctcagctacttcattccaatcctcgttcctcaaactccttctacccaattgcaaaaacctatctccccaaacttcaagcaacacaaaagcttcttgctctctccaatcatacgcaactttagcatcactaggaccagcaaattcaaacccagaaactactttgtttggtttctgtctcttctgaaacctctcatttccacgaatgtatcctccttgtggatcttcctcttctccttcgacttcatcttcgtcttcttcttcattgtaatacgcgtgacgcttaggtattggtctactatacattggatggttttgccgattcaaagagtaaaacttttttgggtatcctgtttcatcttcgctgtcacccatctttgagcaaaacccagaaaagcaaaagaagagagaagaaaggcagatctagggtttcaaatcggacagatagagatttacctgattcttgcacctaatagaggaatatcttggagggtttagctttgagaagagataagtagaagaaattgatgagctttataaaccatggccgtgtctagggttagggatttgcattttcagccgggtcggagtagaagaaaagctaccaccaccggtgaacattgcctcagccagcgacggagttttgtcgcggcgtttgttgggaccatccactgggtcatattgggccagtttggacagcactaatgggccaagaggaccacaattatttaattttaaccgatagcccaagagttcccaactaaaactaacgatcattaagaaaaggagagtctaaactctaacgaatatcagctttggtgtcggttaacttatgacttatggggtcaatttctgacatttagggtcataatattttgacctttagcgtcatattggctcaaaggatttgaagctgtcgctttttggtgggttcgaagatctgcgaatgcagttactgatcgactagctaaaatgggtgccattgaaacaatatgttattttgattctctgctttatattcttaaatatgctacgtatgcttttaattaatctgaataagttcaaaaattaaaaagggctaagttttatttttcatatcacggtgttattactgaacttgcaagagtttaagctgcaagaatatgaattgcataagcatctactatgggagcctcggttgtgggaaatctccatgtgtcacattatgattcatacgtttttgaaaaatgtgaaagtgtatcccaacgataattcatttaatacactatgaaacgtataattttttaaattattaatgatgaaatcttgtttgaagatgatagtattaaaattaagtggactaaaatagagaaatgccagaactctttatttaataattgtttgtttctgtgttttaatataaataaatgaatgttatgcttattgccaatgaaaatgtcgaccacgcttcaatgttggtgagtaattattatgcatcaaaaaggaagtaagtataaccttaatggaaatgatcatggtagtgataagnnnnnnnnnnnnnnnnnnnnnnnnnnnnngcatcaatgcatcatactattgaataactaacactagtctcgtacaatttgattttaggtgtttaaatctcgttagtgtaaatataacgagataaacatttacaatacaaaaaaaaattgaattgtgtgaccttgtaagaacagattttcgaaaaaaattaagagttgagtcattgatatgaagaagcttccaagacaatgatata

SEQ ID NO: 37372 - DNA, 2790 bp, Arabidopsis thaliana landsberg
attaaaggaatacgttttgttgataatcacaaccagtaatcgagcttacctgatatcgaatctcttgtcatttcttccttttaattttacataaattttggtctttttcattttgtatataaattcagtttttccaaacttatgtttctattatgttcattaaaactactaaacattttaccaagtttttttttttttttgttaacgtgttgtcttacataaaaatttcttaaaaaattgtttacatatgagccttataaaatgatatcaatcatatgtagattgatattctgtcaccaagttgatgaatgatagtaatgatattaaatacacgattatgtgtgttgacatgagataataagtgtatagaaaaatgtagaaatgagaaaaaatcaaaaggttagcatttatttatggaagtcgatttcacctttgattttgttttccaaattgttaattgttggaataccaaacgtgtcgaaactgtggtacaaaagatcatcattagtcccataacacacactttttatttattactgtacttaattaataaacagcagaatatagtataattttattactctctcttcttcttcttcctcttctcaaaaactttcagtttcgatctctcctaaaaagtttgaactttccgtcgaatcaaatgggaagcggaagatatctagacgaccctttaacatttactagaaacccaccttcctcgtcgtctccaatcaccgaatctagctttctcgcagaatcgatctctcgctctggtagcttcgagagtgggagcttacgaggaggcgatggtgattgctttagcgacgtcgatttcgcacttgataaactcgctgggactgtacagttctacgagaggcatgtcttcttgtgctacaaaaaaccatccgtttggcctgcgaggatcgaagcgtctgagtttgatcggttaccgaggcttctctcttccgttatattggcgaggaagagtagtatgaagaaagaggtcaagtttttactctactattttctgatgccatcgattcagcttgttcgctgttaacttgcatctactgttttcaagaatatcgcttggttctcataaatctatgtctgattgtttcccaataagtctcccaaataagcaaaaagcatttgcgttcacttgttttggcttacttaaagtatctgtttaaggtcgtaatgagtcataaaaactcttgcctggtgactcttgggatttctgtatgggtcaaataaggcaaagtttctatttttggcacgattctatggctaacaacataataacttgtctattggcttcaagatgggatcttaggacttgcacctccgttctttgagctatgacagtggtgaacttaagtggaaaaggcgtctgtaatggattgcttcttttcggatagtctcatgatgatgccttcatgattgtcttttgctttgtgcctcatgtttttttttttttttttggccattgtttcgtagactcgactcacaatatgtgaggggcatgatggaacagagacatccaatggtgatgtacttatttttcctgatatgatcagatacaggtaaggggtgaagtcttcctagttggagatttcttagatttggtttcgttttttctatcaacagttgggacttttttttgacagttttgatttaacaaaaattgcaggagattgactcactttgatgtggagacctttgtggaagaggtgcttgtgaaggatggtgaatggctgcctggaaatcctgaattgctaaaaggctcatatgtctttgtatgttcccatggatcccgagaccggcgatgtggggtttgtgggccgtcgctagttagtagattcagagaagaacttgagttccatggtcttcaaggtaaagtgtcaattagcccatgttctcacataggtggtcacaaatacgctgggaatgttatcatctaccgatcaaacatcaacagggaagtcacaggacactggtgagtaaggaattacggatttatcaactagtttgaggctatattcatctttttcatgtggttttacaataattttgaatgagaagatcaagaatacatttgtaatggtgttggtttcatgaacggttgtgatcttttaattggtatcttcaaacttcagttgttattagtacattggaagttctctgcaatgtctgaatcaatcataccctgtttttgacttgaccattgaatcattcttgtgtctaggtatggtatgatgaccccagaagatgtacctattcttttgagcagcacatcaacaaaggcgagattgtagaccggctatggaggtacgtacaaagttttcttgttctgtcagttttctcgcagtttccggattagttggtaattggtagattcacacatgatgcttctctgattattaggggtgaaatgggtctatcagaagaagatcagaagaaaactcaagaagggcgatttcagctaaatggtacagtccattccgtaaagatcaatgggaaagtgagtcaagaatcatcggttcacaacgccgatgtttcctgttgccagtcacgagctgcagaacctaatggttgttgccaacaaaatgggaacagctcttcatgttgtcaagacgacactactctgatgttgtcactgggaacatcagaagataatcaacttgaaagtgaaaacaacactgagaagctgacaccaggaagaaaaattgcagaaaagactttctttagaattaatagtgggggatcctctagagtcgacctgcagga

SEQ ID NO: 37373 - DNA, 1771 bp, Arabidopsis thaliana landsberg
  unsure (1)..(1771): unsure at all n locations
gcactccatcctaattttagaaagctttaataccgtgcattgtgtcagactacaaaagggcgaaaagcagagcgattctgttggattatgatggcactctgatgcctcaaaactccatcaataaagctccaagccaggaagttcttaactttttggatgcactttgcgaggacaagaagaattcaattttcattgtcagtggaagagggagggaaagtttaagcaagtggttcactccgtgcaaaaaaattggaattgcggcagagcatggatacttcttaaagtacttttcttctctactttttatgaccacttgtttaaaaatataaaattctcctacttaagggttactaacatgccttgtgtctttttcttaggtggtcaggcagtgaagaatgggagacatgtgggcagagctctgattttgggtggatgcagatcgtggaacctgtaatgaagcagtacactgaatcgactgatggctcttccattgaaatcaaagagagcgctttggtttggcaatatcgggatgcagatccaggctttggttctttacaagcgaaggaaatgctagagcatttagagagtgttctagctaatgagccagtggcagtcaaaagcggtcactacatagtagaagtcaagcctcaggtaagttacctctcttctgctcaatttgagcattaaggttgtcgaagatatctaattatagacgtttgtgcttgttcttgtgtgagaatagggagtgagcaaacgatccgtgtcagaaaagatattttcatcaatggcgcggaaagggaaaaccggttgatttcgtgttatgtattggagatgacagatctgatgaagacatgtttgaagcgattggtaatgcgatgtcgaaaaggttactctgtgataatgctctagtctttgcatgcacagttgggcaaaagccaagcaaggctaaatactacttggacgatactactgaagtgacatgcatgcttgaatctctagctgaagcatcagaggcttcaaacttttctatgcgtnnnnnnnnnnnnnnnnnttgatttggaaccagatcttttgccaggttttaccctcttatgatctcaatcaattccagttatatttgctcactttctgcgacaatgtatgatcttgttctgataaatacaatgaatgattgatgtgcatagatggctaaagaagaggttagacagacaaagaccaggaatagaagagactgggagtttgttggtctgtatgtgtttgtcagatcgaaagaaagaaaagaagaaaagggtagtgagagagtaataatggggaaaaaaacaaatggtgatgtgaagaagctttgttatttgcagagcaatcaatcaaacaatcaaaggaggaggaaaatagatgtgtttgggttcatcagggaaatgtgtttgcaggatgttgaagttaacaacaagcaaaagcttttcctgatcttttttttttaatattcttattactattattattgttatttgtaattggatgatctcttgaggatatcaaatttggattcggctgtttattggatctgaacgaaaacgaaactgtgaagaaaatgtttgtaaagataacgttgcttgtccaatgttgaatttttccttctatttaataatatgcttttcttaacgttggggaagtaacttttttcccgctctagtagtataaaaaatagtgaacggagaattatatgcggttcagtttcagcccaatgggccttacctacgggttttttgtttaa

SEQ ID NO: 37374 - DNA, 2757 bp, Arabidopsis thaliana landsberg
tatctagcaatgaccatacgtaataccctccactcatactcattcttcactgtaaattcaagacagagtaaataattaggttttttcagggattttcagatatacttaaaagaactctagtcatatatatctaacttactggatggcttgatgaatagcgtggatatgtccttcaatgtactccaatctctctgtgtcgattgaaggattgtacatataaagactctgactctgttccgctacttcaccataccctgagattattatagaaaatgttgcatgaggtcttgagagaaacagaaacatataaacagagtaaacagagacacagaaacagagaaacttaagtttgttttaccgttttcagttatgagaatgggaggattgccataagtttttttcacatacttcaaaatgtttctgagtcctgttggatatgtgaaactccactctgatcctccttgttttgctatttgtttcccatctatgttggtttctgcaaagtgttttagtatgagccaaaagttagtcacaaagtttccatcattattattcataaatcataatcaccaaaaaaagacatactcatccaatcaacgccttggtcagttctccaagtaggttgcgtaggatccacgtgtttgatactcttcacgaaaagcgagctatagtagtttataccaacgtaatcgcaagagcctataagtttcttagattgttctggtgtaaaactcggtaatctatctccaactgatttcttcatcgtttctggatagtctccacaagcagtcggatgctgatgcctgccaacatatcgccacaagaagacaatcaaaaacggttttgtgaacttgtgcctcaaagctaattgacccatctatttatatgtagattcgtaatgaagattatttacttgacttttagtcatgacttaccaaccaagcatgaagtccatagctcgattacatccttcgacatcatctggatcactcggatcatatggctcgtaccaaagtggattatgcgcaatcccaatttgtcctttcttaatctgcattgtattcaaatcatatcaatacaacagaacatagtattggaaaatgacaaatattatctattaagggaaattttttaacttacatggtcacattttctaaacacttccactggttctgcgtgcgctacaagcatgttatggctcacaatatatgcctcgtatcccgacattccagcaacactagcgccattaacatacttggagcaccgtcctggcgctttccttcctgtgtcatagcccgcgacactgtagacccacggctcattcattgtgcaccacagactcactctgtccccaaatctctcgaagcaaagactcgcatagtctctgaagtcatctctgcatatacacatcacctaacataaatatctccacaacttgttcaaatttcaaataaatgaattttgcttacataatctgctcgcttagaaaaccgccgtattcatcttcaagatcctgtggtatgtcccaatgaaagatagtaacaagaggagtgatttcattggctaagagttcatcaataacatcattgtaaaacttaattccttcttcactaactcctctatcccttttgccatctgtttttgttttcaaagattagtatcgattttgaaacggcgatcgattgtcgttaaaataaggtttcgaaactgatgatatacttacaaggtagaactcgtggccaagacaattgtggccaagcaatggaaagccgaaacgaatccatgtttatatccttcattctcttaatatcttcctgtacaagaaatcaatcacagatcttcaagtcttgtaactaaattaccttgacaagtaagaaatcgaaaaaaaaaacagaacaagaagagaagaaaagtaccttgtaacgatggtagaaatcaacggcaacgtttccgtcgctagaatcactgattctgtgaggaaacctgttggagaaatgatcccacacgctttgtcctctcgcaccttcattcactgctccttcgtactaatacaaagaaaaaaacaaaacttaaaagtaaatatcattttgatcttgtaatgtttttttataggtcttgattcgaactgattcacctgataagaagatgaagcagttccaaagagaaagcctttaggaaagctagctctaccttttgacatctcagtaagatatgttctatgaagactgcagattaatttcattacgattaaagattgtcaatataatttctcttactataagaatcttgaaacggttgacatcagagaaaaagatacagcacactcactgtgccatctatggttgcttttctcttgtcttgattcagaagaagttggacaagaagagataagaaaagaacgatgatgagaagtagatcttgaaataatttctctggttatagagagacactaagataaaaaggcttgaatgatatgatatataaatgcgtgattgagagatgcagagaattgagaagtcaaactaggattacaattatttttttatgggatttttattattttttcaatcgtattgattgagtcctattgcagctagtttttttgtttgttacaaaaaatatcaagaagaccggtcaacttcaaaattttcagcacactagcatattttaatatatttttttatttttaatttgatattaaatttgtccattgtcgattattcttaccgtgaatattgtctgtctcctaatctcaca

SEQ ID NO: 37375 - DNA, 2189 bp, Arabidopsis thaliana landsberg
caacactacaagaaatatgggtattgatagcacaaaagtatagcgtaattttcgtaaatgctataatagatttttttctggaaatgagactatataaaagctgttttaaaatgctaaaccgaaatatatctatgcgggaagctaaaaatcagttttccgccaacacttaagcctaaaaatcaattaagcgccattaaaaaaaataattccccaacacttagaacaaaaagacttttgtgaaattcaaaagtcagaaaacacatagatcagttcttcgagctctctgccgactagctctccgccgacgagctctccggattcatcgactagctctccgccgagttcctcgtcgcatccgcatctgacaatcttcagccccaacccaatatcggtatgaatatttacccgacaatgtctgttaattcgattctcaattagggttcatccaatttacaatttccggtcctttgcaattagggttctttggatttagggtatgaataagggatgtttgctaatttcagttctatgtatttcagatcttgctaagaacttatctaattcaacgctttctttcaaaggtttgtccaagtcgatagatttcttatgcctttgatttcttacacaaaaattttattgcgaatgtgattgttttttgtatcatacatcttgtgtgttgctgtctgacttgttttctttcttatacatgttttgtgttgctgtctgattcatgcttgttttgggatactgtctcaacggttcaaaataaggataacagataaaattaggcctcgacataaaaaccgtactcgcatacccgaaccggaaccgaacaaaaaaaacgatttagggcgggtacgagtataaggattttacactgatgggtcctatgtaagtgtacccgtgggtatcggttcgggttcgggtattacctgatatccgaaagggtaaaccgaacacccgaaccaaacacattaactcattaaccacccttaaccagttaacccttatgtcgatttaggttttttacttttgttgatttagcttcttccctaacccctacttctcatttcccgtttctagatctttattctctactctttcctttatcaatcataattttgatttgtgaatcaatcctggaaaccctagtggagctctcgacaccgtctctcccgtcagcgttgtccagataccaatcagaggtactttttaatttttcgattacatgttaagattgtaatcgtgtatgacgaaatagatgtttagaatttagaatatgattgtttctgggtttagctagaaacccatttttctattacatgtttagattgaaatcaatttttctgttgcgtcttgtcacttgtgtctagtttggatatgtaatgtcgatggagttagtcaagttcaagcttatgcattcgtttatggttcttagtttcttacttcttagtgtttgaagtttattcttatgcattcgtttgtatgactagtgatcaattttttactcattcgtttatgtttgaacttattagtgtttaaatttaatctgtggttgaattgaatcttgttgcagatggcgtcttgtgatgaatcaattcatgagaatgatgaaatgtcagaagaagagattgaaacatctatttttggaaaatcaaccaagaagaaagataatggaggggcagggggaagtggttctaagtcaagaaagaaggttaggtcttgggtttgggatcatttcaccaaactgtcaactgatggtaaccattggaatcgcaagcactgtgggaaagagttggcgtgaacagccacgtccgaaacatccacttggaaaaagcaccttatcaatatgcgccaggcatattatgtgtgcaaagctgattatgtctacactacctacaaccgtgctactcttggtggaaaaacgcgtgtttgactgtcaacatggacattaaaccaaagagagctgctacagcgaaatctatggctgactcagatatgattcatgataccccatgcgatacgcttaagcctgcacaacataagtgctcccaaggataggagcctaagaccgaatttctggagagcaactaccagaggtgcgctcttagggagaatgaactgtgagtactatcattggataagctagttcgatcgctctatgtggccctgtgaaactcactatcctg

SEQ ID NO: 37376 - DNA, 2133 bp, Arabidopsis thaliana landsberg
gagaggctaagaaaataaaatatgtattaaagagagtttttcattttgctattatcgattatttgtggtaatgcgatttgtatatatacaacatggatgttagtagctacattatagcaaagagaaggtgttattacaactttgattgtcatagaattgaatgcttagaaaaacgggtaaaattatgccgactcccaagattcttgtagatgtacattgcattttgcctcaaaaatatctcatttctctttttacctcttattttaatgacctattgtaattataatatggctcaattattactgtgatgatatgctgcttttgcttcaccaccattcattagttggtaaaagtgggtcatacatggatgtacattgtcgctgtatctttatttaaggattacccaaggagttgacaaaaaaaaagaaaaaaaaaatctatgttcatgtatcaatctcatgttatatgcgtaaattctgaccaaagacaaaaccggtttgtaaccgggctttttcgtaataagcactcatttatctgaaccattctgactatttccgaccgaatgacgtggcaatcagaataagcactcatttatttggcggtctcataatattgtatttatatatcaaaatttgtatcacacagtcaaatactgccttttagggtttcttatcccacaagtaaattagcatgaagagatcaaaagaagagaacgaggaggtgtacaaaaagaaagctatggagatttctacaaaaaacccgaagaggaatggaatatacatgttataccaaggccgaaacacaatttctcattccttgagaaagaggaagttagggttatcagcgagttccgaagctgactttacattcgcaaagtccttttcttgcatgcagctcgagatttcatcggtgtcaaaagggatgctgttgtgttcacacaaatggcaaattatttaggagcgtatgctcaagatatccgaacaaattttaaatgattttagtcagtacctggaatcgtcgtccagcaagaaggaacggctattttcatcttcatttgtcaatagaagttttaagttggaaatcacctgcattgtgaagaccaagatagacactttaatacagagtgtctttttttttggttaatcagagctcagagctatgtacctctggtgatacgttatgatctccatcgtctttgtccttgcagagagtacatattctatataattgctcagtactaagaacctgacagacggagaaagattggaagaattaggttaatggctccttctagagatagcagaaggctacaaaggatttaattttctaatctaaagtcctccatgcattcctgagtttgcgcatgtttgattctgaaacctgtcatttgtaatgtctaattttccttctactctttagtggaattgttacatcagagaagcagagacttaccgagcaaaggttaatagtaagatcatcgtatgtaattgttgacttcggttctgtaacctgaaagaaaaacccataaacattcaggaacgagaaagaagagggagagtggtatactgtcaagaaaagaagacaaaccaggagcactacggcttgtcttgtgtgtttcagttcatcccaagaggatcctacgaactgcattcaagagtagcaagtgaaatcactccctaaatatgtttggttactacaactttttaaggcaagtttttacctcttcagtcgcttggctgcaccatgactctagttcatctaaccctgccttcacttttatgcccatgttgactgtgcagtattcccgttcgaggagaagactgcatggttcagataatagctctagtttaatacgttgactgcctggaaagttgatttatccaagaggtagttggatgaagggatataaacaataacctgttgaaaagttgaacattgatgtattggaaagtttggctgaacatcttctgaacgagaaacagaggaacctgaaagagaacgtttttagtatgcaaatgaagcagtaatgaagcttacatataaaaatattcttacgtagtttttcttccatgtgatgagaatgtaatttaaaaactcaataatgctttgccaagagctcgctggtgaattctc

SEQ ID NO: 37377 - DNA, 3791 bp, Arabidopsis thaliana landsberg
gtttgaaaagagaaagaagagtccctgctacttcgtggaggtagcgagaaccatctgtttctgaccgacctcacctgctacttctggttcgcaattttccccacaggctaaccacgattggttcgagctgaccggccctatttagtttgaaagaaaacagccctgaccgaaaatcgataatatttgcatttgaagactaatccgggctaaatagaattccatgtattttctgaattattccgggttttctggtttttttgttctttgtcaattatatatctgccccattcttcttggcggtccgtggtctctaattgggctaggtttcgtactttgtgcttgtctttcggatggctttttgttgctgtgtcatctactaaataagtaaggaattggcaaaataaagtttcgaaacatgatccaacctctttcccttctctcaaaacatgatcaagataaatcgttgtgatcatctctctatgccgattgtcgaaactcagaggccagtacctactcttgttcgagtcagattgattctcgctcttccgcacacttgacgaccacttcaccttttcattcttgaacacatcttcaactgccttctggtcgtccaaactaaattactaacgaggttggccactagtctctttataaacgccattgattttgaggataactagttgcgtatcgcatcataagcttggcttctctcgagaccgtctagctcctgtgtattcagtgaattggacatgaacagaattcgagaccaaacggattatcttgtaaaaacacttgtccaaatagtcttggtatagcacaaactgtttgtacattgaccaggagaacatagacatcatcgtgcatgctaaaccccaaatcgctccggcttcaagcatctttgtgtttgtttatttctcttatcaggatagtttagtctttagagcttttcagtcttgtaggatcttacgtaggcttgttcatgccatcgtgtaacttgtgagagccacttaattcttgttagaaaaaagatttggataatgaatagatagagaaaatcttaaaaattaaggttgaaagcgtttcacaattgtcgcatagagttataaccattctgtaagattttgatatcaggaataacaatgataagaacttggagaccttataaccagccaatccacaactgaattcggctctgtagctcgttggcaacattgatggctttgtttgctgaagccaatatcagtaatggtcaagtcctgctcaagaaacgacttcacttagtgaggcagtttaccccacacatccccaccatagtacatcatcggtctttctgttaaattagataaatacaagatcaaggtggggacataggtgtatcatatatccaggaccaaacaattgatcaaaatataccaaacagtcggaaagatttaagcttttatactaaacaaatttcttaaactcaccagacaaatcaacactagggtcattgtatagatgcattgcagctgtccaacctacaatcaaaatagtcaatttctttacaatgagacaaaataaaaaaaaacatatacaaatcaagtacttgcataaaagattggcactagaactttgctaggatcagaaactgaaacttgctttgatttctcactgaatcgtaaaacacaaaccgaatcaaagcacaatctcccaaggtcctaaaccagactcaataactcgaccccttgccacatctcataatgtttagcatgagtattcaatattactcttatcaatctcctgattcatactattttaaccgtagcaacataaatactaaacttgtatctagtcgagttaaactggcagacatcgagattgatacagaagccccataagatgattaaagactgaagtaagaatacatacgatcactgagaagctgaaaagcttcactcctagagcaaccctctagtgatataatctttggagaagagttttccctctggaaaccaacagcaacagactgactgctctctccctcattactatggaagctttctgttccattcaaattcagctcaatttacccttactttaaccaagaacacacacttacacacattacaagcaaaagtggttaaagcttctattagttgctaactaaattcttaaaaaagggatcttctagagaatgcaattttacagaaacctccacatttctcaatacagtgactacaaaaaattacaggtttagcaataatcttattatctataaaaatggttcttaagttcaccaattacacacaaagcaataaagtgaaacagagcgtctctctatacagtgagataagctctattcctataaattcgctatacaaaatcgaagaagagagagacaacgaacctcttgatctcctccggttcgaggaacggttcctgtgaggtagagaaggaatctcagaaatcaatcgaaagcaaaggagaaagagaagacgagaatgaacctttggttaggtggagtgtatcgtttaggggcggaggttgaatccaccagtgaagatgatgagttcgggttctgcatctccttccaatggagatctctctgcgtctcgaggtcgtcgaatagcctctgctcttcacgcgctagtctttcagcgcgtgcatttcttaacaccttacttgttaagcggaaaccgaataaaaaaccgaccgaaccggaaatttggttgttaggatttgaaatgttgtgataccgaataacatgttggattgttggtatcagtttctagagaacatgatgtattactgattatctttttgttactcgctgatctttctaattttatttcaccagttcacttaaaaagcaactgatcgcacgtaaatacatgaaataaattttcaagatcaatgtttactagatattgggtggggctattcagccactaagatcaggctgtgatcaaagccagcgactgcttgaagaacacagccctctacatcctctaacaacatcggttcaggctcatcgctcgagcttcctaaaccgagcctaccattcttcccacaaccccaaacccaagcttctcctttctctgttacacacaaggaatgcacacgccctgctgatactgaagctggactttccccatcgaaaccttctacttctcttggcaggttttccggttttcccctaccaagctgccggcttcggttccaaccccatgagagaatatttctttcacccctgttgcagatagctagtgaatgaccaagaccagctgctatagagatcggagattcagttatatcaacaggttttattcctagatcttgtttagaccgacccaactgaccatagatgttgctcccagcgctcaaaagtgtgccatcatctgaaataagccaaaacctatcagacaaaactaatcctctttttgtttaatatatactctcccatagtgtaaaacggtctcatttacttacgacaaaggatcaaggagtgatcggaaccgcacgcaatatatgctaccttctcgttacgcgtttcttccaccagataaggttcccaagcaattggcatatcgttctcttcactcattgcttccacaaccttcttttcagctgcctcaagattcaaatcaccagcagcatggtgacctttcatcgacccatctgtaattgaatctagcagagatgcttcaagtggaagtccaacattgcctactcttccatcagctacataaccccacccaaaaactttaccatccccagtaagcgcaagtgcgtgcccccaacctaatgatact

SEQ ID NO: 37378 - DNA, 1823 bp, Arabidopsis thaliana landsberg
  unsure (1)..(1823): unsure at all n locations
ggaagctgaagcggcggcttgctggaggaagcgaagatgaagacgacgatgacgaagaggatgattcaggagaaacagaggagatgaaatcatcttcagcttctgagcctattcagacgatgtttctgttgggggggggggaagaaacagatcgacaaatgggattaacaggatcgagatacgccatggatgaagatgaagagtacgaagaagacgaagaagatgagaacaacgaggaagaaggagatagtcatggaggaggagaaggagagcttagttgctgcgtttgcatggtgaaaataaaaggcgcttcttatacaccttgtggtcacacgttttgtaagctctgttctaaagagcttatggctcagaaaggtcactgtcctgtttgcagcagcttcgttctcgagttccttgagatcttttagaaacaaattttgatactttttgtttatttttggagaaattttgaaacttttatttttcttgggagaaactgttacatgatcaaagtcccaaaaattttattagaccatctctgtttgatcttagcaatggttaacaagnnnnnnnnnnnnnnnnnnnnnnnnaggttgtctcacaatataaatctgatctccgactttactgctcgagtcttgattcctataccatgtccatagtgcccatgtctcgttcttcatctgcataatgattaatctttttagttataaacttaaggctaaactctgttttgatgcgttaaggagttaactaaaaacagtacctctaggattccatggccaaagctgctttctctcagggcactataatcaggttgccgatcccaacagaacttatcagacggcgtgaagttccacgcgcaaaacccacccatgactggatcgggcgtggttaacggctctggacatttaccggggtcatctgcatgctcgatcgccatcttttcacggttacctccatcaccaatcacaatgtaaactggaccacatgggtccagttcgtaattgtatactctgttcgaccgttcataagcatgcacctggaaataagttttcacaaaagaaaaaacataacggtccatcatatcaaatcgaaaggcaaagaaagataagtgacagctttttgggtcgggtcttacatgtccgttaaagacaatgtcggtaccataagaataaagtaattcctccatagcttctttcatacattctgcttctctgtaatgcgctgtataagaactataccaaggtggatgccaagaagctactaaccatggagttaccgatctatcgactttagccaaatccttctttaaccattcatattgttccgctgcaaaacacaagacaaaattgttaaaacagagtgcaaacagtaaattaagaggacatagtttgagaatattataaaacctgatttgtcatacgcaatgtaggcaccaagcataacaaagtgaatcccaccagcgttaaaggaataatatagcgtagaagacgagccgctttcattaaaagggaaagcgaatcttgaactataagcttcaaatgtcttgttctctgcttgcaattcgatctcatggttcccttcaatcaccatcaaaggaactttggaagtcagattctccataaacctaccccagtagtcccaacgtggctgatacgtctcatgtataggtgtctcagggaaagagcaagaataacaatcagagctagtcccgtttgttagatacaagtttgcattactcacgtcgacgatcaataaaatgagatccggagagttatgaatcaagtgactagttgtatcagtagtattatcagtgaggc

SEQ ID NO: 37379 - DNA, 4465 bp, Arabidopsis thaliana landsberg
gccacattcttcttttaaagcaaccctttgaggaaagggtttatcaagttttacctcgaccaagatcttagcttctcccatttgggttggatccagccaaggtctgctagttaacatagtctccccaatccccgaagcaatccatttaatccctttaaaagagtataactggttagggatgttcttgagcgtaaccaagcaggaatcgttgtgatctccggaacttcgaaattggcaacgggtgaccaagttgagacgaacatcaaacaatcatccacgtgccacaatgctctctgaagaatccaacagcgagttgcctcatctggaatgtgaaagagataagaagactcactcagtttcttactaaatattctacaatttcttccccaaatcttattcataacagcatgaaccaatcctccagaaggagcaacgcattgatagaattgtcctacaataaactccttttgattctcaatcccttctaacaaaacatgactagggagatttaccaaaggggttccatgctctaagtaatccggcgtagtaactcgatgcaaattacgcttcgattgatccatctttgcagcccaaggataatcctttgaaaaaactttcagagactcatcctcaactgttcgagacctatcaataacctttgaatccttactatgatcaataccaacagtagtcatccgcttcttaccactagagaccacaagtgaaggccatctctgcgtagatgatgtgtctgctagcttgacctgctgcaagatgatgagaggtagaactgacgttgcaaggaacctgccaagctcctttgagagtcgacaccggagaggcaggggacttctctggacaacaagttcaattgtcggagttgcaatctcaatcaaactcttcactaacggtgctaactgagacttggtagtagctgaatcaattgaaaccgccggaagaaaataatctcgaatagatcgagagttactcaaccctattctagcagctgagagaatcaacggtgtatttgggggaggcttaaccggtggggaagagctctcctgcgtccacctatgtaaataaggccacctagggtctggaggatcgacgacagcgacgactcctccgggaattgcttctactcctttgtcgcgagatgaaccagaacttgaaatcattgaaagactaggtaatctcgccggagaatagcagaacgagaagcaatcgacaaattcgcggtgattacggcttcgccggagagtagcagagccgagaacttttttctttgataccaaaaagaaaaataaatattctaacttgaaattgatgttatattcatagttagatggaaaatataaaaataaaaattttttttgttaaattataagaaaaaatgataattgtattagtggtacatatatattaaaatgacaaggattgtataaactttaggtcacataattaatattctatattctaatgatttatattatttttttagtcattacgtatatatatactctctatttaccaaaatatcataatgttaatgtacctcaatggttgagtgtctcttatgagcccaaaggtcagctatttgattccccttgatcgaaaatttttcttcttattttctaatgtccagaacgacatcgtttttatttcacggagattataatggaaagtttcagccccgatcgttttgggttgacggaaacttaacgacatgccataaatggtcaagtcatcaaaacttgatcattttatcaaaagtaaaactaaactttaagatttaaatgtcttcttgaaagttcatgcttttttcgtcccaaatttgaaagttagtgatttttttgacatttttcccaataatcatcaaacaaagaaaggttatagaaggagttcaagatcagtttagtagtgagttgagattttatcggctattgctacatatgaagaagactaggatcggctattatcagcaaaggcagttaaggctatcgaggaatttattaggactatcaagattattatcaaaagaattcttatgggcaatttggttgatggaaagatcaaatttgccaaggaaaaataaaggaagtgcggaaggctagttttttattggaaaaaactagttttatcgagaaatagtaaatttaggccgagacaagcaagcggtgatcgaaaaggattgaatgcgatacaaataggtttagtagagtagttaaatgacttagtcatttatttttagaggaatagttaatgatcattgtccgcatacgatggtcggagagttctttggtacgggcgtgtaccgtgagcgagcggaatgaatggttgttaaggccatgtcgtcgaggtacttgtggaataggcagctgagacatgagcttggagtgtgtggtttgtgtgccactacacgtttaggataggatcaagtttggataatgataagcttaagtatggatatgcatgaaagtggataagataaggataagccttatccattgcttagcttgcacgccaagtaacttgggcgccaagtttcccacacttataaatacccacgagatttcacttgtagttcattaccatcccacaccaaaacctttagcttaaaccgttagatagctagttattccgtcagagtctgagtcgggtagaagttggtcgagtcgggagtcgtagtcgggtaataaggtacgtagttccgcccttagttttttcttcttttagaattgttttattaattttgttttcggtccgacgcttagatccatcgttagtacacgttggagatggctcggtcggatcaaacttattaggcagtcaagggtagaattttaatctctcgacaataaggcgaaggtgagtaccgtagcgtgtgtagtagcacacgactaggtttttcttttgggttaatgattttaggattgatgttgcatgtttatacttagtgtaaattatgcattacttgttgatagtcggatctacgtttttacgtaagatcggcttggttgtttgattagatcttgcattcatgcttgatttagtttgggatgaagtatttggtgtgcttaggctaggcattagtttagccattatgtttgattgtggtaggatttattatcgtatttattggcggtaattgttgcttgtttgtttgtttgttcctaatttttattacgaattaaattgttagcaagcatgttaggttgtttgattgttgattgattgattgctgttggttaatcttgttttggcttgattaatctttgtgtgttagttgcttgctagtaggttttattactagtagtattaggttacattaggctcgtagataagtaatgtggttagtcatttttatgactaaggtgtgacgatgtcgtgattgtcccaatagctcagaatggttcgctaccacccgagactgcccaacggggtagtaaaagttttactataaaggagttggtcccttttacacggtttggagtggggaagggatgtgatcgttttagactttgtgtctagcggtcggagacattgccttatgggaaatcagcatcgtatagtatagggcccgtaggatgaagagtcgttagcatgctagttttagatttagtagtttccgctgcatatactctgtaaagagtattcattgcttgtttgtttgtgttgtgtgatttcttgtcgagtatactcaatcgagtatactcgtattgattgtttgattggggattgggattgggatttttttgttatttgttagaaacccggactcactcagtaatcttagattactcaagattctagtttttgtcttacaggtaaccttagttggggagaccttaaggggagcacggacgttggggaaccggtgtaaagtttgttgtctttgtaaaattagatttgtaaattgactcgatttgagcattaggctggggatcccaatccattgtaagtgttttcatgctttattgaataaaggagattttctttcaaaatctttgtgtacttctgatattagccttgtccggactaacacaacttacggacatggtatgggttgaaaacccttaggctgtgttcgtgaggaacgaggttcgaggatggcctgaccttggtaccagatgtgttctgggaattcggtcggatcgtctacgtgcatcaaaagtaacgcttctggattcgttcttagtcctagaacggttcgggggtgttacaagagtggtatcagagcatggttttgttcatgcttaagggacacaagttttcaaacgttttatcgagtcaaaatgagtcgcaaagacaactttaggaaaccggtgcatccatgtgctatcgctagagggattaggtagaaggattaggttttaccccttggatgttagtgcagatttagacttactgtatgaacaaaggtcgaatgtggtggccactacaaggctaagaatcaatggcagag

SEQ ID NO: 37380 - DNA, 1610 bp, Arabidopsis thaliana landsberg
ttttctgggatttgatgacatgatggtgcaatgtctggaaacatttgcttgttagttgtgtgaaatcgaaggtttttgttccttgattgtcacaatggaagtctcttgttgtaatatatgaacctttctatttcaggagcgagacaggaacctattatgcacttcatcttggaggctcctactttaggataataaaggttcatctaggtggtcaaagatcatctcttgaagttcaagatgttgaacgacattccataccaacatctttgatgaatagcactagcgaggtgacaaggctttctccaacatttttctattcgaagctcaattcttatgatctgacagattaaatgctcagatgattcttgttacttgatttttcaggttctcttcgactttctcgcatcatccttgcagaggtttattgaaaaagaagggaacgatttcagtttgtcacaacctttaaaaagggaacttgcgtttactttttctttcccagtcaagcagacatccatctcatcaggagttctaattaaatggaccaaaggttttgcaattagtgaaatggttagtacagggatgcttacattgcttcttatattctctgcaaactgtgacttgtctttgaaatatccttccaaatctattaacttgatatcctgacgcactcttcggttgacaggagttgatgcccttgagctttaaattattacttgagttgtaattttgtgaaaatggaatccatctcttggtgttttcctgtttggtgtgagtcaaacatattcaaatttcaagttatttaatcgtataacaagcaaatccttattattttaggttgggcaagatatagctgaatgtctacaaggagctctgaacagaagaggcctaaatatgcatgttgcggctcttgtaagtgctttgtcactctgcaacagcatcatttccttggcaaaattctggcactaccaccaaaaaatttcaatctttctttttgttttccttacctttttctttatgaaaatatcatgaaatgtttcagttttctctatgagcaggtgaatgatactgttggagccttgtcgcttggatattatcacgatccagatacggttgttgcggttgtatttggaacaggtagtaatgcatgttacttggaaagaaccgatgccataatcaagtgtcagggtctgcttacaacttctggaagcatggtactaagaatcattgcatggtctatttttagaaaccagctttagacccaaaagaaacatgtttaagattgattccctcttatgtttcaggtggtaaatatggagtggggaaatttttggtcctctcatttgcctagaacttcgtatgacattgacttggatgcagagagttcaaatgcaaatgatatggtaatctttgccatacttccctgtttttccgatttggtattgcgttattagtttttaaccaattaacgtctacatcatttggggtttcttacatagggatttgagaagatgatatcaggaatgtatctgggtgacattgttcgtagagtaattctccgcatgtcagaagattctgatatctttggacccatctcgcccgtgttatctgaa

SEQ ID NO: 37381 - DNA, 1740 bp, Arabidopsis thaliana landsberg
gcgggaaaattccttgagatccaccaccaatctgattattaaatctcaaactttcagtgtcttgcataatgttatgatacgggtttctcgtaacattttccattggtggcaagagttgttcattggtctgataatcattaccacgatcctgtatcaagggtagcatatgaaaacagaaagtaagatttcttctgaaaagatgtcacacattttgtaaaaggtcttaaagagcaaatgataattaatttagcaaattacttgctgagactaccgtggatccataagaagcttgagtttttgaatttctgggatcatggttgtctttactaataaaatctgttcccggttggttttccacaatagatgataactctctaatcctatcctgtgatttaaaaatttcgtcacaacatgttcgaaaggaatccatgaagagtattcacattccagcagaggtctaataaggccaaaggacatatgcagacaacagtaatccaaggaaatgtgtataaacactaaaattaagaatttctagcggttgttcgattgggaaactacaggatagagagcttacattgcaagctttagtcttccattgcaactgatcatgcaagtgctgcatacaaagaaatatggaatatatgttgagattgtttagagtataaatttgaagaaagatgaagtgaaaaacaaatacctttatgccgctggatatagcggtagcattagcaacacgaggccaaacaccatactcagctaataaaccaagtaaggacgtcatgaatatatacctctcgtcttctgtaacctaaagatagaaagtgagagaaataaagacggaaaggtaaaaggcaatcaaatatttgaggttactacataatttgaggcaagacaattcacctttaaatcatgtgccaacttcaaattttcttcaagatcaccttttctacgagccaactcattcaacgcagacgtaacagattcattttgtttctcatcaattgcctaaggaaataagaagctgttagtcaaacaaacccagaagccaaagatgaagactttcaattccatgaatcaatctttatagaaaagcaaaagacaaaccactcgaagatcagcacattttctctctagtccatacttctcattcagcagctgcatatcctgtaaccaaaagatgcaatttcactctcaagttgattagaaagattcatatgagcgagcatcatgttctcataatagtatataccttcaaacaagcagcagcaattcgttcctggagactatgaatctcctcttcttgtgatctcactttcgcataagagtgcctgaattttcaaaagctaatctaagtttgattcaagaactagaaatcataagattcttaaatcagcaccagtaccatttcttcaggatcttgtattaacttagtattagtatcttctagcttcctcgacgcaatagtatctttctcaatctcatgcctataagagagacagatcgaagaacaagccactaaatattcaacaacactgcttcaaaatcaaacgctttgtttgtgggtttaaggcaaaacagcgataccttttgattgattcagaactccgattatcatccatcgtatttaagtcgtaaaacgaagctcgactttaaggtcatcggatttccaaagtctatgatttttgcttttttttggttctctatttcatctatgagaaaactttaatcagcagtcaattt

SEQ ID NO: 37382 - DNA, 1548 bp, Arabidopsis thaliana landsberg
ttcaatttcgaagattacgaaacttgaacatctataattttctaactaaggctatgaacaagaattctttgcaatggacctccagattttaaccaatatcagcctaaagacgttactaaattcatcaattcctcaagcctaagcaaatataatgcaatggaaacaaaagagtaaataagaatgcattagagaatcaaaataaaagatcaaatccataatccaaacttcaacaaaacatcttccacaatccaaaacaggatccacatttttcaccatgggaaatgaaccctagaaactaaaaaacacgataacaaaaagctcaaaatgaattcctcacgaaatagtaaatttcttcagaacctgagcttggtaaagaaccatctgttcttaccagtcttgaacctctcctcaagcttagccttagcttccttaagagcagcaaccttcttatccttactctgaagagcatcaagagtcgctacttccttgagatctacatcgagtgtgtaacgtgtaggcatcagatgctggtaattcacgagcttgatgaaacatttcactcttgatttcttcgccgtcttcttcgctgagtctttgcggatgactttgctcgggtacttcttcagtccggcgacgaggcagtgtccgtaacgacggtcactggttccgtcatcgaaggatttgatgatcactgcctttttgccggcgtaacggccttgaaggaggatcaccgctttgttctgcttcagaaacttcaccattgtttctcaccaccgcaaagaagaaaccctaattgaagagatgattgtctttatatagtgtgctgagtaaaaccctaatttgttttatttcaatatcgaattcggcccattaaaatgagatgatcctaaaaggcccatgtaagtttcttatatcgttttaggccctgaaaccaccaaattcgaaaatatttttttgaacaccattttatatgttttgtttggacatcgttttatatgttttgttttacaaaactaaagtcgagattcgtaagctgggggagctctgcgggatggagaacgtaattgctgtgacggttttacggttaacattggacgttgttctgcacctctaccagaattacggagagtctactatgggctttatatcgcttgggagaagcaaatcataagagtggagctggagattgattcgatatttgtagttgggtttctcaagacaaggattaatgattctcacccaaagtctttccttgtacaattgtgctatggccaggggcggacccatgttgaagctgggtgggcatgtgccccattttaaatcttataaatagtgtattagctatatatgtacaagaaaatttagatagcattgatggttttacagtaaagtgtgtttcatataaacccaatttcgattcccaaaactgtaatttaggtataatgttttttaaaatcataatataatttagctaattaaattttaactagtattttataaataaagtgccccatatagaatttgggtctagatccgcactggctatgg

SEQ ID NO: 37383 - DNA, 4261 bp, Arabidopsis thaliana landsberg
aaacactctaaatatcatcaacactatataacctcagtttttgtatgtcgttttaattctgtcatcagctttgatatgtttaaccaacatgattttgtatataacaatagtttagcgatttggttgttctccttaaatagagatccaccaagtcatatgtgatgtggacaccgttttgaccggaaaagtcgacgaattatcatgtttttcaaacaaacttgacgtaaaaggttcaattctttgtttgcaacgacgaactcatgatcacttctcgaccgaatctacaacgaaacccatatgtttcttctacccaaaaaaaagtaaaaagagatcttcgagtcatgttgacctttacgacttcaactcatatttgtcctttcaaaatttgtcatggccatattgttgtctcatggagaaacacttttgagccaacagtcggaaaacaaccatcacttagcatttttttattttaatactactatttttttttttgtaattagtcgagtgtaccaatcccaaatttaatgggtatctttcataaccaaaaagaaaaaagcacaaaaacaaaatactactactatactataatggtgaaacacacattacattagcattaaccgctattccttaaaagatatatgagcagactacaaggaagtacatttaaatcagtgtgctaagttttctcaattatcaatctaataattgtacttacacaaatttaccaaatcatctcaccatttagggcatacaatttttgctcaataatggagcttgaaaagactaattatagaatgtctttttggttgacacaagctcgcttcttcatgtcgtttactttaaaaattgtagattctttcacaacttataagattctatagcctatttgattatcctttaggatgatgagtataatatctcaaactataaaataaaaatgttcacatcaataattgaaaaaaatgcatgtatgaattcacgaaaatatggttacggttgtgtgttgctgctagacaaaagtctttcatatattcagttatatttcttaaaactaatcaaatggttttatgcaattttggcgagtagagagaaaaagcgcgtgggataaataaagaaaggcgttataaaaaaagagaaaaagtcaaccgagtagttctggtaagagagtctcgtgcattcgtaaggtttccaagagtccacatatctatttcatcatcctcttaacgtttttctcacttacttttttccccactcttaattgattccgttgataaaatttgttcgttatatagaaataatcagaatataattagggttaattttggggtaaagggcattcaatcaatggtttggcttgattcttgtttgaaattctatgtttaaaaagggtaatacttacaaacttgactttattagtattttaaaaaatgacaaaacttaaaatggatttgaaatctagcatatttaactttaatacagttttggtttaagtttcactctcttttctatcaaaaatataattttaaaatttgaaagatgttaaaatagacaaatgtcattagtttgttcaaatttagttatgtttttaatatacagacaattatattaaaatactaataagaaagtcagatcagttataaaagaaagtcaggtcagttttaagacttaagtttgagtcttttggatttgaatttaatagattcgcttttattaaaaattgttgaaacactttttaaaaactaaaacatttgtcaaaaaatgcatttaaccaaaaaaatgaaaatgaaaggtagtaagtaataaaagaagaaaacaaaatctaaaaaaagtgtctttaaaatctcaaaattaaaatatacaaaaaaagtacaagaaaaagaaaagaaaagggggaaaaagagagtcaatatcaacatgcaagtgtgaatattagactcttcttctctcatcagttaccccaaaactagggtttacccattttcatcatcttcttcttccccacatcactctctgaaagacaataagagagagagacacacacaccaaaaaaaaaacccattgatttttaagagagagagagagagagactgagaacgaagagcaaatgagagagaagttgaatcaaatttccgctttcgttctctttctctctcctccatttcagtaataaacactccttcctctttaatttttctgggtttcttcttcttccctcttttgttgtttctgtgtgattcagttctcgatccatcttttcgtgaaaagtatcaatcttttaattctctagttgtttgtcaaatctggttagtttcttctcttgtatttatttgatgaacttcggtagtctcttcgataacacacccggtggtggctctaccggagcaagacttctctccggtttaagttatggcaaccacaccgccgcaactaacgtcttacccggtggtgctatggctcaagccgcggcggctgctagtctcttctctcctcctctaacgaaatctgtttacgcttcttctggcctctctctagccctcgtacgacgtcgtcttcctctactactaatacttatctttttatacttaaacctaatttgtgttttggataggagcaaccggagagaggaaccaaccgtggagaagcatcgatgaggaacaataataacgtcggaggaggaggcgatactttcgatgggagtgtgaacagaagaagccgagaagaagaacatgagagtagatctggtagtgataacgttgaaggtatctccggtgaagatcaagacgctgctgataagcctcctcggaagaaacgttatcaccgacacactcctcaacaaatccaagaactcgaatcgtaattatacctttcgatccaatatccatattgttattaccatcatctcttttattcgatctaatgaatctgagtttttgctttcagtatgttcaaagagtgtccgcatccagacgagaaacaaagattagaactaagtaagagactttgcttagagacaagacaagtcaagttctggttccagaatcgtcgcactcagatgaaggtatgtggagattaaatcacatctttaatcccaaaaaatgaattcttttgtaataaaatcatattgtggcgcagactcaattagagaggcatgagaacgcgttattgagacaagagaacgataagttaagagctgagaacatgtctattcgtgaagcaatgaggaatccaatctgcaccaattgtggtggacctgccatgcttggtgatgtctctcttgaagaacatcatctccgtatcgaaaacgctcgtttaaaagacgagcttgatcgtgtctgtaacctcaccggtaagttccttggccaccaccataatcaccactacaactcctccttagaactcgctgtcggcaccaacaacggtggacatttcgctttccctcctgatttcggcggtggtggtggttgcttactccgcagcagcagcagtcgacggtgattaatgggattgatcagaagtcagttttgctggagctggctttaactgctatggatgagttagtgaagcttgctcagagtgaagaaccgttatgggtcaaaagcttggacggtgagagagacgagcttaaccaagatgagtacatgagaacattttcatctactaaaccaaccggtttagctactgaagcttctagaacctctggtatggtcatcatcaatagcttagctctcgtcgagactttaatggactccgtaagttttcaattttttgcgattttttgtttttattcccacatcttttttttgttctctgattatattttttgttcatcagaatcggtggacggagatgttcccgtgtaacgtcgcaagagctacaaccaccgacgttatatccggtgggatggctggaacaataaatggtgcacttcaactggtaaaccaaatatcttcttaatcaatcacattccggtttaatgttatagtaaaccggtttgaatatactaatgtacgtacgtgcagatgaatgcagagctacaagttttgtctccactggttccggttcgtaatgttaatttcctccggttctgcaaacagcacgcggagggtgtgtgggcggtggtggatgtatcaattgatcctgtcagggaaaactctggtggtgccccggtaatccggcgactaccatcaggatgtgtggtgcaggatgtgtataatggatactctaaggtaaatcaacccctttccccccaaagcgttacata

SEQ ID NO: 37384 - DNA, 1217 bp, Arabidopsis thaliana landsberg
ttataatgtttgaacatttagtttccaattttaggagattcgataaagggcgaatatatggttggtgatgtagatatgccaggataaagcacaagcagactcatggtttaaaggtcttagagctgtgataacaaagcatcataacattagaaactctgtgaatcatcggagtagtaggggagctcaaagttgcatcaatagtcctgcgggttttatgcgaaggaaacagaatcttggacttcttgaagagactcctgacgtcactcaggtaactaaaagacactttctttaaccatttatatattgttttcgatttcttgatgtatcttgttatgttcttgaagatacgtagcttatgtggaagtccatcgacgttacttgaagagcggtgtttgtcgaacgggttgtcatgttcttcagatagttttgctgaatctgatgccttgggtccagtttcttcttactatgaaacagattatgatttcaggaactcggattgtgatcgtagtacaggttcagaactttgcaggttttcatcacaaagatttgctgcttctcctcctctttctatcataacacagccggttacaagatccaatgtccttaaggacattatgatatggggagctataacgggtcttatcgatggatcgaagaatcagaacgatgcgttgtctcctaagcttttggaatctgctacgatgtttgatgtacagagtatatctctaggtgcaaaacatgctgcgttggttacaagacaaggtgaagtgttttgttgggggaatggaaatagtgggaagcttggacttaaagttaacatcgatatcgaccatccgaaacgcgttgagtctcttgaggatgttgcagttcgatcagtggcttgtagtgatcatcaaacgtgtgctgttacggaatctggtgagctgtatttatggggaattgatggtggaaccattgaacagtcaggaagccagttcttgactcggaagatatccgatgttcttggcggatctttgactgttttaagtgttgcttgtggcgcgtggcacacggcaattgtgactagttctggtcagcttttcacttatggtagtggaacttttggagttcttggacatgggagtcttgagagtgttacccagccgaaagaagttgagtctttgagacgcatgaaggtcatatctgtctcttgtggaccgtggcacacggctgctgta

SEQ ID NO: 37385 - DNA, 2374 bp, Arabidopsis thaliana landsberg
gaaccttggtgttttgacacatgttcttgagtctatggactgtgaatcagtgagaacgcagttgtatcaatttgcgcgagtgcagacacacaaaaagcagtttaaggagctttcctctatgtgtattgaccaagagttttcagcgcatgatggctccatcttagcaatgaagttttctcctgatgggaaatacattgcaagcgctggggaagactgtgttgtacgagtttggagtatcaccgaggaagagagaacagacacgtatgaagtagctgaggttgattctggtgttcactttgggatgaatcaacgttctcagattgagcccctgaagatcaacaatgagaaaactgaaaagaagtcaagttttttaaggaagtcatcagactcaacttgtgttgtattacctcctaccatcttcagtatatcggagaagcctctgcatgagttcaaaggacatataggtgagatcttggatctttcctggtcggagaaaggggtaaacatcttttcaaactcttccctacatttatatagtctctgattgtgcccatcctcttacatttacctctctttggtgcagtatctactgtcatcttctgttgacgagactgttcgtttatggagagttggctcttctgatgaatgtcttagaactttctctcataagagttttggagacgatctttctttatatgtcttcttcaatgctgcttttggtatggtttcttaattaggcacattctctcttccttgctacagcgacttgtgtggcattcaatcctgtgggtgacaattactttataagcggatcgattgatggcaaagttcgtatatgggatgtgtctcagttccgagttgttgactatactgatataagacagattgttacagctttgtgctatcgccctgatggtaatggcgcagtagtaggttctatgactggcgagtgtcgattttaccatacaactggtatgttatttaccttgcggttgattaccaaacttgcatctagagtcatctatgttttaatgtctgcatcatctttataatttcagataaccagctgcaactggatagagagatcagtttacatgggaagaagaaggttcctaacaaaagaatcaccggttttcagtttttccccggagattcagacaaagtgatggttacttctgctgactctcaaatacgaataatctgcggagtggatacaatctgcaagcttaaaagaggtcctagtcaagtttcttctctttcttcaggatatgtgaacgatcttgtgagtttgtttgttattgatttggtggatatattgcagcttcaagtcttcgaacaacactgatgagtccaacatttgcttcattcacatctgatgggaaacacattgtctcaacaatagaagactcaggcattcatgtttgggacttctctcaacccaacaaaaaggcatcttctcagaaaccaaagaccatcagatcttatgagggatttctatcgcgaaatgtgtctgtggccataccttggctaggccaggggaaggaggacagtatcatagcagatttggaaaaaagttttgctcatttcccggttcccttggactatttctctccaatgaaaggagcaacaacgtggccggaagagaagcttggagtagtagcaggtacggctgcagcagcggtttcagctacagtcagcagcagatctaagttgaggctcttaaaaagtgtgtgccagaacgttcatggctcgacgcctcacctgtgggggcttgtgattgtgactgcaacgtgggacggtagtatcagagtattccataactacggtttaccaattcgagtctaaagacagaagaagcagggcatgtagattttgaagggaattgtggcagtgtttagtgcagcattctttcattttgtttggaagtcacttagccttattcttatatacacataagaattgtgaactaagtgggtctctttgcatttgcttttaattggtactatttgtaattgtatagtgtgagatctatttgtgtgtgtgtgtaaagttataaaaatacactctttcactaataaatgggcagctaaatctctttgtgatcttcatagcagctctgtatattaggaggattgagacaaaccctttcgtggagatatcatttcatagcgttggttgaatcaaaacttgtaggcgaaaaggggagatcaactaaaagcctcccccgatgagaccatgtttgagtacccgcattccaaactcatactgataacacagaatgtcatgttacacagacaactaaggttgaggatgatgaaggagaaaacaacagtggcacgataagtcttctaagcgagaaggtagttttgtagct

SEQ ID NO: 37386 - DNA, 1251 bp, Arabidopsis thaliana landsberg
cattgaaaacgaatttcgaaactcgagagatcatcctactctcctgaagatttttctcgggaaaatcaaagagcaaatgagaaaatcatgaccagcaaaactcaggaaagtattcggaaatcaaaatgcgagatgattttagatcttcgaatagtgagagcaaaattagggtttatttggggtaacaatgaagcttagtgagtttgagaggaagagaagagatctatgttggttcttcttcgtcgtcgttaggtgagtgtaacagtccatgtgttgaaaagagaactctgatatactcacttcagagaacactgggtcccacctactatttttataattctctttcttccgatttcataccccatattttaagaatgaagctattacaaccccaaaattaatgattaaagggactcaactaataaatcttgcaaacttaacccgtgaacaaaaaataattgcacaaaagatggaatatacacaaagaagagatatacaaatagattccagttgtatttggtcaaagagcaaaatttgtaagacttaaaaggtcgtagaatcatctattgttgtaagtgtcccaatcgaagtttgggtgagaataagcttcgtaatccacaggtccgtcgatgatgctatcgacggtctgaatacttcttagtaaagctgggtgataccggtctgtatccgaaggcaaaagcttgtacatcacaagcactccaagtgtgaatatggcttgaagctttgtggaatctcctttaactgagaagaagagcagcattgagacgaggtacaggtcgacacagaatctcatgatacacaaaaccgtgtccattagctttccttcattccctgcagggaagccacggactctgtacacgtaaaggaagttgtatttgtcgacaatgtatctgtaaccaaagtaaactgcgcctacagggaccacgagtggagcgaatgaagagtatatcattgttaaggcaaagatggtgagattgaaggcgtagtattgggcaaagtcgaatttctgtttagggattggtgaggttcggctgattgggtattcagagaggtcttggctcataggttctatgtccccgaatcttggagactcaaacatgttttcagggagaagtggtgtctcaaggttactgcttggctcttgattttccaaagcgtactcttcattttgctcggggacaagctgaagcatgtcattcttcctgaacttttgaattttcttcttgatcc

SEQ ID NO: 37387 - DNA, 2103 bp, Arabidopsis thaliana landsberg
ggttgatctttctaatttgttctcaggggttgctaaagggaaaggagagagatgggtggtgaagcaggaagttgtttctgttgagctaccagcaccttcttcatggaagaaattggtttgttttctttgtttcatacaaagacttagaatttgttgtatatgtgtagtgctgcaattaccaaatctttttctttgaagactctgaatatggtagcttttggtggcgaaatgttagtataagtgtaaataactttatgttgattaggtgattcaaaggttatagacttagaaaaagccacatttgattgtgtttgatctactatttctacttctttgttcttgacttaatgcctcattttgactatgtttgatttacttcttacttttcccgattcttatggattttaagccacttgtaaacattgtttaagctacattaaggtcttctttagaatttaatgtttcagcgttttgaacctcaaattttcatattttcagaggtttacattaactgacttgtttttgcagttttaccccatcaaagtgggttcagtgaagaaaacagaggttgtgtttgtggctccaacgggtgaggagattagtaacagaaagcagctggagcagtatctcaaatcgcaccctggaaaccccgcgatcgcagagtttgattggacgactagtgggacacctaggagatctgcaagaatcagtgagaagactaaggctacgccgtcaccagataaagagccacccaagaagcgaggtagaaccaaatctccagtgtcaaagaaagatgcagaaggtgagaaatcagagggaggaggagaggaaaactctcatgtgaaagatactgaaatgaatcctccagagggaatcgccgagaatgaaaatgtgaccgataagaatggctccggtgaaactgagagggtgaatgatgcaaaagaaaacattgttgctgaggaaactccaaatgcggctccagttcaagaagagggtgagtcgatgaaggagaaagctctggattctgttgatgataagagtaaggagactgacaaagaaaaagatactggctcaatcgaaaagaactcggtagatgtagagaagaagaccgttatagctagtgatgagaagaagaattctgaagctgagaccagaacccatgaagaaaatggtctgaccacagaagctgaggggaaagagaaagcagcagaaggagaagctaccggatagccctgttgtgctctgcttctgttagctcatgaaactgtaagtcagttgtttctatcaatctattgaagtatatggtttcctttttgcttcctaatcggagcattatcgcggtgaaaggtgttgttaggctgagatatgtattatgagatatgtgcaagttctgtttggttgtaaggttatgtagaggatatattattgactcttctctaaaaccattgcaatcactaggtgttgatgttttatctttatgctacaatctttagtccttttcgtatggatggacaatcaagttatgaacaagtcagattaaagatccacacatagattgatcttctagatttctttttatcattggttcaatcttcatttgaacgccataaaatgggaaacccaaataaaaaaatggaagaaagcagaagaagattcaagaggaaaaaggtaaaagttttgctttgagggtaaagtaagaatctaatgcaaagaaagacttacaatgttagttttcttatttccttgattccatccttttgcatggtcccagggacgagggtttagaatctttctattaaggaacaacttcatagtataaactcttattgttcccattttaggattaaaaaaaaaacttgctctgttttcaaaaacatcattcgagacagtatctcaaatgggttattgtgttcctcttcgaaagtctccaacttcacatatggttttctcttctttcttcctttcgtttctcttagtcttctctatactctcttcacaaacggccgtagcattcatcggaacatatggtgtaaactacggtcgcatagcggataatcttccgtctcctgacgcggtagcaactctccttaaatcagcaaagat

SEQ ID NO: 37388 - DNA, 1342 bp, Arabidopsis thaliana landsberg
  unsure (1)..(1342): unsure at all n locations
agagaatcctatgtcgcagtcatttggaaaagattcccattggttacatctttcaccttccgagtcaaactatgcaccttctctttcctcgatgattggaaaatgcagaatccaaagcagcaaagaaggtgatgttttactatcatatttttcttttctgtctcccaaaccggactatagagcctcaattggttgtaatttttgaaatggaaaaagttagatctctagttaaaattcatgatgtaataatataggtggcttaagtaatttacatgacaataagacttgaacatatatgtgcagcgattcctgataccgttactctaaatgatccagcaacgacgtcaggccagtctgtaagtgacattggaagctctgttgatgatgaggaaaagtcaaatcctagtgaatcttccccggatcgtttcagccttatttctggaatttcagaagtgctaagcattctgaaaattcttggagatggccacaggcatttacatatgtacaagtgtcaggtactttactaagacaatgtgtgtattgggttcatattcttcaacttgaattctctgcttaaaagttaaagtatcgatgtcgaagcctaaaatgacaaaaatggatactactgcaggaagctttgttggcatatcaaaagctatctcagaaacaatacaatacacactgggttctcatgcaggtgataatatgaatggctttttctttgctcctttttcattggaatgatcttatttggtcattgacgtcattttctaattccattgtgttggtttttgacactgaaactaaaaaccatggatacgttttgaaataggttggaaaagcatattttgcgctacaagactacttcaacgctgactcttcctttactcttgctcatcaaaagtatccttatgctttggaaggaatggatacatactccactgttctttatgtgagctgttgtcactatttgcaaattttcctgttattcattatgaacagtcccgaactaatcttgaacatgatgttgactctgaacattatcctgttgtgatatcagcatatagaacttgattnttgattgacctgcaagaacttgtttattacttttagtaatttcgtatttttgtttttgaagcacctgaaagaagagatgaggttgggctatctggctcaggaactgatttcagttgatcgcctgtctccagaatcctggtatcattcttagaatcttcatcaccaatatgctcttccgctttcgtttcgcaaaactttacatgatcaaccacatatgtctacgtcgagactctaacaccacaagctgtaaccacataccgtcaat

SEQ ID NO: 37389 - DNA, 1511 bp, Arabidopsis thaliana landsberg
ttagtagccagaggccgtctctttgtctcctggcggaaaatacaaacacaatttcatcataaatatcattataagcttacacgactgcaagatatcgttatgcgaagatcagagatatatttgatcaacagacctgaacaaattgcacgcccgtgttggtttttagttcatagaaatcatcatttccgactcctttcaaactcggaccgcatatacaataacttctctccgggctgtggtagtcccaaaacacaaaaaacatgaattgcgtcaagaggtgtgacgaaacgtttgattgtcaaacacaagttaaataatttagatttaggacctggagtaatcccaacgccgaatcttcaagtcagtaccacctgttaacaagtcacctccaggtaaagggagcaaagagcggataccaggaagacgaggaggaggctcgttcaactcttcgattctgtacttggagctcatgttctgacgatgattcggcttcggatttaccttattgcttggtaacttccattgaaactcggaaacatccgtctcattttcataattggctactctcaatacctacagaatcccaacagaatcagctcaattacaagtcctaatcagtatccaagaatggtctaatctatcaaaacagttttttttcatggactaattcacagtgagcctcccatcactattaaactcacatccatattcaaacttgtaaccctaacagaaaaaccataagtcataacaagagaaggttcaatatccgaagtcaaggtgcattagaatggtagaaccaccattacctggtgacagctacctccctctgcattccagagtgaaacttcgttgcaaccggcagcaacataaattaaaggtttcatagtggtggacactgagacgcttggaggaagaaagcagaggcacatcttctctatgggacatatgatggggtattgccacgaatttacaggaacacgaaatctcaaatcccaaagagtaagcactccccttgaagacccagagacaaaccaattcccacaaggacttgtaaccaatgaagacacatatccttcttcaggatttgctttcagtgtccatgcatctaaatctgaccttgtatcccaaaggtggattccgcagttttgggtactatacattaccatcggaccagaaaggctatcagcagtataattcaagagagaaactagagcgccttctttaacatctttctttttaatatcaacaatgcctgaatacttctccactacgttccccaagcctctggagatatggtcaattgaaaacatatgtatcacaccatcagaggctccaactacaacttgcgttgaattccgaagcattgttgtgcacatccctctgcttccctcgagatgatatgttagccttgacctaaaagagatgtccttttccagttttctagagtcccacaccttcactgtggaatcatatgatgcactaacaaaaaagctatgatcgcttgaagtggc

SEQ ID NO: 37390 - DNA, 2029 bp, Arabidopsis thaliana landsberg
accattccaaaagctatctggcaaatttacctgagtaaggttggaacttgggtgacatagacgagaatattgtccctcatcaattctttgacactctcaaatatctgctgctgccttactgcaggacctgcaccatcaaatatgcaaattaatctaaagatcttccaaacgctaagccgagacaagataattagaatacaaaattattaccacaatcctcaggtgaccagttcttagcaattaaatttttgaactgaatactagcaatttgacgcactgccatgtcacaatttccatccacggctatctgcaataacctcaccaaatgctggggcgtgtgctccaactgcaagacaaaagaataacgagaaactcaggcatcagaaactgcataactttaattgatcattagaaatagtaaacaccactgaaatctggctacagtgaattaaagcaaataacgatttgttcaaaaagagtgggaatctttgaactatcttcagtaaaaccagaaagtgaacttataaggaaactctatacatgaactcagctcaaactttaagatactactagcagaataagaacaatcaaactcgcgaccaagcaaccgtgtaaatacatcgaaagagaaattgaagtggaaactgagaaacctgattgagttgctgctcagaaactttacgctcatcgggaatagggctaagagcggcggttcggaggatcaaagcgaggctatgcagatccattctccgtggagtttgagaatccggacactagacagagtaaaccttgatgacgatcagaggcagtggttgatattcgatttgaaattcccaaccaagagagagagctgaattagaggaggggagaatctcagaagagcatgatagggtttaagagggacaagaatggcggagaagaaggagaagaagatttgattgatagttggcgagagtggaggagagggacaaatagagctggacgatttacagtatttaaatccctagggttgtttaactaaccaaaaccacccaattttgattctgattgacccgggtcttctttagccggtgtattccgaaccgggtcttctcttactaaatgacgtcactgattctcttactaattaagttcaggtgaatttgaggggaaaacaaatatttttggacatgtatgtgtctgaaaatgtgattttccctctttttttttgatgaatatatagtttaaaataaaaactaacaaagacataaaaaaatgtttttctccttttaatcaagtatgtattattttatttgttctggtcataatcctaagtgagtgtggttggtattttgatgaaaatttaaaattgttcattccataatatttatgtccaagtatatatggacgtaaatcatgtaagcgatgatgaatcccaatgttagatgacatcaaagaattttgtgaccataggccatatgtgttgtgtaaattttgtgggtatctagagaaagccaaccaacaaacgctatatggatactttgacaataagttccatccatcagctgccagtttgtccaagtatcaaaatttcatccgaaaagctgataagccgccaatctgccccaagtatctaggaaacgacatattctaatgcctagttgatgggaagaactttggaggtacacacatcacctatcttgaagctcatgaaagcaagtattttaaccttacttacttttaaatatatatgtctctagcgtgtatagcatccctatgtggatcaatttagagcactagtgagcattgtatgctaccgcataagaaaatgcaactacagttaaccatgatgattacatccttattaacatatatgacacactgcaaaagtcactggatgcgatcaagttagcagcggtattttccatgtgtcaaaagcatactaatatactacagtcaatcgtatattgttctttagttaagttaagtaaagactactcctactagacagatattcggtttatgaatccaaatcaagtaattgctatga

SEQ ID NO: 37391 - DNA, 1960 bp, Arabidopsis thaliana landsberg
aatccaaattccatgatttaaggggagattttaatagattttacaaaaaccatacattctttcttaaaatcgttaaaatcatttacaaactcaaaaaaactcaaatcactttaaattctcatttgaatacatcccccaagcctatatagacaacaaaaagttttcataaactaaaccctaatctatatatacatttttgcagccattttgtgaaataaatcctagagttgggacttatttacaatggctgccattgacttttaattattgatttttttccagcaataaattgattaacaaactaaaaatattccaaatatattcagcaactatttaaaacaaaaaatgtttgacaaacaaaaatataattgcaatcccttaaaatgagcaaaacccacctaaatacattctttatctatcaaataaatcttgtttctccaaaatttgaactagattttggcaactattttaaacaaatatttgtttgacaaaccaaaatacaattgcaatcccgtaaaatatttattttaattatatatttaaattagcggtgtaccgcgggtttttttacgggacggatttggcgagacgggtttggcaggacgctacttaataacaattgtaaactataaaataaaaataaatagatttaatttgcaaacttttatatatactaatttaaaaaataaattgtccccgcgataccgcgggttaaaatctagtaattaacttaaaaacactaagtaaaaagaaatcagacaaacatgaagacctcatatctcggcttgggtagtcactcatgtctttttcttgcattaaaagaagataaaaggaaaaggagacagctaaagtgcacgtggcatgtgagcagttccaaacttgaaaaagacatgcctctcgtgtcttaattcctaccactttctctaacctttttgtactacgtatttccaatccgcatctgttttaccaacaacaaattccaaaacattcatattttgtgtttcaaaaacacatccttttaagcttaaaatgttgacactatcaactgcgtaaacgtaatacatttcaagtttatcaacttcttacaaataacagaagtaatacatttgagacatgatttaatagaaacaactttttaaaaactttgcgttccttattattacaatgcccacattttaaacattcttacatgaagctaagacaccaaaatacctcttagctaccgcaccattcaccatcacgtcatcaccatcaccatcacattaccattaccatccaccgttcacccattcaccatcagtctatacagagtcacaaacactaatctccttccaaactcctaaaaccctaaatgagtcctacaaataggagttttcatcacagagcaaccaaaaatacagctcccccggaaaaattcacttgtttttttttttccagttttaccaaactcccactttcaatttactgtttctactgctttcaaccaccataacgaggaatctaccaagttttaagagaaatctaaaagaacaacatttgtcacctgagccctgtgtgaaccagctactcactttgatccacaaacaaaccgtggcaccgcttcttaatctcacagtttgtttcctatatggttaaacttaacccctcacaaattcagagttaatctgaccaccacttgcacttgcacgggttgttgtcgactcgctaactggcgatgcactacgaccaacgttaagtaagaagttccgctggtcttcattagtatgacgaagactcgcacgtaaaagctcggcaggcatttccctctttatagctaactccaacacatcagctgcattgtcgtggttctgaccatggattgtctcgtacttgctcctgcaatatttagtaagaagagagaagaactcatcaaacgaggctctccagagtccatcattcggattcccgtggttgctgacac

SEQ ID NO: 37392 - DNA, 1608 bp, Arabidopsis thaliana landsberg
  unsure (1)..(1608): unsure at all n locations
ctcctccttctcatgccctaaatttcatctcctctcttgtattgattttgttaaaaatctcacctttcaattcggaaccggttccatttttgtgattaatatgcctacttggtggggaagaaagtcctgcaagaacaaggacgataatcacagaggaatcatctccacagatagagatatcaagagctctgctgttgttgttgatcctcctctcactcctactcgtggtggtacacctcgttgcagtcgtgaattcgctggagcttcttctgctttctctggttttgactctgattctaccgagaagaaaggtcaccctcttcctcgtcctttgctctctcctgtttcgatccatcatcaagatcatgtaagcggatccacttctggatctacatctgtttctagcgttagctcatctggatcagctgatgatcagagtcaacttgttgcttctaggttcgctttttcccctttattagtatctgtgcatctacttgtatggatccagaacctcttaatcaatcaaagtttacgtctttttgctgctttgattgtgggttttgtggttataactcaatagtcatatagcaggggtcgtggtgatgtgaaattcaatgtagcagcagcaccacgtagtcctgagagagtttctccaaaggcagctactattactactaggcccacgtctccacggcnnnnnnnnnnnnnnnnngttgtgagcttagagtcttctacagggaggaatgatgatggaaggtcctcctctgagtgtcatcctttgcctcgaccacctacttctcctacaagcccttctgctgtgcatggttccaggattggaggaggctacgagacctctccttcggggttttccacgtggaaaaaagggaaatttcttgggagtggcacctttggtcaagtctatcttggtttcaacaggtgagataatcagattcttctactctgattcgcttaaaggaatgtcatagttttagataaggaacatcttatcaagtgagtgagttgacttagtttctaggtgacaagagttagttagatagctaaccttggttgtagcaaagccttcacacttctttagatcacgtaatgtgtgatgtccagatagatagggcgtttgatactagctttctccataggtggaaacaatattgtatcgtgtggatccagaggccattaacatatatctctaggtcaatagctatctttaaccagagatgcttacatgtgatgggtttgtgtatatgtgatgactcctgactcctgagagggcttacttgtgatatgctgttgagttatgtttgtgggccgtgtggacaattctgatggttcatgtctgcaattacttgatcaaaatnnnnnnnnnnnnnnnnnnnnaatctagataaaggcaatagaaagaaaaagtttctattatgctagctctttacattgtaactctaaactgcttgtttccatcgtataatgttttcgccaacttacagtgagaaagggaaaatgtgtgctattaaagaggtcaaggtcatttctgacgatcaaacatcaaaagaatgtctgaagcaactaaatcaggtatatctaattcgcctcatc

SEQ ID NO: 37393 - DNA, 2518 bp, Arabidopsis thaliana landsberg
  unsure (1)..(2518): unsure at all n locations
agattttcctagaacgtggtccaagaaaatcacacaaaaaggttcattccttttttcttaccagaaactacaaatcaaaatcatctcccctgtctttgtttgaaatctctcaaatttaagaaggatcatccattcactaacctgagattttggatagttttcatctatttcaggtacgataattcttcattatattttgtttaatcccgttgcttttcttggttttaagttttgaatctttaagcctcacatatttgttttctttactcaatctaaggttgttttatttccaaagatttaaaggatagattctgtgaaaaagtttctataaatttcaaattttcaaatgtgtaggttactagctctactaataacataattactttatccactaactacaatctgcatgactcatttttaacttgattgtttatttaattacctttttaatcattaatccttgatagatactcaattctcaatgttgtgttgttcttttttcattaaaattcaatgcttttaaagtttatattcacagatttagaaggagagagagagagagagagagtaaagatagatcatttgctttactttcaaacaaaataattaagaaactgaaaatttaggagaaggataataaactttctgcactgtaatgagtacctttaaagctcacttttggagtttgtgtacttaagcaagcttaatatgtccatctaccatacatgatgtataaatgtatcacaactaatttatgatttatacaaaactgttcacaaatcacatgcacccattcttcttacaaaatctttgctatgattgattttttatatatagagtaatatacgtgcatagaatataataataataaacagtaaacacaattggaaacccataatactatgaaaatcccatacattaaaatatcaaatttattttgagtggattattaattgtatagtggttagtttgttgatttcatatctttatttttctatgtaggtgggaattccagtgcatcgaccatgatcaacacctaaactacacattgaacgttttgcccttgggaatcactataaatgtcgagaagaccagacctcctacgtggcagcgaggtcgccaccgtggctgccacgtttctccgcttcgattttcccgccgaatgttgaatcgaccgttgagaaacaagctctgtttcgcttcaaattccgccttgacgactctcacaacattctacaatcttggaagccttacgattcaccatgcgtgtttcgcggcatcacatgcgacccgttatccggcgaagtcatcggtgtttctctaggaaacgtaaatctctccggcaccatttgtgcatgaatctcagctctcacagagctctctacgctatcgctttcatctaacttcatctccggatgaatcccgccagagatagtcaactgcacaaaccttagagttctcaatgtcacctgccacagactcttcggaacaatcccaaacctttatactgtaaagtccctagacatttttgacatcttccggaattttcctaacggatagtttcaaagctggattgggaatatgaatcagttggtttctctcggtcttggcaacaatcactacgaagaaggtataattcctgagagtattggaggtttaaagaaacttacttggctgttcttagctcgctccaacttgaccgggaagattccaaactcgatctttgatctgaatgctctcgacactttcgacatcgcgaacaacgcaatctccgatgatttcccaatcttaatctcaagattggtaaatctcaccaagattgagttgttcaacaacagcttaacaggtaaaatccctccggagataaagaacttgactcgtttacgcgaattcgacatctcttcgaatcagttgagcggggttttacctgaagaactcggagttttgaaggagctcagagttttccactgtcatgaaaacaacttcaccggcgaatttccttctggtttcggcgatctaagtcacctcacttctctttcgatttatagaaacaacttctccggtgaatttccggttaacatcggccggttctcgccgctcgacacggttgatatatctgaaaacgagtttactggtccatttccaagattcttatgccaaaacaagaaactacaattcnnnnnnnnnnnnnnnnnngagttttccggcgagattccgagatcttacggcgagtgcaaatctctattgagactaaggattaacaacaaccgtctaagtggtcaagttgttgaaggattctggtctctaccgcttgctaagatgattgatctcagcgataacgaactcaccggagaggtttctcctcagattggactttcaacagaactgagtcagctcattttacagaacaacagattttccggcaagattcctcgtgagctcggaagattgactaatatagagaggatttatctgagcaacaacaatctttccggcgaaattccgatggaagttggag

SEQ ID NO: 37394 - DNA, 2758 bp, Arabidopsis thaliana landsberg
  unsure (1)..(2758): unsure at all n locations
tgccctgggcggcaactttgtatgctacttttgtttaatcttgaaacgagatccaacttttcggggcgttttaaataatcatttggtgccataccaacatatccacacccgtaaaagcgccataatacaaaaccccatccatgcacacactgttagttttgggacggtgatgaatgttacattcaatcatcctccacaattgttcaactttttgtactcctcctaatgtgaacacttgatgttcagaagacggaacattcaagtaatcattcattctttccgacatgcacagtactttatattggccatagactggatcgtatccgaaaaagctttggatgatcttgcttcttgatttcactttgggtaagtaaatggacttacctgttctagggttagttataagttgttgctgaccatatccaaaacatatcaagccactcacgtaatgaatatcgcagctacgccgattcgggatttggcagttggtgcgagagagagaagaaagaactgatttccccgctgagaaagttgatgaagacaagtagaagaaccatttgtggtgtcctttatctttatctaagctattgagagcaaagagaagatatggctgaattgatgagaataagaacgggaacgatcggatgaaatatggacttcggatgatttctgaccataacttggacacaaggagaaacctcgatacatctttcaaaggcaatctcttcacgatctcgatcactatgtctataggaaccgaatccgaatcggtcctggtctctgtctttttagtgcgacgtctcgttattctcatgacttttcttgtttctcaaagcataaaccctaacttcttcccacggtctcctctcttattaatgtataggagacatggacgttttggactaagaaggcccaaagagacaggatttggactttaggacaatcttctagtactaaataatcttgtgaacaaaaatattggttcaagatggtaaataaataaataaatccatattttcatgaaaaaaagtgttaccatctctgtttcattctgcatcaagacaaactctacgatccaatatatgcacataagatcaaactcccactacgatatttctcctaatccgtagaagtaagaaaaaaattaagagtaacgcaacatgaacattggttagaacatctcttgtacaccgtagatgtcacttgttttgctctttgggggaggcagtttttctaacacccagctcggagagtcacttagccagagacctacaccggtttctttgtgcttaaaatccggcgattttggggttctctacatggattagaactataaatgattagtatgttacctatatgtgaaaacgattggttaaatgtaacggaatnttcaccttgtcgattctattgtcccaccatttatctgggttctgaaccaagtccttccatgattcttctcctacacatatcagcccagatttcagtttatacaaacatacttgaacaagtgccacataactgtaaacaactttctttgtatagttgcatgggaacatggaaatgactgggaactttacctttaagttgttttacaactctggctttagggactagaacatcgaactcgagtccttcgagttttggcaaaacccaattaggagccttattgagccacagcgaaaaactactgtccttgcttttgaaatcaggatgcctaggttttacctatgtaggagaaaaaccaagaagtcagaatactagtagagagatttagcagacaccatatcaaaagattgcgagtgagataaggatgaatagttaagcacatggggcatttaccaatccattgactttattttcccggtgatcccaccattctttaggattttcaatgaggtgattccaagaatctgaagcttcatcaatgactatatcctgcttagctctagctagagactcatttaacaaaccattaatcagagcattgaaaacaaatgtatgccagaaagatttcacaagaaaacacatttttcattaaatacatcacaagagattaaaaagtagctccctaagagcctttctcagacctaacacaagcgccaattgaaaattattcattggaaatgttacatgagacataccaggctgcttcttgataccactttcttccttttcagatgatgacataaccataaatggcgacggagacggggacataggctgtataaagttaagattctggaccaatacctgttgtaaagcaagtagcaaccacctaaagttacaaaggttctctggaacttttcatacatactcgagggataatcaaatcaacatagtactcttctcacaagtatcataaaactgatcaaatactatttaaagttcacacctgaacattggcttgtgcataagtcatatttggaggaggagaatctataaacagcttcccagacacatgaatttgatcgtctttgcttacatatcgagctgcggttttagctaaatcgccttcaaatattatcggaatcctgacaaaacaaaatccaaaaccttttcaaatatgaatcacaaacaaagttacaaataaaaatctcatctttgagcatagattagagagagtaccagaaaccagaggaatctgaagcagacctctgggaaataacagtaccagcccagaatttgccatcagaagaagcttcgaattgaactggttgatcaacaaatccaatcagaataacccaattcgctacttcac

SEQ ID NO: 37395 - DNA, 3380 bp, Arabidopsis thaliana landsberg
ggctctctcgtctgtcctttgctctttaattgaatgttattaagacttagaaggaacaattgatatggagttgaggatttcaggttgtctctgttgggtctgaggttgggaaagtggaacctggcaagaaggtatgtttcatcttttaactaaaaacacgatgaagtaactgtataatctccttcttcattcatttgttcatgctcttgtatcttttgcaggttttgttctctgatatgagcgcctatgaggtttgtatttgatgattatgatggaacattgagaccatacttgatgactttgatcatacttgtgaaactgagacatctcttttgatttcttcaggttgattttggaacagaagatgctaagcattgcttttgcaaagaaagcgacttgttagctatcgtccagtgaaaagtagcatcgaagttgtgcattcaatgatatcatctaccaaagagtttctggttttcttgtaatttcagtgacagcagcatatgttctgttgtttgagtttcatgaaagagctcaaagtggagattgatcggaaaccgaaattgttaaagtcaacaatgttctctcaaacagaaatcgttttatttgcaaatttctcataagccttatgttcatagcttagctggtgaacaagaccgatcccattcaattttttcaaggatttgatctttacttgatttcttaaaaacgaattattttaccagagcgtaaaggagattcacggacccatggagatgaaccccgtggaccctcttcatttaaactctttgagttattagacaacttttataaagttgaattgaaagcactctatgtcgtacttggatttttattaaaagtcgataaaagatattttgatacttgtgtcataagcgattccaatatagctttgtaggtctatgtgttgaagtggactagagaagaaggactgtgaaacccaagataaacttttccaaggtgatgacaaaaaataagtcaaaactgtcgcactcttattatttatagccagaaattcatgggtcaaatttcaaaatctaagcacccgcattactactactactactcaaaaccgtaatgcttagtgtaatgacatttgagtctttgactatatgacataatacatttgaattaatacttcagcacatatagattgactaacctgattcggtattattggcacggttcatataggatcttaccgctatacgaacccatactgattttgtccaatttttttggaatttagatccggtttgatcaggttccacggttctaccaatcaatcgatccggttttatcttgatttcttgtcctaataatcggtaagtaattctcataagtaaaaaaacaagaacacactacattatttctcttaatctcctaagaacaatatatttggccattcaaactctacaattacaatcagaaaacattacaattttttataacaaaagtattgtttgagctatttcccatagagattattcaccacaagccatataaaaagcttgattttggcaaaatccatcttcagaaagccgtagtttactatccaatagtcaaacacgttgaccaaagactaatcccaccaaaataaaaaaaatcaacggcggtgatcaactctacctaaatccacaagcttcttagaccggttaccgcaaaaagacgccgccgttgataggtgaggcttcgccggagatttcaattcaccggaatatccaaaatccggcggaaatttcgctttccagttagaagaacagttaggtttagctctcactaatggacttaagcaaaaagccatccctgatacacttctaccaatcccaatcgtcgccgtctttttccttcccggagttcccatcaccggcgttcttcttaatctccctggagattcctcaactgattcatcgttcgtcgttgaatctcccgccggcgacattcctctacaatatctctgtctaggtcgattttgattatgatgatgatgatcggattcggaagcgatcaaatcttcgatgtagcaagtattggtggttgattgtttcttcgatcgaactgatataaccttcgaaaaccatgaccgtgaagtcgtcgccgacgacggttgagaaaaaaccgtggaggcgtcgcatgaatcgcgacgcgaatcgtaatcgtcagatctcgttctgaagaagctagagaatctagataaaccgctttttttcttcttaaacgatctgtctgattcgaagactttttccgatgacgatgattgaacaaccacttgcggcgttgcgaagaatcggttattagaagaagctacggagtctcttcctccagctccggttccggttccggcgtcggattttctaggagcaacgtaaggagaaacagaacgaggaaaaagcagaggaggtggagaaatacgagaatgacgatgatcgttatcgtcgttttcagacgcggcggttgaaacggcgagagtaaagagtcgttcacggagacaagaagcacaaacgccgatactgctactgaaatctactgtgtgtctcttacacctcatcggaaaaaaaacaaaacaaaacagttcgagaaacttcgatttcagagatctgaggaatagaaaagatatatttgtcttcttctggctctgagattttctctttttgagagagagagagagaggatctaatgagaagagaatcgccggagtaaatggaaattttctgatttgtgttttctttaagaagaaaaatagaaagtagtattttttcaggtaataaaggcttgacacgttagcctttgtttggtttataaagcattgtttttgcaattaagatgacgatgattaatacttatggttaaaggataattatcccattcgcttaattaacgtcctaaacgtcactattccttttcttctttttgggtgtgcttgtagtgggggagatgaacatttcattgttttcataattcgtattgtcgttgacattgctttttttatcattgtcaaagcaaacatcacttcatcacacaatgggttatgtaatgattagttattacttcatctctattgggttgtgtaatgattttagttattactttataaaagaaaaaaatgttaaaagtaaacgtcctcttaatttgactcattaaaactgttttagactaaccgtccttgctaaggacatcgtatgtcaacgttcttccttgaaattctgtggaaaaatacctaataagttcttggtggtttccttttgttttgtataagaacacgtttaaagtttgtacatatatgattgttattaagtgtaggtctaatttgtgatactattgaagtcttctatgtgcgtttgatgatatcctgaataataatagta

SEQ ID NO: 37396 - DNA, 2088 bp, Arabidopsis thaliana landsberg
agttctttcagtcttgtaatttttctttgatttttcagttcctttttatgaagcttcggtgctatccatttacaggtttagtagagcacaagtagacgagcttgacaagaataggcagtggtctagggctcttgatggctccgactatcttccaggaatggtaatcctctctctttaattacacttgatctttaaattaatttgtcttctaaaaggtttagcttgtaaatatgtaggtggggttgaacaacatacaaaagacagagtttgtgaatgttacaatccagtcgctgatgagagttactccattaaggaattttttcctcattcctgagaattatcagcattgcaagtctcctcttgttcaccgttttggggaactaactcgcaagatttggcatgctagaaactttaaaggacaggtctgactcagtttatgcctctcacttttttagtttttaggtgaggacctcactaatttaagttaccttgcatcaacaggtgagtccacatgagttcttgcaagctgtcatgaaagccagcaagaaacgctttaggataggccaacagtcagatccagtagagtttatgtcgtggctcctcaacactttgcacatggatcttagaacttcaaaggacgccagcagtatcatccacaagtgcttccaggtatgtgtccgtcctttgaattgtcaacataatgcagtttgttataatttcttacaaagagctgtgtctcatgtaacctgctaaccattacagggtgagttggaggttgtgaaagagtatcaaggcaatgaaaacaaagaaatctccaggatgccgtttctgatgcttgggctagatttaccaccgcctcctcttttcaaagatgtcatggagaaaaacattattccgcaggtacacctcttgccttagattttgcagttatggctatttcaaaccttgaaaatctttacactgtcttatttacaaaatgcatttcagaaagggaacatttttatcaataagataatgtgaactactggaaaacttttagttctcaatataaagctacataattatgtcacatttggttgaaatacaataatagggattcttaaatagtggctttgcaaatttactgtccttgagtaaactgtcttttccgaatctagtttatgacttgggaaagtgtagaattctctgagtccttggttgtttggagctcctgtagcctttatggcttgctaccttgtatatgcgtcttagagtgtttagtttgcaaagtgaggttagcagaaactaatttctttgatgtttgggtcaggttgctctatttgatttattgaagaagtttgatggagaaactgtgacagaggtggttcggcctaagctggccagaatgagataccgtgtaatcaaatctcctcgttacttgatgttccatatagttcggttcaagaagaataacttcttcaaagagaagaaccctacattgggtgagtctgtttgaaatttttgtgacgttaatgttgtagatggattccctaatgcctggttaatttgacccaatttctttttctatgccacagttaacttcccagtgaaggacatggagctgagggattacataccatcattgcctagagcaccagaaggggagaaggtgtgttcaaagtataatctaatcgctaacattgtacatgatggtaagcctgaggacgggtacttcagagtctttgtgcagcgcaagtcacaagaactatggtaagctttctcaatcattaactattattgtgtttcatgttcacaaatgcatgatctagatctgtgcataagaaagacataaattcatttgggggataatgtccattgcaggtacgagatgcaggatcttcatgttgcagagacacttccccagatggtagaactatcggaagcatacatgctgatatatgagcagcaggaacaatagagccctggaaagaatctgacttcatttggtttaagagtaaaagtggccagttttatcttggaatgagattagagatttgtttcacactcttttggaaaaagatttttggacccctttaaagtatagagagc

SEQ ID NO: 37397 - DNA, 8466 bp, Arabidopsis thaliana landsberg
cagctgggaaatcatggaagaattagctttcccaaatccaagtattccgtcaagtgcttcttcattagaagagtctagatctcctgactgcctagcaccacaccttcaagatcatataaaaacattaaaaaaatgaagaggccaatgaggaatgacggatttagcttccctgccgtaggactgataaaacgctaatggacaactattctactttgtttacagatctctgagggattttctacgtgaccagcaattctcaggccaggatacaaaactaaaatataaatattgtataaatatgatatttctaaattactaagttttccaacgtgtagaagcatatgaaattagatgaaatgagctgtgctcgggaagataccttagcaaactaatcaactgtcacaatcaaaagcacaacatattcagtaaaggtctatttgtgatattcactatatggtggagaacctattcccatgttactttcaaaataaaaaagaatagataccagtatgcacttcaacgaatctcaagatttttttctttaagcaattaagttttatctgtttggcttttgtatgcactttgaaaactgttggtcaattaagctttgtaacagcgttttccatttcttattttttctgttcacttaacaaaataaaaccttgaccacaaggaaggtgaaattgtgttcttttcagtgagaagtgagaacacaaagaagatctaagaaagccgcaagaaccatgttgcagcagtttactagtttaaagataagtcatgtaaagcgaggttattaaaaggagacatacccaaaaatgacactgccattagctgtttgagtcttgagatcaccagctacactgtcatactgcacaacatctttgacaaaataaccagcagtagagctaccatctccatatatctcaagataaggacaagacatattagctttgcagccagagagaggaccaccactaatctggtagcaaaaatcatcatcacaagagaccaactttccactgtctgattcgtcaatgttgtagagtgtaagctcaatctgcatagagaaacaaaacctcacccattgagttggagcaacgaaaggcaaacgtaaatgagacacaaaacaaaaagcttacaccgagagtgcttcgtcttggacattgtttgcactggatgcagttaacccacataatatcactccctgtgtcgacttgaacataatagctcttagcaggtgttccaattccaatttttgcataataaagcctgagataaacaatgaaacagagagatcactgcaagttaactcaaaaatctcagctttttagagattccataaattcctctcaaaaggctcgaaatcagcagtgatcagagacgctaaagaaacaataacaactctttagaggaatctgaaactgacccggggatatcagggcgaccagttccaccaaggggtagatcgattccagcgagaattgtgagctgacgccggtcatcgtgctcctttaaggcggtcaaggacccttgaagccttggataacggtactttacattgaacactccgggattacaagagacggaaacaagagcagtgagaaaccaaatcagcgtgaatcttccgcagatggggaaagatacgattgataaagtcatcttctttcttcttcccacgtgcctgatgtttacagcgtcagtcgtctcggcggagaagttgaaagaaaccaccggaccggcggcgacgacgacgacgacgaggaagttcagaaattacagagtttgtttggtcacttcttccaccaattcccgtattttattattttttatttccagcgtggacttttctttttctttcgacccattaattcgatatttttatggtttcattcaggtaaatttattacatgtaaacttaggtgttactgacgctgttacaactcatattttactgttcagttatattatcctttttgtcgtttcaactttcaattgtaacaaaattataaatgataggaatttgtttccttaatttaagtattaggttatgagtttaagactaaaaaccatgtgaacaaatttataacaaacgaatagaaacaaatatcattcgcaaaccacatttatgtttccttgctctttctctatttacacacattcttccaatacaataattaaatatggttttacatacagaaaaatataaaatgtaatgtcgtttgcattataagttctagagggacaaaaacacacttcttcttttttaccacaagcaatttcacttattacgtaacattaagcaagagagacttgagagcaacggcgatatatcataagacttactaagaggaagaggaaggtacagttgaagggttgaaaggtttctgttctgcgcagctgagctcatcgtttggtcccgcgtcttctcttccaatacccatgaggtcaaggaagtataagtagtgtgagattatgttgttcattggatcaatggaaccttgaccacatgtgtactctccgtagaggacgttcatcgtgctgccaaaagtcgggccacgcttggacaaagtgtcgttcttcgtaggtttccagtttccgacaaagatgtcgtgagctgagggctgagctctcttgattggagtcatccatctccagattgcagcttggaatgcaagtgtcgcgttttgctcaatgtactcagggtggttcaagagatcagctttcagggcttccccagctgctccgtagttgaagttccttcaaataacacacaggtaaaaataccttcagtatggacgaatgcaaattgtttgacacagtttttatctagagcttcaaagtagaagagaaatgtgtaccagtaaatgggtaaggcaccgcgtccgtagtattcagctccagggctgcaggggtacttgaatttccaggactcgtcacagtaggattgcattgggctcatttccctgttgtagcacagaccccaagctaaaggccctcctgttgcaactccatagccacctataagacatcacagtaacactcatatgcagcttcttacaacatagaaaccaccaactgcaacttagggcatatccattttcatgattctgaatgtcgagtttgatcagattaatataatggtatagctatggaggtaagcttaaagcatccttttttctattcatagttagatggtcaactatgtagaaagaggactaaaatgaaggaaaacttacaggacgttttgctggctacatgaccgagaaaggcagccatttctttctgtcccatgagctttcctccagtggtaccaaaaccaagaggctcaaagagggcagcagcagtaatgaaagactggtagtcccagaaaccaacagcatgtgcaatgggagtgttccttttggaaaagagttgctcaaactgataaacctgaaagtaatctgatatcgtctggttacagcagtatttagaccaccagctgcattcccatccttgcgtgcacaccttatttcccctcactttcttcactttaatcgttttgtcctctccattggcaaccaaggccagaaatgatacagccagcagaaccaaaatcacgattgaaccactcctgattgtcaccatagcttacaactatggaacaaataccagctacaagctgcaaacatcaacaaaaaaacaaatttagaaacatccattaatcccaagtaagcatctgaacattactataaagaaaacagaacacaaattactaacaatacagatctaccttatacaataggcacttaatgccaaaaagctgattagaaacaacaaaggaagaattaaaccaaaaacatggaactctctaagttcttaagtgaaaaaactaagaaaaattgttagattgaccaatattataccaacttggagagattgatgtataagatatgcgaagacttcaaatgtgagatcacgaattcaataaccaagcaacgaaacaaaattctctagtcaagatttagctaaatcgttaccaaaattaggcataagtacttgtggaaaaaatgcttacccgcaatgcagatcagctatagatccagagagagatcgagaaaactagcttgtgaattcaaccgacaaaaattaccctttttgcttcgttgccgagaaaataaggaagagattcttgggaaagagaggaggaagaagaaacactaaactaaagcgggtgacggatcagcagtctctatcaaccgttggattagagaacaatcaacggtgaagattgcgtttggtgtaatgtatgtgtcggttagacaagacagcctggttcgtgttgtgggccctactttactgaagtggagccttccaccgacagccgcacaccagcagaacctgatttaaaccaatcggtctacttcgatttttttcatgggttttcggttcatgttatggcccattgggcttttaagtaaggcctttctataaatgtcaattttgccagagtttcctgtctcgtccttgtctttcctctagccactcttcgccactctctttctctctcccttgttttccaacagtaacaatggcgtcagcttccaagcaaaacccttcttcttccaaacctcctaggcatccatctccgatcattgcttcaaccccctcgaaatccggtgtattggaggaatcccaatttcgaaaccctaataacccgtcgacgtcatcgaattcaccgatttcgatggcggtggaggatcagatcctgggaaattccaatcacctcactcgcccggagcttctccgacgcagatcgcacaacctgaagcagctctctagatgctacagagaccattactgggctctaatggaggatctcaaggcacaacatagatattatagctggaactatggtgttagtcctttcaaagatgagaattatcaccaaaacaagagacgtaaggttgaaggacaaactggggatgaaattgaaggtagcggagacaatgataataacaacaacgatggcgttaaggctggtaattgtgttgcttgtggtagtggatgcaaatctaaggccatggcactcaccaattactgtcagcttcatatcctcatggataaaaagcagaagctttatacgtcttgtacttacgtcaataaaaggttcgttcacaatttcgagtttcatagttttttccttttgattcgcatcatattctctcgcattaggaaataataggtgcttcaataaatgctaatctgtttttatgattctgtgaaatttcagttccttgatactggttttggttttgtttcgtggtgaggaattgaaagtactttgcattgtttgtatcgtaatgggcgaagatgataggagttaggattgtctgcatgattatatcattatgaagttcttactgtgatggtggtctagctattatggtaaattggtgataaaaatggagcagatgtgagatgtctgtgtcatctgtgctttgatatccctgattggaaagaacttaaatttttgcattgcggagtgcaatgagcatgtgatgattatataatcagctttattctaactctatgtggtcacattgttcatgcagagctcagtcgaaagcaataacttgtccaaaaccaactcttgcatcgactgttcctgccctctgtaatgtgcacttccagaaagcccaaaaggatgttgctcgagctttgaaggatgctggtcataatgtttcttcagcaagcaggcctcccccgaaactccatgacatagtagctgcatttgtgcatcatattcaagcaaaaagaaaagatccacgaaaagagggcaaattgaaaagcttagtaaaagaagaacttacaagctaaatcaaacagagtgagcagaagctgtttgtttccacaattgtgcaaaaatggaaggtaagatgactggctttctatcatcactagtgagaaagacaggtacaggatcgtgtttgactggtgatagatagggtagtcatctacacagaatgtagtagatcgtgttcacacagaatgtgttggtaggaatttttttttgttgttgttaagcttagcaaagcaaagatgcttttagcatgactagcttctaggatgtgtctcatggttttcgttttatttttcgtgattggagctaacagttatttatttccattaagctgagtagacatggatttcaacaaacaacatactgtgtgatcgttcgtaattatctattgttgtcttgttgaatgtggattagctagacttgaacccaatacctttgtttaagcattgaagcaagccacgtttataatatataggtttgtaatctctattcaagcagttaatctacctgcataccatttgaccgaccctgcttctgcaatgaattgacagatttagctgtgagtgcctttacaaggttacaacttacaaggagcttcaatcaagcgaggagcaacattgacacaatggtttaattaagctgtttagcttgaaatgaggatatatttggaatgtattctctaggttctttagtagatttccgaagtcctaacagtttacttctaattcctgtggcaaacttgattcaggcatggatagagcaatttcacacttaatgttttagcaactggtagctttcatggttgtgtgaaaaaccgatgtttttttgtggttcctgctgagacctttgtctactccttaatctaaatattattttctggaatttaagagtgagtgtaaatataagcttaaacagtttctggtgactgttctgtaatacatgttaacgactccactcaacaataagtcttgagagaacctaatcaatgaaattctgaacatcaaactcgtgacatttaagagttgttgctctaaaatgtatgattttttatatacacgcgcaattccaagccctttccgagtacgcattgctcacaaaaatcggaaacatatgaatcagtttgcaataaatcaagtcttaaattcagagaacactgcaaaagcatctaggactgtaatcagccatcatcttttagttgatgaagaacgaaaaagatggaaacacataatatatggcgtctatcatctttctcttcgtcccactcgattcttcatgaaatgattaaggagcatcaccaaattaggttatctagccacaaggtttgtagattcaacacacactcacaaaaatggaatgagttaaagactgtcagaggacagtagtaatgtcagtaccttcataaagagggttgtagatttagttaccaagttaagattagttacctcagcaagtggaggtccataaccagttagtgatagctctcataaacacaaagtctctcagcactgcacaaggacaacaatctccagctttcatatctcacatgtaataagctttacacagtagcttaacacataatccgttcacagaatggtataattgcatcacactccgttaatacttaatagacacagttagattagttacctcagcggaatcatgaccagttaagtgaagtgaatgctctcactactgcataaggagaagaatcgagctattaagatgtcagatgttaaagctgtcgatgctgagaccagcagggaaatgagaaagaatttgatggttttattcaagtgatatcttttatttccgttcataaaatcattagactagatactactaactactagtacacatacatggaattaagtgagaaccattgttgatattcagttcaattttagaccttccaatgccactttctgaaatctcctcctccgctaccaatgcttgagatattgctcattcgctagtattcctggttcagacgtgacaatgattcattcagctgcacaattggacagtacaggcaacggcttgtgcccagtatttgagcctagctttcacatcatccggattatcacctgtaaccaacaacaaaattgaaaacattcagacttcatatcccaattttccaattattgccatctcaattctcaaagtcagatttgtggcctctgtaacgaaaacggtatattccacattcttgtttaacactaaagcaacaaactttgaactaggattgaacttagattaccgaatcaatcgatggaaagatgagatatttaccgggactagagatcttccaattggcaatcggagtggcggtgaccagtggaggcgacggacaatcttccaccgacgaagtttccggtgatttattttgcttatcgtctaagaacttctggctcattgaatagcaaagctccaaagcaggtaaagtgttgcagagctcagggatctcgtcgtagctaaaaccaaaccctagatctaaacaacctctaagatcttcgaggtcgtcatccgtcaaactcttggatctcgtcagatcgtccttttgatcatccaccgaggaagaagaagcagtctcaacgtaaccttccagtaacacttggctcttcttcctc

SEQ ID NO: 37398 - DNA, 4992 bp, Arabidopsis thaliana landsberg
  unsure (1)..(4992): unsure at all n locations
agcttctggaattttttcctcgtcgtcgagttgctgcagctcgagattgtttgcttgcgcctcgagttgcttacgcattgcccgagtagtaacaaagtttatttcctcaagtcgaaaattgggctgagctatcgtttcaacagggattatccttgtgacagttacttcggatgtagaagccaaagcagctaaggcatcagcaactgaaatttctgcacgaggaactttgattagttcgaacttgatataactcgattttcaccgattttatctatgttttaggtataggattttgagtctttctgttatttctcgagtctttttagtgtcttttcaggtattctatgcactgggacaacaatggagataaggagtcattttggagcaagatctaaggaaaaggaagctaaggacgattttggactcaagaatcagcgaggagtgtcgaccgacacacttttggtgtcgattgacaccagtttcggcccagcaaaaccctagatgctttcaagtttacagaagatcaaatttccccagatccctatttacagtattagtccctggacgtttttagggtctatatatattgtttttagacctaagtttcttttatcaagtcttttatcaagttctttgcaaaaccctattgtgagagacataagctattcatccattgttcttgagagattcattcagatctatatacagtgaagagatcccttctttccctttctctatttactgtgtttatgctttttatctcaaatatgttgtttgcttcatccaatatgtctaagtaacctgattattaggaatagggtttctcattagggattcattggtttagtagattgctccctttgctaggttatctatagaattcttcatctttaattatgcctaatgctagatctagagtaattaactagatattgaatccagacaatagatattcccgccataggtatctgtagttggatctattatttgatgaatctggtttatagatgtgtaataagaatcggcctatttactaagatgaacaattgaactcgttaagaatgcatatttaggttgatagtttctccgcttctcctattattattagctatagatatagggagtttcgcggcacgcccaccggttattccataattagagtttgagtttaagaatggttcgataacaaccttgctttgtttagatctactaaccaatagtttcatgagaataccctgttcctagctctttattaaatcgtttacaatacaatcaatctgttgtcttttttactttgttctcttttattttcactcataccctgctagcttaatctcgagtattaactcagtgtttgaacaaaagaactccatgacttcgagcataaaatactgcaattgatctcttatttgagagagtagttcttggtaatttgaaccatatcaaaatcaatgatgaaattaagaagagaaaagagtttagaagaatcttttgtaaagggagtcaccacagggttttgctcccaagaataaaagagataataagagttaggattaaataatgacctctaaaactatatatatatgtactaaaacgtgcagggacttctttagaaataggagaaagttctgggccaaatttggaaatcttccaaacatcaataagttgcgcaattcaattgccgtcaggtattggtgtcgctcgacaccaggggttttgtcaatcgacacctacgtcaattttcgtctccggattgctgtcgcagcttaagttgtctgttttgctccagaatgctccataatctccgaatgcatcctaaacatgtaaagacctgaaaaggattagaaaagactctagaaataacaaatagactctaaaacctgtacctaaatcatagctaaaaccagtaaaaataggttatatcaactcccccagacttagcttttgcttgccctgaagcaaaacacaaaagccgaacccgtggaagaggtttgaaaacaaaggaactcccaacattctctaccttattgccttgatcatcctaaccaaatccatatgcctagctgttctaatcaaatcccaaccaacatgtacttctctgcaagcttacacaatattctagattccatacctaagttccacaactatatccaccaagctttcatcgctgggtcttatcaaacaagtttacattcaagatccttctagactcattcttgtactataccatgataaatagaccattcttttattattattattttttctttatttctttggtgttctttctctcccctagacttattctttttagagagtaaataaaggggaactcgcatactggatcgacaccctcaacatttttccaacctttgtaattgatcattccaaataatgtataataatggggtcataggaaatattcctacccctatacactatctgaaaatcctgtcaatctctcattattatacatatttttttatcaagggagaggaatactttttttttatcacattagtcgatttatcaggtatgaacaaggagtcaagtactacgaacactaaccgttttgatgaggtaaaaggaagagtagtgagattagctccagcctttgtggattatgttggaaactaggatgtccttaagtttgttgctttgccatctagattttcaaatagtcggattgactcaaacctacaacactcatcaatcatgcaataaacaagagaaatatatatcatgattcttaactaaactaaagaaaacgttatttttttttttatttttttgtagaaggaaagaaataagtacatgaactacaaaataagaaacaaaaataaaagcatcattagtaagaacctcccccagacttaaacgacactgtccccagtggcattcaaatcaagagaaagcgggaaaaataaagcaaaataaaagaaaataaaagtaagggaaaagaaaaatcaaaccagttggttgcctcccactaagcgcttgttttgagtctatagcttgacttggcggagttcaggatgtgggtggagtggtggatgattgctgatgcctnctcgccactcagatctggttggggcagctgcaggtgtcgatcgacactcaggggtgtgttgatcgacactcatcacgtcacctgcaaggacaacaggagaaacaagctttcgaggaactctaggcttgttatctagtgaagcagtcttcgaataatctaaagaattaatcaaagataaaacaggagaagagagagaagagaacttatcacataggtccttaagtggtgtgggttgaagagaatgtgcagaatcatctgtctgtgaaacccgagggtgtcgatcgacagggatagtggtgtcgatcgaaaccgttcctctgcaactgtcattggcgagctgaacgtgttggagcgttgtgtgtggctctgtggtgggattctgatcagtctgaggaggtgtgtctgtgctggaggcaatgcacctgatgggcttagtaagctctgaaccatccatgccaaactccatctctgaatcacaatccttgagaaagattctgcctctcttcacatcaaacttagcagcagctgtagctaggaatgctcttccaaggataagaggatcattgagttccttctcatagcccaggaccacgaaatcagcagggattatggagttaccaaccttaacagaaacatcttcaaagattcctccagggattcgcttggaacgatccgcgaagagaagagtgatgcgagtaggcctgtagtgagtcatgcctagtctctcagcaacagacttaggcatgaggttaatgcttgatcccagatcacacaaagagcggcagaatctgcttgtggagatagagcaatcaagaacaaagctacctggatctaaaagcctctcagtggtctaaccaggagtaatggtgcggatgtactcagctatgtctactctctgtaccttctccttcttggccttaggcagcataattgcactgatgtctctggtaagtagcttagcttcatctaagctaattcctttgtcaacaagtcgcttgacatacctgttgagtgaggcggaagatgtctcagaagcatccttatgaagagtatggaggatcttctccattatggctgtgcacttggcagcatgaatctccttcttagaacgactcttcctcggataagggataggaggaatgtaaacgggctcgggctccataggtacttgcacctcacaaggtgcagtccggatctagtgtcgatcgacactagatgggtatcgatcgacaccgtcgtattgagtcgtctctgagaaaagcgtcccatatggtgtcgatcgacacaggagggtgtcggtcgacaccatctctgcaactgcaagctccaactcgtcttcagtgtccaattcctcccacacatcatctccttctctgatcaagatggcattgcagctcttccttgggttagcatcaggattaccaggaagaaaaatctcttgtctcttgatagattgtgcagtttgagctacctgtacatctagtttcttcaagtgagagctcagattgtcgatcttcccattaagatctgtgtagacaacatcaaacttgccattaaactccacaacaagctttgattggctctccagaatctgctcaagcatcgattccattcttgtctctgctgagggtggaggggggcttggtaagttgaattaccataggtcctctgaaagctgctttgaggaaaggtcttctggaaagcaggctttggagtgtagttggaggaaccctggttccatgtaaacctgttgccactgaagttgccatgtggctgcccaaacttcctgtatccctgaccatctatgtagaagacttcttcctttgactcaggctcaggctcaatagtctcttttgcagctgcaatgtggacatgcttcttccctgtgagcaagttatgaactgaatccagcttagcattca

SEQ ID NO: 37399 - DNA, 2633 bp, Arabidopsis thaliana landsberg
tgctctcagttattctttgtaatccttgaatcattgatgatgatttgttgttattatctctttgagaagtgacctaccacttttgttatatggaataaaagaatacaaaacatatgtacctcttgtcttaatgtcttgttttgtgatttatcaaacttccgtccaaagtggaacatgattaaagttaggtttcaattgattggataaggacaaagactggttgttgtgtcacatttcctctctctctcagattttacaggcaaatcgatttcactcgaagactggttgttgtgtaattgtgttcgtcgtctcaggttttcaatatctgtctctttgaggtaaaagtttcgatttttacgtttcttgatcatcttattgaactgggtttgatctaaagttaggtttttttagaatttttaatttttgatctttttatcgtctgggttcgtacggaaatagaaaaaagctgcaaactttgttcttaatgttgataaagttattaactttatgttaaacttgttgagatctggattcgtttttgtcatttgagtatagagtgttgtctgattgttctaaatctggctggtgttttagattgttaataggatagagtcactgtgacactgtcagtgtcctgtaatctaatatatctgacagaaacagctttttgttttcagttgtattgatgggttctgaaggaccaacgggtgtgacgattcatatcacagggttcaagaagttccatggagtagctgagaatcctacagagaaaatggctaacaatttgaaagaatatttggctaagaattgtgtttcgaaagatgtgaatcttggaagttgtactgtgcttgagactgctggtcaaggagctcttgcttctctctatcagttgctacaatccgcggttaacacaaaagagtcagagtcgttgaccggaaaaaccatatgggttagttagttagttaagccaagtgatttctgatttgattctatatgatgaagtttctctgaagttattgtgatgtctcttttaggttcactttggagttaatagtggcgctacaaaatttgcaattgagcaacaagctgtgaatgaagcgacttttcgttgtcctgatgaattgggttggaaacctcaggtttttgttcactcccctttggttgtttttgtttgataagttgtttagttccatgaaacattcttgtggtctgcagaatttgccaattgttccctctgatggtccaatctcaactgtaagaaaggtatgttgactttgtctcctgattctgcagagttggccattcttgtttttgtgttgaatcttgtttatgatttgcagactaatcttcctgttgaagagataacaaaggcgttggagaagaatggctttgaagtgataacatcagatgatgcaggtcgatttgtgtgtaactatgtctattaccattctctgagatttgcagagcagaataagaccagatcactctttgttcacgttcctcttttcgttgccgtggatgaagaaacccaaatgagattcactgtttctctgctggaggtactcgcttctatttgcaagtaatgttatcccaaatgtggctattcttattcatgaaatgtgcatcatggaccgattgtctccccacgggaaaaattcgcttatcaataaatggaatataagttcacttctctactatctcctcttcatatatgcatcattgcattcaagtttcataaactagattcattttcttcttcaaaagtggtatcaaatgaaaaatgatatatgcctacttgccagtggtgccaatgcaatgagatttggaaatatgcaatctttctgctcaaagtactaatcattttgaggaaaattcaatgtatgaatctgatttaagggtcttcttctgtttctcaaagtactttttatttatttatgttacaaactagattgacttctttgagcctatcacaactgtatatagtgtgcatcctaaaaaattacatacttttagggtaatgtctaacctttagactaagttcttcgatactctttactgatattgaagctaccctcacatttttgtgttcatacttggttctgaatctgaatacaagttggtgaactgcgatgaacatatctttttctgttagaagtccggaggtgcatcgagtagacaataaacaggtggtactgtaatcttcatgcttccatacgcgttccagcagaacgggttttccaaatgctggcctttggaaggaaacagatcgacttccgtgagtgtgaggttagtacaggggacagagtcgctgcaaccaaaatgtatgggtgggcttctcaggtcgtaagtccctttgatatttgcatagagaacatcgcttataatgactgcgctggtttggttagcacagttattggtttgacagtagtactggtctatcattatagggttacgaacgttgaccatcaaaatgttactgaacacaattcttgaaaccgagcctgaccctccttgccatgtcttgatccgaacaccgttgtctgagttccatatggttgagtttgtcactgttatgttcgagacataggcctgcgagttgtggactccgaggctacctatgctgcaacattacc

SEQ ID NO: 37400 - DNA, 4615 bp, Arabidopsis thaliana landsberg
tgcttcaattggcacttaagctaagaaactcttcaagtcactcaagttattcatcatcatcactccacgacttgcgactgttaaataggaatccatctaaattaaatcgttatatggctgtttcatgtcttcactagctgctgttattcactttttcttcaccttcttcaagtggagatcataaacaccagtttcttttatcttcttaaccttcggaagaagattacatttccacttctgcttagatcctaaatgaaattagtatttacaaaaattaatcaacccgaggttccagcgacttctgcagctctctgtctcatcatctccatgacggcagctctccgcctagaatctgattgctgttgtaaccttctcagatgttcctttaggtccctgaattgagaagatttacaatgatcaatacaaatcatgcggaccatttttttcaaaaaagctttgccatatgttatgccccggttctaatatatccaaaaatgtcgtttttactttcaattttacgtttttacttgttgaaagaaaaggcaaatactgaatgatcccgttaagagatcgattgcaaaatgttagacagggacagaagttaaagagattacccgcatcgaggtacatcacactcggattccttgcaggcccgagcgtggagttgcaacagataccacattttcttgcatagaacacaacctcctgaagcacgtactttgcagcggagaccatgtcggaatagccccttcactttgcggcagttgggatatagacaaactggagaacggcattgcgacgcatgcaccagaagatcgagcattttcctgagctgcatattttagataaatgaaaactttagcacttcagatacattgtgggagctatatgacctaacaaagcccaatggttttctcaaatcagaagaagcctaaagcaagagaagaagaggcagttttttcaagaggatctaccatgcacaacaacaacaacaaaaaactgaatattacagtacctgcaagactcgcaattgcctagcttctttattctgagcgttttgatcagctagagatggatgagttgttaacttatgaggatgattaatacaaccctctttcttgtaacaagcattgcacacatcatagtctgggcaaacttcacagcgccagcctagaccactttcaatatcgaggtgacatacgttacatgttgtcacaaaggcaggagcagtaggattatgcagatgataaagcaccatcatggaagaatgttttgcccgcctcagtgtatcatactgataatggttcccttgacatagactcaggaatgcttgccttgtatcaaagaattcactttcaagtatctcatctctgtccttagtatccgtaggaatatcggcgatctcaacctacaatatcacacaccttatcttttgcgatacaataaaatagaaaaacgaatgagacttagcgacataacctcgtcacagttcctgacccaaaacaagccaatgcaacttacaggaaaaatattatgtttatctttctgattaacaggatgtctttctctgtcttctcgtttctgctcagcctcataacatctgaaaggtataaaaataacacaaagggttaccaataagtttcttccacaaagataaccacaaacgcttccaagttatacaaaccaattcacaataacaaaagcgccaaaacgagcggaaaaaaaaataaacaccagaagtgaaaggacaattcttacccatcacataactggaaatctttgcattggctgcaaacccaacgatttccagttaccatcagcgtacagcaatgtgtgcaactatgctgcaagtgaaccatgataaaatcctccttcattggatgaatggtctcaccaagctaaacacaaacagaaataatattaacacgaacacaaaggcaaaaaaaaaaaaaaaaacgaattacttaagctgatatgcaggaaaggactagtgcatagaaagaaaatattactctatgcattagaagcagatccttggaagcattcccagatagatcagtctgaccagaagcttttagagcccttttagtaatggttttcttgagcattcctttcttatttccctttcttccatcttcttcttgactcatttggtatataagatcctctgctgcacctggccagtagtcaccgtcaaaatacgggagcctagctgctgtaaccttagctctacattcaccagtttgcatgaaaaaatggtcatatagattgatagtttctgcaacaatgccctcctttgaagcttttctcaacattgctaagtacctgcgaataacaacgtgggcagttggatgatgtaaatgactttttcatatgaaagtttacgaagttcatcccaaaaaggtaaatgaactgaccactctcgtagtttatcagattttggcgtcttctgaatttctggatgacaatataagatataatcctcgcccttcagcggcggacaagcccatatgtagcagctcgtgaaaccacgcaacttgcagtattctaggtagccgatctataaaaaggatcagattatactcttagatcctccatacagtgtagaaagtaaaaagcacagatattggttaaacaccaaggtttcagaagacaaggacttaccagaatttcgtggtaaacaaaagtacgcagagcttctccgttataagatctaacctcgggtctgaagtacttgacagaatccaaatacgagagataaactcggcgttgattgggaaatgcgcattcagaaccgaattcttggacgtacatcccaaataagcatacttctacgccttcaatcttttgaaacaacagaactacctggaaaaataaaatggcaagggagtgagaaggataattgtacgagaggaactccagaaaaataacgcagatatgcagtaaatacagtaacaacaatacgccttgatcattcttaccttggacttgtatgcaaattctgttgggtaactgtcctcccgaaaaatttcaagaaatcgaggtttgacttccagcttcttgtcaacagatgaaacaactctaatcacaagggactcggcagtgggaatctgttcgtatcaagtcaaagaaaaaacaaagtcagcttcaatatactgtttctaacaaagaatcactagatcaaacaaatagaaaaataaaaataaagagcttgcagatgtgaaaataaatgaaagaaataaacgttaacaaactccaccattaaattacctcatcataactttttccttgagccctggctctctctgttctttcctgcttcagcctcttaaacaaccgctgctctatatggtcactgagaattgttcgcggtaagtctttagctccaagaacagcactctgaggtaaaggcttcctcttactttgctccacttttgctataaagcaatatgggcaggtatactcagcctgccctccgtcattccttctcccattaaataaagcacatatctgaagctgccacgcctcacatttatcacattggacccactgcaaaaatcatacatagaaacaaaatatagcatgaactaaaaaaacatacaaagacgggagacaaacacaaaataagtctacagagtggataggcttttacccattcttcagtctcttcatcatttttctttttctcgagtcttgccttaggcataggggtcccttcagcgagtatagtgtcgccgcgggattcattataacatggaatacaaaagtaatgacgagtgtcaccagctcctacggtgtagtacatagcatttctcttgatgcgagcaccacaaggggtacaataaataggtggtggctcaaaggtaagcttctccactgcacatagttggcaggaattctcactcattgaatgctccattgcctgattcttttctgctttggctttactctgcaagcacatgaaggacaatcattaatcaaatatctatttagataaaatatggaaaaatgtgtttaacggaacagctcaatcaagcctcatactgcagatgagtcatctagtacatgtaaaaagggaaaactaatcaaacaagccgcatataaagcgaatactagtaattaatcacattattgtgtaaacctcaaaagttacagaaaccacaaacctgcccaacccactgacggagaccacggatatgttctctcacttgttcaggagtgaacaattcagttaatgaaacaccctttatctctggttttccagattttgatgtatgttcagtagactctgccagattttctttcttaagtgattcaggttctttctccactttggtagtctcttgcataggtgaaacatcagataaatcttgtttatcaggttgactgacaggtctttgcttgggaatattttcagcaattccaatttttgtatctttgaatccgggtcgtgtctggacagaaaagtcagaaacctcagctttcacttcaaaatattttgaaggtgcacgtacatcactgtgcttatgatcttttctttcaacgtactgagatgattgtgcttctgttacggaaacaactgagctcttacaactttctgtctcaacatccacag

SEQ ID NO: 37401 - DNA, 2512 bp, Arabidopsis thaliana landsberg
ctcatttccttgaacaaccataatagtttgtataacacttccctgcgtcaacaatacctgcaaatatcacttcaatgtatgcataggaacgtaaagtgtaggtactctatcttcatacctctgagggtataaaaccacattatctgcaaatatcacttcaatgaatgcatatgaatgcaatgcatatgtcctctgcattcatacctctaagggtatgaagtcgcatcgtacccctcctcgggcaacgtacgatgctaagttgtaccggtacggtcggaccataggtcacgacccaacttcagatgcaagtgaatcatgcaatgtatatggcatgctgcatttatcaatatactttacttccttcacatacaatacaacctcaaataatacttcatttaccttcagatacaataccaacctcaaataatacttcatttaccttcaggggtgtgaattaatctcatgggtcatacttgaaccataatcatcatcaataaatgatagagcatcaacacaatacaatcaagtaaaacatcatcatagagttcatttatgatagaatccaataattctgaatattagagtgtaggtgatagagataacaggtcaaaacggtagcaaccaccgctacattcacttgccttcatcgaagaagaaaaatgtactaggcatgatctgtagtgtagccactgctagcgggcataaaacttagtacaaatatttacaaacatttgccaacaatcaacaaaacactcctacacttgaaaccaagacccagtggaaagactccaccctgaaccacatgccatacagtagcaacacgtgtttgttaattttgtatctttacaattaaaacaatggtgatatcaaacaaatactctaggagtatctacacacaacactctataacttcggtattcaatggataattaaattctgtcatcaataagttctaaaacatctgacaagataaccgactgaatctgttttagacagcagcctagttaacatcaaaattcgatatctcccaaactactgaaccaaaaattatgaaattctgctggcagtaataaattttatccctctacaaaagtctccatagttggaagagccaattcggccatttactagatgaaacccaccagtgaacagaaccgctaatttttgtcaagcaaacaggaacagccacagtaaaacaaacataactggagtttcataaatcatattgtcgggtaccgtaaataggggtacccccaacactcctaaacacagctggtaaccaccatcagcacaagctgaagagattgatgggcacgattcaggtaaaggcttcgtctactcatgggacgcgatctcgcctcgcccgagcccagcctcgggcggaaacagaagtcccagacgaattctcgcttcgcccgagggcctcctcaagcaacgggcgcaccctcgactcacccgaaccccagctcgggcgggcttcgttgtgaagcaaccttggccaaatcgcctcaccaaccgaccgtatcgcaggcgcattcaatgcgaggatcgcctgacaccttatcctgacacacgtgcctcagtcggcaaggtcgaagtgaccgtagtcacttcgcccttctactgaccgacctaacaagaaaatagcgccgctcgcccctctccgactgctgtgccactcgacagagtgaggctgacaacagctaagtccagccttggcaccataggaagctccgcctcgcccgaccctagggctcggacatagcctcagctccgaaagacgacgaactccgcctcgcccgaccttagggctcggactcagcctcggctccagaagacgatggactctgcctcgcccgaccccagggctcggactcaacctcgacctcggaagacagtctctgcctcgcccgaccccagggctcgggctcaacctcgacgctggacgacggactccgcctcgcccgaccccagggctcggacacagcctcggcctcggaagacggtctccgcctcgcccgaccctagggctcggactcaacctcgaccttggaggaatcgccacctcgcccaaactcgggtccggaccggccacgtcgccagggggccatcattaccctgcccctagctagctcaggctacggggaacaagaccagcgtcccatctggctcgccccagtaaacaagtaatgatgacaccccgcacgctccatgacgacggcagctcccagccccttacgtcagcaaggagatgtcagcaaggatccgacaaccccgacagctgtacttccgcaaggctctagctctcctccgatggccacgacatcacatgaacagggtgccaaaacctctccggctgccacgacggcatgtacttagggctctagctcctctctgctagacacgttagcacactgctacaccccccattgtacacctggaccctctccttatgcctataaaaggaaggtccagggctctcgtacgaagaggttggccgcgcgggagaacg

SEQ ID NO: 37402 - DNA, 3138 bp, Arabidopsis thaliana landsberg
tgaggaaagagacgagagagtgttggtcatggtaagactaagaagacgatggttagtggagttgttaatggatctggaagagacgccattggagaatctgaggaggattactctcatggagcaatgggaggccatatagtctttggtgtggattgagaatagagggaatgaggtaatcaatcgatttctcaatgttatattggtttaaggtaagaaactaggataagcgagtaaaaaacttctttttgcttggaaaaagttgcgattgtgattttgacttgaaatctgttgttgagccgcgtgaccctcacggactcaaaaaccaatccttcctttgcttataaaccccaatcttcttcttcgagagagagagtgaaagagaagaaaacgacaatgggacacgccacgagtctctctcacttcctcatcctctcttcctccaggttctctcgtctcgggtctctcactagattactctccaaacccacctctctctccggctctttttcttccatttcggtcaccggacaagggttccgatgctgttgctccgtcgccacagatgacacttctccttctgtaaagtaatggcctctacctgcttctagtttctattacttcttagctatgcattctctgttgaattcattctgatcccattttgatggtaggaaacgtgtggtctctggtgtccagcctacaggttcagttcacttaggcaactatctcggggctatcaaaaactgggtcgctcttcaggttctctctctctcctttgccattatgctaatcacttactgattcaccaatggtatgagacatttgcaaagtttatcactttaagattgtttcttgtaaagttaaagactttaagaactggattcagttttttttctggtttctaatcacttcctcattcactagtgtgtgagaagtagattgtttgttgtaaagttaaagactttagaaaaaggattcagtttttatattttctggttgctacaaaaatttaatctttttttcaggcgttttgtgtttatatgtttgcaggatacatatgaaacactctttatcatcgtagaccatcacgcggtatgagttatctacctttcggaagcttgtttggtgatatatctctcgcggtgtttatctatatcttgcttgatctatgtagataacacttccatatgatacacgtcaactaggaaaggcaacatcggataccgcagcactttatctagcatgtggtatagacgtctctaaggcttcagtatttgtgcaatctcacgttcccgctcatgtcgagttaatgtggcttttatgttcatccacacctattgggtggttacagaaaatgattcagttcaaagagaaatcacgcaaggaggtgcgtatatggttgcttcatggtcttatcacattattatgtgctttaaataaatgaaagcgaaatcctgcttaatagtatttaaggtttgttgttgatttctttgtatacttgtttagatatcatatgtaatcttctaatgtattgggcatacatttagaattctgtttactgattccattttcgtcttttttggcagggggttgagaatgctagtgtcggtttgtttacttatcctgatctgatgactgctgatatcctcttgtatcaggtgatgctttaaagtagtttaagtgtgttgcaattattgtaatgaagaaggaacacaagtaaaacaatgatcttatatagctaagctcatgtaagattttttcggcgatcatttttgggattgtttcgttgttctgttaaaaagtgcatagaaatacctgctgattgcttgcgggatgaccattttactgaattgtttggttctctgccatatgcctctgcagtctgattttgtccctgttggtgaggaccagaagcagcacatagaacttgcccgtgaaattgcacagcgtgtgaatcatttatatggtggaaagaagtggaagaagcttggagggtatgaaattttgtatgtgcatttagtatgttgagtataccagtcatacaagtctttatgatctatgattttcatgtttcttattggtttaacttccccttcatttgtattccctcatccgtataacattgtcaattttcattttcagccgcggtggttcgctctttaaggtgagactttcgaaatcctttgtctatcctcgtagcttttatttatcacagatggttaattgttcttcatatttatcttgtttgtagataccagaaccactcataccacaagctggagctcgtgttatgtctcttactgatggtctttccaaggtagtatgttttcattcacagctactttaaggtttctggtcatttattttttctttctgcattcagcagttgcgtcactattggtcttcaatagataaaattgtagagaagacgaataacgttcacaaatcctattggaaatatattgagataatccttcatgttatttaacatcaaatagagttttactactagctagtctgtttctttatagtttctctctaaattgtaaggattaacacacttctggaaatttgcctccctaactgtggtcagaatatcatattgaactaatccaatttttgggcttacttattgttgttttcaaatgatcaagaggaattttatacttatcgctaaggtcttactgtcatgtaatcttgtagatgtccaagtctgccccttctgatcagtcccggattaatctccttgactcaaaagatgtaagtaaaatgaactcactcatgttctttgtatgtgttcttgttctgctactaaatccatttctcatccctcctttcgaaaatagttgattgtggacaagataaaacggtgcaagacagactcatttgctgggtgagcgctacttatgtcgctaaaaaatttcttgcaatgcacaaagttttttttttttcctttttcttgttaccatttcagttttcaaattgagatatctaatgttgaaagcttctgcttcttgttgttccaacaggcttgaatttgacaatgctgagagacctgaatgcaacaataacctctcaatatatcagattgtttcaggcaagaaaaaagaggtatgagaaagagataatgtttagatt

SEQ ID NO: 37403 - DNA, 3148 bp, Arabidopsis thaliana landsberg
  unsure (1)..(3148): unsure at all n locations
tttagaacttatgtatcggaatttgaaaacaagaaatcaaaataactttgaaagtttcagagaatgattaaactaagttgtgcatcaaagatatctagctccgagattgaatcctgtgatggtatgtctcattatactgcttgtcatctgaaagccgaattgctgaaatctgatttcgaatttgtttatccacattctgtgatacgctgagccggttgaggtgtcgtccattttaataatttcttatataaaaaagaaaaatttatgtacctactaatttggaaatctattatatgcttttaaaagaaagaaaaatatttgggttcactactaggggtaaacccttatattcacctcttttattttagccaattaaaatctgacacctaataacaataataaatattaattttaattataaaatttaatttgctactaaaacgaaatgatgtatcggtttgggtttattagaaaaggtcagggtttagattttgtgattaaacgaggttaaatatcggtttgggtttagaaaagtacgattagagtttagattttatgattaaacgagttaaatattggtttacgtgtataatcatatttagattttacaattaaacgaggttaaatatcggtttgggttttaaaaatacgattagggtttagtttttttatgactaaatgagtttaaatggtggtttaggtttacaaaagagaattagggtttagattttgtaattaaacgagattatatatcggtttggatttataattatagttttaatttattatgtaatttaattaggatttgacatggcatatttttattgattaatgcaaaatgaggtgaataaaggggttcacccctagtcttgttcttaatttagagctagatataatgtgaccaaggacatataagtttccttgaaccggcaagattatgatgtattaattacagcatcaacaagattatttagtatagataataatatttggatgctggggaatgctccttgtaactagatgatggtgaacgcgaagtcgtggtcgtcccaatcatcattaaatatctccctgtacctctcaaagaacaacacttccttggtgcgtttcacaaccaatgctgtcgtaattcttgttccatagtgttcgtatccaatctttttttttaaaatgttaaaaaggaagaagagaggttacgataatataatgcaggtaacgatcataaaaaaaaaaggtggctcaattataatgttttgagtttcttaccttcatgtcgacgaaaaaaatagagctcagtagcacggtttcgtaagctttgactggatcatacataatctcagcaatgtcccttattggtggtagtcgttctctgttaatcatctcacaaaaagagtgtctcatacgtaagtcctgcatgagaccaaaaaagaagggtttgcttttattaagctatacatttctatatgaaaagatttgcaaatagggaaaaactctgttacaagattcttgtactaaattaattaccctgtatccaacgtctgaatcgagtccagctgaagatagtgtgtgaacaccaagaccaacaggctctgtatagacaatgccatagtcagagaaacgcgggttggagatataaagcattgagtttgaagctatgctggccacaattagatgaaagacggcctgtgttcttgctacgtatgtaatctgcagccgatgactttgcaaatgcctctggactctcgttgctctgtaatcaacgcaatcccgtgagaatccagactagttttgaacgaaaaatcaacgaaagaaaaaagcattaatcaaacctctaagaactcaagagtacgactctcggcgccgttgaatctgtctctgttaataggccctgcctccacaagaaaagcgactcggcctcgagtagaaatacctaaccacgtcccatcggtctctgggcaacgaccacttaatatctggtcagtttcagttttaacccaatccgcctttcttattgacctattaatcaccgatacagaaaaaggttcatcaacaatgtctgatgcacaaattataacctaaaacgtcgaaagaattttaaacttgccttaattgccagttctctctgttctgcagcagcgtcagtgtnnnnnnnnnnnnnnnnnnnnnnnnnnctacgatccccatttttgtttttgaaagaatattgtaaaagttttttgctattgaatctcttgctctgtgttgttcttgttgtcattttgagttgtgacccctctctgtttttatagccgaaagatgattcactgtgctctgctttttcctttgcttgtcagcttcttccaacataggtattccaacgcgcttaagagcttctttatccaattttggatattataccttttgctgttttctgtcaccatcatacatattctctcctccattcactaaccaccagaagccgtgtctatgtgtttctaatttacttttacggattcatgcatgtaaaaccacaaaaaaatagtggcttctagtagcataaacttgctatactaagtaatatggaagacacattgtttcaacatttctcaaattgttccaccttttgctgattgagtaaggactaaggagtaaagaggactcttgtatatgtggaaccattcagaattgtttttactgtactaagaaaatacaagaagtggtttactagtagcacacaaggttagaactcaaatccaactactctttggtcttaattagctttggtagtccgattctattggctctagctagtgttgattgagtaaggttgagtcatttgtatatggaaccagttagaaagtacttttactaatctgagtaaaattgaaatgtagacgttaaagaaagtacttttactaacacgttggaggacagctaaggccaatatttgttggttatgtcgtgttattgatttgatatatgttaaatgatcaatggtattgcaacagccagtccatgttctagctcgaagtatgaagctctagcctagaaacaggtctgagatctctgaagtctcctgatcaattcttaaaacggcatgtatctaatgcaaatttcagaagatctcctcttggagctgaatcatctgtaactcctgagagatattccg

SEQ ID NO: 37404 - DNA, 2752 bp, Arabidopsis thaliana landsberg
  unsure (1)..(2752): unsure at all n locations
aaacgttgaaaaataatatagtgagcatatttgttctcagatatgcaatattacaagcttgtgaagttaatgaccaaactctgtttgtgaaaagaagatagaataatgaaaactcacggtcactgccttgagtaatgcatgctcccatgtgtacaccatacacaggataagggtcactgtcagaattgcaaagaggaggctgggttccaggttctcttcccaaataacaatcatttgtcaaaggtttttgccaaattacagtttgattcctttttgcagctatcgtccaacacatacggcccacaagagcactcatttctctccatattctgaggtcctcttcatcttgtgcatatgcttctggagatgaatatgcaaaatagccaccaggtcttagcaccctgtctagctcgagaagaagaataccatctctttgaagccaatcgatacgacaacgtgaacagtgagcaagttcaaaggatctgcttgggtatgggagcctcttggtccctagaacgccgaggtatgcacgaatccctctctcaagagcaaattggatttggttctgatgaacatcattaggtgccaaagacatcgtcataatttctgatgcaagaagataacctccaaagctagcaacaccacagccaacatcaagaaatgtcctcagccttcccccattgttcaaaacattgttcggaaaattaagcatctgcaatttccatgaatagtatcagtaaatgaagatggacacacacctctattccacataagatctagtaactgccttacatttgccattgatgcaatatacttatcagcaccataatgaaaatgtgtgcctccaccagggaaattgattttctctcctttaacaaccatccagttttggtcagacttctcatgcgctaagtgagtatgaggaatgttcactttccaaacttcgtctctgcttttcggccacttgattggaatctagacacattcacatagaaaaaaacttcaaaatatgtcaagacactgatcatatcaacaaagctagagaaataacacaccttataccctggaggaggaggaatcaagcaattaaacctcctttcaggaggaggacagtgacgttcataatgctccatcaaagacaaatcaagcttcaatctcatttggtatataagattcctatctaagcaaggaataagctccgagtgtcgatcatcacacacctttacaagaattaacaacaatattaaacacatattgctcaactcaatcatcaattacacaaagaaggtctaaagaactcacaggaaagcttctgggagtgaaaccattccctactacatcttctacataaaaagagctagaagtgtcatctttcttagtactatcatcatcatcaccacccaaaccaagtttcctcccatactcaatagctttatggttagaggaaccaaagaagagatatacaaaaacaagcactactgatgcaacgcagagtaacacaatcaccggctttttcttccctccttctgatgtccccctcatcgccgccgctctgtatcttagtgattactcaaaacaagagaaacacaaaacaacaaacatatcgtgcttatgccattaacaatctaaaaagcttcttatcaatggatctgataaacagagaaacaaagctacgataaaaacacgcaattaacgcacacagaaatatcgatatcgaattccaaaattaaacagatcgtaaacctagttccggaggaagcttcagatacaaggttaaaggaaggaataagaaaatcagagaagcggattaaggaaatctcttaccagtagaaggagagaaacagagatcaagatcaaaagagatgcgaaattgtaggtcattcacatagagagatcggagaaatgagagtgagattcggatctggagaagaagtttgagagactgcttcttcgtcttcttcttcgttggtctatattgggattcgaacgaacaaaaagtaccaaaagcggcagcgaaagagatataatgagagagtgaagagagaaagagaaataaagcgtcaaagtcgttaattaatttttcattgaaatatttggtttagttttatgtgtcggtgatcatttttgttttcgtaacatgacaatatgaattatatgaagaggaaatgcattttcgtttatttattaatacatattgatgactttttgtgtgtttgaatattgtcgcctctggatctacgctttttttctggtcttggtgagagtgggttactaggaaaataaatgactcgatttggttcagcttacacatgtctaatggttgacttgtcccgattttaatatattttctagacctagttagttaggtatgtaaccaatgttacgaaaaattaattgagtatactagtgttagttaggatataaaaacgtaagaaaagaaaattaattaagtggatattttagaaacttatgtcatttgcaaaagctatttaattggatgggtgctatactctaactaacatgttatttggcaaattgttttgtaaattttatcatcattttcttgtatcaaattgtacatatcgtgttattttcgtcgtcatgcttctatatatgatccaagtatcctcaagttttcgaaaatatatattgcanaacacacgaataaattcgtatgataatttgtgttttttaaaaaattaatcttattagctggtccgataacacagggtaaaaagaagtgctttaaagt

SEQ ID NO: 37405 - DNA, 3150 bp, Arabidopsis thaliana landsberg
caagtcttgatcttgaccaaaattagtttgacttgctccccttaacgtatgttgttctctcttttatagtttctgacttggattttccttttcaagatgtagaactgttgtgcaaacttgagctatcagatccatattgtagctgaggatcacttataatctcctacataaggaaaatatatagtttaactaaccgaaacatgtttaaaatctagagaaggtgcttaatggatttaatacctgtatcgaagtcgcggaccctgagctcctgatcggtgaaggctgtcttacaccaaatttaatgctttcttcagctagatccctgagtttgttaagctcaggcaaaacaatgttccctaagtcaggtctgtctttgcgtcttaattctgcacattgtagagcaagttttgctgcagccaaggcttcttcgaatggccagtcaggaacagcagggtctaacatctcagcgaaagttcccttttcaatggctttttcgacgtgatgagttaaacccattggtggcttagctgtaagtatttgcaaaagcataatgccgaatgagtaaatgtctgacttagttcccaacataccggtctgctgatattcaggatctatgtaaaagaatgttccagcggttgaagtcattctatattgggttgcagtgtcagcaacagatggagggacgagtctggccaagcccacatctgaaatcttgctgacgaaatgctggtcgagtaatatgtttcccggtttaaggtcacggtgcaccaaaggctccggtttcatctggtggaggaaatgaagaccggttgcgatttcagatgctatacgaaatcttagctgccaagaaaggattggagagtttcctcgtctgaagagacagtcgtctaagctaccattggccatgtattcatagactaaacatccgtattccggacatgcaccaagcaggagaaccatgtttggatgtctcatacaggttagtacttcaacctctcgctggaactgagaccttccttgtgccgcgtctggtcttagaacttttatcgccactttagtatagtctagtgttcccttgtaaacaggtccatagcctccttctccgaccttgcgactaggcgagaaatcttctgtggcttcttcaatctcctcaatagtgtattttctgtaccgctgatcggttcctaaaagctgatcgatcactttcttcttctccaagtaagtccttaaagcattcacctccgcgatctgtcgctgacaaaactctcttgcgagcaacgctttcgcagtttctacctctttaactgccttcatgtaccgctctttctccagcgccgcggtgttcctctgcaactcttctttctccacagcattgttcactcttttagattcattcaaatattcagtcgaaagcattttaacctaacagaaaccccaaaataaacactttacttggagaaaaagcaagcaaaatgattcaccagtgagtttggaaaactattttatagaaacaataaaatcagatataaaataaacacttctttcacagataagttttgatggccatcacaaatatacaaatttctcttcccaaaatcatctctaatcattttcttgcagattttaggcttcaagatcagaaatctataccttgttttgtgtggagaagagctcttcacaagcttgtttatatttaaagactgtactttgtagctcattcttcaaacgttcgacctcttcttcaatctcaacctgtcaaacaacaccaaatctttcaaaaacctcggttacgtcataatagctagtctcatcattgcagcaaaagatgatggtaaagtaaccttcttggattttcttgatgtttccgggggtgaacgatcagagtctcggtgttcgctaacgatgttctcaacatttgattggggcttggtacatgttttatcaaaatctgagtaattcagctgaggaatatcggatcctctccgtcgcctaaaaatctctggagttgttgcactagaagccttactactttgaggcgttttgggtttattacaagtaaggcttaatgcctcaaatctcagctctcttgccgatgctgacctccttgttcctgcctcttcaacatccaaaagaaagagaaaaacttcaggccttcaagacatcatagtttatattatatgcattatcatttatatattttataatatgaatctatacttgatagatgcatgttcgttgcaaatttcttcgtataacaaatttatattcagagttataatgttatgcaactagtttactttttgtaactaagattgttgttatatatttttcaaaattaggttcaattcaaaaaaatgagtcagttgaccattaaaattatttttttttttattcgctaagaatgtcagaattgagaatgtactatatattaaaacaacctaaaaccgctattcatttcctatgaattctgatggatatttgactagctatatggatatttgaccagttgactgtcgaggatcgggtaacgttggagaccggatagtgtggaaactatccgaccaggctctcaagaagtcatgggcagtcgcggctgcgtgtggacttgtgcacggctctggttaccacgattaaagagaagttttaagaaatgagaaaatatggggtgttcaaataaaaggttttgcctataaattaccatgtttaagaaactacatcaactatggatgtagtattaaacaataattttcttttaaaaaaaacgaaacacaaaatcctaatttttacctcggttgattaatggatccatagattttgtagtgattctgtctttacacacaatgtatacttcacatgtttctggtgcgtatcttaaaacggtcagtggtactcctgtaccttttgttctcctagaccgaaaatatcgctgttagtgtatataaccgagttaattaagaagaacgtaaaccaaaaccgaactatgtaaatttaccatgtgaatatgtttgaagtgaatgatcccataaccaaactgttaactcctgagatggatatcaatctgacaagtgacaatgccggatcgtcgtactctagcaatagagtcctacctgacactgaaggctacaatatttcagggagttaaaagtcagt

SEQ ID NO: 37406 - DNA, 2637 bp, Arabidopsis thaliana landsberg
  unsure (1)..(2637): unsure at all n locations
tcttagggctattatctgtccatccacaagcaccaatagtatcaatccatcacctagacgtagtggatcctatattcccaaaaacaaaccgagtcaacgcattaaagaagctaatgatcccagcgaaactcgattcagcgagtcttgtccaacaatcggtatgctatgataagagtcatcagtggacaatgtcaatctcgtggggatacacagttcaaatcacgcgtacgtatatgccagcaaggatgatggaagtgcctactcgcacttttaatgattggcacttacgtagcgatttcactaatcttgcattcaacacacgtccggtaacatggacggattgtcagcgtcctcgtgtgttttatttctctcatgcgtttagtaactcttcttcttctgatacaacgacgattagccaatacttgaggcacgacgaatggtatcctaaatgtgaatggggaatcgcggatccttccgagatcaatcagatatttgtctacaaaaagcctactccggataggtggagcnnnnnnnnnnnnnnnnnnnnnnnnnnnnntattcagaactctttagtcttctattattgttcacgagaaattgtcaaatgtttttgtaggctccacggagagattgttgtaaattagtgccaacaacgaccaaggggacaatggtgatcaatgtggcagcttgtgcaaatgacgaaattgttgcttattctgataaatagtttgcttcttgttaacttcacaaagaggacttgctttttgaaaagaaaatcttaatgggccgaacgtttgtttatttaatgtagtgacatttatatagttagggaataacatacaaaggcggataatctaacacgaagagttcgtacctacccgcatcctatcacgtgtatcaacaatttttctcagcattggcttatttgagtcaatgtagcatagatgtcgaagaaaaaaaaaataggtttgggccttaaagacaagtttgaatgtatgggcttcggcccattaagacaagaaaaagacaattaagacggaacagctgtaatgacgcgttgacttggtctctctctcaacatgtcaattttcattacattttcttgtctgatcaaatttgacgactgcaaaaatttgtgctaatctttccacgacaatggcgatcctctacacaaggatcgtattacttatctccatcttccttgcatcttcttctgcatttgcctctttctcttctgtcgacgagtacctcgtaaactgctgctccaacctttactccaccgtctataaccgccccttcatgcgcgacgcatctgcatcaaacgaccaattcttctcctctgaacgatcaatagctcttaaaggagaaaatctacctcataacgttccacaaatttacagatccgctaggatattcgcacaacaagcgaaatacaagttcaatgtccacgagaaagggactcatatggtacgtctccatttcaatcgtctctattcctctagaatcgatctcaatgacgctctatttcacgttaccgttaacggtcacgtcgtccttagaaattttagcggcgactcgtcatctgattttgaatctagggttagagaattcttgatttgggttgatgttggagaggttgttattaggtttgttcctagtaaagattcgaactttgcattcgttaatgctattgaagttatctctgcgcctaaggatttgattggtgacgttgcaacctctgtatctcatgatgggactgagaaattcaatggtttagctaaacaagcaatggaggttgtgtatagagtcaatgttggtggtagaaaagttactccttttaatgacacattgtggaggacttgggttactgatgaaggattcttgaaaaccggtgatgggtcgtctgagaaaagttacttcaccgggaggattaagtataggcgtggaggggcgagtcgtgaagttggtcctgataatgtttacaacactgctcgtgttggtaaaagaagcaatggattggttgatatgagttggggtttcaaggtgaatgtgggttacaagtatctcatccggatgcatttctgtgacatagctagcaaatctctcggcaggctttatttcaatgtctacattaacgggaacttggcgtatgaagatttcgatatctcatacgctgcggataatgtccttgcttctccgtattacattgatttcgtggtggatgctactgctgatgacaacaacccttcaggatcgtcgataaccgttagtgttggaccatcaaacaagactagtgttgatggaaatggagtggatgcgatattgaacggtgttgagatcatgaagatgaataactcgatgggtagtcttgatgggtatgtttcaacagagatgattctgagtacttgcccaaataggagaaacctgagcatatttatcgcaatgttggcgtttatgtgtatatttatgagcttctacattgtgactcaaagaaagagagttaaggatcagtatggctggacaaagctgtccatggacgtgcttgaagataattccacgtcagggaatcaatttacagcaagaaagagaaagaagatgcttttgattgttgaatatacgtataaacagtggacttcc

SEQ ID NO: 37407 - DNA, 3433 bp, Arabidopsis thaliana landsberg
ttcgtcttctctacaagaagtgctacacatcattcagtactcccgttgttttggtgcaacaataaagaattcgatattgatggtggatgcaatatatgccgtcactcaaattttggcactgactattatttttgtgacatttgcaagaaaaagtatcacaaagaatgcgtcgagtctccacttaaaatcaaacacccttatcaccctcagcattcgctccaactttactttcacttccttctttacagtattaattgtttatgctgtagaagaagagtaaacttcctggtatattattgtaccatatgtaacgttttcatgcatccagtatctgcaatgaagccaataccctttgttatagacccaccaaaaaggcatgtcgaccatcctctcactttttttcctagacaaacttctttaacttgcaacttttgtggtttggtgagaaaactatatcccacctacatatgtgtcagatgcaactttgtgtttcatagtgattgtatgtactctccaagcgtcatcaagatatcacgtcacaaccatcgtatctcctacactttttctctacgatcatgtgaatggtcttgtggagtttgtcatcaaattattgacggtgattatggtgcatatacttgtgataagtgtggtcattatgctgttcattcgagatgttctctagagaaaaatgtgtgggatggaaaagatctcgaaggtttaccagacaaagatgatattacacaagatgttggatcattcaatataatatctaaggaagtgatacttcattttctccatgaccatcatctccggctcgaagtcagtatactttataacgaaaaaaaactttgtcaagcgtgttatttacctattttcgaaggtaatttctattcttgtgtggagtgtgatgatttcatcttccatgaaacatgtgcaaaattttgcaggatattacaacatgcattacatcctcatccactaacattaaaagctgcaagtagatatggtatggatcgttttggatgcagttcttgtaatcgtggttgtcgtggctttgtctataagtgttgcataaggggatgtatcttcactctagatgtaaaatgtgcttcaattgctgagccgttttgtttccaaggtcataaacatccattgttcatatttgtaggccgagacggaaaactcatatgtcgcgtatgcaaaacagaacgtcataatcaattaaattgcatcaaatgtgattttattgtttgtatgaagtgtgctacattaccctatagagcaaggtatgaacatgacaaacactttctcacagctatatgggaagaagaggtccgtgaaaaagattggtgcgaagtatgtgaacgtaatttaagagacacaaacacaaaagtgttctattggtgcgttgagtgctgcaccattttccatattgaatgcgtactaggtaaaaactcgaatttgagtctaagccaaactctcaaattctgggttcagcgggctcaaattcttttagaaaatcttaatctgtaatagactaatagacaatatttccaagcattcagtgagttatatagctctacctctctattcaaatgtaatttgttttcttcatatttgtctccttggtttgtgtttgaaaaaaaataaaataaaaaaagtctccttggtttgttaagttcagtatattgttcaataaacatatttcagaataaatttttataataaaaatatatcttaataaacatttgatccaaaataaatatatattcaactaattatagtgtatatttaatataaatatttatatttcttttgttaaatggtttccttgaattaatacaaccgcttgtaactaaaaaactttgatattctccggttataaaatgggagctccattcaaattgtttttatgtgctctgttctcattaccaatttgatatcgtacaaaaagagctgcttcctactcgtgatctagattgtagatttgaaccttatcaaatgtgtgatctttactatttatcaggattagattaccaaaaacaaatcaatagatgatgactctacaggcttgagctttatttttggctcgaaaaattgtctagatttctaaaaccgaacaagaacatcagaaaacattgaaatatcaacattcctagttataaattaaaccaaaatttctgaaacattgtggttttattaagacgcccacatggatgagatgcatcactccttcacttcagctcttgatgatttgttattcattatagcatctttttttaattggggtcggatttctccatagctgcaaaagagaagtattcgaataagcaagttaacaaaaagaatagagcagaggcaacacaaggcaaaagaaccgggtatggagatattactgttgtagtttagaagcttttcgattagatcgacatgagtcataagcatacgcctgcagcagtaacggactaatccaagcgcgtcaagagcatccctgcgtattccaaaaccaaaattcagattttcagttcaacaaaatgcaattttagcataatgcctaaaaccaaagtagctaaaagattagatagaaacaagagaatggaatatatcagtgatcacctaccatcatgctctttactaacacttaagataacatctatgaacttcaagatgatcaaattgcaactaaaacaaaaacgaaattgcgcaattccaaatcatgtagcttaacacctagaaccaaacgggctaaagattacactagcgattaaaacaagaaaatcgaaaaatcccaatgatctaacttcatgcttttagtaacaaggctaaaacatgtataaactttcaagatgatcatacaagacaagatcatgcaatctctttgactacacaaaaccatcaaatcattctattgtcatgttccactattgtttcatcttttacatgactctcttttcaactaagaaaatgtcagaaaacgttcaaaattccaagattcaatcactctcatgttcaccaaaaaaatttctcacaaattatgattctttttctaatcataaactatatatcgcttacccttcagcgtaatcagcctggtgaagttcaaggtatgtgtcccatttgttcccaatcacctacaaaaaatcataaacaaaagcttcataaatctcaatactacaaaccctagagatttgtcacacacatatatatataacaaatcgaaatcgtgcaaaaagagagaagaaaaaacaaacctttccacgagtaaaacaacgaacagggacgatcatcgtgaacgaatcgagactttaagagtttatcgtctcaaagcgatcttgagggcttgtctcttaataacaccgttcccgtctcggagcgggggtgtggtatcaagtcgaattgggtaatgctataatataatgccacctattatgtg

SEQ ID NO: 37408 - DNA, 4890 bp, Arabidopsis thaliana landsberg
  unsure (1)..(4890): unsure at all n locations
tgccttcgtactgttcgatgattcgctccactggcgaccatacactgggctacccgccctcctccgatccatcagtgtgttggtgaaggtacttgttggttggatgaaatcgctgtatttaagcgagcaacaagcaggtgaaccagagaaaatgaaatttctcggggaaaaaggtagattttctcgagaaaacggaagggaaaataaacgttcggtgagattggagaaaagtgttgaaataacagtgacgccaaaaacgacagcgtttaacacggagaagagaaacacatgcgagctttcaaaggtaagtgattaatgataagattatagttaacaaaatctttaatcattttcacttaatctgcgtaccatttaaaaacaaaaatatacaactgtttatgttgtatctgttctgaatcatattatctgtgatattttaatacagtttataaagagatttgtttctcttctaagagaaaatttatatacacatattaatcaaatcacatgagtaaattaaaatcccccctgattcgtggtttgtccaggttattttttcgaccaagtttagttttattttggaagaaaattttacaaattcaattattcaaaagcacatggtttgtcgatttggtatcaaagactatatataatatatatattagcccaacaatgttggagaattaattatgggattcaaaatcctcaaacctcttgacaagaatccacaaaggaaactgttactccgagtctaatcttcttggagctggcagtggcaacaaatgaagttctagccatgcttggctaagttttctcaaaggtaattaacaaagtgctcactcaaggttcgaaatttgggaaatggtaaacaagttcacgtatgagagataactggttacatacaataccatttacgcatggtagaaatggtttactaattttgattattctaaccaacaatcaaagatcagtatatctttactatatacagtgttagtattattataaatatatgtttcttttcagtgatttattcggtctgcaaatcctcgttgacaagtaaagagtcgtgacaaatcagtatttgactgtttctatcgccgtcgtcagtcaatggtaaaatatgcaaatagtgagggggtaaatctgacatttcataaccaaaaactcagcacctataaaaccgtcaaattagattccaacaaaactcaacctgacattttttctcctgaagagaaaagtcgaaaaaccaacagaagaatttgaatttctcatctcctctctcgaatatgtctgagtcaagaagatcgctgatcccgagctttctctactcgtccgatcatcgtctttttcaggcgacgaccatgagtactcaccttaaatcacagccgttgatttctccgactaattcttcagtctcatccaacggtaccagtttcgccatcgcgacgccgaatgaaaaagtggaaatgtactcgccggcgtatttcgcggcgtgtacggtcgccgggatgctgagctgcggtatcacccacacggcgattacgccacttgatgtcatcaaatgcaacatgcaggtgaaagttccaagccaacttctctatttgtagttaacatttttaatacgtatgtgataagtaaaatatttagtgagaaaaacttgaatatagaaattattagcggaaaaaaaacagcgaataacaatttttgtttttgtcaacttttacgttttcttgttttacacggcatcgactcttcaacgccgtcgaagacttttcaatctcatgcatgattttgatgttcactcagagagaatattccacgaatttccaaaaaaggcccttaattctgttgttatttcagattgatccactgaagtacaagaacataacttcagctttcaagacaacaatcaaagagcaagggcttaagggtttcaccagaggctggtcaccaacgcttcttggttacagtgcccaaggagcttttaaatacggtctctatgagtacgccaagaaatactactcagacattgttggaccagaatacgcagctaaatacaagaccttgatttacctcgctggctcagcctctgcagaaatcgtcgctgatgtggctctttgtccaatggaagctgtcaaagtcagggtccagactcagcctggtttcgcccgcggtttatctgatggtttaccaaagatcatcaaatccgaaggcttccgcgggttacacaaaggacttgttcctctctggggacgccagattccatgtaagtctctatacacaagaaaatgtagtagagtcattgagatgatgatttcagtaaaagaaaattcgacgtctttgcagatacgatgatgaaatttgctacttttgaaaacactgtggagctcatatacaagaaagtgatgcctaccccaaaagaagagtgctcaaagccagttcagctcggggttagctttgcaggtggatacattgctggaatattctgcgccatcatctcacatcctgcagataatttggtgtctttcctcaataactctaaaggagcaaccgttgctgatgtaagtaaaaaagctccatactcttcaccacaacatcaaacttgtggacacacaacacagagctttttatatgatctgctgacttggtttgattatttcatgtgctacaggcagtaaagaggctagggttgtggggtatgttaacccgtggccttcctcttcgcattttcatgataggaacactcactggagcgcagtgggttatctatgatgctgtcaaagttttagctggattgtaagttttcatcatcaatactcaattcatttaagaactaattatgaaagacactccatcagttaactataattttatcattttattaggccaaccactggtggtgcttctccagctactgcgcttgctccatctgtaagtgcataaaattacaagaatattcctcgcgtagccgtcacgttagagaaataaaagggaaacagtgctaccaatgattgtgattaaatattaagctactggagatgaaatagtgcaaaaatggagtggactacatacatgtatctaatatggaaggcaggaaaaatatgatctgcggtacatgaatggaaccaatttaagagggacaacaactcttgagatgggctgacttgaaagatttgtggaactttttaacattgaatcattgatacattatgcactcttataaagctatgaaaatgatataaaaaggtaaataatttacatatgcccatgccctgatccattgatctaggcgctaggcttctaccaatttattaaacatattccgaaaaccgaagtaacaaaaaaaagttgcattgtatcacaagttaaaaacacaaaaaagcttcatcttcttccatcaactgtcgtcagagaaggtaatcttcttaccgcaagataccctgaagatttccgtcttataaacaccatagagcttcatttcttattcggttaggtctccaaatcatctttttctatcagaaggctgtcttgtccaaggtagtcttcgtacctggaataacacaaaaacccttctgatctctccatgtttaccaaaaacttcacccagtgtgcctcttgataacaaacttatgaggcaaatagttaaatcccttaccaaagcttctttgcaagtttgtacctaatgaacagaaataatagcgttaaacttctaaaatgacatcaaaactctaagcaataagctagagaaatgaaaagaagggtctaccttggcgagtcaagaagaagaaacagagtcagaggaagaagaagaagacgaggacgatgattttgactatagcattctgagtgatgagagcagtatcggttactcggaacagaaactttttgttaacggtactcaagtcttgacagactgatgttttaaaggaaagtaagaaataagaattggttgaggttgatttatttgtgtctttgtctgttaggtttgatctatttgataattttttttttcatttcttcttatccggagatagtaaaatcagtttcttatgaacttagccatacatttggaatctggtagtacaccgttgaacgttaggattgtgacattttttctttctttcttatcaatcgtcgtcagagaaggtagtcttgacaccgcaaaatacgcctaaatatttctctttaatcttctttttcttctgtttgttctccaaatcatcagcttctatcaaaaggctttcttctcgaaggtagtcttcgtacctggaataacaaaaacccttgtcatctctccttgtttaccaaaaatttcacccaatgtgctcttgataacaaaactcaaaaggcaatttagttaaatcccttaccaaagcttctctgcaaggttgtacctaattaacaagaaacaatagcattaaacttgtacaatgacatcaaaactctaataagcagttagagaaacaaatctcaataacatggaaaatcaattaacttgggtcggagagggtatggagctatctcagcctcgacaagaacaacataacgattccgcaatcttcttaggttcttcttttccagcgccttatagtataaaagctttgattagcaatcgtgcttccaaataactacttgtaaatttgacatcataagtatacacaacttttcaaatgactacttatatacttttcatcattaaactagtctcaccttctttgctttgtaagcagaagcaaactcaacaaagccacagcccacatgcttacccctgtggtctacaataagtcgagcgctaacaacttctccaacatcactgaagaaattgatgctgtagnnaatggagaaaaaaatgactgccatgaaaaacttgctacaccaacgnnnggg

SEQ ID NO: 37409 - DNA, 2278 bp, Arabidopsis thaliana landsberg
  unsure (1)..(2278): unsure at all n locations
attgagatcgaaagagtcaaaacatacttgatcagacagaatcatttgcaatctcaaaatagtctcaatagcaaaaagcactagagaaggaataattttcacgacgtggttgcagctgttaactgtttaactttggcctgcaagaccattccagcttcatctgccacgcttttctttttcgctgcgacctgcattgaatgaacatttttgaagttataactaaaatctcaggtaagataaacagcagtaacaatagggtttcaaaataaaagagtattgaaacaatttggcaatgatgcacttgatttcaataactattgaagaaaatggaaaggaaacgtgagatcatagcattgaattttgctttatacgaaaacaatactcagacctctacttagtgtatcatgtatggctctagggactagggagtgtttgacaatgcaggaaaggatcaaccaaagggctttctgactacgtacttgcattccataaaactttaagccctcaaacatttttatacaatggatcaagtcagtgaaagaagtccacaaagaatcacccctagtaacagaatcagactccattcaattcaaaaaatcttatccactttgctcattcacaattttcgtaaatgttatgagaaatgtgttatccttcagtaaaaggacagttctaaggcatattcaataagccgtatgaaggaaaagtgtaggccttcaatacctaaaagtacagttctaaggcatactcactggcattcgaatacatattccctttcactcagaatctatctaaaaaccaaatcaggcctttaaaagttgctaagatagtgaaatgatcctaattgcgaatacatattacctcaaaaagttgatcaaagttggatttgagcaagttgatcttcctctgacaataatcttttccatcatccattgttttctacataaaaatgcagcaaaacacttgagctacacaagaacaaagtcataataatccaattacttattgaagtttgctattacctcaatgaagtaaccagtgccaatatcaactaannnnnnnnnnnnnnnnnnnnnnnnnccaggcacgtatagagaagcagtcagtggtacaagcatcttcttacctacaattttcaaattgttttataatcatccatcgctgaaattgaagaaggagaggtgaaataaacaaaaccttgaggtcgaagagagagatcgttgagagctgcggcggcggcatcgagacgaacggtagctgtacggatgttgttgagactatcttgaagaagattcacttccagatctgcttgctccttcaaagcttttagctgatcgattcccatcttctccatctctcctctcgatgatgacgacgccattcttctctctcacagtcgcgccttcgagtttgcgatgcgctcaaactctttcttcaaaaggttagagacgaagtgtgtgatggcccgttaagtggagttcagacttcagcgttagagatgaagtcataaggcccatattggcccatttaagctgtttctaacattttcgaggccttaaatgattaaagaagaaaatagtgtatgttttgattcaaataaaaattaaaacaaaattgaatcaaaaaacaattttttaatagtttacctatattttgaaaaaatttgaaacaaaaaaatatttgcttataattcaaacaatatttaatttgcttatattttgtcatacttttaattttatgtaaccaaatgaaatagttaattagtggcgtatttttacatttgtaactaaacaaataacacataaaattaatattcttacatgttttaggtcttatatagaattaatatagatcccaaattgatcactgtagaatctgcaactaggaaaaannnnnnnnnnnnnnnnnnnnnaaagaaacaactaaaatttattttatttttgctataaaattgtttttatagtcagttttgaaaatcaaattttgatactctatgataatgtttagtcatcaattttttctgaaccataaagtatttgacagtacatttaatttaacacggcacagagctagtagagtgaggtgaatgagaggctatttatttatttacatgtgtcggtccaaaatgcgaaatatgtatatgaaaaataaagactcgtatatgaattatttgccagcctatagaaattatttttcggtagaaaataattgggaccatatcaattattggtgttggggtcatttagatgattcgacaataccaggtaccgatgtttta

SEQ ID NO: 37410 - DNA, 2538 bp, Arabidopsis thaliana landsberg
  unsure (1)..(2538): unsure at all n locations
tctgggccgaacaattgtgggccttgagaaactctattaacttttccgtttttaatccaatctgtccaagacgggcgggtcaaatatcttttgacacctctaaaaattgttcacggggaaagcaaacagaagaacgtaaaccagtcaagtctgtaaatggcgaaaaaagaaggttcaaagatgaacatcgccattatacatccagatcttggaataggtacgatcttcattaattgttcgattttgatttccccctgattagccttcttcctctcgtataattggtctttcttctgcgatctatcttggttccgaggagttattaccaacttcaaagagtaaacgcaattgagagatcaataactagtttaacagactttgatttgatacacggatgaataagnnnnnnnnnnnnnnnnnnnnnnnnnnnaatttacactagtgcgttgtttctggtatatgcaggcggagcagagagattgattgttgatgcggccgttgagcttgcctcgcgcggtcataaagttcatatcttcacctctcaccacgacaaatccagatgcttcgaggaaactctttccggtgagtgacgattttacttgatttcagaaagatgtttgctttgaaagagctatctactgagagttcagattcttgacactcaatttatcatttggttttagaatattcttcaaatttgtaagctttataagatcacggtttgtgatttatgattcatgtcttaacaactatccaggtatctttcaagttacggtgtatggatctttcctgccacggcatattttctaccgactacacgcagtgtgtgcatatttgcggtgcttgtttgttgctctctgtgttcttttgggttggtcttcattcgatgttgtactagcagaccaagtttcagtcgtagtcccattgctgaaactcaaaaggtcatctaaggtattcaaattttgctgttagtcatcatatcttctgctcactatatacaacaacttaattttgaccatatgtggatataggttgttttctactgccatttcccggatctcttgctagctaagcatacaacaacacttagacggatgtatcggaaacccattgatttcattgaagaacaaacaacaggtttggttttcattcatttcctcttacttacatccatctgacatcaaattattcttatttatcacttgtgggattgtagggatggctgatatgatccttgttaacagtaacttcacggcatcaacatttgccaatacatttaaaaggctaaatgcacaagggagtcgcccagctgtactttaccccgcagtcaatattgatcagttcattgaaccccacacttataagtattgtatatccctgaactccaaatttccaggatagaaaagcaagcttccatattgcaaattacttctctgtcggtttctataagttcttctcttcttctttgtctcaagcaggttgaatttcctctccataaaccgctttgagaggaaaaagaacatcgatctagctgtttcagcttttgctatcctatgcaaacataagcaaaatctgagtgatgttacccttaccgttgcaggcaagtgtattattattcatatttcttcaataatcattactagatgaagattttactgtttgtgtgtatcctaacaaaactctgttattcaggtggatatgacgagcgattgaaggagaatgttgagtacttggaggagctcagaagtttagccgagaaagaaggagtttctgatcgagttaactttatcacatcttgttcaaccgctgaaagaaatgaacttctctcaagctgcttgtgcgttctctacacccccacggtaaaagtcaccatccttttttttttttgtctttctccaagttttcaatctcatctcatttcattgtccatatcaattgctaggatgaacattttggtattgttccattagaagcaatggctgcatacaaacccgtgatagcctgcaacagtggtggccccgtggagacggtaaagaatggagtaacaggctatctttgtgaaccaactccagaagatttcagctcggcgagggctagattcatcgagaatcctgagttggcgaattgtatgggagctgaagccaggaaccatgtcgctgaatcattctctgtgaagacgtttggacagaagttgaatcagtatctcgttgatgtcgtatcaagtcctaaagaagattgagattcctctgtttagtaatcatagatcgttcgtgaaacagcatactttaggcttagttctgaaactacaggagctttattctcggatcactcatcttgaccgtgaagattggttaaatctaggtgaacagttttttgtttgaggataaatttgacgaaataaaatcgaatcagtggtcggatatgggccaagttaatgaaatttcggtctataaaatttgtgttttattgggcttggatgaatatgctacatgaggtggtactatattaggcctgattattttacgatttactaaacgt

SEQ ID NO: 37411 - DNA, 1258 bp, Arabidopsis thaliana landsberg
aacttttacaaaagatattcgaataaatttagatccagggtagaagatagaatggatgcaaacaatatgtaatctttataaaaaaaatattgtgtaaattttaggtcatataatttattattttagtttaaacaaattaattttttgttatatagaaaagaaaaaaattgaatggaaaaatataatttatttcaatacataaggaatgttttatatataagtttaaatattaataattcaaaaaaataatttcggtaagtgtattcaatactaaaatgtattaacttggttattgatcttaaaataatagaataactgcagtataattaaagtgtttgataacaaagataaatgtaaattgaaaaaaaaaaaaaatagatgaggaaaattatggatttgccacataagcaacattgtctttcttaaaaaaaaatattataggggatataattttaaaaatcaaccatcacactttttgtcggtttggtttttaaccaaacaaacaaaaattattactttgagaggtagtgttcgaatggattggcacacatttctaagttcggtgagtgaatacgggatctatacaaatcaaaataaatagtcacaccccatttagcattttatctagacattttaaatatatcagtgctatatatcactaacaaccctttactagagataaaataaaaaaaaaaatataccttcatgtgatctaaataacaaaaccaaatatgactttaagcgttgatcacatggatcatgctgcattaacaacgaactcaattcatttacaagatgatgtattgaaggagatactcacacttaacgccaacacagagtatctcaaacgttttctcgatggaagctctgataaagagttgttcaagaagaacgtaccggtggtgagctacaatgatgtcaagccttatatcgaacgtgttgcgaatggagagccctcggatgtgatttcaggtggaaccattacaagattcgtccaaaggtacataaatatatcattatgattaatcaatggatcaagtactagttttgatttggaggtgatggttgtgtgtagcacgggaacttcaggagggatacataaaatatttccagtgaacgataagtacatagagaatcttggataccttttggctgtatcctctctcattacttccaagtaagtcctttcttaaccgttgctacacaaattataagttataaactattggctaatagattttaattggattagaaatct

SEQ ID NO: 37412 - DNA, 405 bp, Arabidopsis thaliana landsberg
tgtgattcattcagattatacttgcttcctattactctggagttcatctcatatccaagcaaatgatgcagttccacagccaaagatggtagttctcgatgcaagtaatcgaaaagattccggagcatcttctggtttaggtattgttcctccaatgatagtggttccaagtacttcttggcgagctctaatatgatcagatttataagttagcatctcgtgatcgatatgagcatcacccacccctccagagcccaaaccttcatttcgcctacccgctgccccccctgcttggaacggcctctaaggggttgttgtgaaacaagagcataatgttcactagaacatccgtgtattttatcatcaaccttatgaatttatttcatgatatactgctttcctatc

SEQ ID NO: 37413 - DNA, 5070 bp, Arabidopsis thaliana landsberg
  unsure (1)..(5070): unsure at all n locations
ttccaacttgccccaagactatcactacaaaaccgttttggttttgtggtatggtgagaatgcaaacaaaagctggaatggtgttcaaacttgatgaagaaggaaacgctttttacactcaagacattggggatctctacattttcatctcaaggtctgaacctttctgtgtcccggctagctcctttcccggcatgttctctaacttcgttgagctcttggatgttaacgaaaacgttactgtcgatctgtctgattactccatgaatggtggatttggttatttcggtgcaccagcccacatcccacctcaaaaactagactagttccatctcaatctcgccaagcaatagacttgtagtagtacactatattccattgttacaacatgttaactatgtacgtgggttcttttacattagctaatgacctgtatgctgtgtatgcatttgtttgttccctcatgtgaaactattctcattggtgtcgatcagtttccattttccacgattgcagttagattccactgatacaattggcctacatcttaagccaattgtctactgatagcttaattacgcagagagtatttatattggtaatacatctgtagtacgtttatattgccagcaatgctttttggaagaaggaaatacatttgtagtacgtttatgttggtaagccgcttcacttgcgtgtttagtcagtgtagtcgacttcgagttagtctaggtttgcgagatgagatccataagtcggaaataaaatcgtcacaaaagaaaaatcactctcatcattgatgatcccatactctgatatttctttgatcgcaaacaaaataaaaatacagaaaaaatgttttcttggaaaaaatatagagtgagattctattacttgacaggtaagcagtaggaagaactgagaagtggaggcaagacacatactaagtgaggacccgatggattgctgcttacatttgcttcttctacgtttggcaacccgagttgaggaggacggacataacccgcaactaacgggacacatagtatcgagattactactcttgaacctgtagtatttattggaaccagccaacaaaattaagaacattatcatcatttgttgtttcttgcactaaaacaaatgagaagaagaaaagattacttaccttgctcctctgagagagagacatggcctctcttcctaccagcgatcatccaattctccgaatttgcattgacttcatataacacctcatccttgtgtaaataaaacaacaaattttgatgaacatgccgatattttaaagtaatatatagtttcaatagataggaagaagctatatcgagtagctcgatatggacatcacttacatgttgttgttccacggcttcactttctttgagttctttaagcctttccactctccactgcatggtgataagtttcccgaccctaagcccatcagaaggaagtgggaggaatccaactgtgaggcaaggatcaagtactggacgctgcaaaacaatagcactcttgaacaccaaatctctcccttcagtatcagtttcagagtgatctgcatccactggcctgtgtgctccagctgctctatccccatggattccatatttgatattcagaatgctttctggtagctgcaaatctttcccttctgtcgtacgaacaattagttagtttgtagttaataaaacttctatttctctgttttcatatgcattgtatgctttatagccacacgtaaaaggcaatcacccaaatacttgcataattcgacataacgcatcctgatactgatacttgtatgctttatagtttatagttcacagaaactaagatttgagcaaactagataagcctaccgaaacgaggtatggaagaatagaacaagacagggttcaggggtttgacactttatatcaagtggatcttcctaagcctatcgagctttctggccaaatctatactagaataggttttgttctgaaataataaatagcttcagatggctgaaagtaagatataaagtaaaaatctgagtcatattaaccgttggataggaatacctgatgacatactcttgtctaggcatatactgaacacgactgctgctctagatcctggagacacgacaagcggaaagaacgttgaagtcggtcttccatcattttgtccatgaataaatccatcttgaagatcaagccaaacatcaagaactatcaagttcgccttgacgagggagtgtaacataacctgtagatagaaatgagttcattgacaatcttgggtggatgtgaataagattgagggaacagagaggttaaggataagattcttaaatttttaggagctaaagttgattacctgcaagaccaaagtgccatcattgcatttgtttgccacccttgtggtcacatcaaagggatcggtaaaatgtgcagctatggttctgctcacataacaaaatcaggagacatatgattaggaaaagaactgtttgagtcaggtcaaacctctgattgatgtggaaaaacgataatcaagatttgccacaacaaggaagaaatacctctcaaatatctggttatgatgaaccccaaattcaagtttcaaagctacagttctcattccctctaaaatatcttgtttcagcggagtgactgttaacgcaaaagaaatatgatcattggccagtggatgtgacacaaacatgtcataataatcaaaaaatcattgtttgctgcaaacctgatgatgaccctctagcaagcttctcactcaaggcacgaacagggacccaaagaatagaactcacattgctagcccaatctgagaacactattttaccatcgcaaagattaagcacctctgaatcccgttttgaagagacaggactatcttcaacaaaaacctcagcttttgatgcaccagtatcacaatctgcgtccatgtatctctccatctcaattccatacgagtcttcaatctttagccctggaccagtatcaatgtgcaagatcgcgcctttaagtgagtaagcaataggacgtactatgataccaatccactgggcttcatttattagcagagcagaagatacagctgcagcaagatcaaccagagctcttggtttggaaacctaagaacaaaatgtataccgtatcaacgaaggaaacaagtgtccacaagagtatcactactcatgcatgtaattaatgattttctaccttcaggataggtctggttggcttctcataactcatgaagtcgtcactatctgcaggaccacccttcgaaaagctatgagacctgaatctcaagcgcccaatctggccagtaacaactcccaagacataggaaccgggtttttgtggaggcagagcaaaagtgatagtattccttccggggtttagcacagttgcagcggaactctttaaagcctgaaagccagtccatatacaaagttcttaagaacgtgaaattaattgaagaaaagaacgagaaaagtcatgtctaatggaggcaaacctggccgccttcgtcagtgttgttggtggctaccaaggtaagactaagcgaatcaagggtgatatcatcaggaaagccactccacacagtaacagatagattcccagggtctccatcacacaactgaagtggagggccagtatttccagaaaatgtgatcaatgatgacacatctaagggaactgggttcttcatttcactgtgtgcaagagtaacaacctcagactgaaaagcttgccgctccttggacgagaataatcctttatccaacgaaagtagtctaacacaagatgacatgtacccagcttgatcatcaagaatcttttgacactgtgctaaattaggcaagacttctgccagtaaatcttgccatccttcacccgcataaagggcacaaactttttcataagagtttgcagccaaatcatattttccgtgcttgaagcagacagctgcaatttccccatcgagaacgactnnnnnnnnnnnnnnnnnnnnnnnnnnnnnnnnnnnngcagcacctttggttaggttaagatatttattctgccacaacaaaatttatatacatgagaagctagaataaagagcagcataaaatcagaagcttcattgtccttatgtaaatggtattagcaggctacctcgaaatcctgaatagatgacaatgtcttcaacaaatcatgatctgaaatggtaagtcgtagagcgtgctcagctgcaacaaaaatttcagcaagcctcataggcctatctaggggactctcaaaatttcctggtgaagaatttgttcttgacatgggaggtgcttgtactttaagtgatgaaggtgttctcggagacgcttctaaacctgatctgtcgaaatttataaagatatcattttagttccttataacagaaggtgatgatttgcaatacttcctggaaacttcgaagatatatgagattaaagtactaacaaatttgaaaacaagaagggctaaagaaaagaattttacaaatttcattacccttcagtaaaacttgggcgcccatcaaacatttcaggaatatttccggttgaaagagaagcccttcttctgttagccacacgtagaaggacagatggttcaagaggtaaggctttccgttgaataccaaagtgcttggtccttgaagttgcttgaagaatagtcttttaccaaaaaaaggagataagtattataaaagaaaaacgaaacagatggtaaatatagttacgcagccctaaatctcgcatataatacatttacaaacaataccctggtattatgtcagtgtccactagaggccatgcaagtacagctaactcttagctcgaatctaaaagcatgattggcttcaataacaatgctatcagatagataacacattcacgcagcatatgtatattataccttttctttttcaagcacctccgaggaagcatcttgtggaagagatggccagacagccggttttggccaagaaagcatactgagacaagcactgtccataaaa

SEQ ID NO: 37414 - DNA, 150 bp, Arabidopsis thaliana landsberg
actcatttagagcgtatgatccctaaacaaacagggggaagcctatatgggtcacatacactaccaccactaagatgtcgtggtgctcgacattcaatgaggtcaaaatggactgatccgacatactctatacctggccgatcataacat

SEQ ID NO: 37415 - DNA, 3172 bp, Arabidopsis thaliana landsberg
  unsure (1)..(3172): unsure at all n locations
tacgctatcaagattcaagaaacaccacaactttcttaatttggtcgttccttttgttaatttctaacggtcatatttggatttgttgttgcgatttctttctttattttagcatatagacgttgcacttgagcccctacataanctcagccttgttttcatttgtattcacccataatctaagaattaatcataaaagtattttctttcaaagtttgtctttgagttttatgcatttgaacttagtgtggattcactaaagtcttgtgtacgtgcggaacaattatcttgtgaattcaagttaatttgttcgttgtttgattgtggattcaatcaagtatgttgagagtggattcattcaaaccgtaggccaagaaaccgagaaacataaaccctaggaaaattccaaggtttgcatcaataacacatatataaatgtaagaaaaaagataatgtgaaatgtgtatttcagatattttttagtataatgatagaaaacttaacaaaaatgtataaaaatccatgtcagaaggagaggcacaggttggctgattttatagtcataaactaattgcattttcaacttttccccccacactttttgcctcttaaatttccaccataaactttgataattctttaaattacaacatgtactttcggattcatccttaaacatacattttcaattgaaccggtcattaaaccggaattaaccataaattcgcgtttactgtaccgcgattgcgatttacccgattaatcacctatatccgaaaagaaaagggttgactgattatatagtcataaactaatcggattgtcagctttccccccccccccccactttttattcctgaaatttccaccataaactttgataattcttaaaattgcaacatgtactttcagattcatccttaaaaatatgattccaattgaaccggtcattaaaccgagattaaccacaaatccgcgtttattataccggtattttgatttacccgactaatcccacacccgttaagaaacgacgtcgttttgtctttgttttgtaatgtgaatctatctatatatgttatgtgttgtgttagttggtaaggaaaatgacaaatcgaaatagataaaactcctaatcatgaggatagctaagactccaaatcaaacagtcaacctaaacaataacatcctaaagaaaatcaacttccgaaaatacatcatccaaaatagacaaaagaggttgaagattgtttcaatgacaatctaaatgaataaagaattataactactctcattgatcacatagactgcttctctgtgtgagtgtgactctatcggctccatgtggtgtttcttgaagctccattgtaggcttacaaaataacgttgttttcttaacggtgtgggtgattagttgggtaaatcacaatagcggcacagtaaacgcggatttgtggttaatttcggtttaatgaccggttcaattagaaacgaatttttaaggatgaatctgaaagtacatgttgcaatttaaagaattatcaaagtttatggtgaaaatttcaggagcaaaaagtgtggggggaaaacctgagaatgcaattagtttatggctataaaatcagctaacccttttcttaacggatataggtgattaatcgagtaaatcgcaatcgcggtacagtaaacgcggatttgtggttaatcccggtttaatgaccggttcaattggaaatgtatttttaaggatgaatccgaaagtacatattgtaatttaaagaattatcaaagtttatggtgaaaatttcaggagcaaaaagtataggggggaaagctgagaatgcaattaatttatggctataaaatcagagtagagagaattcacgtacacaacacaaaaattcattctctctcatcatactcttttttttctttctactttgatattaaagaaagttgccaacccccattaaaggtaattatttgtgtataattttgtttatagagtattttaaccacacaacactatcaacttagaacaagattaaattttaatgaaatggatatcgaattcatattttggtttatgtgaaagcatgattaatccatcgaacccttttactttttgtaatatacgtgtatgttgcatagtaattagcttactttgtaactagcttagtttgtcaactaacttagtaattagcccatatacacgtgtatgttacatacgtgtttaatatacatgtgtaactagcttagtttgtcaaataaaactactgatctatatcgtactcttatatataaaagtgttgttgtaatatgtataaagttataaaaaaaagaagagaaattgctactacaagactaaaaatacgagacatacgtatgtaataatttattttctaattcataaattgttggattttattgaatgtagaatgacgttcaatcgtcgacggaacacaaacccttccagatgaacatattcaacttatcccactgaaatttctactcctgccacagaaacaacaatacgggtaaatttagtaatatatatatatatatatatatatatattaaaaatttacttaaattcgatagaataaataacattgtattcacgaaatttgtagaacaaagacaagtacaaatggacgtacatacatgaaataacattaattcagttgttcgacgaagcaattgccatgaataattatactctcaagaatcctactgctatcggtagagagtatatggttgaaaagttcaatatagcattcaacatgaatataagttatagtttttttcaaaaacaagcttgatgaattcaaaaaaagttacaagagatggaaagcttttacgcacaaaacatgcatcacagttgatcctgatacatctttcataaatgcaactgacgcatgttggactgaacaagagtttgtaagtacatcaaatctttgtattaatcaattatgtttcaaaattttggtatcacgtatctaattgattttaaaattacagggatgcaaattaacaaaaagcttgaacggaaaaccgcctgagttttgagacgtgatgcaacgatgtctcgtattacatgatgttcaatcacaatctcaacattctgctcgtcaaagagagaacaattgatccacgagcatggagttgatga

SEQ ID NO: 37416 - DNA, 419 bp, Arabidopsis thaliana landsberg
cgaactctacatgatcctcatgtagtagcacgttgcctgtggcaaggtgatatccgctcactgtcccacactatatacgaacctaaatcataaggggataagccagaggggcctaaagtaaagagctaactcacatttaatctgacgttgtgctcacttaggcgcgctctacactccgctcacgcagacatgccccctgaataaaggaatcgtcaactacctaattttcctcttatacataaaagaataggatcgaaccattgcatctctataataaaaataaaggagcataattgacgttataggatatcaatccattaaaccaagaatatttttcccaaaaaatctgatcgtttgaccacttggatgaaacctataaaaaaaaaatcttattacggtattaaaaagtacagggattt

SEQ ID NO: 37417 - DNA, 938 bp, Arabidopsis thaliana landsberg
cttttgtatggtgaaagagagttccatcgttggttctgaatgtcacaaaggttatttcttcatattgttgatgctgctaaacagcttgacaactactttaatcaactttggcagtttctcggtcgtagtggatctcccacaattattcttgaagctattgcttattacgatctatggatatgacatgcctattttggggtaccaatcaacaggaatgacaacaatgttttgaaggaatccaatttatttgcgaagctttctcaaggcataggtcctcctgctgattacattactcaaggaaagaaatataatatgtgttattattcagctgatggtattcatccgaaatggtcaactattgttcaaactataagtaatccccaaagtccaaagaaaaaaatgtttgcagcaaagcaagaagcatgccgaaaagatgttgagcgagtctttcgagttctacaatctaagtttgctatcattgcaggatcatctaattgttggaagaaatgagtattgcatgatataatgtcgacttgcattataatgcataacatgattattgaggatgaatgtgatatcaacacactgattagagaagaaagatcatcgccgaaagtgactgttgaaatgacagtaaatgaaaacattcaatttcaaccatttttggcggtaatctccagattaaaaataaagatactcatctagctcttcgtaatgcattgattgatcatatatgggagcatatgaaagcattatggtaataattttattgagtaatttataatttataagttaatttatgtatttattaatttttattataaatgtattgttttgttaattaagattatgtgtaatattttaatgtatgttttagagttatttataaaatttatatggttttaaaattattatgaacaatataaggactataatgc

SEQ ID NO: 37418 - DNA, 582 bp, Arabidopsis thaliana landsberg
  unsure (1)..(582): unsure at all n locations
ggccgaggagcaaaaggaggaacccgcccgaggaggggcacgcgcccgaccagccagtaggagaggcaaaagcccaccaaggcgaagagaaggagctggcccgagaggacgaccagccacaccgggaccagagacacggcccaaacccccacgggaggcagcaccggggaaccccccgcaaggggcgaaagcccgacggagcaaagccgcgaggagggagaaggcccacgggacccgaacaccaaaacccagagaagaagcaacgacgggaccaggggaaaaagcaccaggcaaacgccgagccagcagccgcgggaaaacagaggaagcaagcgccaaccggaaagaaagggcggaaagcgccaggaggaggccaaaaaagacccccggcaaaacccagggcccaacccaggacaggcgggggaaaccaccaagccngagaacggnaggggcagagggaaaacccgggggaacggcgaaaagccgaaagaccggaaagaacaccaaccggcaaagcacccaggagggccgacaccgacaccgagagacaaaaggcaagggagcgaaaggaacaaaaacccc

SEQ ID NO: 37419 - DNA, 2796 bp, Arabidopsis thaliana landsberg
tttattattaacaatttgccaatcttagatattgcaaatcaataagaatttcaattaaattaggtgagtcttcatcctttttcctttccgatctcgtatattgataataagatttggcatgatgtatctattttacaaagaacagtggaagcaaccaccagtttctcaaatcaagtggaaaaaaaaaaaattacccgacgtcgttgaagcctacaatcgcatctttggaactaatatttgagcaattgtatcactttttagattatcgtataaacacaagttaggatgtacgatggtaaagttgttatctctataaagtataaacactttgcaaatgtaatttatatttgatgaaccaaaacatttattagcaaatttgtttattttgaatgttttagaatttttcaaagaggattggtttgtgaaattgtttttaatgtgtaacagaaaattaaactaacttaggggcggagctaagaagaagttaaggtggtcatgtgaccctctaaaataaataaatgaactatatctagtataaatttgaatgaatttagtgaaacatttggttaaaattagattaggatatcatttgtatacaaacctggcaacctccaaatgtctccaataattatatttttgcatcaattattattgccttttttttttatcttgatgtgaaacagaaaattaatctaattaaggggcggagataagaagaaattaaagtggtcatgtgaccctataaactttatagatgaactatctctagtataaattagaaagtatttagtgaaatatttggttaaaattaggttaaccacccaataaatttgtgtacaaacctctaaatgccaccattaattacattttttgcatctatcattattgctttttctatttttgtttttattatgcttttaatacaatggtttctagatcgccgctgatccacctccaaagtcaactcaattgattttcgtatctaacaaaaaagtgttttaaccacgtaacaaattcaaaaccccaatggtaatattaataaatatttatccaaacacaaaactttagctcaattttctttattttctgcaaaagattccaacaccactgctggatccaccggtgcaatcaacagtgttttgattcagcaacaatggctcaatcttgtccaaacttcttgagccaccagagtaaacacatgcattacaacttgtttcaagaagtgacgctgttctgtatttatcttcgccaccaacaaccggcatagcaacgccaggtttcgccggattcttgaaatcttctttatacgttcttcctaaaacaccttccacgtttgatgacaacttcaagaaccggaactgaacctcaagatgagcaaaacagtcatcctccggtatcccgtatttatggattatgtcgtcttcttttgtcaccggaaccacgttgatccaaatctcggcaatgtcttgtaacgtgaccaacacggagtttatgtcagaagttctctcgatctttatatagtctcctagaggaggactccacactgatgtatctccttttggtaaagagatctcttttccttcgtaggaaagacggaggtggtcaacttggtgatcccatttctcggcttttgtagcctcgagtgagaaggttttgctgttggggcagaagattagacctaaggattgtatccacgtaaaatctctggcccgaccattaggtctaagaccaatgaaacgtgcgttgacttggaagtcaacgtcagagattagtgcaaaatgctcgtcgcgttttccatgaaagtagaagacgatgccatctccgccgatgaaacgtggatctaagcatgctgatcctttgccgttgcaattaggcttcctatctgttacaatgattattttcagtacgacattatattgttatattaagaacattttgttatagcatttttcatacatattaaaagaacaatgtaattatacgtaagtctatctctctaattaataagctaaaataatatgactaaatctgaaggttaatttgaaaattctctattagatatgaaacgacattttatgaaaagaaataaaatcttaaaacggcacttattatgaaacagaaagagtattggtactttacttcggcaagtggctttgcaaatagggttaaagcaatcgatgacgcatgccttggtactgccattgggaggggaaaacgaaggacattgctttgggcaagtttgcttctttagaaaacatggactcttcctttggaaacatgtctttgtttccaacgctgcttcgagttgtacaacgacaatacacgcatagagcatcaccaccaatccaacgtaaaccccatttctcagatctcccttcattgttttttacttctcttgggaaatgaattattgtgtccacatgttgtctctttttatagaaagcatgcatgcttaccaagttggaatttcctaattaggcacactttaataattccttcgtaagtattatgtacacaccgacacaaacacacacacgttactttttttaaaacgaaatgttaatatgtttattgtaaagtcaatcctctaatatacggcggcattactacatcgagtttttttgggggttgttttcaatatgtaatatactagttggattttgacctaaaaagtgtatcctagttggattgaattaatattaatatacttaatatggtaaagttcttttctatagcatacatacgaattagtttggtgtgattttaggtccattccacgccacatgattaggatag

SEQ ID NO: 37420 - DNA, 2407 bp, Arabidopsis thaliana landsberg
ttgacatctataatcctctattgaacatggtcataaaccctgtttagtatggtacggtattttgacatttcgactaacacctacattcttttttttgttcccattaatatcttttgttaatggttttttaaactgtagggtttttcgaatcaagaagggcttgttgtggaacgggtacaatggaaacttcgttcctatgtaatgcattgtcggtgggtacatgctcgaatgctacgaattacgtgttttgggatggttttcatccatccgaggcagccaatcgtgttatcgcaaataatcttcttgtccaaggaatacccctcatctcttaaacctaactttattccaaaacattgactcaaacagtcaaaaatatgaatatatgatgaaaatatatcctagatcgttatatagttcaatgaatggttggagattattaactaaaggtttggtttggaaattattgctttctttaataaataaatttgtaaataaataatttcagttacggggatatttgatcatatcaatagtaaagagcgaaatgtatatatttcccactaatatagggaccttaaataaattgcttgattacaaaaatggtccttctcttctgaagtaaatagaacaagtgagaaaggtttatccatggcgatttaggcgcccaaaagctcaaaaattcattcatgtccaccgttaatcatcactgccaaatttaggaagtaaaagataagggaaagttagtttctttcacatgatttagcatgtgatctcttcgtgtctcgtttgactaaacccaacgaatgataatctaattaacaaatgagtcccgaaatagtaaaaagaaaaatattttgtttcttgttattgcatgaatagtgtgagaggtaacgtatgtcatctttaaattcgaaaacgacgacgttactacggaagcatgcagcttcaaacaaactaaaatttttatcttcttttttcaagtaacttcctttaatctctctccctataaaaccctaatcattcacgacttcttcgtactcagtcatctcaaaatattttactgcattcaaacagaaaatgaagatgtttattacaatgtcgatgagcatatcggttatcgcctgtttctacgccggcgttgggaccggtgagccacttgtaccggctctaatcataatgggagattcagttgttgatgccggtaacaacaaccaccgtattaccctcgtcaaagccaattttcctccctacggacgtgacttcgtcgcccacagtgcaactggccgtttctctaacggaaaacttgccacagactttaccggttcgaaccagcctagctaattcacattatagtacaatctatcatgcatttcctttttccttaaaatttgtttgttgttgagcagctgagaatttagggtttacatcttacccggtggcttaccttagccaagacgcaaatgagacaaatttgttaaccggagccaatttcgcatctggagcttccggttttgacgacgcaactgccatattttacgtaactaattaatctcctcaagcctgtttaatgtagctatatattaagttagtaataaataacattgatatggtcttatcgatcattattgtagaatgcaataacattgagccagcagctgaaaaactacaaagagtaccaaaacaaggtgacgaacattgtgggaaaagaaagagcaaatgagatattctcaggtgcaattcatcttctaagcacaggatcaagcgattttcttcaaagctattacatcaatccgatccttaaccggattttcacgcctgatcaatactcagatcgtctcatgaaaccctattccacctttgtccaagtaacttaaccaacaccacaccgtacctatctttaacttttccggtttactctaaaccgatggtccaatccttttctgttttggcagaatttgtatgatttaggagctagaaagattggagtgacgacgttaccgccattgggttgtttaccggcggcaataaccttgtttggtgaaaccgggaacaataatacgtgcgtggaaagactaaaccaggatgcggtttccttcaataccaaactcaacaacacgtctatgaacttaaccaacaatcttcctggtctgaaattggtcgtctttgacatctataatcctctcttaaacatggtcatgaaccctgtccagaatggtacgatttctatcaaaccgcaactttatttgacgactaagaccgacactttaatttctcgtttgaaatatttcaattttttatatctttgaacgtagggttttgcgaatcaagaagggcttgttgtggaacgggaacaatggaaacctcgttcctatgtaatgcattgtcggtgggtacatgttcgaatgct

SEQ ID NO: 37421 - DNA, 959 bp, Arabidopsis thaliana landsberg
tataacctgagcgagcatgtgtgttacggcctaatctgcgcatcacacaggggggtaatttatatctccaacggggttaaaaagcttggcctctctaataatacaaatcttctcatacgaaaagctgcacaatttggccgtttatgcgaggtctaattcgattcttcaatcatcggaatcgtaagataactctttacactcaatccaaaatgatacaatctccttccttcttcattgaaattgactttttttctgtatcgactaactgaatcacagggcgagatttgcaaagctgtcatatgtcctgaaatcgcagcatctaggtataatggaatgttaaagacttatgtgtgcattgatttgggtgattgaagtagcttaaggtagacaagcttaggttgattgaagtttgtgggacatcagaatctgaatttcattgtgtaagtagcaccagtttctctaacatgcaattcaatcttcaaagtactgatttaggactgtgttgatcaaacaggacttgacctccatgatggacctttgctttgacttttttcgcgtatcaaaggaaaagaaagatcttaaggaaacaaaaggaagtaaaagtaaggttctatcatatgtggtatacatattgttacaatggctcgatccggtgaacgattattaaaacaataagtgcttatgtgcataattttgtgtaggtttggttgatgtgttaccccaaaagaagaggagacttgatgatacacatctgatgatgaggtacttcttttgctagttctgaacaaattgatctgtttctagatagctagaacaaattcttccaaaagggtgcatagttaattcccaaatcatttatatgtgatcaccactggtttaatactaaatttgattgagtttctgcagcctcatgaaacaaaagacaagagaagataaatcaagtacgaggactgtaagtc

SEQ ID NO: 37422 - DNA, 1175 bp, Arabidopsis thaliana landsberg
ctttaccaagacatttaagacacactgtcttaaatttaagagtatatacattaactaacctttgacttgaaaagaacgaaaaatctaattatgatctacagaaacttgtcagagagatagagaaaatgacatatataacctccattcaatctttttctcttttgtttatctttctcttaccattattattaaacctcaaacttgatctttccaccatagcaccttcatcatcaacaccaccctcaactccaccgccactataatccttgtttcctctgacattgcaatagagctctacaaaaaaattcactaatccttttagtcatttagaattctcaattttcttccacctccattgatttcaagagccacatgtctctttctactcttgcatatctctttcacttccatattctcttatttctctctgatttcgatattctttgtaactcatcgtcatgttctataattaccacacgaacctgtgactcataaatcggttccttagatctaaaatctgtatgaaaaatacaagtagtatttttggaaaacatgctagtaaaacaaatatctatatatttatcaatatttcatgagatttaacaaaatttcatgtatttttaggtaattttcatgttgttcaacaaaatacatatacttttgttttagatacatgttattttcacttaaaaatgtgtttctttagaattgtcatattttataacaattctattaaccaacaatagattgaaaaatacaagtagtatttttgaaaaacatgctattaaaacaaatatctatatatttatcaacatttcacaagattcaacagaattacatgtatttttacgtaatcacatgtaatttttagaattctcatgttttctgtttctttttttcttgatctccaccactagagatcttttatctttggtttgatcttctccatcatcacttcctctgcaaccatcatcatcttatcaagttatcaacatcaaccaccaccgactttaccaaatttgtaacattcggttcttcactacggtacctctgtaacctcatactcactttcatttgtatcacttccaccatggtatctatttcttctcccccaatctttcaccaccactgcttcctatgaaaccaccatcacttctataccacatatcatcatg

SEQ ID NO: 37423 - DNA, 2525 bp, Arabidopsis thaliana landsberg
acacatcgattctcttcccttttctttaagatttagattggttacgttcttatttaatgggaactgttctgttcttcagggttccaacctggatagcaatgcaaaaatgtggcgcctagttgctgaccttatgaatgatattggtatgtaaaagttagttgtcacatcacacttgatactaattgcctgtatttggttctcagttgaatgactacaagctttgttgcttttattgcaggaatgctaatggaccttctttctcctttgtttccatctgcctttatcgttgtggtttgcttagggagcctatcaagatcatttagtgcgtatcatttcttgcatcaaacattgaagttaagacttcggtttggattgatacatcggtttttaacttttttcaatcttggctattagctggtgttgcaagtggagcaaccagagcagctctaacacagcactttgctcttcaagacaatgcagcggatatatctgctaaggtactctttacttcttgtcactgtgaatgatatagaaactataaatgtgaactttgagtaattctttgcttctattttatctattgaaaggaaggaagccaagagactatggcaactatgatgggtatgtcattgggaatgttgctagctcggtttacctctggaaaccctatggctatttggctatcgtttctctctctcaccgtgtttcatatgtatggtaagtcacaaatgaaggttaaagcatagatcaaatcagaatttctctcactgtttgcctttcttatatatttagcaaactatagagctgtccggtgtcttgtattgaattcattaaactttgagaggagtgcaattcttctaacacatttcattcaaactggccaaggtaatttcgaaatgcgccattgattctttcaagttttcagtggctttcctttgttttttattggtttctctttattattgcaccatataccaataactttctttaactaaacgtgttgccagttctctctcccgaacaggtttcttcaatggagggtgtattgcccttgtgggccacttcattgaggtcaacgaattcaaagccattgcataagagagtgcagttaggtgtgagagtttcctctctccctcgtctagatatgtaagctctatactagattatcataattttcgggtaaagaatcggctcaagcttgacatatttgtgtgcaggttgcagctgctaaatggtgttggagcttcttcatacaagaatggtttgattgatttatttttccacaatctttcaaggacattagtttctctgtccatacttgacgtaagctcggttcttgtctgttgttgtacactcctgcagctaagtatttattggctcacataaagggaaatgttagtgtgatcttgcacaaagattcaaaacctgcagatgtgttgaaatcatatattcatgccattgttttggcaaaccttatggaaaagagcacatctttttattcagaaggagaagcttggattgataaacactatgacgaattgctccacaaggtaagattaaatcactaggaccagttaaaccgtgtttttatgacactaaagctactgttttcactctttttctttctgttgtttcccatgtagctgagatcaggaggttggaaaacagagcgtcttctttcgccttccattacttggagagctaattggatatctcacactttcgctgctaagttcgactgagctttatcgcctttcaagatcaaaatagtttgttaactcgttgcaaacatacaaaaatatgttagttctaagtcatgtaaaacatgtaaccgatgccggtttaaccgtaaaatgtcggtttaacattgtataacgtttgttattaatggaaaattaaagaattataataatggcagccgttttatttttttggaaacgcaaaaattggaatcggatccgcttcgaacgtataaatacttcaattttgtgattctctttcattatcacttcatgttcatcgtttagctcgtagctgaagctaattccacaactccggccaataattccgccggcgaatggaatccacggtgagtatttcgtttatagtcagacacttgtaccctagtttttggaattcgattaatttattgtttgttaatgctattaggtcatgcctgggtttgatagaattagcgaattgccggaatctttgattagtcaaatactgttacaccttccgactaaagcttctgtgaagacgagtgttttatcgactagatggaagaatctatggcttaatgttcccggacttgatttgaactgccgtgatttcccctttcagaacaacaacgaaaaactgttgattgatttcattgacagatttctccagtttaacaatgagtcacgtcttcaaaaattcaaggtagattacagtagagataagatcattaagttctcggatcggattggtgacgcgattagccgcgggattcgagttttagatgttgagagcaatacctatta

SEQ ID NO: 37424 - DNA, 564 bp, Arabidopsis thaliana landsberg
tatacaatctaacgcacgtaaccaatttctaacttgagactcctatcttattaacatgaacaatctgattagcacgcataaaatatacaaaaggggggtagacggggacgtctggggctagacgaaggcacgacgggccgtgccaacgcattgcgcactacgagagcacgcgcgcgaggccgcacgcacacgccacgaactagccgtgcgcacgtcggggccgagcgctagccgagctcaaagtcgcgcgctaaaggcacgctgggccgagctcgaggccacgccggggccgtcacgacgcgagcaaggcacggcggggcgagcgggcaagcacgccggggcaagcgagcacgggcgagcaaggatgcggccgggcgaggccgaacgcgggggcggggcgacagggccggggcgcgacagcagcaaccgagccggggcacggggcggccgagccggggtcggggcggttgaacccggggggcggccgagccgagcgggggcggttgggccggggcaaggggcgcgggcggtcgacgcgaggcgccgagccggggccggggccag

SEQ ID NO: 37425 - DNA, 695 bp, Arabidopsis thaliana landsberg
aatactgagatgcatgatgcaccgagtatttttcttctccaaaaaaggaagacaaatagagtcacctcgagttgcttatcagtcacaccagatgctttatataaaacctggggcgggcttgcagacttcactccgagcaaggaaacaaattctcgaagagatttcacaaaggcatcagtgcaaacccgacttttatcatgtctgactaattcctcttcaaacttttgcgacaattcttctgaagaaagatatgtgtggtgagattgaggaggacatgtggcctgcaaaatgcaagtaccgattgtgacaaaactctaaataaagagagaccaaaaccaatatacaaaagtcgaaaaaagcacctgaactttcagaaataatctattaaaatttaaaggagctccatcctttccttccattagtgctgggtccattccatcatccccataagtaaattgaagtatacatccgctggcatttctcactgtgttatcataatggactaatagatcctccaaggctttcatcagtctacgagacatgtaacctgtacttgcagttttcacctgcaatagacaagaatatcgtttcaagttacaacaaggtgaagaccatttttagtccagaatgtcaaacactgtcacaatttaaagaaaccatcatgggcagtctcttttctatgaaccaactttttt

SEQ ID NO: 37426 - DNA, 2191 bp, Arabidopsis thaliana landsberg
  unsure (1)..(2191): unsure at all n locations
gattttagaataagtaaaatggatttaagtttgcaatgccgttttataaaatatgtaaaactgtgatgatggttttgtcattaccgtctccgaaagttgccattgtcaaaggctttgtgataaccttgctagtgaaatctgcaatgtcctttaaggtaagttggtctactgtcttcaagaattggtctactggtttcctgcagatatgttgggaaaacaaaaaaaaaaacagttagagaaaagtctggttataatcagtttagaagtggaatgttacaaagtgtatgtacctctctccgtaagtaagaatctgtctaccaatgtcttctgctgcaatcatctgcaaatcacacaaacagttaaattccattataaagtcaccctcatggcttaagaaaaagaggtggaacttttaagtgacctacccgagattccagattcatcagaatcgcagattttgttgctgctttggcgcgatcaagatgtttctgattaactgccaaagcatgtacaccagagtaaataatatgtttgtatgagttgataaatggttctaaaaaagaatggatgaaatatatagaaaaccttttccatcagcaacagcgttcatttcactagctactaattcaattccctgtgaagcaaattcaggactctgcaacgccaaaagaatgtaagcaaacccacattgcaaagtgctaaaaaccgttaataagcaacaactagaaatcggtgcaaactcaccgtgcaaccatagattccaaacaatccggtattgttaaagacgctagtgaatgcagtgcatgattgaaactgctgatgttggttcaaaaggcgaagatctgcatccagacaataaagaaaccaatctcatcatcatcatgaccaacaaataactaacttacattaaaacatgagtgttgaaaaaccgcaagtagaaagagaacacattcagagacttacagagccaagagtgcattccttttccagggcctcccgcagaaaatgagccacctcctcccataagcatctgataagaattggattttacacaattaagtctttgcgtttgaaagatcaagtaatgtatttgagtcaggcacctgaagaacagttgcaatgatagcttccttctcgttattccatcctggcacttcaaaagcaagcgcaaaatgtgtagcctgagaatggtgaaacaaaaaaagaaagatattaggaataataaaccttcttttactcaaagaagcccattgaaacgtcatatttgtacctctccacccgtatgttgacggaaatctccaccgacatattgagactttggctccgcaggtcggggtacattagggaggtcagatagtaatggctcaaccacttttagaagttcttcatgatcaactccactagctgctaggaccattcgtgaagcagtgtaattctcctgaaatttcagaacaaaatgagaaaaaagacacatctacgaaataacaaaccaaaagccagtgatactagttccagcgaatgcaataatctcttgtgttaacggtcttacaaaaacaaaattctccaagacctccccagtcaatccagtaattgcagattcaggtgcatacaatggatttgccaatgcgccagagtaaccagcagaatgaactgcctccaaaagaaaacccattggattcgttgcgaattctcctatctctactttcacctttcggagctgccaggagaaaaatgatgaaaacagtgtaaaaaaattgcttagctatnttaaatagttttttggggttggaaaaggctaaaatttccatgcaacatgacatgaagtacctcttcattcacttcccagtccaagaaagcagggtttctaacactgtcaataagaacttcaaccatttcagggacataggtcttaagagcatcaatagtgtaactcatttgctctcgagacgcagaagcggatgtgttgcctccaatagcctcaatttccctcacaagacgaaaatgagttctgttcaacgtgctcnnnnnnnnnnnnnnnnnnnnnnnnnnnnnnnnnnnatggaaataaggcgcctcataaatagaaccgcaatcaacatataaaccaatcgaagctgccggattaagcacacaacattaactttcttcagttcacattttcaggagtgaaatcagacattaaaattcgttc

SEQ ID NO: 37427 - DNA, 2341 bp, Arabidopsis thaliana landsberg
  unsure (1)..(2341): unsure at all n locations
cggaactttccctggacaagaacaaagattacgttattgccgagcatcaggcattgttatattcttctagctgttcctttgtagcaagtttgttcccaccaatgtctgacgattccaaacaatcaaaattctcatctataggtacccgtttcaaggtaagtctgattttagtttgcaatttctactaaacatgttatatcaataatattggtcacttaattatatttggtccttcttttcagcaacaattggtatcgttgctcgagattctaaataccacggagccgcactatattcgctgtataaaaccaaataaccttctgaagcctggaatctttgagaacgaaaacattttacaacaattacgttgtggggtgcgaatgacattctctgtcgatttcatagttcagtttctcgtgaaaaattttatgtctgaaagaaggatattttttgtgttcatgactttagggagtgatggaggcaataaggattagttgtgctggctatcctactaggaaacattttgatgagttcttggccagatttggtattctnnnnnnnnnnnnnnnnnnnnngaagtaagatgtttcctctcatagaatttcttataatgggtgatatccattttcatgtcttaactgagtccttataatagctctgatgaccctgctgcnnnnnnnnnnnnnnnnnacaaagtgggactcgaagggtatcaggtaattccctcatcaagctttttgcaatgccactactgcttgtgtgagctacattgatagttaaggattgacattttacttttgtagattggcaagacgaaagtttttctgcgggctggacaaatggctgacttgaatacccgaaggactgaggtcttgggaagatcagcaagcattattcagagaaaagttcggtcatatctcgctaaaaagagtttcatcgttctgcgtaattctgctaaacagattcagtcagtttgcagaggtattttcaatgttgtcgaacatgtctatagctcaactagactaaatgattggattgttctgtcctttttttatttattgactaagttgcaaacctatgtgtctgcctttttgtcaggttatctcgctagaagtgtatatgaaggcatgcgtagggaagctgctgctttaaaaatccagagagacttgcgtaggtttctggctaggaaggcttacacagagctatattctgctgctgtttcggttcaagctggtatgcgtggtatggttgcccggaaagaactatgttttagaagacaaaccaaagctgcaataataattcaggtacacttaaatcaaaattgcagaagtgtcgcactattagaagttcaactcgtcagagaacaccaattacataacgagattgattacttcacgaataacaacaaaacagttggtagttctgtcatattctgaccgtggtaatgctcattgttattatagactcggtgccgtggatacctggctcgcctgcattacataaaactaaagaaagcagctatcacgacncaatgtgcatggagatcaaaagtggctcgtggagaacttcgaaagcttaagatggtgagatgtggtttctttctttagctagtgttgttccattgtctcttgtttcagaggctcacttataaagatggtgctttgcatgaatttaactgaatttctttaattcattttacacctaggctgctagagaaactggagcactccaagcagccaagaacaagctagagaagcaagttgaagagctgacctggagattgcagttagagaaacggataagggtgtgattgctgtttgaaaagctgaccacattttgtttctcgcaaatttgaccctaattttttcagggccttcttgcattttatgaatattattgagagtttttcatcctctttcaacattgcagactgacctggaagaggccaaaaaacaagaaagtgcaaaagcacagtcttctttgtaggaattgcaactgaactgcaaaaaaacggacgcattgcttataaaagaacgtgactctgcccacaatattgctgacactgccccgattattcaagagataccagtggtcgagcaagaatatatggatgagatcaccattgagaatgcagagctgtaagtttgtgagaatatctgaactggaagctaacttaccgcatatgagtatgactacttacgatttgagaatattgactacttagaactcttcagaagacaaactctgctgaacaactatagatctttgtggtctaaaaggctcttgttactgagaatggtgacatcactgtaaatgaaaagtggctaaactgagaaaaaac

SEQ ID NO: 37428 - DNA, 1788 bp, Arabidopsis thaliana landsberg
ataaaaatatttagcaattagatcccgcatcattatttttttacttcataaaattaatttttacttttagatatgaaaggtaaaattgtagaaaatgacgattttaaaggttattgaacgaaacttgggttcactcctaggggtgaatccttttattcacctccttttgcattaaccaataaaaacatgtcatgttaaatcctatttaaattacataataaattaaagctataattataaatccaaaccgatatataatctcgtttaattataaaatctaaaccctaattctcttttgtaaacccaaaccaccatctaaactcatttaatcgtaaaaaaaactaaactctaatcgtattttctaaatccaaaccgacatttaacctcgtttaattgtcaaatctaaatctgtttataaacctaaaccaatatttaattcgtttaattataaaatctaaaccctaatcgtactttctaaacccaaaccgatatttaacctcgttaaatcatacaattttaaccctaaccttttctaataaaagaaaaccgatacatatttttgttttaatggcaaataagattttataattaaattaaattctttttattattattaggtgtcagattttaattggctaaaataaaggaggtgaatataaggttcacccctactatttttcaaagaatttaggtcagccgtcatcatgaaacgtcagaagatagatcatatcccctttgatctaatggtggagattctcaccagattaccagccaaatctcttatgaagttcaaatgcgtttccaagttatggtcgtccattatccataaccaaagcttcatcgattccttctactccatttcctcaacacgaccacggtttatagtcgctttcagcaacggttcatttcccagtgataaggagaagcgtttgttcatcttctcgtcctcacacgagggacatgaatcttcttcttcagtgataaccaatctcgatacgacaataccttctctaactgtttctaataaccttgcgtcacggtgtgtttccctcaatggttttatagcctgttcactttacacaaggttcacgatatgtaaccctagcactagacaagtcattgtcttaccaatcttaccctcaggtcgtgctccagatatgagaagcacatgtatagggtatgatccggtggatgatcaattcaaagctttggctcttatttcttctcgcatacctaataaagatagtactgtagagcacttggtgttgactctaaaaggcgacaagaaaaattactcatggaggcaaatccaaggaacaaacaacattccaccttattcccctgtgactatgagagtatgcatcaacggggttgtgtattatggtgcttggactccaagacaaagtatgaatgcagtgatcgtttgttttgatgttagatccgagaagataacttttatcaaaacacctaaggatgtcgtaagatggtgcaatgattcaattttgatggaatataaagggaagttagcttccattgtaagaaaccgttattctcgtttcgatacttttgatttgtgggtgttagaagatatcgagaaacaagaatggtcaaagcaaacatgtgagattcctctctctgtgtgggattctgttgagaactttaacatgtcttttccaggtattaacaagtttggtgagatcattctagcaccaacatgcttgtcaggctatcatcttcgatccttctacattttctattaccatgtagaaacaaagaagattagaagag

SEQ ID NO: 37429 - DNA, 6561 bp, Arabidopsis thaliana landsberg
taaaatagttccagtaatagatacctatggtgggcatacctatcatcctaaaatcaagttctagttagttactctaaaactagcattaagaacaatctaagatgaagaattctaaatatattatcctaacagggttttcgatctactaatttatccaaattcctaatgagaatccctaaacccaacaagaggactactcaagcatgatcatagaagaacaaaacatgattgaataagaaatcaatgattaaattaagaagagaaaatagtttagaaagatcttctctaaagggagtctccacaggttttgctcccaagtacagaatagagaataagagttaggtctaaacaatgaccatagaaatcaatacataagtcctaaaaacgtatgggccttctttggaaataagggaaagttatcggccaaatttggaaatctttaaaacacgaataagttgcgcaattgaattgccgtcaggtattggtgtcgctcgacaccaggggttgtgtcaatcgagacctacgtcaattttcgtctccggattgctgccgcagcttaagttgtctgttttgctccagaatgctccataatctccaaatgcatcccatacatgtaaagacctgaaaaggactagaaaagactctagaaataacaaatagactctaaaacctatacctaaatcatagcaaaaaccagtaaaaatagggttatatcactgtgtttttgtttcatactcaaatatgttgtttgcttcatccaatatgtctgagtaatctgcttgttaggaatagggtttctcattagggattcatatggtttagtagattgccccttttgctaggttttctgtagaattcttcatctttaattatgcttaatgctagatctagagtaattaactagatcttgaatccagacaatagatatgcccgccataggtatctgtagttggatctattatttgatgaggctggtttataggtgtgtaataagaatcggcctatctactaaggtgaacaatcgaactctttaagaatgcatttttaggttgataatttctcggcttctccggttattcttagctatagaaatagggagtttcgcggaacgccaccggttattccataattagagtttgagtttaagaatggttcgataacaccctagctttcactagatctactaaccaatagtttcctaagaataacctgttcctagctctttatttaatcgtttacaaccaaatcaacttgctgttttcttactttgttctctactatttcattcatcacctaccagcttaatcttgacattgaactcattatttgaacaaaagaacttcgtgaattcgatcctttaatactgcaattgatctcttatttgagagagtagttctagggtaatttgaaccttatcagcttcctttaatcagttgatcgtcgatgagtgcaactacaaatgtgagtcattgaaaacaaagcatgataattggataaaaatattaactgctgaacagaagaaggtatacgatgaaataatgaatgatgtccttaatgatagaggaggtgttttttcttatatggttttggaggaacagggaaaacctttttgtggaaggttctatccgcagcgataagatgtaaaggagatatttatttaaatgttgcgtcaagcggcattgcatctctgttattagaaggtggtcgaactgcacattctaggtttggtattcctctaactcctcatgagacctcaacatgcaacatggagcgtggtagtgatcttgctgaattagttacagcagctaagttgattatttgggatgaagctcgtatgatgagtaagtactgttttgagtcattagataaaagtttaaaagatattctatcgactccagaagacatgccgtttggtggaaaagtaattcttttcggaggtgattttaggcaaattcttcctgtcatccctgcagccggtagggaactgattgtcaaatcgtcactcaattcgtcttatctttggcagcattgcaaagttttgaagttgaccaagaacatgaggcttctccaagatatagacataaatgaggcacgtgagattgaggagttttctaaatggatccttgcagttggcaaggggaaactaaatgagcctaacgacggagtaactcagatacaaatactagatgatattcttatacctgaagggaacaaccctatagaatcaatcattaaggcagtctatggtacaacctttgttcaagagagagatccaaagtttttccaagatagagctattttgtgtcccaccaatgatgatgttaactcaattaacgatcatatgctttccaagctaacaggttagtgaattaactttggatattactcaaaaacatacatataactttatcagctcttaccaataagtgtatatgacaatgaactactattcttttcaagtgaagaaaggatttatcaaagttctgattctattgatccttctgacacacgtgcagataagaaccctgtatatatatgcctgattttctcaataaaatcaagctttctgaattacctaaccgtctacttcggttaaaagttggttgcctagttatgttgttgcgtaatcttgatccgtatggaggtttgatgaatggtacaagacttcagattgtcagacttggagataaactagtgcaaggacgtctattaacaggtactagagttggtaaactggttcttattccgaggatgcccctaactccttcggatcgtagattgccctttacaatgcaacggagacagatttctttatccattgcatttgctatgatgatcaataaaagccaaggccagtcattagccaatgttggcatatatttgtcgaaacctgttttctcacatggacagttgtatgtcgctatgtctagagtgaaatcaaaggcagggctgaaggttcttattacagacgctaaggaatacagaagaaagaaacaacaaatgttgttttcaaagaaatatttcaaaacctttagtagattatttctacaggatttattttagtgaatataaaaaattatttgaaatattaacatgtcttatcgttaaattgcagtgaatatataaaagcctttcgttttcccattttcttaatgcaagctatttttaaaagcagtggagaagtatgtagtctattaatatttttttttttttttttttttaaattacgagtttgaagtttggagaaagatattttccaagtattaaattatcaaattttttaattaacttacatgttaatgacatacacgaaactgtacaaatactatgtgtacacctacatatactaaatatacaattacgtacacaaaagtacataccaatactataataaattttacatgctactgaggagactacatatactaaacaaaatacaagctgaggagactaaatatatttagttaataacaataatatatgatatacaactacatatttacaaacaaagaaaatatagtaaattcgtaatatatatacagaactgagatttgatgattgattaaaccaagaataccgagcgtaggacgggtactgacctagtctacactattatttgagatgtacgttaagtgattctcagttaaaaaaaatttttaccttaaaatcatatgtttaaaatgttaatgtcatagaaaaagtttacctttaactgagaatcacttaacttacgttataatcttggccattcgattgaattgtttgtgtccgttcgatttctcgccttcacttaaaaaacacgcggatccttttgacccgggtttacattttttggatcatacgttataatcttggccattcgattgaagtgtttgtgtccgttcgatctctcgccttcacttaaaaaatacgcggatcattttgacccgggtttacaacttttgggttatacgttataatcttggccattcaattgaattgtttttatccgttcgatttcgcagcttcgcttaaaaaaacacgcggatcattttacccggtttgaaactaatgggtactcgcctctaatcttggccattgaattgaattgtttgtatccgttagatttcgtatttcccaaaaaaaaaacacgcgcttctttttatcctgtttaaaaaaaatgagattctccttttaatcctagccgttgaatagatttatttcaagtcgtccgattttgtagtttcatgcataaattcttccgactatatttcaggaaactaatcgtattaatttcattcaatatcttgtgtatcttcgttacaattaagtatatatcacttctccataattatccatgaaacaatatttcgtttggatcttctttttgaattatcttacattttttccataattatagcacatataatatttcgtttggatcttcttttggaattatcttacattttctccataattatagcacatctaatatttctttgccatcttcttttggaattattttacatttctccataattctaacacatctaatatttcgtttcgattctcttttgcacctatcttacatttttttttaaatattccctatattcatacatacttttacggaaatgaaaaatattttcctataatcatcggattcttgatatcgaataaacttgaactccaaggataatatcttttgtgcatctttttttgacctaaccactcattcttataaatatcggacgccccatttcaatctactcactaagcttacactcacacagtttcatttccaaattcatttttaaaaatgatgctcgccaatcctcttccattcactcccttgaaatcggtaaaaccttacaagaacgcttgtcgtattcaggttaaattgcttcatgtttggagacaatattctgtaaagcctggtgaatccatcgaaatgattttggttgatgaagctgtacgtattatagttacaactttatgttttcgttaaccttatagtgtgttcacgcatcatttttctctactacttattatttaaattatttttgtcatatagggtgataagatgtatgctgctgtgagaagagagcagatcaagaagtttgaaaggtgcttaaccgagggtgtttggaagatcattacgacaatcactctaaatcctacaagtggcaagtatcgtatttctgacttgaaatacaagattggttttgttttcaaaaccacggtctctccatgtgattccgtttctgatgctttgttcctctcacttgctaagtttgatgtgatcctctctagatccgctaactcaaatatcttgcacggttagattcaagttttcattttattttcgaacatacatgcattatctcttatatagtcattatattcatagatttattctatttgtctatacagatgtaatgggtcaggttgtcgatcggtctgaaatccaagatcttaacgctaacaacaagcccaccaaaaaaattgatttccatttgagagatcagcagtacaaacaatctatattcatattaattcttatttaaagtttgttgtttttttactttttattaataaatttatttctttccattttagtgacactcgcttggcatgtacactttgcagctcgtgtttactcggaaaacaaactcgacaaatgtttccacaagcaactacctatcaagcaacaaagatggttgaacttatacacggagatctatgcggccccataacaccaagtacaagcgccggaaataggtacatttttgttctcaatgatgattatactcgctatatatggacgatcttattgaaagagaaaggagatgctttctgcaagttcaagaattttaaagctatggtagaaggagagtcaggagaaaagattcaaagcttcagaaaagatagaggaggaaagtttgtcccaattgagttcaattcgttttgtgagaaacttggcatcaagcgtcatcttacagctccttatactccacaacagaacggagtagtagaacgacgcaatagaacaatgatggagatgacgagaagtgtgctaaaacatgatgcatatgccaaactacttatggggagaagccataagacattccacctatctcttgaaccaaattttgacgcgagcgcttaaggagaagactccgtatgaatgttttagaggcaagaaaccgagcattgatcacattcaaatttttggctgcattccatacgcaaaagtggacaaaccccacttgaagaagttggacgacagatcacgtattctaattcatctaggaaaggaaccgggttcaatagcatataggctgcttgatccggaaacaaagagaatagtggtaagtcgcgatgttgtgtttgatgaatcaaagggctgggaatggaagcatagcaaggaattagcagatggtaatggaagcttcaccatcaagtttagtaactccggaaatcatggtcttcatgaaagtgagactattactcatgaaaacgctgaaacaggggaaagtattgaagagacagatccgaatgatttaatggagatacaacgag

SEQ ID NO: 37430 - DNA, 5031 bp, Arabidopsis thaliana landsberg
tcttgtaaccttatatactcatgagattatataataaaggtcacggactttacctttctacatggtatcataagcttaacctagcctccaagctaaaagcaatcgatcctctcctctctcttcttcttcgttcatctttctctgctctatattttcccttcatctatgtgtcatcatgactagttcatcttctacttctaccagtgaaaagctcttctccatctctcagatcaaaaatatatgtattaactagatcaaaattttaaagtattatctaatattgagtaaaattatatataatcataaatcaacgatccaagataatataaaacttaaatgaatatatattttggtcgatgtcctctatatataattcgacttctttaataaaggcagtagaaatcttttgacaaaagaaaaacaaaaagcagtagaaatctagctaacaaagtaatcacaataacaacataacaccttgtatactagatagtcattactcccatcatccatggaacaaaaacattaaaagctattgggattatgatatatcttagcaattattacaaatatcacattgactaagatatggttattaatagtgcaagattcatatcaacatacgtaaaaaaaaaaacatatattgtaaaaagatttattctttccttgataaatgaaggactgaagctatctcatactagcatcagcttccttcttcgttatgcgactaccaccagcgtcatctttctccttcgttatgtagactgcatgacaatatagcatatattgataaacatatattatgattcttataagacgataaatttaccaaaaaaattcagttcggaaagtaccacattttctgtgcttttgttttctaaaagtacacaaaactctgaaaatatcataaaaagtttaggtttataaaatattcttaaagcttagaatttgaatgtgtaatttccaaaaaaatgttggtgtcgataataataaattataacttttattgattttataggtagtcatcatcgtatatacatagttaaaatcgatcttatgatttgaaaactatttttttaataatggaattattgttttcataccgtcggcgatgaagcatacggcaacgaaggaggtggatagagcatttgtggctgcagtgttgatacatgcattttcggctgcagtggtgtcaactgcggcattgggggaggtgtggctgcactcggcatctggggcaggggcggtggtggtggtggcggcacgggcagcgtcggtggattgtattgacgacgtcttcgactgtattgacgacctctttgacttcttgatcgtcgtactagccgcaacttccttctcaattctattgatttacaattataaaatttagtttttaaatatgctttgtttgacatagataaaaattaaaaattatgaatattaatattttagattcaaaattaatgttggatattctaaacaatatttaattcatgatggagcgcagactataaacaatcatatagaacaatttgatattttaaaaaaacaaattgacgttgagacataataagatataaactttcattttatgtttcatacaataataaaattttcatcaatgaacattgaatacagagccaaacttatgtatattgttaaatcactacacagtaaccaagcttatgttcatgcgagtgttagaaaaagccaagaggccttatgtgtgttagtgtgtaaacacttacgttggagatgtttggcgtcggcgatagcaacttgagatgagataaataagagaagaataaccaaagatacgcgaagagaaacgaaatttgatgtctttgtagccattaagctaggttttccactttctcaaaactccattacaagacctatttatactacatgtaaaatgtggtactatgagtctggccgtctgggcctacggtccaacgcctggacatttccattttgccacaaagtctagtctgggcctaccgtccaatgcccggacatttccattttgctgcaaagtctataccaaactttgtgacatttcatatttttgtgattatgtcatactccgtaatcatgtttgttactattggaatcgcaatgcactgtacttcgatctccattcatatattttttcttagttttttttaacttcggcgtctcgagttctggagaattatcaaacacttaaaaatagtagaacagttttaggctgagttttaaaattttgtgtagttaggaaatgtaaaaattaattatgcgtttgtggtttgatttcaaacataaaattttgtggggctgtaaatttgatcatgaatatttaaaaagaagtttaacttttcttattaaaccttcaaaatcttgtctgatttctctaattaaaactaaaattgttataaaagaaacttaatcttaagaaaaatactatttccccctaaatgaattatctctatatttaggctccgaatggtgactacgttttgcggtgcgggagaagtgcggtgcggttcaaatagtaatgaaaatacatagatacatatatatatgtagagattttgatattgttacaatactattgcggtacggttttgggtgcggtctatgtcactattcatggttttaatatctacgtaccttatttgcaagtgggctgaagacttctgttagacgacgatagaaattattattttgtagtatttttatttatttatatatatgtagtagttttatctttttttttgtgaatgtatacaaaatctaaaagacttgactaatatatttttggtgtttagaaaaaggccaaacgcattcctctgttcgctataggccatagcgtccccacgattatttctgtgtaaagaggtgtttgcttatttttattaagaaaacacataatatcggatttgattgctgactattttaaatgaaacacttgcaaggttttttagcagccacactcatatgcctccgtcatcatttttatcatagcaaatacgtcatcaactgcaaccgctctctgctaaaagcagatcaaaatcagcaacattctttgatgcaacataattccccaagaggacctgattttcgcactaccagaccttacattggtcgattattgttatgtggtgttcaagaacattcagcgcaaactttgttaccaactttagtccatgacatcacaacctgcaagcaatgaatatctcttactaatgcaacatatcctcccatatatgatcccatgccatggatggtagctaatctcacaaccatgactcccaccaatctcaacaacatttattattctcatattatatgtttcaggttataatttacatattctttataaatttgaaagactacaatgcttcaaaatgaaatgacaaaccaaagtaattttttttttcagaaagcgttttttaaacattagaaagaaataaaaagggttacaacatcatcactttacaatttacatatataaaaaaaccgttttatatttaattaaaaaaattaaattattatctacgtcaattgtatttatacatataattttggtttgcaaagacttttcgcagcttcataaagtcaaagcgcgttgaatggaaatgttcgtcggctactaggcccagtactacatttatagtagccatatctactacctatgcttcattatcttatatatgtgtcttgtaatggagttttgagagagacgagcacttaaagtaatggctacaaagacatcaaatttaggtcatcttcttctgtctttgtttattctgctcttgtttatcttatctcaagttggagtcgcccaggccaaacgtctccaacgtaactatttaacactacctctcttacttttgtattgagtttgtgtgtctattaaaaacgagctagattccacatccatatatagtaatactgttataatttggtttggagttttaatttggttttattctcaacatctaaggttgcagaacacataatgtttttccatggtatcacgttatttttatgtggacatctattttatcgaatataattatttatcttttatctaagtttgatttattgtattagtattgatagtgttaaatagtattatatcaatgtactagactaccaaccgaatatttattttattatttttttaaataataatgtattacattgttaatttgttacatttatttttgtcctttttcctttctaatagcagctctagcaattatcatttccctaattacgtatttttaaaaagtaattaccttgtttatactctctatacatagttttctgttgtagttttaatcatatttattgtttgaagaaattaatcatacaatttgtggtacatacatatttttagaaaggaacaaattgcgtttggattgcgttcctcttcctcctccccctccacctctccgtcgcatcgtcacacctcctatcgcttcgtttcactctgcatcgcctaaagataaaggcccataagccataagtcatcatagtgcaggataagaggtcaagagagttttataagtattttgttatacaaaaccatgttgtatcatattttttatttataattaaggtttttttttcgtgtctacaacacatgtacacacacaatcagacgtatatctagaataaaataaaaaagctatatcactacgggactccaacttcttgtcatgatatcctttaacaaaataacaagcctctagtcctttatttttcggttttaaaaaatatatttttgatatttttgaacgttcaattatcaagagttcaagactatactcctgaaatctactaatttttttgtttaattgttctaaacatatgtttaaggttatgaatcttatgatttacatatgtattatttactaatatatatgaaggactacaatggtccaaggtgaaatgagaaaggcaaagtaaaatatatatgtttttattgtgttttgttgaataaatgcctctaatttcttctgagtaagagggaaataaaaaaaa

SEQ ID NO: 37431 - DNA, 7240 bp, Arabidopsis thaliana landsberg
atcattttttgctcctaaccatgtaagacacaaacaaagctccaaacagtaacgcagagacgaaatgcaagttgtgccacgtctttgtttttttcaagacaatattggcaatgctccgttgattctcattctgctttttaaccatgagcgcttcaactgtggatttaaaatcaagttgttgtcagtcaatattcagacgacgtatgcagaggtctatgtacttacatggaaatgggccatattgatctctatggtcaagatttgaggcactgcgtgtaagagtaggagacgaaggcttcaaatcataactctgtgagtcacaccataagcgtacttatcagatactgatgaagtttacggagccaaaaaaaaaaaaaaaatctcagagagacactaagacagacaccttgttgtcttcttcaggattatagctcagtttaaaattttccaagctctttgaacgatggagccggatgtttatgacattataaattatctggtttggttgtattactgagggtgcctgcgatcaagagattcaacccccttgtctgcttttaggtaaaaactattcatgttaagaactaattaagaacacacctcactaatttctagcgtactattgcgtccttcctctgctgcaatactggctaaatgtctaataatcttttcaacgactttctccacgaaagccaactcaggactgcaaacagatagtttaaactaaagatgtaataaactaaacacattggtcaatggaaaattttagaaggaaaaaaaaaacaaaaaaactaaacactttgatcatgtcccaaatggccaaatcgtacctattcttgtcatgagtcaatccagctatttcagtgacgatcttcagagctttcttccatctcttgatcctggaattaatacgcttaatcttcctcttatcgacttcttcagcaagcagatagttttgcaaagccagaaacttttccccaaactttccgctctgtttcttaacgcttgaaaccttcaccctatgaaagatgggtatgactgctttaagtgcctccgtctcaaagcatttcttgatctccacaagttcgtccaaacaccaacctgactcggcgtagttcttggaaaagatcacaatagcgatccttgactttcggatgtgtccgaaaagattctggagcggttgtccagtcaacttatcgtcagtgaacacattcacattgccatcaatcaatttctgcttaagaagagttaataatccgttccgctcgtcttttccccggaaactgatgaatacttgatccttattgtaatgcgtaatccccatatctcaaacacagagtttgatctttgttttgctagttagagactagagagaatacaaagtttgagagtgataaagaaaagtcaaccaaacaatctaagggtctatacttacttatactactaataagtactaaaccttggttactaaatagtatatcaaaattgatccaatgaaactttgacgcgtctcacattacgcgtttcagttttcaccatctaactttcctaggaaacatcaattctatggggtttttgtctcacaatatataaatggtacacatgctatccctgatcaaacaagctaacgtgggagcgaagacaaatttaaataaattcggttatttaactatacgtaccaaatatttaaaaatgatttaagagggtatcatagtgtcactgccataattatgctgatggatactagtatatgggttcagtgttactatgtaccaagtatttaatcaatgattttgttcataaacaatagtttggccatcagttgagtctttctttacaatatgtcattttgtcaaccaatcgccttagtcattttgaccaaatgatatatatatatatatattaacgcgttccaataatggacattaacgatccatgtgtttagtaactaaggatattacgtcctaatctacttaggccactggtctcattttacgagcatgcaaatggaaatcttaaattcatataacagagatatgtaaactcagatttcaattggatacaaaaataattcagatatatatatatatatatatatatatatatataattgtttgacaaaagaaaacattgatttgctctaaaagttttgatcgattttgagagtttcagaaaatgtaaactttattatgaactataaatatatgtttttaagaaagacagattgacaaatgttcgtaatatattatacggagttagtcttagtggtgtgtatgatgattgacacatttttctctaatctactaaaagagattggttgttccacaactgctttctcgtttaataataaaaaaaaactgctttctcgtttttctttcctcgttgtatattatttctcgtttttgtcatatgaaaatcgaatgcttagcacatttcaacaaaattttaattttaagatttgtttgtaaactcttaaatatattgggctaccaatatcatagagagttgagttctaattagtatgtagttgacaacagaaaaaatcctgtaaaacttgtctaaaaaaaatcaaattttttcgacattttgttggaaaaacactaccaaaattccatcaactgacaccagttacaaatttttgaattcttttgtcatatccttgaaatatcatgtagtcgagacgcgagtataaccctaaaaaaaaactcaaattccaagtcatacagataatacgatacgttttcacattaatttgaatatagcgaacgtagaaacattttattgagtcagcaaccatggcttaaagcctaaaacatcttaacaatccagacactcataacagtctcttttcaaagtactagggcagattcctttagacatactgaaacaaacacatgataactctcatgcattggaagccgaattcttaataggatatgaagcaagcatcgcaattccacagagaccttttggatcttcaaagttacgagcaatcttaatgtagccagcatctccccacgtcgttccccatgagtttctcacgatccaatagtcctgaccgttctcactaccgtacccgacgataacaagtgcatggtcaagatttgttccgcatggtccattatatatacccttaatgacatcaatcatgtaaacatagaccatatgagtttattaattgtatatacttggatgcaacaaaaaaatgaattttataaggtatgatagataccgatcgatagagcataaattcttgggattttttgtcaacgccaacactcacgggctggtgagcaaccgccttttgtaaggaaatctcatcattcgctggcacatcctcgtagctatcaatcgtgatgaccttgtttgaggtagactgcgaccaacgtaccaaaaacaaaaattgaaattagctacttataaatatatgcacatatatgtgagtgtttaattacggcagcactaataggtgaacctgtttgcggttacaggagccttgagtgccctggtatggataatctttttcggaatcaagaccattgttattgataaggaactggaaagctgtgtccattagtcctgatccataacaaccgttgttgactagtttgcagtcgaccaattcttgctcggacaatgagattaactctcctgtcacaatcttgtttaatccctctactgctgccactgtggagaacgcccagcagctgtcttttatttaaattaatatacaaaaaaaaaaaaagatattaaagtactaatcgtgatgcctttcaaaattctaaataaaaaaaaaaaaaatctgattgtttcaaaggcatgtacgtagttgcattaagtagttaaaatgttttgctaattcttcaaacaaaacagaaatttttaaaagaaaaatatatatataagaaaagaaaattaccgaacactgatattgaaaatgcaagcgaatgttctcctcttttatatttacactctcagaagggttttggatataaaaaaaggatactaaaatatcaaataatttaacaaaagtaactagcacgccaaaaataagtatgaaaccctactatacttaattaaggtcacgaagtcaaatttcgatattcggaaaaaaaaaacctaaatttatctaagaaaaacaaaggcaagaatttgttgattaagtgaaaaaaaaaaaaaaaatcggacctaaataaatcaccgtacgactacgaatattagggtatgaatgtgaagactagtaaaagtactcactgcaagtgccttggtctttaatttccgacactgcaccttcttgcctccagtcaactgactctgggatctgatctccggcgagtggcacgtacctacgactggttttgagattccttcgtttcggtttagggcttccagggaaaaggtctcggtactcttgaacggttaggtcagcaaaccgagtcaaaccaagctggtaagagaggttcttagcattgtgctggtcgatgaaacggagattgtccttgaagttctgaaaacgcctttccttctctccgagagcattggtataagtcttcccgtgcttcgacatccacatttggaagataaactcaacctcctcgttgctccggttgtgaccaccggatgtggcgggaaggtccatggccgaggacggcgccgaaagaacgaatacaatcaaaagaaagaggattgtcatgcaaacaggtctaacaaagcccattttgtatattcttgttagtgattatgagatattgcaaattggtccgaaacaaatgaatgatgggttttatcgtagccaattacgtgtgtttgtgtttggatatatatgaatttaatcctgatttttaaattcttgacctgcagctaattctatatagtgtccgtattcgatccatattcagaatcttgagtcaaaattactattagaattcgttttcaatctttctatatataaagtttaagaaaatccttttaattttacaaggggaaacttggaaatgaaagaaatttatttggagattttcccagctgtacctttattactaaattaacataattgtctaaaattaccctttttactagattacaccaaattttagacaatttcaaaaggatacttagaggaaaatttggtttagtctattaaaagagtaattgagtcataattgataatatagtaataagtatagatggaaaaatatccggaaaaaaaaatcttttatttccaactatacctttattgattagcattgtccagcaatatttttatataatattaatcctacttttctcttaattttataatttttaaataaactaaaagataaaaaaatctttgataagaagataccttattttttcaacaatgcaaaatgaatgttagtgtttgataaaccccataatttagaaagaggtgttagtgtatagtcgaagatcttagtgagaaaaaagcttctttaaataactgtttacataagtaaaacaattttcaaagttttaaataattataaactttgtagagcgtaatataaacaatatacgttgactattttacatatttctacaaaatataaaaggtaatgatcactttattgccacggcattctcatcattgctctctcgtgttaaagaaaggtgatgcaaagaaagtttttgaaataacgaattacacaataatataatacaaaattggaccgacaatgttataagactatttgatgttcttttataaccgtcattaacggttaatttaaccgaccataagaaatgactttaaactgattgtgaaagaccaaagtcctgatgcccgcaattaccgcatccatttatctgaccgcattcattttcgccatagtatcggatggtctcgtaaaattcagtggagtcataggtttgtgttgaatttgagattttgaaagaaaaagtacattgatatctgacaaatatatatcctgaaaattgtataatattctccgcatgcatcggcatctctaattctttttctgtctgtttacattttaaaatttgagattttgtctttttacttttataattatccgggcagtttgatattcagagtaaagtaatttagtaaagaatcgattttttaactgattgatgtcacttctgacgaaaaataatttttgtaaaaactatcaacattcttgatttttcattaataaatctgtaaaatcagagtataacattttttcataaccaatatcatttttctagattatatgttacttgatcagttaatctatgcaagtatatttgatataaactaaatggttaataattaaaaaactttcaaaacaaaaataaacaaattatacaaatacaaatgactccaaataactacaaagggagacgtcacttggtcaaagtatccgatccgtttgttctcacttctatttacttttgcatcaacaaattagttctccccaaataaatatatagtttttaaaagttgatttttatatgtttcgtttttcaaatagttttcatgttttttaacttctaatgcttatccttttctgtgatttgagacttcaaaaaaaattttggttttaaaaaaaattatacgagcaaatttgtgatgtatccttatttttatcatacacgcttcctctacgtcaccgaaccatatgagatctagctgggtctgagtaccttttactaaaaaagcgatgattaagtcatcattctttacatatcaatcaggtttcttctggcgcttgaacgtcttttcataaacgtgatcatacactaactctatccatataagaaccaattataaatatatgatcatttttgccagaacctaatcagtagttgctcactataacagtattcttgagattaacaaattttctttcctacttttgtcaaggtcatggctaactttgccacatgcgaaagcgaaaattatgtccacgagatctgtttggtgaaacataaagtacctattaaattcggtccaaataaaactatgttgtaatgatatatctaccgctttagtgacatatacattagatagaacgagagtaaattaatgaagagagaaaatactaacctcacatgcttctttttccttcttaaaaactaacctaccattgctttttcttcattgatacctctcacaagcctaattgaaaagtagaatattatttcattgtgaaactattctgcatatttttatttggctttttatgacctagcaaatatgacctagcaaaattag

SEQ ID NO: 37432 - DNA, 3599 bp, Arabidopsis thaliana landsberg
  unsure (1)..(3599): unsure at all n locations
tataaaacaaatttttgagaagtgtcatagttggaaaagtagataacttatttaattcgaatggggggggggggggatgaatatgaaaaccacggtaatagtatatttttgttttttaccgtatttatcattccagtatataaaaattaaaatgtaaagtttaattttttaaaaaattacgtataaattatttcaacaaataatcatcttctatggtggaaaacaatttccaagacacataaagagttaccttaattaatgatacattaaaaaaacctgatggtttctgaacctcacaatcgtgtggacactatagagttgatcactggaaaaatcataaatattcgtgttggtcaactattggctcacagctcacaccatttaataagttcaaagaagatacaatgattacctattacataaatcatacatgcatacgtgtggttgtccatattttgacattaatcatatactataataaactcatatattttgtgcatatatgacatacatagctatctctattgtaagttgtaagtcgtaaccactatataaactaattaattacatatgtatatagtgatagatatgttgaatgatcgaagagataacggtgtctcttcacgaaaatagagtttcatcaaaagcaagataacggagtactaattatctaactcgttaattaattgagctctatcttagtaagattcaccggacactgcaatatacaattaaccacgtgcttttcaagtgaatattcagttaaattctcatttgtcttttctttagaattgacaccttaagctatttctagtcattctcaaaatataaaaagttaatggtccttaattgccgtgacaattgctattcttcttttattcccaaaagagatacaagtataaaagatcgaaacgctatactatttattaaaaaaaataaaaatacagttttaattatatgaccaaaaagacttttgatatatttgatcgaaaaatgaaaattgatttagaacttgattggttctcctactaccatacgtaaatgttgagtttgcggttgctagcgtttaaaatgaatcaaagaaattgctttaaaccactttggatagtttttttattgttctaatgcaaaattttaaagaaaacattcccgtaagtatttttatttatatattagtgaattaaggacaaaaaatgtatctcacagttttctcagaattttcttttttgacatagtaatgaataaattgatgtagattctatgctgtttatagaaacaaaaagtaaccgttttaaatgcctcaattgacgttaagtctgtcttggtgcaatttaattatgtttcgtcatcatcttttcaagttcacgcactaagcttagtgaaaaagatacgccttttttcttgttctgttttgttntgcatgtcacagtaagtaactctcctcctcaattatcaanaatgcaaactttaattttcttctagagaagagccactctctccacttctttctttgtccaactttttagacagagaaagtggcgtcagagatagatagagagatacatatacaagttggttgaaggaggagaattagcggttcatatcagtacggagaaaattgtcagtcatatgctttttttctttaaattctgcatttgagtgggtgtgtgcttttaaccattttggtgattatcaaaaaaaaaaaaaaattctgtgtgttttgagctcaagcttctctacaaattttgctgtctaagtttttccttttgaagtccaataaagttgaaatcttggttctttttgattggtcttcgtgaattccggtgaaagtttcaaacttttgatttaaattccggggaggaattagggtttatgaaagtaaaagaagaaactttgaagaatttgggagatggagtggttttaagacctgttgatcattgttctagcatttggagtatgaagatgaacatgaagaactttcttaagaaacttcatatctcgcccaatcaatcagatgaagctgaaggatcaatttcaacaactaagagcaatcatcataagtctatcgatgtatcatcatcatcatcaccgaggtctcatcacagcaatagccctgaaatcaaacctttttctggtttatctaattggttaagttctgttggtcatagaaaaatccctagtcctcctaattctttcaatgccaagaacagagccgccacggttgatgacactgttgttgttaatgggtcagaacatgtggatttaggttccaaagatccagctgttgaagaagagaatcagatacagttggctttagagttaagtgctagagaagatcctgaggctactcagattgaggctattaagcaattcagtttaggctcttgtgctcctgagaactctccagctgaactcatcgcttatcgctactgggtaagcttttgattcaattgttttctctgcataacagaaactctttagttactcccaagaactcatttcattttggtattgttgcattcacagaattacaattgtcttggctatgatgacaagatcttggatggtttttatgacttgtatggagtgttgaatgcatcctcagcagaaagaatacctcctttgctcgatcttcaagggacacctgtttcagacggtgtgacatgggaagctgttcttgtgaacagaagtggggattctaatctgttgagacttgaacagatggctcttgatattgctgctaaatcaagatcagtttcttcctctggttttgtgaatagtgaattggtaaggaaactggctattttagtgggagattacatgggtggaccagtcgtgcacccagagagcatgttgagagcttggaggagtcttagctatagtttgaaagcaactcttggaagcatggttttgccacttggttctctgactattggtttggctcgtcaccgagccttgttattcaaagtatgcactttttcttctgaatctcagcacttttaagtttatttcatttcttatggttctttctttatatgaaactttgtaggtattgtgtgatagtgttggtgttccttgtcgaatagtcaaaggtcagcaatataccggttctgaagatgtggcaatgaactttattaaggctgatgatggcaggtaatcatcacattaatgtgtagattcaatatttgtctatcattcatgtatattgttatctaatctgcacctcctgaagctaatattgaggcttaaagaaagaaactttgttatatgctattcaattgtgaatttcagggagtacattgttgatcttatgggagatcccggcacgcttattccagctgatgcagctggactacaaatagactatgatgaatctgcctattccgctagtcctggagacaatgattcaattcatgtagcttcttccagcaatggtattgaaagctcatatgaagagaatacagagtttcgaacagtggaacatcgttctagtaccaagagttctgggggagagaaaccaatccggaggtggaggcgatctcattgttcatccaaatatttctagagaagatgtgaaaaatcagaagaaagttgaaaag

SEQ ID NO: 37433 - DNA, 3949 bp, Arabidopsis thaliana landsberg
  unsure (1)..(3949): unsure at all n locations
gcatgaaacaccactatcaggaaaagaaaacatcgcaggtttcagaatacatgagttaaataatctcacttcgattgttctcacaagaacttctttgcacttggttagtctcatcatttttgttattgtaattgtcacgcaacaaatgtgagcctccattgcgaaatatttggttggataccgaaggagattcttgaagttgatctcttctagcagcaggctcattaaatgagttagaaaatggattannnnnnnnnnnnnnnnnnnnnnnnnnnnnnnnnnccttgacaggagctttagttacactctgttttgatgaagctgatgtaccacatcccaaagcagttaccaacgtagaagatggcacagataacgaaggaactgcttcctctgagcttgttggcactctcttagtttcaacatttgatatagcactgtaaagacagagagagatagtgtgtagtgtttacaagcaagctagtgaaggtaaacatgtcattaactttcataccatttcatcgattgccaaaattaacgcatttacaagagattaaacctgttcaatgaagaaccagccaaatgattacgaattcgttgcacattactcgttcctgaaccaaacccattgacaataactttagacatttgttgatatatagaaccactattaacagaaggaaagataggtttaatgcatctcagtaccataagagttaagcttgtttcctccattttgatcactgccattcttagatttgtgatactggtttctaccactaagtctttgaatctctaatgcgtccttggcctgggaaaaataagcaaataagtgcaacaaaacttaaaaaggttcaagctttacattaggaatgacacaagaaacaatatagtacacacaaacctctttcttcttgtctcgattactcttcacttcctggaaactatctggaatcgtaatcgaagcagcattatcagtcagtaatcaatcaaagagcaaagaaaactcagaggcaaataatcactagcacaaggtttcaattcccttaaaactcaagaaaaacataccaatctctggtttctttcatcttcgtttcttcttcttataaaacttgaaagcttataaaaccaagataaaaaaggcagcaactttattgaagaaaccttgagaaagaagacgagtaatggcttcgtgaggattcatgttgcattcaacaagcattgcgtaaatctcttgttcggagcaattcacgatttccttcatagcccgtacgattggtcttgaatactccgggattgagttaacgtcaatgtctgaagaacccatttctgattcaacacgaaaaggatgatctttctttctctctcgctcgcttctggcttttgagtacgattgctctctttttctctttccctctctcactttcaatttttgggcttaatatcacaaatttataaactagtacaatttagtagatttcataaatacgaggactaatatgtaaatacgcgtaaataccattgcattgcaccatataacagacaagcgtatattttgaagcttgaccgttaaacaaagatgaggcttttgcttccattttcctcgccgttatccgccacgtcatcaccgtcgacgccgcaatttatccctgaacttccacctccgtctcaatttgactactcgggtctaactaaaattcttaaaaaatcggtaatcggaaccctaaccggagctctatcgctcactctcgttttctcgtcgccgatttcctccgttgctgctactaatgatccttatctctctgtcaatcctccttcgtcatcgtttgaatcttctctgaatcacttcgattcggctcctgaagattgtcctaatgaggaagaagctgatactgagattcaagatgatgacattgagcctcagttagtaactaatgaagggattgttgaagaagcttgggagattgttaatggtgcctttctagatactcgtagccatagctggactcctgaaacttggcaggtgtgtgaattagcttgttgggtagataaaggaagaagctttatatatgtaatggttgaattttttttttgttactttgcagaaacagaaggatgatatattagctagtcctattaagagtagatcgaaggctcatgaagtgattaagaacatgttggctagtttgggtgatcaatacactcgattcctatcaccagatgaggtttttgttctttacattctatgaatttgattgatggaggaaggactcttaagttgtttcagttactcatatcattgtttgtttcacttgtttgaagttttctaggatgtcgaagtatgacattactggtattggaattaaccttagagaagtttctgatggtggtggaaatgtaaagttgaaggttcttggtcttgtattggacagtcctgctgatattgctggtgtgaaacaggttataaaccggtctagtttctttcttgtagtttcgttcgctgttgatctcacttaaaaaagtgtgcaatgtctctctctttgatagggagatgaaattctggctgtcaatggaatggatgtcagtgggaaatcatcctttgaagtatcgtctttgttacaaggccctagtaaaacttttgtagttctcaaggttattattcttaataataagatacatactaaattcattagtacttgatttaagtttggaatcaagatttttatgtagtttaagcatattgcaggtgaagcatgggaagtgtggacctgttaagtctctgaaaatccagagacaagttaatgcacagaccccagtttcttaccggttggaaaaagttgacaatggaacagtctctgtcgggtatattcgtctaaaagagttcaatgcgctggctagaaaagatttggtgattggtaagccttttcatgttgttacatcaaagttatcaactttcggtcccatccttttatctacttgtgtttaaatactacacatccttttcactatgtgcagcaatgaaacgactcctagacaagggtgcgtcttattttgtaatggatcttagagataaccttggtggacttgtgcaggttcattctacaattgtaacttaagaccatttcttctcacaaataatttacaggaacttgatttttcacttagcccttcgtttcttggttatgtttatttcaggctggaatagaaactgctaagctgttcctagatgaaggagatacggtaaatcaacattcatttagaacttttaaaacattgtcaatcgttgttcaggaatatgaaacagaatagcttgcttcaacttacatgaatgagttccataacgattggcttaaacttatgttacatgttgcgattgtgtaacaggtgatatatacagcggggagagaccccgaggctcaaaaaactgttgtttcagataagaaacctttgatcactgccccacttattgtatgtgatgaatcatgtaagccagttaatctttcccactattatgttattttgcatcttgcactgattagaatccttattattgttgcaggtaatggtaaataacagaacagcaagtgctagtgaaattgtgagtaatctcaaaagatttaacccacgggaaactcttctttttttggatcgttaaacggatgatttgtgtcatatttctccaggtggcctctgcacttcatgataactgtaaagcagttcttgttggcgaaagaacttatggaaaggttattccaaaggcttactagtttcataaccaatctatcgattttgaattgtttttgatcatcttcatgtcatttgattaatgggtttcagggtttgattcaatcggtgtatgagctcccagatggttcacgagttgttgtgacaataggaaaatatgtcacacctaaccatatggatatcaaccgggggggaattggaccctgat

SEQ ID NO: 37434 - DNA, 3456 bp, Arabidopsis thaliana landsberg
tctagtcacgatcaaaatgaaatgtaattaatgtagctaatgggttacaaccttccagatataatcattaattataatagaataaaataatgtggcttggctgctggctcgtctttatcaaagcccatgtggtgattaggaacaaaacaaattttgataatgattttgaaggaccactaattctgagccttctttcatacaaagagggaaagaatgtctcaaactatatagactcgtaatgcaaacgctaagcttatatataggctaagaagacttttacatatgtaaaaccatcacaagctaagaacggtcacgaaaagtcgaaaactatacgatcttataatggtcaaccaataaatacgtcattactgacgacatggaaaagaaaacgctacttcccttacttcaccattgtactctagctatgactataacttcattagaccagatcaacgtgtttcaaaatcgcatttatttcttatcatcatcactctgtatgactatagactatagtaaaaatcaattaggtaatcgacattattatagagactaaaattgttttctaagataaaatctaattaatcattgaatcattgaaatctagtttctagatttcgattagctaatttacgactttagtctaaatatgaatatattaacaaactgagaaaacattatgtaatgtttttgagtttaaccaagagacaagggaaacaagctaaaggggttacaaggttgaagaacacacgtgtggaatgacacgtattagaacacagtgaacacgaggcctgatgtcggtcggaaatagtggcaaacaatactgtctcaagagtcacgatcttgttctgctcatgtgacttttaccatctttccaaggttatttacgtacacgtgcgtctgtacgtatatgaaagcacatacgtagacctagctacaactcatgagactggattcaaattaagcattctaaccaataatatggtcgctaattttgcttagctagactaccagagatgttgagacttattggcaattaataacacaattttgaaaggaaaagtgtttagtagatttttctttgaatatactagtagttttacatgcatgtaccgtataaataattatattaagagaaaaagagcattagaacttgtgaatctgcgtagacacacagatgtgatacagtgcattatgaagaatatacagatttctaactatctatacgttttttagtccggctaaaagtattttaaaactattcgcttgtgaaaattaaatattgtggattagtaaagatgacattatcttttatatatatatgaagcaaataaaagttcaaatagtcatcaaaatgatttgtatacgtacatacctgatacctttacgtacacaaacaagataacgtatgtaaatacgcagggtgaaaacaacctaccaggataccactccttcatcagtcatcttcttattcttctctgatctctgaaatcttcaagaaacattgagaataaatctcatgataccatttgattataaaagtaagatctgcatacaattcctgtagaagatatatattgcatgaaacaaataagaaccgcattagtccttgaaagttgaaactgtgtggtccgcattttatataagaattcaaaattcaagaacttaatgcatccgagatccacaggaaaacaaaaaacctccgttgtagcgtcttagcatagtttcagatcaactcaaaaggaacaaaatttaataattaggtactaaggaacaaaagatgaactgagttccatacatacctagagataagtatatatatatcattaatcaacgaaacctataatattacatataattcgatctaaggcggtacggcctcggcaacagatggagcaccgacgttacaagggtctccgtcactttgtctcgaagaagcgacgtcaactctaacggtggtgacagttggcggccgtttccgtttctttttctcgtaaggaatcccacgagcctttgcctgactctctctgacttccctcaagtaaatccgaaccgcacgtgcggcgaacgggttagaatccggccgtccaccgttctcctcgtaggcagctctcaaccgtccgatcaaagcatcgagagatccccaagcttgcttgagagggcatgagcaaggaccaggtggatcgggttgtccgaagaagacacaagcttgggatgtactttggtcttaccaaactgatctaagtaccttaggaaacttagcacgtgcgtgtagtcgaattgagacatcatcaacggtggattttgtgattttaggtattggacgaacgtgttccagtcgcggcgtttctgcgattcatagcggctgagtggttgctgcggttgaggaggaagtggttgcttgtggtggttggaggaagaagacggatgatccggtggatctttcgtcggtgtgtgacgatccgaagacattattagggaaattctgattttttgtttgtttgttttgatattatatatttggtttatgagcaaattgaaggtttaaaagcaacaataaagtaagggaaagaaagagagatactgagaaataatggaatgggagagagaattattcacgaaaaaatgattacgatgtatatatataagtgacaataataaatttctctcctttcatattttcatgcgaaaccaaaataatttatttaagaatttcaaaactatgcattatatcagtaacttataataagttacttattgagtcaaatgtaaacattttccagtaatggtgagtttattataccgttttgtaacctatagtgtttagtttttccacgtacgtgtcctaacaaaaataataataatcagaatatcactttagttaatttcttatcttagttaattacgctataataactaaatatcatgtaactcagtataaaaatattacagacatatataatgatttctttacaacaaaaactaatatttaaaatcaatcgttataaaaccagagttatttttatttagttttattttgattttactattactttagataatgtgaatgctctgttaattttatagtcaaacgaatatttatatatttgaatagaagaagatctattcaatgagattttatcctattttcatataattggttatatattatgtttgtattttgttaatgctatgttcacacgttactttctatgacttttttttgtcatcatccaagaaaattaatatatcaacgttcacaaaacaatcaaatatcgactttgtaataatatatactacaaattagtacgcgttattattatatagagcaaaaagagagaatatatttcaatggatgggacccgtgagaaggtgctttcgttccttttataaattttattccaaatgatcaaaatttgttattttatttggcttgttaattatcttttttggtcactg

SEQ ID NO: 37435 - DNA, 1407 bp, Arabidopsis thaliana landsberg
tgcaaacgataggagcctccatctgcatcccaagtcccttacaacgttcgatgagtttatttacaaagtaaccaggcatcttttttttcaaactctcggatgcagtgaagtcaagaacagcccaatgcttgattattgaaccctttgtgactccctttgtcgtaaggttccattgattgctctcgctcatgagtttctcatggataggattgcctctccgatcagtcaatttcagtgtaggagcctcgagtacacgaccttccaccgttgtcatgtttggatccactctcaatccgaagtttccaatgatatctccactgtcataaatatacataaaaggataagattaaggtcataagactaaaaaataaatataaaaatcttttgtccacataccctctaggtccatcactagactttatcatcttatttatattctccagtctttgttgtggagtgactagtgaaagctcctttaaccacgcggctgaatctctatacaatttctcttttggaaaaatctgcccctcgaccaagttacagaactccatgggtacaaaattttcccgaccctttttccccaaattcaagcaaggaatatccttgtgatcaatgtctcttccatacttttccttgaaatactcaacaatggatattttccttggaggctggtttccagcatgatcaataaaatcgaatttgatatcttttgtgtcgtccttactcaaccccataatgatgaatttctgtttggtctttcgatgatcaacagtgactttcaaaccaatcaattcttgtaccacgtcatcaggcctacaattcttaaactgacgtatatttctccacccaaagtacaacttcaggtattcgatgactgaaattgctttgcggaacgccaacaaagaggagttcaaacataatgataaaccttgtactgtgggcttgagagtgtggtgaaaccctttcgcagctccaactccgtatccaaagtcaatctctagccgagtactaaagaatcttttaccaacagtgatcatacgttttgaaggatgttccttcatcacaacatccattccttgcaacacatcacgcggaataaaagtggaacgtccatctatgtaggcttgcaagtcaagtaactttagctctttcacttgtttgatgatgaacgtatagcttctacctctcatgatctcctcggtttctgagaaatcaactttaaatgatcccgtaggtaattcaacagcgctgaaaatgttcttctgaccatcgtacgctgtcatggcgttaggaaagtcattattgtccttgaacagcttttctttgaccatagctagctcaaatcttgatatcttttttgaagaattttctcctttgatatcaacatcgtagtgccttatgacactt

SEQ ID NO: 37436 - DNA, 3511 bp, Arabidopsis thaliana landsberg
  unsure (1)..(3511): unsure at all n locations
agataccttgcaggagaagacgaggattgtttagcgagctcgatttcaacggatttgcttgctttcgttaagtccactcctgaattctccaatgcttctctcagtgttttcactaatctgctccacacacaaaagtaaatgtataaaaggttaataattttttacttttacttaactgttgcaagatcaaaattcaaaagagagctttttagttttacccttgtgagtaaacacttgaaattctgatgttaccctcaagaacttcctcatcttcttcttctttttgactccgggaactcggacttggctctacagcctctgacgatgcgactcttgcgtggaactggggtacgggattacccgcaatcacaggagagaaaaaactgttgctttgaatcgacaatggaaatggagaggtcgncgcgggttgttggatgatcaataacaacaccttgtgcagttgcaaggaccgaaaccgaatgttgtttttctcttcttcaattttggagcaaaagcaactccttcaggtacctagctgtggttggtggtactctgctataatggtaatggatcacacgttaacattacatggtttgtttgttttcagtttccaacccggggaataaaaatgaagtatggtcggaaaatgtgagattatatttacccaattcaatagcttcgcaggttcgtgattccatccttggtaagaggtctcatacttgtctgctttctcttgtaagaattgaatatactcgataacctgtatgaagttgtccaaaaaaaaaaatggagattaggagcagatgtgattgaatcttactgtcacaaaattttcggccaaaagagtatagttatacctctagtaagaaggaggccttatcccgcttttggtcgctgttaggtattagttgtctcaacatctgaaatctgcagagggatccattaacaatgtttgattagtatctccactctgctaagctatataaccaattctggtggcttttgctacatattcaggacttacctatcattgatcttgctccttctccgttgctctgtagcagaatgtttagacctaggtgtgttcagcttttgatcgttaggagagcctctcacatctgcttttaccctcaaatccactgtaaagaagcaatcaatcagatcctaagctgttactgtttagactttagatatcatataggtggaatcttggacaatacaaacctctatggctctggctagtcgaggagctttctttcttcatgataaaatcttcttcatcatctaaatcatcttcctgtgaacttccttttgctgaccttatcatgtccatgaagctctggctcttaagcacagaccctctgcaaccaaagtaaaactttagttgatcactctttaaagtccatagaccgagttatataaaaaagagaagatatgagactaactgagaggaagagagagaactgaaaccgctcatatggttgtttgtcaaagactgggaccgtctctccgccactggccattgtcccacagttgctgcaacatcagctacacattcaaaaaaacttatatttcatcattccattgatttctaaatactactttaaaactagtctaaataaacatcacgattcaagttttcttgttacctctcatgtttactctctccccaacactattctccttccttgtctgtcccttcttcccagaagcagattcatcccacagagtgaacccgcttgatgcagcggcgtacgagctgcaattagagttagaattctcatccaaaacgtttctctcattagcattgaacatcattggtggtgacaactccggcttaggaattctctgatgatgatgatggaagtaaggaatggggctaatcgtataagtccctataccaccgggaagcacgtgctgcaacggtggaggtggagcagggggcggtggcttctcggacgctgtagtggtagagttaatcctacttacgtcttctttagcaccaacacattctaacggttgaagaaaatcatgggttttcaagtgactacctgcttcacgtaccatcaaaattaaaaacataaactatatgttagagaagtaaatccctagataatacacattttcttatacatcaagttgtatgcatttaaacgcttatagtaattaacaacattttgttatttatgtgatgcaattctagggatcaacatcatgagggttgaaagatatttatttaatcgaaggcaaggtttaacgacatgtgtagacgaaaaagaaagaaaaaaacggtcccaaaattccatgggctttaaacacagatgggcccattaggacccaacaaaatagcaacattttgatccatgattcgtcttaaagtcagatcagatgcacgcgcgaaaaaaacgtgacccctttaaagagaatcttaaagaagaaaaagggtaaaatggtaaaaaaaaataccttgagaagaaggtggtggtgttggctttggatgtgggtggacggttgaatgactgcagagcgataaaaaatcatgtgttggttttctccctgtgcgaaattcttcttaatatatatatcaaaattcaaaaaaatacataaatttaaaattatgaatcttgtagaaactaaacactctgttttaaaataaaataaaggaattggtaacaataatatctgataatggtgtttaccttgggttttgaagggacgaggttgaggaagctccatgaacgacagagcttcgacggtttttgaattctttttaaattattctattactaatctgtgcgcgggaattatcgcaaaaattggctagcagctcagatctgcgacttgttgcagctgattcaagagatattgtggttttcgatggttgaagaagcggaattgagctctgaagttgctgaattatgctttctctgtatctttttaccgataaaaatcctcgaatttggtcaaattctgctcgatttaacctaaatcagcctccgccgcaacttttctcagcgaattccacataattcaaacgggagaatcggcagaagtcaccaaattcgtggaatcgatagatctgtcatcagaattgggtagaaattcaagagaataaccataattcagcggaattcatagctcaaaccaactcaatttcgcataattcaagtcaaccaatgaacatggagatacaaaaactagaatccaagtcaaatctctaaagaacacgaatggattagatttgagctaagaagcgtaccttcttcgacagcaaattacgtgaagcttggagatctctaagtcagagaaaccaaataaaaagttcgaattacgagataaaaactcttcgatctgatcggaaaaaaacaagatcagccagagagctatctctctctctctctctctctctctctctctctctctctctctctctctctcgcggtcgggagcatacgcgcttgcagattccgggcgtccaggggtgccaactgactgaggcagtgaagaacga

SEQ ID NO: 37437 - DNA, 2046 bp, Arabidopsis thaliana landsberg
  unsure (1)..(2046): unsure at all n locations
agagaatgttgattttggatcagtttgttactggggtattaaatttaatttttgtcacagatgtttttctttctcgcattggttatttacctttgctcttgtaagttataactaattcaaggagctagtgtatatcaccgtaaaagagagcgcgtgagtaaaaaaggtaagtagtgagataagttgtattccacgtgtcactgtggacggcgaaaaacacacgtgcgacccacctgacaccaatacttctttatcccccacgtcaacacgaaatccattggctaggttatgatacgataatagttcaattacctttttttaatacataaaaaaatgtttgttttgtcctccaaaagcacgaatcaaccaatagaagtacagacaatcagaagagcgacaagataacaaacttattcaaggacaacaacatcagatcaatctttagggacttgcgttgaggtcaagatccggttccattcgcagcttacaatccacggcggaggaagtctcaggctcttccacggcggtttgaggaccaatagtcaaccccatatcaatggactcaaactggtcaggacaaactcgatcaagctcctctttcaacgcaataacttcaggcagatctaagaaaaatccagcaaccgcttcagccacccccggagataacatgtcgtgacaatccgatggaagtgttccatcacgcgccgtttcggaaagggtgttgttcaccggagaagccaaagcattcccatcgtctccaacgagagggaggttggcatttccatcactcaccgtctcggaaaggttgttgttcaccggcgtcgccgaagaaatcccatagtatccgattagagggaagttagtagtagctttcgatcctcgaaaccttatggcagcnnnnnnnnnnnnnnnnnnnnnnnnnnnnnnnnnnnnnnnggacccgagccagatttcttttttctttaccggatcacggatctccgcagcatatctcccccatggtctcctccttacacccctgtaacgcacttccttactcttttctccgccgtcattcacggccagggccttagttacattctttctcttctttacgcccttgtcactcacttccttactcttttctccgccgtctttcacggccacggccgtagtgacattctctttttctgtggtcatattttggttgggggagaataatttagataaaggacaaaactattgttttatagaagtgacgtaatcccacaaaaggacaaagtgacaaaaatgtggaaagaaatgtccacgtggattgactgacgcgccgccttaaagagaaaacagttttatgacgcctttttatgttttaacctaaacgtccccgttcttgcgtctcgcagttttgcgccatttgttgcttgggctttaacaggttattatctttgggctttttcatattttatctgagaatctgataaacaagtacttagaaattatccatgtcgaatatatacttcgagaaagcttgatgaatctaaaattgtattctttgatacaaaagttataatacataaaaattgagtagatgatacattgctacattataacaaaatttgatgatttattattactccacaatctgcttagactaatattggatgtcaaaaaaagaaaattcgactaatattaagcataatatgaaaatataatgagtttaagtttcaaattttgaacgcgccaataaaatgtataccgttttaaaaatcgcaaaaaatgaattagtggtaatttataatccagtaatttagataataatccagagtaagatttgtttctaattttctcatttaaataccattgtgaagaatctaaaccctaatctaccagcgcgactcttcatcacgtcaaagttgtcaattattttgaaaaaccctaaggagattcaaattacgacactatgtcgacgacggcgaatactaacgcgacgactgcgccgaagcgtaaaccagtgtttgtgaaggtggatcagctcaaaccaggaaccagcggccatactctgatcgt

SEQ ID NO: 37438 - DNA, 2858 bp, Arabidopsis thaliana landsberg
  unsure (1)..(2858): unsure at all n locations
aaggctttttcttgctcaacgcatcaacactcttagttcaagatttcacctgtaatgggtgaaacatgttggctcgtagacttctgcccatttttcgaaccgaccactaccataggctttggtggtatcaaaccggccctgaaaagcatgctttccactgtgtctgttggttgagctccaacagataaccagtacctgcattattcgagtaccatagagtgaaaatcaatttctttcaacagttgcacaaaataaaaaagaagtttagttagacaccaagaactgtgtggatttagacttttaaaccagtctaatcaaatcaatcatacaagcaaaaccaagcctcacagaaaacttgcaccagatgaaatgcattaggtgtagaaacaaccaaacatgactgagagaagcaaatgaattaaggattgtagccttatgcaaatagagttttggacacagaatcaacagaaagcatctcaatttgtcacaatctaagcaattaggcagcatcattgtggcaagaacaagtttatgaccttgcagaatactaaagagaatgaattaagatgattaaaagacaaacaagaaaacacattcatgaggaataatcaatcatatggataatgtcgagaaagagactctttagtgtttcagtcttatcaagcaatcatgagtttcacatctaactggtgtcctaaaatacttgacacaattatacaagcaaacaggaatatgaagatgatagaacaagtaaaaaaaacatacttgattctgtcgaatttgaggctcactctatccgcatcttctttgcctgaagacgtacaagtagattcatgatagcagagacattaggaagtgttcaattttactgagaattgagaaatgtatatagaggagaaataacgaaccttggagtggatcataaaagcctaacacctcgatttgtttaccgtccctgcgcgatttttcatcggcgacaactacacgatagaagggtcggtgtttacaaccaagacgcgcgagccttatcttcaccgtcatctctgcttggaaattgaggtctgagaagtgagaagaaagaagataagtaaaggtttttatttaagctggtgggttttggctttttccccttatctgtgttctctttcttctgttacgatcgttattgataagatgggccatgttgggccagtttacattttatctctttattcacattaagcccattagatctgctatacgtttcttttcgtgatttgctatacagaagtcacttatctaaaatctcggattatccagaaattccaaaatattcaatcagcttcctgtctttaaggatcttcctaaaagaaattgcttcaaaatgttcaatttnnnnnnnnnnnnnnnnnnntatcgtataggtgtttgactgttagtagagagatatacgaagtccatagtgcatgcaacaagttagatataataaaataaaataaagttatctccagtctcaaccactcagatgtcgaaattcagagtgatgcgtacatcctacgagtataacttttcaaacaaccaccaacattcacaaaaattgcaaaagcttctacaaagataaccaaattaaccaccaccaaacacaaaccttcttcctgttaaatcattgctacagtttagctgtcgttttcaattctaaggttcacacaagattaaacgagctcatctatcaagagttattatgatccattcatcatcttctccatttcaacactacaatttgctaacccaagattcacaatcacaatctgatcaaccaaattaaagagccatcaaagaaagcgatcagttaatgaacaatgaatcctaaaatgcgagttatttaatttccatcatgtacaatgagatcttcagaagcatccgaattacttactactaaagaggaattgaatttgagctaacaaatttacacattaattaaacccagaaactgagaaattctaccgagagttcttgaagaaaccatcccatcgccttgtgaaacttcgaaatcccaacacaatcagcacttgaatttgatgccgagaccatgcttaccacgaacgataccaggcttaaaaaacggagatatctttgaggcatagaccttggcgattgctcttttccccagattcctcatcctttgtctccccaccttcttactcacgctacgcggaaccaactcttcgtcaagatcatacgaatcgtcgtactcgcgatcttcttcgccgtcgtcattaacactatctccgtacgtaattccaacagaataaccagaacctccaccgagaaacatcatccgctgctgagaccatccaagatcattctcagcaacttcatcgcgaacgacatcatcgccaacatcatcatcaccatccagatccacggcgagatcaccaccgtcagcaataggaattatctcatgcggcggagaaatgacagagggtgcgacaaaggaagcgtcgtcaagagatatgacgtcatcgtcggaaagactatcgacggagaaagaatcgtcggagaactcgccatcagaagggttaacaacttcccagagatcgagatcaacttcttgatcgagaatgagaggagacatggtgataaccctagatcgctgcgccattttcgaaattgtgtgttgtttagaggttgcttctttgatttttcaagactgtttgtttttgataaccagaggaagttaccctattaatagaggcaaaccaccgagtgttatcttgtgctaattggtagttacactgttgaagatacgtatttacaaccagttatatgttgccacgtaaggattattttgccacctcagcgtgcccaaagttgccagt

SEQ ID NO: 37439 - DNA, 1899 bp, Arabidopsis thaliana landsberg
ttttatgaatgtataaaccgtctaaatcgtgtagataccaattatgcgttctaagtgctactgcgtgttagttaacaacccgcatataaaatacgctagtatccatcgattgtgggaatataaaaaactaagataaattaattgcaaagtgattagtttaattttaacatcttcaaacaaaattaagctttacttgatttgttaaaatctcgatattcttccaaaaacatgttttactagattttaacccgcggtataccgcggagacaatttattttttaaagttactatatataaaaattgcaaattatatttatctataaaatattttgattttatagtttacgattgttattaagtaacgtcctgtcaaacccgtcccgccaatccgtcccgtaaaaaaaactcactgatcttatttatgatatgtttatgaatcattgtctaaatattttttaattttgtagtaattaaatgctatataatatctctgcgatttgatgattataatcgaattattatagtcatgtagaaaaataatatcaaaaatgataattttgtagtaattaaatgatattaaatatttcagaagttttagtttagtaactaatcgtgtagttaatgtggagagattttgggaagattatcaaatatttaattcaaagattttctttctaattatcaaaaacaattattaaatgccagtggcatccactgtaaataaatcccaactctaggatttatttcacaaagtggctgcaaaaatgtatatataaatatctaatctttacttagatggcatgggtttgaaaagttctgagtaactgataggcccaatgactaaaagcccatatgtgtttctcatcataatggaaggcctacaagtagaagaattcgctcgtgtttatgaattatgatcttgattgtaatcttattatcaaaaaccaaccgtaaaagtatatgaattgcgtatttgtaaattgtaattattatatagtattgagattgtgattaaaaagtaataatgaatttgttgaattattattatagactatagtatagtagcaagagtgaaattttgttttcaggaattgagtcctaattttataaaaggagccaaaaaacccaattctatctaatccaatgaaaactccaagatcgtctctacgtccgccacgtcagcactatcctgatcgggaaacccaaaacgagtggtcgaatagtttccgactggtaacagagaaagcatctccacaatccccaaaattctttcaacacttgctctccattaatcttttagataataaacctaattgtttctgttttgtttttgtttctgtgagattcttccgaggcttgaagctcaatagctatggcttctctttcagtctcttcctcttcaaccatcatcgattcaagagctcctccttctcgactagcctccgcctccgcctcttctccgtcgtgcatttcacttcccacacttccgattcagtctcatacccgtgccgctaaagccactgcttactgttcgttttccataaatctgaagatttttcttttcacttttaatttcgagtttaaagtttcaaactttcgaaatgggttttggtttttaggtcggaagattgtgaggaacgttgtgacgagagctactactgaagttggtgaagctcctgccactactaccgaagctgagactactgagttacctgaaatcgtcaagactgctcaagaagctgtaaatactcatactttatttatgcaatgatgattctacctcttgcttctgggttacatgaactgaatttggttgtttgaattgaagtgggagaaagtggatgacaaaaacgctattagatctcttgccttaactggtgtagtggctctttggggttc

SEQ ID NO: 37440 - DNA, 2424 bp, Arabidopsis thaliana landsberg
acaggtctgtgttcaggaaccttggtgctaactgctgagtcaatatcaggatctactgaattgtacgtatccaagagaaaacccgaagaagcagcaactttatcattacttgaaaagcttttaacgatttgaggatggtcattttcctcagcaacagacccatgactatttctctgcatcaaagttacatgaaacagttgtcaaaaataccaagaaagatgaaacacttaacacaataaccatgtttctctaaaaaaatgtaacaaaaacgattcaatataacagaaaaccaaccaaagataggagaaggaatatacccaaggaatcaatttggttggggattgataccacatttggtgagaatcttcatacatgtgaactttttcttgaagaaagtgaatatactctataacctgagacaacatataaaagcaaacatcattctgattctctaaacacatgttctgttcaaaactataaattttactaacctccaacaagaaagaagctttatctcgtttctgatcattctgattctgaggtataatatccattaaactctgaaatctgtatccaccaaccaacaatcacaaattacgaaactttcttgttaccctttttagaaaatctgataaaaattcaaactttgaacacttattatttacctttcattgattttgcttcttctacgttgctcagtgaccgaatgtttagaacgtatcgcactagctttatcattttcctttgaatctgctttcaaaatcaaacaccgaatcacacagagacaaaacttagaaaaatctaatcccaaactattcaaatcaaatccatctcgatacatatcaacaatagctccaaccaaaacacaaattgacgaaacaacaactaagaaatattcaaaagtctcccaaatcgaacaatttacctctgttgctatgaacagtagtgttggaagaaggaccttcacgtttagagttaaagtcttcttctccgtaatcttcttcctcttgatttccttttccggttctcatcttcgccggagaatttcgactgtttattgttttattttcaacttttgccgtcgacgagctcttttttgttgcttatttgttttgttttttttgggtgcctcgtgactcggctgagttctagttagctgtgggagagactacgtgagtttacttgagcttttgtccgtcagtttcgtgttttggacacgtgtaggacttgatgtgattacccggttaggcctctaaatgaaccgtagcttgtgatgacacgtgggattcacgtgataagacgagattctaacctatcagatttaaggtggtcacgtgatgcacgtggtctctttctgatctgttaattttcacgtactatgtttgtttctaatcgaacggttatatatgcctatgtttccaaaacaatactataaagggccgaatggaattatcacacttgggccaaacccaaactttacaaaggaaaaaaagaagtaacatatgcctatgtttccaaaacaatactataccttattcgaatttatcatgggctaagcccaaaagttacaaaaaaaaaaaaaaagtaacaatactatcagagccaggtttcgatcctgggacctgtgggttatgggcccaccacgcttccgctgcgccactctgattgttttgaatgttttatatccaagttttatataaccgttaaataaaccttgggtcgtttgtttttgttgatgggcttttggtctgtcaccaattgatctctgattagtattcttcgtattttttttttatttttgagaaattttcaaaggactgtttctattaagtgactctacattaaaaccgcgtagaaaagttcccaatcataagttgcataacgacagcttttaagataatcgttgaagcgttttttggcagttgaattgactaagtagacaaaactgttatgagtaacgacgacccacttcataatacaacaacaaactcgaagacttatgacttactccactttctttcattctttttttatctccgtcaacgacccccaattgttatttaacacattactttactctcattcagtttcttctgttttttgttttttaactcaacatttttgtgttttggttggtggactactgactagtgggcaagtcttacacacacaatcctatgtacattcttttatcaagtgagcttttattatttctaaaataaaaggcgaaccaatcgaattcgaaggtaaacaagtagtataggatagtgtatgtgacggtgttgacggtggtgcaacgaagtgtcaccgtcatgttagcctgagctttaagtctcgtaccgactttaactatccaccgaaaagtttctccattcttagtgcgccacgtggtccaccagaagaatccagccttgtttagccaat

SEQ ID NO: 37441 - DNA, 11841 bp, Arabidopsis thaliana landsberg
agaggataatcgtcctaaggatattctccttattcttcggaggttttggggagatttcctgatttcgacattatcttcaaagattctcctttatcatttccaaaagtcccataaaagatcctattttaccggaaatgatccttggagaatgaatggtttttacaagtctttgcctcgcgtgtttttcacggctcggtggtcgtttgagaggtggcttcggggcaaacggtatgtaccggctcggggcgcgcttgatgactccattaagctcagttggctgtctcctgagccgatatagatgtttcccgcagcgttctcacgattggctcgggctgtgttcatatgattaacacccgagccattttacaaactctcttcgggacggtcgatcgaataaggtcccgaggtgctttgttctaggctaggggccatttatatgtttaaccatgaggtgattgttattcttagactgtttggctcggtcttgcttgtgggggaatccgaccccaatagttagccccccagctcgttggttaagagttaatgcgacgagcttcatgaatggtgtgaccgagccagctgcttccgcatctaaactgactgatccgtatcttttgagagtaaggcttgttttttcttggtgctacgagattctgttcttgacgggtgttgctatctcgaattcaaaatgttagctgttgacaagttgagctaggaaagctgctaggagacttgttgaagaactccaagctgttgacgagctgttaggccgggcaatagctaggaaggctgccgacgagctgttagctgggcgaactacgagtcagagaaactgcagacggactgtgagctaggaaaagtgcagactaggtgctagctagacgaactgcgagctaggaaagctacagacgaacagggagctaagaaagctgcagacgagctgttagctaggcgaattgcagacgagctgctagctaggaaagctacagacgaactgggagctaaggctgtagacgagctgtcagctaggcgaagtgcagacgagctgctagctagacgaacttcgagctaggaaagctacagacgaactgaggtggttggctcgggtacaaattgcccgagtcaaagctgggttcagtatacttcgttccgagctgatcgtctcggtaccaggttattcgggatagctggatttctaagcacagaccaaagcacataagaaactgtatttagccgaagcaaaagctcggcaccagtgtttatgataactgggttttagtttccgaggcggttgactcggtaccagtgtgtttagagtaactggatttcagtagatttgaatacccacggttgcgacccgatttgattcaatcttttaccagcgtttagaaacgagctggggcaccggtgttaagtataaccgggtttcagaagatagaattcatagcctgctcgaaaaaatattcgagcagattcttatcttgaatatttatatagcacgctgtaaccgaagcggtgtaaatgaaactttggaaataataggccgtcgcccgttaaaatatttcaaagtaaaaagatttagaaatcaaattccaagaaaatttgaagtagaaaaatcgaagttcaaatttaaaccgaaacgagagtttaaaattgaagtgggagtatggatatacggaccccactcccccccctttttgctcggtagacgagtgtttttgcaagtttacgcaaaaaatatagcagagaatgcatatatatgattaagctgtacttgttagattataatagataacacttatcttattggtttggacatagagatgatgatatctacggcatggacgatctgaatctctgagattgtaaacgtcgttgtatgaaaatctacatttaagatgttgttcgttagaggagatctcatctttgcgtagaaagagagaagcaaggatgaatgcttgtgatataagtgaaaatgtcaatcaagcttaattaatatgtaagaaagtaattgaaagacataaaagataattatcaagctttttctctctctctaaagggcgaaaagtggtttccttctcttctagcctccggcgtctccagcggcgccggctcctcctctcgccgggctcggcaggccctcccctcctcatggggaagcaaaagcgcctcaagtcgttctctccttcggggagctcgtctccctcggtctcttccgccgcctctctggtggctatctcctcgccgtctcctccgccttctcctgtcgcaagtgcccctgccgccatctcctccgcggccatctcccccgccgcctctttgtctgcagtttccagatctgcgcctgtcttagatcccagatctacaattgatcctagatccacggcggatctagcatcctccggtcacgtcgatgtgcagctagcggctacaagtgtacctgcttcagctccatctgtgcctcctacaattacagtgattccatcgaatccctctaaagtctctgcgaaagctgcacctgtcatggttgctgcagcaaacccagtcattgtcgcgcctattgctcctccccccgtggatagctgggtcgatatattcaaaggtacaacatctaaaaggctagagaagaaaggttccgcttttactctaccctcaggagaagcatgtgtggcgattcccaattcgcttattgagaagcatcagaagtcttgggactcgttcatcctcgggcaattttactctgatccccctgctcagggtactgtccataccattgtcaatggaatttggagcaagcagtttcgtgatgtctcagtctcgaagatggagggaaacgcgttcctgtttcgcatcccaaatgtgcaaacccgtactcgcgtgctcaaccaacggctttggcagattgatggacaaaccatgtttgttgccaaatgggaacctgggctccgcccagttaagccagagctcacctctgccccgatctggctggagctccgaaacgttccttttcaatgcttcaatgatgacgggttggagcacattgctagtctcgttggtgagccgaagtttcttcaccccgccactgcgagtaagactaatttggaagttgcaaaggtcttcactattattgacccccgtaaacctcttcctgaggcagtgaatgttcaattccagtctggagagattagaagagtggaagtgtcaagcccgtggatgcctcctatttgtgcccactgtaaagaggttggccacagcttgcggcggtgtaaagcagcaccgatcacctgtaaagcctgcaactctacacagcattctgctgatgcttgccccagggcaaagtcccaagcagagaagaaaactccaagacgtcggcgatctaaaacgccgaagccgatgctcaaagaaggtgactgggcggctgtagggttgggcaagcggacactgcaagacaagccagttcccttaattaaccctgatgctgccacctcctctcgggggaagcgggtgacagatgctcctaagcagaaaggctctgttcccaagcctattgggcgcgaaagcaagcagaagaagcaagttgcccgaactaaagatgtggcccctatttccgaggaggatgacgactcttctgatgtcccatcgtcgccctacgattcagatactgatttggaagatgaagagcagttcactgaagtgttgtctcagcgacaacaacgcagtgcgaggggcaaaggtcccaaatccctttagtttcttaatgtgtatagacattttttgttggaacgtccgcggctttaattcttcctcgcatcgtagtgggtttaagaagtggtttaaatgccaccaacccctttttggaagtctggtagagactcatgttaaacagccgaagcagcagaagtttatcaataagctgttgccaggttggtcttttgacaataattatgatttctcggagctgggaaagatttggattttatggcaccccagcgtaaagcttttggttctctctaagtccctgcaaatgatcagttgtgaagtgcaggttccggactacccagagacttttgtggtttcttttgtgtatgcttcaaatgacgagactgttaggcagactttatgggatgagcttgtggccctttcttcagacagtcgtgttgtgggaaaggcctgggctgtgatgggtgacttcaaccaaactctgcacccaagcgatcactctgccaccattagtcagaatgtggaccgggcaacaagggtcttcagggaaactctgcttgatgcctctcttgttgacctgaactttcgtggaagcacttttacctggtggaacaagagagccaactcacctatagcaaagaagattgatcgtgtgttagtaaacgatatgtgggctgatatttttccctctgctttgggcttctttgggaagccgcacttctctgaccatgcttggtgtgggatcctgtttgattcagctgcgccaaagacaaagaagccttttcgtttttacaactttctcctgaagaacccagactttgtgcctctcatcggtttcagctggctttctctaaacgtaactgggtctgcaatgttcagagtatcctgtaagctcaaagcgctgaagcatgtaataagagagtttagccgctataactattctgatctggaaaaaagaacgcaagagtccctggattgtcttttggaggcccaaggtagagtcctcgaaaacccaaccatccacaatgctgagcgggagatagaatggcaaaggaagtggcagactctctctctggccgaggagagtttcttcttacaaagatctcgtgtcacctggttaggagagggtgataggaacaccgcctactttcacaagatggcctcttcccgtcaggctgtgaatcacatacactacctctttgatgttaacgggtcccgtctggattccctaagcgccattcagaaccattgtgttgactattttgagaaccttctgggagggattcaaggtcctaccatgtttgctcaagaagatatttctgctttgcttagtgccagttcgcaagctcctattcagcatggtcttgactcccctttcacggctgaagagattaaggctgctttcttctctctgcccaagaacaaggcaagtggccccgatgggtactccgctgaattcttctgcagctgctggtcttttgttggcgttgagatcactgcagctgttgctgagttcttctcctctggccagttgctcaagcagtggaatgcaacctccctggttctgatcccaaagatcccaaatgcgtcttctgttgctgacttcagacccatttcctgccttaacaccgtctataaggttatctcctctctgttggctggtcgtctaaaagctgtcctcccatccatcattggccactctcagtctgcctttatgccaggtcgtctcctgttagagaatgttctcctggctacagagattattcagggctactctaagaagtccactgctcctagtgcaatgcttaaagttgacctgcgaaaagcgtttgattctattagatgggactttattattgcctgcctcagagcattgaacttccctagattactcatttgttggattgagcagtgtatctctacagcgagcttctctattgtggttaatgggcagtcaggaggctatttcagaagcacccagggcctaaggcaaggtgaccctatgtccccatatctttttgtcttagccatggaggtcttttctggtctgctgcagtccaggtattcttcggggtatatctcttaccaccctagaacttctgaattagaaatctcccatcttatgttcgccgatgatgtcatgatattctttgatggtgggggctcctctcttcaaggcatttatgaaacattggatgacttcgctggctggtcagggctccatatgaacagagacaagacgcagctcttctacgcaggtctgagccaaactgaatccaatgctttggcaagctatggattcactgttgggtcgttacctattagatacttggggctcccgttgatgagtagaaagctgaaagtttcagagtatgagcctctcatagggaaaattactgcaaggtttaacgcttgggctgtgaagtctctgtccttcgcggggagagctcagctgattggctcagttatttcaggcactgtcaacttctggatatctacttttgtgttgcctaagggatgcattagacggattgaatctctctgttcccgtttcctgtggtcggggggaactgaaaaaagaggtttggttaaagtggcttgggctcatgtctgtttacctaagaaagaaggtggtttgggtctgaggcggtttgcggattggaataggaccatgtgtttgcgtctggtttggctactcttctcaaacagtggctctctgtgggttgcttggcataagcatcataatatcagcacttctaccaacttttggaaccaagttgaaagtacaggtgactcatggagttggaaatctattctgaggttgagagaacctgcttcagttttcattaagtgcagtcttgggaatgggaggcgcgccagcttctggttcgatagctggactcctttgggaccgctctacaactgctttggctcctctggtcctagctccttgcgtgttccattaaatgcgacggtttcagatgtgtgcaaccatcagggctggattattgcaaacccgagatctgaccagggggtgtctctgcaaattcacttatccaccattgccttaccttcggatgacagtgggccggatgagttcgattgggtggtcgaaaacaagatctgcaaaggcttctcctctgctaaaacttgggcagtcactcggcctagagctgccatagttgattggtgggactcagtttggttcaaagaccacattcctaagcatgctttcaacatgtggatagctactttggaccgtctcccaaccaaaaccaggctctcttcttgggggcttcagattcaggatacttgtggcctctgctctctctccccggagagtagagatcacttatttctgtcttgtgatttcgccctctacttgtggaatgcggttagtttgaagttaaatatgcagggtatccacttcactttgtgggctgagcttctttcctggctgaagtcgggtaacagaaggtcgcctcctactctcagaaagctcattgcccaatcggtcatctatgcaatctggaagcaacggaacaatctgctacacaatcttgtctatgtccttccctcggtggtctttcgcgaagtggaccgcgaagtgaagaactgcatcactgcccggcgactcaacaagcgcttctccaggctaatgagtctttggttgcactaatccgttgcctctcataacctctcttttgctttcttgtttttaagcttttttgccaagaaaccaacctttaggtttgctctgtaaaccaactctttcattattatgatatttacaagttagcaaaaaaaaaactattcactattgttgacgacttgacggtctagttgtctttgatcaaaatacattaggataatcaaatgaaaacaaccaacaacaacaaaaatatatgacaaaagttacatctcggataatgtacttcagaatcaacaagaatgagttgtgaaatctcttcttgaactatatgaatagtaagtggaagtttggaggcacacatgcgtggcgaactctgtgatatgttgttgtctatagactttcacaaactctacatacaaaataaaaaacgcaattgtagtaaaatgcttaatcttgtaattatcttctaaccagcataattcatatttgcacacacatgtgatttgggtatgcatgcaaccactatttcagtggattgatttttttatatgtcagacatattctcatgtttttttttcttctgtacgataggatacctttacatgggcactaaagcataatcaaagtcataacgttagttaacaaagctaaactagcaataacaaatatataagtcggtttaccaaaactaaactggcatcccaacaacatgatcgttgtaaacttgtaatccataacactctaacatcaaatgccttagcagacacttagctgtcggacactaagtttatgttatcatcaacgtacaagtgaactatgaacattttctattttaaaatttatttataaggacaacagagcaagaccaaaagggatcaaccatgagctaggaaggcaagaatcaagaaggaagaaaccactgagcatcgtagaagttgaagttggagagaccgtggaagcgtttgatggtctttgttataagattgaagacacagatgtcgaggcatgacgattctttgtgacggatacgatcaccacgggtgaaataaatggagttaggctcaataccaagggtatggtcagcaggcacagtaatacccaaatcaagaaagagggcctcatcacctagagaatgcacctcaagaagccaggtgtcgagggttttcgggtcaagatctttaggatccctcttgtacaaacggaacatcctatgactttcagaggtacctaaatcgaacgtatagacaagcaaaacttgacctgctcttgtaacagcaatgcctttgttagatgggatacacttcaattggttcctactttcacgttccttcatagtcagacgtggcatccacattggaagcctatgtttctcggacacatccttgaaaccatcttcatcttgtccagacaaatccaagtgtcgaatgaactcacgggtggcaaagacgtaaagattgtaacctttaagtaccatatcgtataaacctcgtaactccctctgaacctcgagctgtgttggaatctcgcggtaatgatcatcccctgtcctgcaaaaccctagaaattggttcttttcaaactgccagacaacaacgtagtttccattcttgtcttcaacccacaaacgacctctcagatcttcggcagcatgaggaaattcatcacgaaatggatcgttatcagccatttgcatatgcttgacattctcctctccgtcacgcaaaatcttaaaatggctacccttaaatgattctagtggtggaagatcgatcctcttctcgctaaatacatctataatatagagtttcattcgggaatctaccaccagaaaccacttacctgagtttcccaggaatcgataccctgaaaagtcactcttcgtctcgtaaaccctatcattgtatgggttatacacactattactacgacaaccatccttttctgcagaaagcatcagcaatggagatctggcttttggccgctgaatcaaattcgaacgcagaaccttagcagagtcaagcgttagcgtagtagacctttgcattatcgggacggagatcgattatctcgtgctgaaaaaattgagcaagggttaagttgtgcacactgtgtgtaaatataggtaccaagcccaataacagcaacaaaaaatattctaacgggtctgtggcccaatataacatcatcatgaattatttttggttattcaagattttgagaaacgtttgtgtgtaaactcatagtcgtagttattcaagattctcttgatattttcaagttgaattttgcaagagatactctcagttgtacaagcttcattggtgtcattagcatatgtcagatcagtgatagtgttgatgggttctcaagaaggtattaatattatgaggttgggaaaaagatatagaattctttatgaattgaaaggaacctattcttaccaaaaaaaaacaaatgctatgtcacagactgtgtttgaatttgagaattacgttcagttgtgtgtttgactcaaagtagacggtattgcgacgatccgttcatggcttcatagtttttgtgtaggcaatggcatgcgatgtttagtgagacatatagtcgattttgtttccacattactactaattcaataaagctatagttagttcaaaatggctgacttttgtttcgaagttgcttagctttgataatataattattagtttcgaattttatgttagtctttcaaaacgaactagtgatgtaaaatggatcgaatttctctgcacttgtacatagcaaaaactctttattttggtttgtattttgtaaacatcaatgacgtacaaaataggttatgacaaatttaataaaccaaaagaaaaacaaatataaacatgttgtgtagaatgtagataacaaatttctgcaataaggttattcagctgtctgaatgaacctaaactatgctaagatagtgttactataagtcttagttaggtgaacaaaaacggcgctcattggagctcctacaaagtaaaacgacaagttgtttcggcaggccctcccctcctcatggggaagcaaaagcgcctcaagtcgttctctccttcggggagctcgtctccctcggtctcttccgccgcctctctggtggctatctcctcgccgtctcctccgccttctcctgtcgcaagtgcccctgccgccatctcctccgcggccatctcccccgccgcctctttgtctgcagtttccagatctgcgcctgtcttagatcccagatctacaattgatcctagatccacggcggatctagcatcctccggtcacgtcgatgtgcagctagcggctacaagtgtacctgcttcagctccatctgtgcctcctacaattacagtgattccatcgaatccctctaaagtctctgcgaaagctgcacctgtcatggttgctgcagcaaacccagtcattgtcgcgcctattgctcctccccccgtggatagctgggtcgatatattcaaaggtacaacatctaaaaggctagagaagaaaggttccgcttttactctaccctcaggagaagcatgtgtggcgattcccaattcgcttattgagaagcatcagaagtcttgggactcgttcatcctcgggcaattttactctgatccccctgctcagggtactgtccataccattgtcaatggaatttggagcaagcagtttcgtgatgtctcagtctcgaagatggagggaaacgcgttcctgtttcgcatcccaaatgtgcaaacccgtactcgcgtgctcaaccaacggctttggcagattgatggacaaaccatgtttgttgccaaatgggaacctgggctccgcccagttaagccagagctcacctctgccccgatctggctggagctccgaaacgttccttttcaatgcttcaatgatgacgggttggagcacattgctagtctcgttggtgagccgaagtttcttcaccccgccactgcgagtaagactaatttggaagttgcaaaggtcttcactattattgacccccgtaaacctcttcctgaggcagtgaatgttcaattccagtctggagagattagaagagtggaagtgtcaagcccgtggatgcctcctatttgtgcccactgtaaagaggttggccacagcttgcggcggtgtaaagcagcaccgatcacctgtaaagcctgcaactctacacagcattctgctgatgcttgccccagggcaaagtcccaagcagagaagaaaactccaagacgtcggcgatctaaaacgccgaagccgatgctcaaagaaggtgactgggcggctgtagggttgggcaagcggacactgcaagacaagccagttcccttaattaaccctgatgctgccacctcctctcgggggaagcgggtgacagatgctcctaagcagaaaggctctgttcccaagcctattgggcgcgaaagcaagta

SEQ ID NO: 37442 - DNA, 2079 bp, Arabidopsis thaliana landsberg
caaaccatatgattggttcttttgtcttgtaaaaaaataacttgagctggcttattgtttttctggacagatctatgcggtttggatcactatccgtattgctgtaagtcgtcattcaattttttgtatttttcctactcgagacggtacacatgttctcaatacaacttgattatcatgtgtaataatccttatgatttccttttctacaatccatgttaattcagcttggcttcatgctgctagctcttatatggaagtttgactttccacccttcatggttcttatcattgccattctgaatgatggatagatcattatttttgcattcgtcactctatagttcagtttctactactgtcaaaactgtaccaaaataagagttcagcatatctatacttctaaccgtatggattaactcttatggcactgactttgtaggaacaatcatgacaatatcaaaagacagaatgaagccatctccacagccagatagctggaaactttcacagatttttgcaactggcgttgtgtttgggagctacatggcgatgatgacagttatatttttctgggctgcatataaaaccgacttcttcccggtatgatttctctctgctcctcagtataacaacaatacccttgctttgtttttctctctctggattgtgtgctccattaacacgtctgaagttgttttccaacgctagtctactgaaacatcgtaaaccagtttcaaattcctgtgttctgtatcttagtgaccagcttttattatttgaattcagcgaacatttggagtttcaaccctggagaaaacagcacatgatgatttccggaagcttgcctcggcaatatacctgcaagtcagcatcataagtcaggcgcttatctttgtgacccgatcacggagttggtcttatgtagaacgtcctgggatgttgcttgtggtagcctttatccttgcacaattggtaagtgtgccacttcactatctgtggtcagcactcaagtcagagtcataaaccgctgttccatttcattgattttttttttccaatacaggtggctactctaattgcagtctatgcgaattggagctttgctgcaatagaagggatcgggtggggatgggccggggtcatctggctttacaatatcgtattctatattcctcttgatatcatcaagttcttgattcgttatgcccttagcggaagagcctgggatcttgttatcgaacaaagggtatgtatcaaaaagtaacatctttcttttcatttctaatctttccattagccagatatctacttcttcttggattgtgacccaaatggatacctttagtagtaagtctctgtttataatcacttctgcatatgtttcataggttgcattcacgaggcagaaggatttcgggaaagaacaaagggagctacaatgggcacatgcacagagaaccctgcacggtctgcaagcaccagatgctaagatgttcccagagcgaacccatttcaacgagctttcccaaatggccgaagaagctaagagaagagccgagatcgccaggtaaaaatcatcaatgctttttcttcctttgaagtcagagaaggaacacattttaggatatattgtggacaaagctttctgttattggctcaatctttcttaaactttgataggttgcgggagcttcacacacttaagggtcatgttgaatctgttgtcagactaaaaggtctcgacattgaaaccattcaacaagcttacaccgtctgagagaagcatagagagagcccaagaaccgtctcaaactcattcaaaaaggtcaatattcctgtgtgaaacatcgatacaaattatgtatgtaagtatcagtttcttagtagagtctttttggttgggttttatttgttcttccgagttttaagatatgttctgttattatgatgaagtatgacagaaaatagaaacagagtcctcacaatgaaagacaaattttattctgaaatacatctgatgttataaatctctcttttgtccacaatgatagaaagaaagagatgtgatcttaacac

SEQ ID NO: 37443 - DNA, 2357 bp, Arabidopsis thaliana landsberg
tacttatgtggcctatccgcgttaagaaggtattgccgttattagcttattattatgtaataccagctatgtgtaacattagtaaattgattgctaatctcttctttcccctattcacagatcaagatccagatcccgctcatattctccatcatactcaaggagaaatgggcgtggagaccattctgatgaaatcagcaaaccaaaaatcgaatatattacggaatttggaggaggctctggagatatgagaagtccaaagtttgaaggatattccccaccgcgttcaccaccatttcagtctgatctattaagccggtcggagcactcaacctctagttcttgcaaagatacccacttactccccacttgttggttgaggaaaacttttattgttgtagacttaattggcactagattggcactaaacgagatttataatctttctttctggaaccgctttgaaacttgaatgaattagctagttataatcgatggagtaggaaattataatattttatttccctgcagaccatcgccaggccgtattcttgaggcgctgcatgttgatcctgcatctgatatatcccttgagaaagacaaagttgccaaaccagcaaaatcgacagtgaggtatggatgagattacatatttttagtttttttttggttttgtatcttcccttggcttttgttgttgtgaattggaacattattcctcttttattcttgcagtacttccacagcactagcgaagctttcaaaagtagcaggtacctcctcttcgaagcagtcacaagcagagaagaaagaaactccccaagaacgactgaagagaatcatgaacaaacagctaacgaagcaaagtaagatcttaattactgttatgtttactatcattaagtttattcctatttgctgttggaaactgagatggtggatgaatcatgttgtacgcagttaagaaagactctgcaacagaaacggctaagaaacgagaacaggagcgacaaaggctggagaaactagcggaaacaagccggttaagtcggaataggcatcgcagccgtagtaggagtattagtcgatcaccaccaccgaggttgttaataaagttatcatttttgcttcgtgattaaaatggggggatttgtgaagatgagaaggaagttttcggttcgagagctctgattggatccgctctttcgatattcactaacacagttgtcatctctccttctcccgtttgattttctttactaaaatgttttgtctacagaagacacaggcgaagcagaagcagaagcggaagcaggagcaggagatcacgcaggcacagttcaaggtcacggtctaggtccccatctaggtcgttatcacgctctccgaaacgctcacgctctccgaaacgctcacgcagacgctctccatcttattcgaggtctcccaggtaagaacagatggaaagcattacatgtacgtcgaaaatggtgtctttgactctttgctttacctttgcctatataacatattgagttgttgtgtttgcaggcgaagaagcagcaggtcaaggcactgaagagaggaaactctaattgttgcggcagctttttttgttgcctctgttcatgttttttttttttttctgtgtgttttcgtatccttacgattcagtggtaaaaatatggtatgtgggtttacatgggataataacaaacgtttcatatgatgttttagaaatttataagatgttataaaaaaataattattttagtagttgaatgtgaagttttatggttagctttgtttgttggattagttaacaaatgtgtgtgtttgtcgtctctgtgtgagacgcagcgtaaccatctccatgcgttgcatcgttcgtgaaagtaaaacctttcgtaaagtttctaactttgaataatcatccgcaatctttataagatattttcagctaattggaattacaaatacacaatttcaaaagtcttggttctttccaagaaataatttgttatagagagattgtcatactttacaactacatttagaaaaaatagttaaggctggtcccataaaaacaacttgcttaaatcaccatgttatttgcaaaaacaaacttttataatctccatagtatagatttcactcaatttaagtaagaagaagaccatgaatatcaagcttggggcttgaattctcgcgaaaaggaagcatttaaatggttataacaacaatggaaacaaaaaacgtgacattagttgaaaaatctatttctctgatgtctatatgtatattcttcattttcttcttgtcatgaatatatagataaggacgatttggatgaagaa

SEQ ID NO: 37444 - DNA, 3297 bp, Arabidopsis thaliana landsberg
  unsure (1)..(3297): unsure at all n locations
cagaagaaacaagaaggaaaatgtgtcacacgtgacgagtttggcggttgaggatgtgacagggatcacacgtacgaagggttaaggttgtgccttgggattgatgagtataaataaagaagagatgctgtggagagtggcatgttgaatcaagtggaggattagtcgacatgagattatcatatggagagattagatttgaagagatgatgagaatctaatctcatctttcatttgttttaattccaatctttgtaatatttaaacattgagagtttcattaatctgaggaaacttattaagataggcttgattattggtttccaaataagtttaatatcactaaagtctatcaattggtgcgtcgtgactgggtgacacgtagagggagaaatagccactcatcgagctcaaattaggttaagccgcaattttgggggctctacacctaaaaccttgtttctctctctatctacaaacaaagctatggcagacaaggcgattttacctccgattcgagaggtttcgtcatcggaggaacaatcagacatgtttggtgatatttatgagaagataggaacaatggcgctacaaatcaaagacgttggtgagagaaaacgtttaccagacaaaaagttggatgttgcgacaacaaatatcgaagctttgatgtctcgtttcaacacatctgacgcccggatgcaagagcttcaccgtcaactcgacatgctcatccactcttttccaagccgcgacagtggcaaggaacatggcggatctagtgcatccccccagtctcaggactcgcgtttccacccaccagcaacgttcgcagagccaatgcgacgagatctgggttttaacaaccgcgacaagcttcttaagaacgtggatatgccactgtttgacggcgtagacacttacagctggattgcccgcgtcgagcgttctttccggatggggggtttctcgagctggtctccgtgagcttaacaggggatgctttaagttggtataactgggcggtgaaccgttaagggtttacaagctggcccgagttcaaggctcggatgttactgcgttttggtaaccttaagagtcgtggaccaagtcaaagtctgttatgcatcaaacaaacaggctttgtggtggcgtacatccaccagtttgaggatctctcgtctcatgtctcaggccttgacgacatcaaacttgaatggatacttcttatatggtctttccttgcaaatgcaggagatagtacacatgtggaacctgcataatctaccagaaatgattggggtagctagagatatggagtccagtctgattcatctagtggtactgaaagaaccccacagtggcaaaggagggtccaaaatccattccgatatcacatctttggtaccctaccatcctttggtatgtaaatctaggcctgtcatcacagagccatcgggaaccaaggagagagcaacacctattatatcaagaccgcgaaaacatttcacggatgtagaacttgatgagaaacgtcgcaaagggttatgctttaagtgtgatgatcactatttcaaaggccatgtttgtgctaataaggacctacaagttctggctgtggttcatgggtatgaagaagaagagccacaactcataaatatgtctttatcttacacgtactttgttggtcttccatctgagcacacaatgatgatgcgtggcactatcggtaacacatatggtggngatgtagaatgggggggctacacacaacttcatcacaccaatattgattgagaaaacaaagtccggcactcagcgggcgaggggctttaacattaagctgggtacgagtatcatggttcagggttctggtgtctgcaaagatgtccatttcactgttcagggtcacgaatttgtcagtgatttcatcactttggagttgggaaatgttgatctcattttaggcatcgcatggcacaagacactgggagacagtaatgctaattgggataaggagaagctgttttttctggcaccagggtagatagataacattgtcgggtgaaccaactttttctcatacaaagttgtctctcaaatcattaaggcctgttccaatatcagttcacaagcgttgcgagccaagtggggagacacaagagtcacacattctggcacaactgtcctcagtgttcgaatcttatgcagaggtctgtacaacaccaacggcactttcaccagttagaggcagggaacttgcaatcaaactcttaccacaagcaggccccattagcatcagaccgtacaggtacccccatgctcacaaagacgctatggagactctagtacgtgacatgcttcaatgtggtatattcgccccagtaagagccctttctccagtcttgtcttgctggtgaaaaagaaagatggctcgtggaggttttgtgttgactacagagccctcaacagagtcaccgttcttgacaaatttcccattcccatgatcgatgaacttttggatgaattacatggcacaacaatcttctaagttggatctttgtttgggttaccatcaaataaggatgcgggaagatgacatcgagaagacagcttttcgtactcatgacggccattttgagttcctcgtgatgccttttggcctcacaaatgcaccagcttcgtttcaggcactcatgaatgagctttttgggccttttcttaggaaattcgtgctggttttctttgatgatatattaatctacagcaacaacctcactaaccatgttaaacatctcacattggtcatggaagtgcttgccaaacatcagctatttgccaaccgcaagaagtgcctatttggacagtctcagattgattatttgggacatgtgatctcggctcacggggtagccatggatccgtctaaaacagaggcaatgattcactggccaactcctaaatcagtcgaggaattgtttggattttcggtctgacaggatactatcgtcattttgtcaaagggtatggggtgttagccaaaccattaatggaactcttgcgcaaggatcagttccaatggtcacatgcggctcagttggcttttgatacccttaagactgcaatggtttctgctctggtgcttgcatcaccaatgtttgacaataccgtgttgttgtggaatctgatgcatcaggttttggtctgggggcagtgctaatgcaagatcatcgacctatcgcacactttagttatgggctcgccgcaagggatcaacttgaaacaatctatgaaagc

SEQ ID NO: 37445 - DNA, 3173 bp, Arabidopsis thaliana landsberg
  unsure (1)..(3173): unsure at all n locations
aagaaacagaccatcatcgaatcggagaagaagaagataacgaatttagttttcttttggcgtcaatggattctgattggatagctgacagtataaagtcgttttttccggtagcttcaacgcaacagagctatcatcatcagccaccgtcacgaggcaatacacagaaccaagatcttcttcgtctctcgcttcaatctttccaaaatggtccaccttttcctaatcaaacagaacctgctctgttctccggccagagcaataatcagttagcgtttgactcatcgacggcaagctgggaacannnnnnnnnnnnnnnnnnnnnnggaaagatacagagactagtgtcatggaacaacgtcggagcagctgaatccgccggaagtaccggaggatttgtgtttgcttctccgtcgtcgttgcatccagtttatagccaaagtcagcttttatcacagaggggtccccttcagtccattaacacacctatgattcgtgcttggtttgatcctcaccatcatcatcatcatcatcagcagtccatgaccactgacgatcttctgcatcatcattcataccatatcccttccgggattcaccagtctgctattccaggcattgcatttgcttcaagtggtgaattctccggctttcgtataccaacacggtttcaaggctaacaagaggagcacggtggtgacaacaagccgtcctctgcttcatccgattctcgccattaaacaagttccaaaaacacataagattgtgcaacacaacaggtttcttttcatattccaggtttgaagtttttcgaaaacaacacccatttgtgaaagtcttgtcttttaaccattcatcaaattgataacttacattgtttttaacgtttcagggcgcttcgaatgcgtggaatagtgaaggcggttttcgttgttgtgtgtttcgaatatccaaatggcctataaatctgatcaacagtttcaggttcttcttaagtctttaaaagcctaggccttggttaatttgaattcatcttgtatcaattagagaacgttctgtaagttcaattctgttttacaatgtttagctctagctacatgagctcacatcttgtttgttgtaacttgttctacaattacttgtcgtttctttatgttcttgtgttggaaacctttaaccccacttgaagctaaagtcttttgtttgccctttattccatgtgggtttaatgctttcctcaagaaatatctcattttgtttgccaatcccaaagaggaacagtgctctatccatctacatcaatcatcatattgtttggtttagcgtttattagaagtattatcttcccaatctctgtggttataaactttcttttgactagcaaatggaatttgaaacaatcatttctcttgtgtttcttagtctcttcttttggccccatagatgaagagtcactttccatagacagggtttgcatgtgttgcttcttttggagtttagagtttagaattatgggtttcttttaaaatttgtttagtggatgcaagctctgatacttagtaagagttttggcccatgatccacggatccctatataaatatcagagaaatggtttttgacttcttttcatagaatcttcctcaatactagatttcaagattttatgaaaaaggagcaaaagagaatttgatgtctagtgtcaaataactgtctactttaaacaagagtgtaggagatccaccgaacttgagtgtgatgtagtctttaataagtaaaaaagaataggacattagattagtagatgaagacactcttgttggtctaaatgaaggaagttgaaagcagagcaagtctctttcttttcagatcaatagtgtgaaggtatgaatttttgtccataatttgtcgatttttggctataatatctttcggaaagaaaactttggtttcttatggagaagttatataaagaagcaacactttacatgagatgtgataagatgagattggaagtagtggctagacatccgaaagtaagttgcagcataaaaaagaaaaagacagcctgaatcatatccgttctacattttaaaattctgttatcttttcttcttcttttgttccttccttgtaaccttcttgttcaaatgtatatgattgatgtacatacaataaatgtagctcatgatgaatctggttatgtgaaaagatcaatgaggtaaaagaaacctctatgattttgggggcatgacagaagaaaaagggaatgttgaagaagacatgaactcaatgataataataaaaaggatagcaaagtgtaagaaaaggatggaaacgaaaatgggaaaaaaggttgtcacctttaaagaatggtcccctctctctatttctttctatctcttgtcagatctcaaggttacatacagctgtcttacttttctttgatttttcttcattctattccatagccaatgataattttccaaaaaaagaagaaaagagtcgcaaaatggctcaaaacttgattgttggatagtggtctaaaaccattattgttagtttgcatctctcttcagaggatgaggttacaacaaaaagttttaaaaccggctcttttggttattaagtaatgaggttactacgtttgatgttgtttgagttaaccggtttcatttactgaatgataagaagccaaccaaatttgatccaattttccttattgacactaaaagtttatgttccttcaaacaccatcaaattctggcaggcatgaattttctgatttacatttggtttagcttcatacacaaaatgatgatatcaagagttaaggaccgaaccaaaaaaaaaaagttagagctcgtctttcaaaaggttctccggattcatatacagtttttgggtctaaaaatgtttgtaaataagaattcttcaaaataataaaactcagtttggtcccgcggctcgaacccgcaccttcgctcataagaccaaccttaccactgactacgaccctacatacctttcttatacatataataatattatcgctatgacaatgcatacttgtaatagtgtatagttgtcacattctctccccaaataaaattcatcttaattatatacactacagtacttttgtcatcagacatctagtaacttaaacacaaat

SEQ ID NO: 37446 - DNA, 6032 bp, Arabidopsis thaliana landsberg
ttttcttctctcaaacgatcatgaacgcctcttttttcttggtccattcttacacgcggtggtatgaatataattttctactagtaggatttttagaaagttatggtactccgtactcgagtatttgatctatatgagaaatttacgagtactcgtatatgtatctaagcattcaaatacccaactgtgggtcaaagaagatagtaacggattgagtcggcaattccggttattatgtcatgtccatcgctgtctttcttttgtagtcaaagttggtttgatttcttaatataaaacatggcgtcatcaaactactttgcacttttgtgaaaatcattgcaacgtgggacattatgttttggttctatatgcgaatgatatactcgtttttgaacatttatttttaaaacatattgcaaggttctaaattctttctttttgtttctttattgaaaatgcagagagtggattggggatatgtgaacatggtggaagcagaacaaagattactagcaaatgctttattagacatatcaaacgaacgattcgtacttctctccgaatcatgcatccctcttttcaacttcaccactgtttactcttatctcattaactcaactcaaactcacgttgagtcctacgaccaacttggtggcgttggacgcggccgatacagccctctaatgcagccacatgtccagctacgccactggcgcaaaggctcccaatggatcgaagtggaccgtgccatggctcttgagatcatctctgatagaatctactggcctctcttttatagttattgccaccatggttgctacgccgacgagcactatattcctacactcctcaacatcaaatcaagcctgaaaccgcgcaactccaaccggactctcacgtgggtcgactggtcgaaaggtggcccgcaccctaaccggtttattagacacgaggtgactgcggagttcatggagaacctaaggagtggtggtgagtgtctctacaatggagaagagacgaatatttgttatttatttgctcgcaagttcttgcctactgctctcgaccggttgctcaggctttcacgtactgttttacatttctgattatttttcttttttcatatatttttttaatttttcaattcttcaccgtaatattgtataatagtttgattattcgtaaatgaggagtattttattttgggtgattcatctacacattccattaaacttttcttttattaattccgtaatatcagccggagaaaaacatcagccgacgaaacaagcttcaacgactctacatatgttagatattttatgtttatatagttgactaacgtgtaactctaccactatgtatagttgtatgctaaatagaagacgaaaatgttacatactatgcgataacatgcgcacatgcttgccacataactctataaagtcctcgctagtttctgtcgtccgagaaattagaataatggaccggacattaaggcatctctagtgggtggctttccattcatttaggccccgactttctagagtaagcacatccttagttaatacctagactagggtgatgattagtataaatgttaaaagagttaacacatcaaattaaaaataagaattgattaaaatgccacaaaagatgtaaaataataaagattgtaataaaaatcaaatcccaaatatatggttctaattttacaaaaatagaaccatataaaatatcattttgggatctaattttaccatacaaaatatcattttggggatctaattttactatatgtttttttgctattgggccaggcaaaagtagagaaggaaattttgtttacccctaatacaaaatactcgagactcacataattgataacccttcgtgttacaaactaaaggaaacaaacaaagaacaaaagcctacgactctagaagtgttaggatttcagacgaatgacaaaagtcaagattctaggcacgtgatttacatttttcaagtaaagaaatcttactactgactcgtagtcccaccgcaagtgtcctcggacaagcacggcgagtccaccgcagaattgatcccatcattgcacggcgaggcctcagagccaccaccacgtatatcctctatcaacttcaccacatgacccatcttcggacgatgatccgcggcaactgcggtacacgccatagcaatctgcaacaaccccaccatttcttcctctatatccttatacctcatcagctccaaatcaaacacttcagccgtccactcctctctcaccactgattggacccatcttggtaaatccaccatgtcatcccggcttggtgattgcactggagacttcccagttaacatctctagtataagtacacagaaactgtaaacatcggatttatgtgtgtgtttccttgtttccattacttctggtgcgcggtagcctgcacctctcattggagcaatcggcacagccatcagaggggtcagtccaaaatcagaaatgcacgcatcgctctcctgcttcataatcacatttgaggactttatgtttccatgactgaactttggacctccagctgcatggagatgagctataccttttgccgctgatagtgtgatttttactctggagtcccagtcaagaggcgttttctcacttccccggttacctgtcatggcatcgaaatcaagatattcttaagtacaccaacgaggtaaatataaaccattaaacgaaggtaggaagaaaactaaccgtggagtagtgatgataagttaccagcagggtaataatcacaaaccatgagcttctcatccttggagtagtaatatgcacggaggggaaccacactaggatggttcccgacccggctgataatctccatctgctgttcaaactccctctttccagctgcgacttctttcaacctttttaccacaacagttgtggattcctctaacacagccttgtatgctgtcccatagctaccttttcctagtacgtgtgctgatgccctcaacaaatcctctagatcaaagttataggagcatccattaaagaataccagcttattcttctcaggttcttgcaccccacttccaaattcttgctttgctttctcagtcaaagtctttacttttacgatgctgttttccctcttgtcctttttcttgatacagcagcataatataattacggtgatcaacaacagcagagcagcccctccagctgcaataggaatgatagtgcttacatgtagtttcctttttgaaccttctttgtgaggaaatggcggcaatggaggcgtggaaatgtgtggggttagcgaaggagggggagaggaggtggcacagggttgcagaggaagtccacataacaatgtgtttccggaaaaagatgaactgggaaagccaccaagtgcagagggtattgaaccattaagatgattgttgctcaagtttaaacgtctcagacttactgtatcaagattaggtactggtccagaaagtttgttattttggaggctcaaccctgtcaattgcttcagattttggaacgttgctggtatcttcccggtgaaagagttaaatgagagatctaagatattgagctgtcgggacacaaaggaaggaacctcaccagagaagttgttatgttggagatagatgtaatctagtgaagggagagagtgaatgtcaggaggaaggttaccactgaggaggtttgatctcaaactgagaatcctgagtgattctagtttaccaagtgtgtttggagggattggtcccaagagcccaattcctggaaggcgaagagcgtgaacactagtaccatcagaagtgcaggtgacgccaacccatgatttgcagatatggttagtggaattccagttgagtcgtctgagatgaggaacagaagcagcaaatgcaagaagagcttgcctatccgagttcaggtcggcaatagcataagagcagaaagtagttgtgacaaacaagaaagagacaagacaagtagacaagaacccctttgacggtctcaaggtaaatactggaccaacataaaactggaaatggaactgcatcatcagcttgacttcttgaccctgctccaaaagaaaagcagaagatgataagcaatgacttccactacacaagccagtatgcagcagcaaggaaagctaagctaatcaggtatctctaaggaactggccaagcaagcttcatttattggatcacaacattgaaagttgataactaatatttggttgtgaaagaaaaaagcatatcagttatataaaaaactacagatgggaagaaaaaacaaataaagatactagttagatcttcaagaaaaagtatgccattgcctatctttatctttatcattgggagattaaacaatccaagaggctaagataagagattgaagcatccagcacaaaaaaaaaagcaaaaggaataaagctaaagagccaaactttaacacaaaactttgatgagcaaagaaaagcagactccttttgccaaaagatattgtcactagagaaagaagcagaggtctgtccatcatgtggacaatgtcactaagtaaataaagatgagttttgagtgtctgatttttatcggagttgttgaacaaacaacgtgtagccagcgaattggaactaatataccacgtcactagcctgtatctaaagtcttgaaagtttcctacccacctagccggagaaaatggcgatttttaagtataattcccaacaatgagagacagacaattacagaaagttaaaaggaaaaatacaaaaaccaaaaagaagaagaagagagaaagagaacctgggagtagagaggtaagctagcgaagtaagaaaattgtgggcactgaagaactcagcaatagaggaagaagaacttatgcagatggagcgctcagacctctgcactctactgcattgagcggactataacacaatcttgaaatggtgacagagaagaaagaagaaaaggcaatgtatgtggggactagtggagaagaagaagaagaagaagaagaagaagaagaagaagaagaaagagagagagagtgtggtgaagttaaacaaaagaggcgtatttgttaagggtaagacagtcttcaaaaggagtctttagatcaaatcatattggtgtgtaaacaccgcaacaaacgctaatgtagagagacccagagactgaccaagcttaagattcttatgagatagcaaaatgacaaatacatgaaaacaaaaaccatcttgatccaagttgttatttttaaagtaatcatttagatatggtaatagttcttacctgtccaaccactcttgctactgttttctcttgatttgcatcattcttgatttgcggatactatgtaatagtaatactggtcatttcatcatctatcaccaactccaaaacaagatccaacacatttaggcattattgaagtctgaagttttctatgaacattgagcagtgcaacgtgctcctaatatcatcactatttttgttggctttttaatcagaggagacataattattaccatgctctggcaattctaaagacaccattcccagtttttcttatacattaaactgtaaatagctgatagactaaaaacaaatgtgaactgggggtactgaaattatgagatgcaacttagttcttaatttaactgcaaatttgattccatgtccttaataattctcaaaacacactggaattttaacaacagccataatctggttccacttctgctttctcttcacttgtaaaactcaaagtccgtgtctggcttcttaacatttgcgcggtagcccttctcgaaatccttaggtagtatcacatatctgttctttcgcaccgcatgcataccagcttcctggcaaattgctgctatctgcattgttcaacataaaatcaaaatagtgtgtcattaataactatcatcattacatgcaatctttttaggaacaattcccatgttcatgataaa

SEQ ID NO: 37447 - DNA, 3175 bp, Arabidopsis thaliana landsberg
atgagaagtggacaataataattaataaaaaattatgtttttattttagataccaaatatagtttgttgattttaattggttacttttttggaaattaataatgtatttcgtttttctaattaaattaaattaattaaaatttagatatcacatcttatatgttgattttgattggctattatttttggaaattgataatgtatttcgttttttaattaatttaattaattaaattagtatttgactttttaatccttaaagagataaattaatttactctttaaaattttatttctaatgacatatttatgtaattacttacaaaaattaaggttacatttaaaatgtatttttcaaataaataatatagtaggatttgtcaatatattcacattacaatattatttttttccatggtcgattatttctacccgaaagagacggcaacgcagcccacagtgagattggagattagagattcagtcaacgatgattaacgttacttttcatagttagtacataagaatagcacgcaggtttcgtcgaggttttggatttttcatagtttgtaaacatgacacgtactttggataaaacattatgaaatagggaaagtcatcatgagtagttggaaattttctatgccatgtatgaataatgaatatattaaatattggtatgatttggtcttgagtcattatatcattacctggctaatgctatacgttaccttataatgaattctaaatgtctcaattgctttttgaaaaagttgatcacgaacccgccgcctcatattcataattaaagttaaattttgtttttgtcaacattgatcatagttaaatatttagacacgtctatttttattttctccacgttatacattttcttgactattcatgcaactcttgtgatcttgtcttagatatagtcaagtattgtgtatacatcatagggaatatccgaatatgtgtgtgtttgattaattagtgcacactagctcagatcatcgattagtccgcaactcgagtaaacgtgttttcagaccacccaaaattttacgacctttgtgtcccactatctacgtcgatagtaactttagaacaaaaaactcaaaaagagtgtaatttgttatgcttttggtcttctaaaatttgtattcttctaccaacatttagcacagtttcatacatagaaagttctcattacttggaattattaacatgataatcccccaaaaaaacaaatcaatatctaacctagcaacaatgacggaaggaaaataaatataatcaaaaacaaacctaccaaatactgtttgttccccatagccacactccatagacataacaaacaataaactatggaaaaagatagaatttgatgtgataaaacattcattaattggatctatatatatctttcatgcctccacaaaaagaaaaccatagaacattgaacaaaatgaagactaatctttttctctttctcatcttttcacttctcctatcattatcctcggccgagcaatgtggtcgccaagctggaggagcactctgccccaacggtctatgctgcagcgagttcggctggtgcggttcaccgatccatactgtaagcagcctggctcgcaaagccagtgcactcccgggggtactcctcctggacccaccggcgatctttcgggcatcatttcaagttctcagttcgatgatatgcttaagcataggaatgatgctgcttgtcctgctagaggtttctacacttacaacgcctttatcaccgctgcaaagtccttccccggttttggcaccaccggagacaccgccacgaggaagaaggaggtcgccgccttcttcggccagacttcccatgaaactacaggtacccaaaactcattaacaatttgacgtagattgtttcaaaacacaattgctaaattttggtgtttattattaaaacattagaatttgaagttctttttttcttctgtaaagagttttggatccaagtgctcatatatacaaagaactactatactatatatatatatatatatgttttattgaaaaaattatagcttctcatatttagaaacgaaagaaaaaaatcaaacaaaaacgccaaacgcaaagaaaaaatgttttggtcttagatgtttgcgtttacaattaaaaaactattttaaaaatatgaaattcttgattaatctaaacgcaaataaccaatcaaggaacttacgaatattccagtttccaaattatacacttttgaataatgtcaagtttgtgagttgtgactatatatatagctatatactaattaattaagtggacggttacgtcgtgcaggtggatgggctacagcaccagacggaccatattcatggggctactgtttcaagcaagaacagaatcctgcttcagactactgtgaaccgagcgccacgtggccatgcgcatctggcaaacgctactacggaagaggaccaatgcaactgtcgtggaactacaattacggtctatgcggtagagcaataggagttgacttactcaacaaccctgaccttgttgccaacgacgcagtgatcgctttcaaagccgcgatttggttctggatgactgctcagcctcccaaaccgtcttgccatgccgtgatagccggccagtggcagccttcagacgccgaccgtgccgccgggagattaccgggttatggagtgattacgaacatcattaacggtggattggagtgtggacgtggccaagacgggagagtcgccgatcgtatagggttttatcagaggtattgtaacatatttgttgttaatcctggtggtaatcttgattgttacaaccaaagatccttcgttaacggcctcctcgaagctgctatttagtaacgagagtattattattataatataatacgcagctttgtattatcaaaacaataatatcagactaataaaactctttccaatgatgtttcactgtttatgttgcgattttatttcccatgggccttttttaattgggctctctagcagatgagagaaagacgaagaaaggtgcatagatgttttaaacttcgattacaagtaaaggtgtttgacaatttctgtgtgactctgccgacacgtttcgtataacgtgccgctatcctcagcaa

SEQ ID NO: 37448 - DNA, 8197 bp, Arabidopsis thaliana landsberg
cactcagagcatcacctacaattaaccaaagaagaagaaaaaatcaaactttgcaatcatcaagtgtcacgaggatacataatcactggaatcagtcgaaacagatgtaacccaaatataactcaagtcaatacagcaaaacaagtaacagataagttaaaaatgccttctttaggtgagaacaagctctcataagcctatactaatcaaaatactcaacaagggaaactaatttaattggaaagaatgaaaaattgaaagagaatgagagagaaaggggaaaccttcggcgttgcccgagactctgagaaccaaatccaaaacgagaatcaaccaaaagaagcaagggatcattaatcttcgttccattttatcctcaagagattaaaaacaaaccctagaactatccctcatcagagaaaatccatcattgttaaaacccctgataaaagggatctcgaatccttcgattaagctaccacccacacaaggtaataccaagatgatgaaattagaagcagaatacgagaaaagccctctcaacgcgtatccacccgttgacttaatttgaagagaaaatcgaaatacccaaatcgattaatcgcggaaaccaaaaaagcaaaaaaaaaagaaactgaagctagacttttccgattagaaggaacgccgagatcgctgaccgttgactacttaatgctgagaagagagaaaactgagatagagaaaacgaaaggaggaagaagatatttcctggaaatatactaaaaaagggtcgaaacaaagagagatgagagagaggagagaaaccaagttatcgccgagagcaaggaaggaagacgaattttaattattttctttgcttaaagaagggattttactgggttgagttgttgtactgtgaaaactatattaaaaaaatgacatttaagattgagaaaacgacaaagaggatgatgacgtggacgagcattttcaaagcttttttagagctagtcaaagtcaaagacgcacgacttcattccgaatcatgtttgttatgttcgcccaccttatcatcatccatcatatgacattagatataaaccatgatggtcatgaactcatgatagttgatagtgagttatataccatcatcataatcctaattaccggcccagctctattttttcgggcttttattgtttattgggcttggtcttaatagcaagttcgtttattccaaagatgagcaaaagcttttttgatttttttattcttttttaaagattatagctctaaaaaattacaattcaatattgaaaaatgtaagctgaataatccatctggtccaatgaattaaacaaaacaaaaaacattattgtatcatatatattttaatggttgatagtttaactatttatgccatttaatatttttaaaagaacaaaagtaattttgaggaaaaatgaaataaaaaacaaaaaaacaaacggacagagtatatgttgccagcaataaaatacggacatataccttagtttggcattaaaaaacaaaacaaaaacacaacaaacaactcagtacagtaggctatttaaaggcccatcagattaagacttggaagtctgacgagattgtaacgcctcacaatccttcctacccgtgagtccgtgaccgattgtgtatcatccatcttctttcttcttctttcttcttctttcttcttcttttatatataaaccaaaatataattcgtgaagactttcactttctccttgccactttttgacgattcacatgcaccatccaatattttagtgcccttttcacgacatatctgtgtctgtatccaattttcttatttactacttcttttttctatttatatatacaaaaagaatcaaagagagagacgaattttcgaggtaaggtatctatcgactttctatcttcctccacctttgtttgttgtcaccaccacactacgctaatcattgccacacacatgcataattctctccaaccatctaaaagtcccactttagcattcttctgtttgtaattttatctcagagcttgcttcatgggcttttgagttttctctctgtttccaaaaaacaatggaaccggagaagaatccgaccacagtattgagtgccattacaagaccttcgtgggcgtttcttctccttgttttcaccgtcttagcgattctctctctccaaatctcttccaattcttttctccctctctggatcccgacttctcaatatgacgaccctgttacctgctccgggtttttcaatcacgacccgttccctaaccggatcgttatgtcgattaccgatttcggcggtgttggagacgggaaagacgtcgaacacggccgctttccgccgcgccgtaaggcaccttgaaggttttgcggcggagggtggggcccagctcaatgtcccggagggcacgtggctttctggaagcttcaacctcaccagcaatttcacgctctttctcgaacgcggcgctctcattttgggatccaaggttatatcaaagttttgaattctttaacacattgataaagtttactttttttttgctttgtttgttgttgattggttctgaacagtagtagtattaagagaattcaattagttgttgattgctctgtgagaatccaaaatttgggtttgtgattgctttttgatttgtgggttcataaagttttgttggtaaacactatattcattacgctaatcacggtcagtggttaaaatggacccaccattgtttgatacagcaaaaaagctgttatttttgagtggggatagtctctagtagtgcgaaatctggatttgcatatcaaaagtcagtgttttgcatgaattttgtattaacacttgttaatttcggattgacttgttcaatgaatgttcttgtgatgtctcgatagtagctgtaacaaaaaaaaagtcaagtggaagaaaccatttttatatgatcatattccaagaaaggagttagatgtatagacaacttttgtctgaagcatgttcatgtacgaactagatctatcagattacttgtgttgtctcctaatttagtattaaattattactgagtttttttgctgtcaagtttgattctgattaaaagtttgtctgctagtgtttgagcacattttcatgtgtcgatgtaaactcaaaagtcatctgtacttatatagatactttggaacgctgttttttttaattcttacattcttaattttacgttgtatgtactatactgctatgttagtctgacagaattgaaacgcatgacccatcacaccttgggctagaatgagccatgaggctccttatcgtggagggtctgagagtccatcattctaaataactgatgagatgagagtaataggacttgcatgaaaaacctatatagtccagcaagttatcattcactgctttaaaactactattattacataaatcaacataaccttcatccgcagtggcataatttataacaattatttatatcataaattttagtacatgtaaagtttattgaaaacatgaaaaaatcataacaaatataaacctaaaattttaggtattcgtttgtaatactgtcagtacctaattttcaataaacagctattcactttaaaatacaatattcagtgattgtttgttatcacaatggtaataatcaaagatgaatgtaaaatatgtttttttttgtgtccaccatcacaggagcaagataagcaaaactctttaaattaacaaatctttcatctttttgcacctaatcaaaataaatgtcaagttgatgatcaatatatttacactaaacttgtggataaagcttaactaatctcatgagcatgacttgtcaaaatgatggaaaaaaagaaataatacttgatgatgatgtgaaaataagtagttcagaatttagctttatcaaaccgatcactaaacttgtgaaattgaatatccaaaatcagtgtagaaacaatatacacctcatagtgatgcaagttagagcatcctcattgctaaattatttttttatgtctcaaaatcaacatatttaatattttaatatcaaaaacaaactgaccactaacaacaagacatatggagggaatgatctttaaactgactattacaagattttaaatgtctctaggaagacacatttcccaccttgattctttaaattctttttttattcttatttttattaattttatatttaaagactctttattttgatgaccaatggagatggtcttagttaagttggttgtgtttcttggcctttttgaatcaacaaataattttccataatgagcatttcaatgtcaagttttcacttaaagaactaactttagccacaaaaacatcacattcgtcatcttttaagcttatgtaattgtcatttagtggattttaacaatgaaatatcattcaaaatattttcgtttcttttttgtataacttttgatgagttattagggagtcccaaaacaaacaaaagcaactatagaaaacaaaatcaaatatgctctcatcctagaaatattcgagaactttaacgatagagacaacacctcaacaagtcacactactagctcataatgtaaaatcctgtgaataattctaagaactttgaagggaataaatccaatgattttacccactttagacctagtagctggtatggaggaacttcttaatccaaagccgaacaatttattaaccaaatgtccttttttcacacaaacaaggaattataccataatacatcaaagacgtcaaacaaaacacacataaacatccaaagtgaaacttgaaaatttcagttctcatattcttaaagctccttctgcaccggaacaacggtggtgccaagtgattgtggagactcttcaacggaccgtggcgacttcggtttaccaccgagccaagaagtgaccgctcctttaactttccccaccattccttctccaccttttccttcctctgcaaccgcctcaccatgtcctttcccctccgctatctggtcggaaggtatcttctcaaccgtcacttccacctcctttgtagccgttgtcttcttctctcctcctcctccaaaatgaagtttctcagctatcatttccgataaagctttgtcctcttctccaggtttcagcttctccgatatataatttttagccgtcacacctttctcttccccttgttgcgtctccttcactccacttccacctccggagagaggtagctttgtcatcaccgttgatcctgtttctttgactttttcgtaaaccggagtcaacttctcagcaacagttcccgccactttctgcccgtaagcagtaacagatctcggagtttcatcttttacagggctctcgctttgcccgccgccattctctccggtgtaacctagctttgaggcaacgacgttctttgcggctatagctttgttagttatggctgatgtagctgaagctaactgctctgtgtaggtgcttggttttgtctcatgtgtcgactcatctttggtttcctcagaatcatctctctctttgggacgagatagttctggtgagaactgatcatgagttcccgtcggtaagtctcttcccaatccactctctactttcacatcacctcttgtcggaaaatcttcctccatcccagcttttgattcccctccaaatcttgccggagaattcttgttgatatcagattccttcttcagatcaaactcatggcttctcgtcggaaagtcttcttcgcgtccttgtcttgatttctgatcaggagactcatcagtcactttcattctaccaagagactcagcaatctctggtactccagcttctccaccttaaacagaacagacaagagttattacagattcataaaccctaaaaaaagtctcggccaaagtcattacctttatgcgtgggatcagtaactttggactgataattagatacaccactgagataatccgatcctcctcctggagcagccggatcttcctccaaacgttttggcgtctcgacgttgactttccgttgaccaccgagatagtcatcttcaccaccaggagcaaacgtcctagtcacgtcctctgttgctgaaagcagagacacaggagtgttcaatggctcttgatgagcctctctgctctctcctctgtctgaaaattctgacactccgagaggataatgagtcggtgcctctcttttcgcttcccagtccgatgtttccgtcgttcttacaggatcagccagtgcctcatgtccgtaagaggtatcttgtaatgatacaggctcaatgggtttggtgtggtcagaagacacgacaggaaaaacttttgtccctggaggaacaatctcctccgatgccggaacattagtttctccggcatgactaagagacttaggtttacccgttacaccacctctcacggcagaggattcatacactgtgcatacacataaaaaaacagaaaaaccgttaatacacaaaaaaatataactgctgattgacgaggactttaatacagagaaattaacctggtgcgccgtgaacttctgggtcttgctcgtcatactcatcatcatcatcttccacatcgtgatcatgaccatttccatgtttagtgagactgttcttgattttcttagccttttcttttactttcttcaacactttggatgctcccttctcatgatgctcttcttcttctgtatccgaatcacaataaataaggcaaattaagagaaaagttctcaaattagaatcttctgtcatagatatatatatacctggatggtgaattctgattggttcttctgcttgctcatgaccataaggacgtgtcaactgtgactccattttccaaagctgtgttttctctttttcaagtgaatcaatcaaaccctctttgttctagtgttgttttctttcttttcgtgtctctgagaaaatcagaacaaagttccataaagtttatagagagaacgatgacatatggccgaactacctctctctggcttctgtctctttacttctgtaggattctgacacgtacgatgcgtccgtttcgtcctgccacgtctcagccagttgctctctacgtggctatgcgacattatcttttatccgatctttagagaagcctatcgatgtatcttctattatttagttttagtcggtccacgtttattggcccatcatgtagttatttggcaaatgcactgtgtgttgtttaaatataacaaaacggcaaaagaaaaaatcaattcagctatcaactgtgtgctgttttgaacatttaaaacggcataacgtactcaattaaaattgaaagacgacaagtggcgagagttgctttggtatctccatctccctcttgaaatcgacgggggatattttttaatttcttaaaaattcaaaaccgccaatttcaaaattcgttctcttcttcatcatcatcatcatcactgatacagtctgagctcccaagacggatctagaaaattacgatgcgaactcgatttctcaacatcgattacttctctactccaccttctcacgtatttgaaaccctaggcttcctcaatcttccggctcctgataatttcccggcacccatcgtctacaacggagaagaagaccgtctccgatttggctcgatcgaaaatgttagtatccctatcggaaatttgcctattgaagctgctttgtcgaagttcctttccgacgtggttcccgaccgcgtcagtgtggactatcgagtttttgaaatcgacgactcttcgctcggagtttattactcagacgaggtaaagttccttcgatctagatattatcagttcctggaggtgaaatttcgaatttcctgagtctcgctgactgtttctgtcaacggtcctttgtttcttatagtgagattggttgtagatttttcgaaatttgaggcgtgttttctcagtttccatttctgattgtcgcttagatcttatattcatactcgggttggaaattttggtagcttaagcgaatcttaccggagtttgaaaaccgaagttatgatctatttgcagaaggatgacggagatgccattgcggataaagctacacctaaaaatattgagttggggactccagagttggattttgag

SEQ ID NO: 37449 - DNA, 4324 bp, Arabidopsis thaliana landsberg
ttgttatatatatgtatccttaacccataaacaaattcttcaatacaaaacctgatatttatataatttctgtgctaaatcatggcaagaactgagttgtgtcacgataagccgtttgatccaagccattcattgaacatcctgataaagttgaaagcatcagacacaggtttgagtaatacattaacaatgcctaaagaatttgtagagaaaaacttatttccatggtttagtaaacatcgtcgtgtaaaattgtcacaacacgattcggtacaattgttggatttatacgaatacgattcgaagattacaacaactcttattatgaaaaaagagcaagatggaaatttcaagtttcacggatggagtaacattcttgataaaagaaagttcaagactggtgatattattggattttggtgggataaattttacgatagactcaattttatatcactatcgactgcttgatcgatgaaccggacttcataacatcatttctcgaatatgtatctcgggtcttgtcatgtttgttcgagtctggttataactatattcctttggctttgaagatgatgatatatataatttttttaagtattaagaaataatccagagaaaaatgtgtaacttaagaaactcataaaacaaagcataacttaggttttgtatccaatatctgttttatgcaacgggggtcaacaaacaagtttacacatagcataagagatccaaatcaagtaatcaaaggaccgtacaaaccacgaaataccgaactatcatcgttttttgaatccgtatttcttgcgttcatagaacagatcggttttagcactcccgagattaacaatcttggggcaaccatctctgtctttctcctgctgtgtacactctttgcagtaataagcatctgagattccaactcctccgcatataacacaccgaccttggaatgacccgtagttgcattcatcacaaatacgtactagagtacacggacgcacataagaatcacaaatcacgcatttcccatcgcatttctcacacagtcgtccaatggcaattccgggttgtttccggcacatgatcaaatcagggtgatgcttggccatggcttactggaacagtgtttgacctgcaaaccaaaacaaaagcaaaagaggtcatttttatatatactcattcacaaaggaaaggtgaccaagagaatagtttagtaaaagaaaacttaaaagcttcttccaagtaaatggagactagtaattgataaaactactgaaatacactaaacttttatcaacagttacaaaagcagaaaagaaagtaaaacttcaaaaaagaagctttgtctactaatagtttctcagaggaatttcgtcgaacaccttacatgcatcagttccagccaaaattttctaatttccagttccagaggcctactctactaacccaacaaaatcgtggaagagaaactatcgataagaaatttgaaatttgatcaaactaccgaaagctccatcaataagcatagacattacaaaatacaaaccctaagatttcagagcaacgaaatcagtacacaaaataaacaaaccccagaaaaaggtgaaagaaaactcacacaagtaaagggagatctaacttgagccaatagagaagaacgttgcgacgagaaattttcagagcgccaagattaaggaaggtgacgagtgacgacgaagaagtcggtataaacgaagcgggtcgggttttacaccaataaccaagtatccatgttgtttaacttggtccaatcgtaatgggcttttaatttgggctaaaaccggtacagcagcaacgttatttatcaaaaaaaaaaaaaaaaagtcaaagatcaccaccacctgtatgaggagagctaatagtcatctaaattgttaattgactttttgaatttcggacaacctgtactactaatacttggcttttcaaactgtcatattattttgtcttagtataagtaaattttagaaattagcacaagtaaatacgattacaagttgtagtatactgtatcatcacaaaacatgaaggctattaatatgagagtagagaacataattataatatcaatcttcaaaatctattcaattaagaaaacaaaagaacttgagtttcagtacaacaaaacatttgtttcttaaaagagaaagagcaaaaacagaagtaggagagttgatctacgagtcggcgatggtgacctcaacctcaacaccaggttcaatggtgatggatgtgatttgcttgaccacatcaggagagctgaagagatcaatcactcgcttgtgcaccctaagttcaaatctgtcccatgtattggttcctgtttacaacaccaaaagttaaaagagtctcagccaatgggaagaagatacttgaagtattgagcacaatcacatgttctaaaatctacatccgcgacactttaggaacggttcccaaaactcaagctctagtgtttttgaagacataaaagatgagagaaccagaagtataccttcaccacaaggagcctttctggtagtgatcttaagaaccttagtgggcattctcactggtcccttgactctaagtctcttgtccttagctccacgaaccaaatcagtgcacactacatatatcatttgcagcaacagagcaaaaacatttattcagtattcaataattggaacatctctcagatagcctcaaaatactctaatgtaacctaagactagtgcaacgcatttccctagaaattagagaggtgattaagaaaagaagtaaaacctttctcaaggttcttgacattcttggaggagagagtaatcctgatcttgtgaatctgctcgagtggctcttccaaaccagcctttcctggtttcattggttgatacgctgtcgccatatttgcagagagacgaacgaagctcgagtcgacggcggatagctttttgcttcaagagagctcgaattttaacctaagaagacgttttatgtaatataaaaaccctcatttatatgggcttgttgggcccaaccaatataaagcccaataactacagctatgtttgctctgtttgttttctttcatattccaaaagtgtttgataagtacttgggccaatatgggccttgttatttttagatgggctgctattttgttagcatgttcatctctgtatttaacattggtttgtcaaacagaggaaagaagattggttcttgcagagaataataatacgtaggaaggaaacaaaaagttgagatcaaaaaacacatttgtctcttaaagagatacggcaattaacaagaggaagtatggttagtagtaagatactttgttatgtacatgaagtgaaaaaacgtagaatgttgactctaggcttaactaatttacaagcagaggagtgagtagaagacaagaggtataaaggcattgtctaactgcgccgtgtaagcttccaacatcccggtggctgtcacagccaccagaagcgaccaccatccttgacttagtatataacccattgatgctaatattgggaccagaacaaagcacactgccatcatcgatgttattcccgctgctgttccttcaaccgttttctctgttccgcaacactcatgaccatattagtttccgatgaaaacaaaagttgatatttcgaaaacaaagaaaagaaatatgctcacttcctgtcttgctccatctcaacaccccatatttgtgaccaaccatcgatgcctgtaaagcaagaatgtttatcaaacacaagccattctgaatttctgagtaacgttacattggaagagacctaagcttaccattgtatctccaattcctaggctgagaattccggcaaatggagataaggctcggtcattgaacccagatgacatccaaatcggaagcgcacacccaagcaagagtgagaagtggctataaaataagacataatataatcaatggttatacaaaccaaacaacaatgtgataattctacactaagttttcccatccatggtttaaacagttttggcatacctgacaatcagatgctctgagtcacgatggtcagtgaaagcattcatgaattgatgtaaaggctctccaagaggctgaattctccatatctggttttcacaatgagtatcttgcattaacctcatcgaaagcaatgaaacatagaaggagatttctttcaaaagaagggagcttactcgaatgatctccaatgcaacaaatactgccaatgctgcaccaaatgctagatcgagaaatttaggctgaaatgaaatgaca

SEQ ID NO: 37450 - DNA, 2211 bp, Arabidopsis thaliana landsberg
caccatcaaaactttgagaagaagaagcttggttaatgttttggagtcgaaaataacttgatgtgatgtgtatgattaagtataagaacttaaaccgcaaccggagcttaaaagcctaagtagtgtttccttgatagaagatacaaaggcatagactcatacggagtttagctacactatcaaagctttgagaagtaagaagaagcttgtttactgtttatgagtcaaatatgactagatgtcatgtgtatgagtgaatataacaactagaaccgcaatagcattaagaactcctaaaacagaacggaatcatgcatttataaacttagctagctaaagaacagaggaatccaactaaagctaacccatcctcaagaactctgaagaacactactcatgaactatgaagaacatcatacaaaacccagaaaaatcataaaacccagaaatcattataaacttagtatgcaatagatctaagcaagataaacaactttgtaaaagaaaataattgcaaaaacttaaaaattcaaaaggaaattaaaggaacatatttagggtttttcaccaaagaggctagaacaaaaggaataaaagaggaatatccattaggtaaagggaaggggtctatttatagcaaatactaggttgccctaattcgctagaagacaaaataagaaagtcggcgcaggaccgctcggccctaggccgagtagaaaagccgagtggcttggtcttagtcacatcgctcggctcttggccgagtggcttggtcgagtaggtgcgaatcttcaagattcactttttcttcacttactcgacatgcacatcgagtataaaggtcgagtatacttaaaattcttccttaggtcctccgaactcgagtctgtccatcccttgtggtagaaacctccaagttgagtccaaaagtacctaattcacctgcaaaacactccaaatgcaagtatgctatgcaatgcaatgcaaaatgtgcaaaagaaggaaaagagactaagaatgcataaaaaagggcatgaaactaagctaaatgcatgaaaaacaagggcttaaaaaggttaaaatctagtgttatcagtagccaaagtccatatgagtttttggctttgtgtcttctaacaaggatacagttcttacgcctttaagatccggttgcggtttaagttgttatactcaatcatacacatgacatcaaggcatatttgactccaaaatactaactaaccttcttcttgcttctcaaagctttcatggtgtagacaaagtccatatgagtctttggctttgtgtcttctaacaaggatacaattcttacgcctataagaaccggttgcggtttaagttctaatactcaatcatacacatgacatcaagtcatattcgactccaaaacactaaccaagcttgttctagcttctcaaagctttcatggtgtagccaaagtccgtatgattttttggctttggatcttctaacaaggaaacactacttaggcttataagatcgggttggggtttaagttcttatactcaatcatacacatgacatcaagtcatattcgtctccaaaacactaaccaaccttgttcttgcttttcaaagctttcatggtttagccaaagtacatatgagtctttggctttgcgtcttctaacaaggaaacactacttaggctttttagatcaggttgcggtttaagttcttatactcaatcagacacatgacatcaagttgtattcgacaccaaaacactaaccaagcttcttcttgcttctcaaagctttgatggtgtagtcgaagttcgtatgagtctttgtctttgtgtcttcttacaaggatacaatacttaggcttttaagatcctattgcggtttaagttcgtatactcaatcatacacatgacatcaagtcatattccactccaaaaccttaaccaagcttcttcttgcttctcaaagcttgaatggtgtagctaaagtccgtatgtgtctttggctttacatcttctaacaaggaaacactacttaggcttttaagataaggttgcggtttaggttcttatactcaatcatactgatacaaggtttttcggtgtgtcaattccctaagcgcatcttatgtcattgcacatttaaggtgcaatccaatgggtgtaatgctatcatcggattgatcagagatctaagtagccagt

SEQ ID NO: 37451 - DNA, 2455 bp, Arabidopsis thaliana landsberg
  unsure (1)..(2455): unsure at all n locations
ttggggtttgaaccccagatcaagaaaagttgtttttgtttttgcaggtttttcctaagcttacatccattttgtgttattttcaatttccaagtaaattggatttgtaggaaaatttctattcgttgggcatggaattggctacttttatagttccacatgtacttttgcttcaagcacaaggttctcaagataattcccattagaaccctaacgtccgcactacaaagcacaaaccaaacgtagtttcgttggaacatatggagattttgaaaaacccacttaagctaattagaaactagaggagggttacgtgttaaaccgggtcaagacacaaattacatgaaccaaactagccatgttgaagccacttataaggtgccctaactaccaaacaacaaaattaaatactcacatgagaatctctcaactatatcttgagaaaagctcaagaacaattgaagtttatttatcttggtgtcggctcttagaagttgggtcattgaaatgacgttctctctttggacataaccatttttcaggcacgtagttatggagagtcccaatagttttggggcaacaaatagacaaaaaccttgtgatggttacttaaagtatggtccctttagtttggttcatctttggatagacctcacgtgacctttttgtggatacaattcaacagtttttttgcatcaattgattcttgctcttatccagcttcaaaaaatagatgagtgtctcattggcaatgaatgtagtcgaaaattttattaacaaagaaactaaactatttaaaatctttcgattaatttcatagtagatgtgtacactgatagtaaacctttacctattaaattaagattcaaccaaccactaaaagattctatgtcaagaaatcttaccaaaaagaagacggtagttttcaaaagtaaaactagtcccactgtcgatctaaaatagtatatatatcatagtattcttcttcttggtggatttttttaaaaaattatatccacatagtgaatattgctctctttaataaaacctatatatgatggtactttatgtgttgtgtgacttactgtatgagtttacctaattttgctctctttaataaactttttccgacgagaaaaaagataatagtaaacctttcccaaaaataacaaacatatacagtagtagttttcttacaaaaatccttgtttgttttctgccaaaatcaaaatacatttcttaatttgtagggacttacgaagtaacctatatatgggtaatcatttcataatcggttatcacttcattgattctgaaagtttcaccgcttttgttgatgtcgatagactgattgggtttcgcttccatgtttttattctttttttccatgggaccaaactntaggacttactttgtataattttaaacatttttcatttttctaatgaaatatttacctttttaacaaaaaacctatatatgggtaatatggctgttttagttgatcacgtttaggcacttaagcatacaatagatatatagaagagtaactaaggaataggatgtataaaggattaaaggggacacaagaaaatgacgtatcaaagaaatgcatgagagcgttaaaacgtcgaagcggcatttgcatgtgcttgtaacatggtagggctatctactaacccacttactaatattttttaatgtattagtggcctgtctagtcaatccaggtaatttaaataactaagcatatacataattcgtatttaaaccctaacaattttggaaaattttgtcttaaaacttgattacatgaaaatcgcaaatttctgaaattcagagctaatcaaccactaaactgatatgttgccataaaaatttaagtgatcataatatatcattcaataaatataaaatgtactgacgacttacaaaaaaaataaaagctagttccacatgaagtatatctatatatgcctacacgaaatatacaataagaaatgagcacgatgtatgaaagaactagttgttgtcatatgcatagtatcaattcatcattggcatgctaacaagatcaattaaaatattctaaagaaccatgactattaagctcattttcaacaaaggaacaaaaaaacaaaatctgtagtagttgtttatcgaatatctatatactataaagtcgaaagcatcatatgtattaacacaccaattgttgatttggtgaatatctttatatagtcaacacccgctagttcgtaagattaaatctttgatatggttccaatttccaaaattttaagggtgatccgaacaaaaatagaagtgatacgaaaagtctaaattctagactgtgcgttattccccgcttattattttagaaagtaaaaatcccggaaactattactaacaaggaattgcagctgataaaaaatacttccaaattccaatgtgc

SEQ ID NO: 37452 - DNA, 3626 bp, Arabidopsis thaliana landsberg
tacatatgacaaaaagctttatgctttggtgagagcactacaaacgtggcagcattatctttggcctaaggagtttgtcattcacaccgatcatgaatccttgaagcatctcaaaggacagcaaaaactcaacaaaagacatgctaggtggatcgaattcattgagacgtttccctatgtcatcaaatacaagaaaagtaaggacaatgtagttgtcgatgcattgtcaaggaggtatgttcttctttcatctcttgatgctaagttacttggatttgagcatataaaatctctttatgcaaatgattctgattttaataagatatattcatcgtgtgaaaagtttgcatttggaaagtattatagaaatgaaggattcctgttttatgataaccgtttgtgtattcctaattcttctttgagagagctttttgtaaggaaagcacacagtggaggtttaatgggccactttggagtctcaaaaactcttaaggttatgcaagatcattttcattggccgcatatgaagaaagatgtggagagaatgtgtgaaaggtgcacaacatgtaaacaagctaaggctaagtcacaaccccacggtttgtatactcctcttcctattcctttgcatccttggaatgatatttctatggactttgtagtaggtttgccaaggactaggacaggtaaagattccatttttgtgattttctaaaatggcacacttcattccatgtcataaaactgatcatgccatgcatatagccaattttttctttagggaagttgttcgcttacatagcatgcctaaaaccattgtatctcatagagacactaagttccttagttacttttggaaaacgctttggtctaagttaggaactaagttgttattctctactccttgtcacccgcaaattgatgggcaaactgaggtagttaataggactttgtctacactcctgcgtgcattgataaaagagaatttaaagacttgggaggactgtttacctcatgttgagtttgcatataatcattctgtgcattctgctactaaattctcaccttttcaaattgtttatgggttcaatcccattactcctttggatttgatgcctttacctttgagtgaaagagttagcatggatggaaagaagaaagcagatttagtgcagcagattcatgagcaggcgcgaaagaacattgaagagaagaccaaacaatatgctaagcatgcaaataaaagcaggaaggagcttatcttcaacgaaggagacttggtttggagtcatctccaaaaatcacgttttcctaatgagagaatgtctaaacttatgccgcggatggatggaccttttaaagttctcaagaggatcaacgacaatgcctactctctggatttgctaggtaagtataatgtaagtaatagttttaatgttgctgatcttgttccttttattgcatatgaaacagatttgaggtcaaatccttttcaagtgggagaggatgatgtgataatgggaagcttggatcatggagctaaggagcagcttgaacccaaggagcttggatctcgagcacggtcgacgatcccttactcatggtcaagttttctcgaccacacgcgatgattcttaagcatcagacagaatttcctcaacgaggggcaagttttactgaatttgggcaatcttttctcggtttcggacgagttaacgatgggacagccttatagtctctctctcgccttcagaaatgaatttgggcggaaaagctctatttatagcccgcctaaggtcggccagactgcaccgctcgctgccacatgtccggacagcttctgcgcccacaggcgactgctgtctcgggcgatgacgttgtgataggtggcgacgggtgtcactccaccgtcccaccaacttcggctccaagactcagctaacttcgactccaaggttggtaacttaagccgcaaggcaccgtgagtgaggtgtccttttcatgtcggttctgcggccggcggggcaaacttcgcctgtggcatgcccattcttgcccatttgtgcccattctcgcccgttcttgcccttttttgttttggcaccatttggacacacgcggtcaattggctttgtattcgggcaaaatgtttcttattcggtcctttggccgtcccgatgcccttatgtgggtcactacattctcccctccttaatagaatttgccctcgaattctaacctttggccattctcaacttcattgtcctaattatacaattgcctgctcctcgaactgaacttcctttcttttgcatgtttccctgaagtatgctcgatctagatctctagcccaaataagttcaatttctttcctctgattcttcatttggccggatgttgctgaggcacttttgatggggttttgaactcatcctattcttatacaagtgatttctcactcatataatggtcggccacacacaagcaagaaaatacttaacttctcatacattcaaaaggttcatacaagtaataagtaccggattttagtcttagttttatacactatttaacaagtcctaagccttagcatatttacacccaaaatttcgctatgactcagccgattttgtacttagccgaaaagttaactatattttcctagatgatcttacggaccatcggtcaagggttcctacacttgggacactcacaccttacccacaaaaacgagggcatcccttcattcaaacacttctcctctgtcaccgcagtcattgatggcccgactcctctcaaagatccttcgcccgcatttggcgcaacatacgggcaaaacatggacacatgccccaatcctccgcaacaatagcacttggtataatcattcatatatggcatagtcggtgatggatacaagcactcttcggtcggatgatctgtatggccgcatatctcacacgggcgcttagccggagtggctaacttcctcccaactaacttcctcgctgttgcccgtattctaggcttaaccttggagttaatcccatatctgatcccaagtggatgcgggtttactccaatgattcgcgggtccttagccttctccgatcccatttccaattctgccgctctctttcccttcagcctctcatcttctccctccttatcaaccatctttcctttcgacctctcttcatcaagtcttacacgattcatcaaagactcgtgcttcagttcctgttcaaatagcatcgatcccccctctcatttccttcatcatcactcggttcattccctttaaacatttcattctcccagcatgaatccacgtcgctaggattcgctatcatcaagatagcttgcgaactgtccgaggagatgttgatcacactcagactcttaggttctggcgttaaggattcaaatgagcctgacgaggaatcacccccatcgttcccattttctcctccttcttccccattcggaccatagtcttgcgcacactcggcaattaattgatcaatcgcgtgctctaactcattctctatctcatcttctttgtcatttcccataagcattagcatttcgtactcatcgttggctccatactcatttatttctcc

SEQ ID NO: 37453 - DNA, 831 bp, Arabidopsis thaliana landsberg
  unsure (1)..(831): unsure at all n locations
ttgcaagaagacccgtaaccaagcgcagtgcaatccgaaaaagtgcaggcgtaatctatgttagcagcgagttttgtcaaatctttggcttctggattaaacatacaccacttcttaggtagatacgtcacgttctcggcaccaatcaacaacttgttctgtccttgacctgatagatctataggaaactttggttgcccatcgaatttgaatattccccaatgacgttcaaacgctcccggtgctatacttttcgcatcctcatcaagtaatccaaacaagtatacctcaatgtaggttggtctcagtggagtgcctctgtttgccccaagccttggtaaaagaccgtttgagaatctgtaagcactgcctgcgaataacacgtttttaaaacatttcattgcatctaaagaactggaaaatgttagatgtcttaccacaatttgcgtgtttgtcaccctctgttggccaaccgacttctccaacgatgattggcatatctccatgaccaacagctttcaaagccgataccaaagtgtcgaaattggcatcgaaaacgtttgtgtaagcaacaccattgtcatctactggtttagcaccatcaaagaaggcgtaattgagtggaaaatcatnnnnnnnnnnnnnnnnnnnnnnnnnnnngatgttaatggtgatgggtgcactgttattgccaagaaagtcaacaatctgagtcatttgaccgatgatatcaggacggaatcttcctgcagatggcacagggttgcttgatggtgaatcgtaaacataagcgtttaaagggactgtcgctttgacggagcttcctagtcc

SEQ ID NO: 37454 - DNA, 18115 bp, Arabidopsis thaliana landsberg
  unsure (1)..(18115): unsure at all n locations
accgcatcgctcgatctagtctccgatataacccgggaacactcggccacattctttttcacacacctacccctgactctctcacgaaggtcatatggcctggacgacagacccaaggaccgtccctcctctttcacagactccctaccacgtgatctctttagtgggatactataatacaaacaaagaggttaagacacgaaaatacaagcaaaagggtaagccacctataatactaacaacaagggtaagccaacctaaacaaaaagggtttgtcctataggtcaatctacctaaactctagcaagtgactgaacaaatttcctaatagctttttgcgacacatttactcgataaaacattgaaaaccatggtttctcgtagcgtaacaaaccatgctgtgataccaccttgtaacacccctatcccgctataaaaatataaacaaaataggagcttcatgtcagacgcccgcagtcggccaacccaggtttctgaaacaaattcgttcgcctgagttgtccaaccgcaagagtccagcctcccgctcgtggcctaaggcttttcaacgcgtaccgcggacgcgagttgtgtaagccggataagacttatatgagtcagtataaccatataaattttagaaatcggagtcttatacatatatatatatatatatatatatatatatatatcatacgagaaatggttaccaaaacgtatatagttttcagatcctttttgaaaaccatacataatatacttagtaagaatttacaaaaagccgtaaaacctacattggttcgtcctaagtcacgagcaccctctacaaggttggtcaactaagttttcctgaaaaagataagtagcgtcataagtaatctagcattccttaatgaaccccagatctagatagtgttatcataatacccttccttaccccctaagcagcaacaacacgtaacaataatactacctaacaagcaagacataaacaaagaaaacacgcaacatacaacaaaagcaaaatataatgcatcatgcagaatgcatgcagactcgaatttcctaatatgcagcctacaactaatgcaagaatgcttctatcaacctaggtaaggccttctatgaatccatgatcttccaaggacatgcctccatactcttagacacaaagtctataagagacataacattcctttagactacatcgtcatgtagcgcccggtcggtagcgatccagccctgagccttcgtatgccataacggaacggagttacacgtgacgcacaacatacagacaggattctcatggttcggctaatgctatccatctaattaaagactaactaacatgacaacagactcacatactatcatacattcatcatatatgcaaaactctactaatcaaacaactaatcgcacttaattattactaatcacggttagtccccctaatcatggtttaattaaaccttatcatgcttaagaaatacaaaccctaattaatgatcactaatcctaattaacaattactaaacctaattaactatcctaatcaaggattaagcgaataattaagctaagtaatcataattaacctcctaagctatattaaggaaataaatgaataaactatcgtattcacgtgctacttcacgtaactcaagactcacttggatttccgagtggtttggcttctgaatgttttctcccgcgaactaagctgttctaagcgatttttgggtctgaggagtcaaatgggcggagggggtatttatatggtccaaggtcggtgattaggtcggccaaggcaagcacgaggtggcccggaccaatcaaaacgttaaaattgtcgaccaacagccgctctgggacactaatcggcctccgattggttccttccctttttcggataaacatcaaccaaaaatggataagcacgacccttaaagaataaggatgaccggaatatggataagctttagccttaacggataaacatgagccaccgttaaatcctggccatctgtttcctcattctgaccaaacgtacgatctgtcaccggaccgcaagaacattaatacggcacactccgttccaatgtctcatgagggtccatgatgcaaatcaaggcttccttaggactataacgcgttccatgccagaattaaccgagtaagccagctatcgtcacttatctgcattctccaatcaaccctcgaccattcacgacccatacatatcccattgtccaaatggattcccctcgactttctaatgtttcctagaccgaaactaggtttccttaagctatcctagttcttagggctagcctaatggtttcggggtttaccggtagtcgcatcgtaactaagcttggtccgtctgatggagagtcatccctttaccatggacttgatcctattcaatgctccttacccatgacttgccacacaaaatggccgaactgatcttgccttttttttgcttgatctcgcattctactcgacagactgtacgtccggccgcatagtcaaggttatgggcattacattcttcccccccttaaaagaatttgtcctccaattctaaggactaaggaagtaactagccttcaaggcaaaccgattcctttgttggttccatgaagctttgtgtagaaaggataggtttggtctcctccatttttttattgcaatattttcctccattcctaggaagttgatgcatgcctaacggactccgccactttcttttcttgtatgtgatttttgtcgtcaccacatacggtttagctaacgatttaatttatcggcttcctagtactactaggcttggtccacaaatcctaaggttccatcctaatttttatggttctctcctaactcttttgaatgggcttcagacttcctagactttctagttcctatggttttgtacttggttaagtacgaaaccaaacacacacataaatacattaataacttgaaaataaatcaagcaatcacacaaaaggatattagtataaacataatgtaacataacattagttaacagccctaaggggaaaggacgtgattttgactatcgtacacacccgcttattcaagccgatagatatcatcaaaaagatatcacaatataaccgaaggttactattggctcccctgtagtcgccgctatacatcaaaaaatggggttagtttccttatatttactaaggtttatgactcctaagggaatcacagtaaccctaagctacacctcgaacatgtacaacctagaaaaagatcctcctccgtgtcgggaatcggtggggatgatggtcctgctacgtgagatggggaattactagtcggtgcaggaatctgactgtcatctctcattagcatacaggttaccgcgtaatgctcatactctccatagtaaagacaagcaatggccatgggcatatactgcgtgtataactaacagtcctcaggtaataaacatcctcgccaaagatgaaacagaacggtatctagatacccgatgtggagcccccgtaaaatgtcagaatagcgtcagccctcatgtccgccgcgaaacgaaatatgggggacgtgccctcccataacagtgcaaaagggctatctgaagagtcatcaacagcctccgggacgtatggagaaatcggtggatcaacagcctccgagatgtatggagaaatccgcggatcaacagcctccgtgacgtatggagaaatcggtggatcctcgatcctcatccggatctgactcgtaggatatcggtgaatacgggttaagtgcaaaggatggcgtggcagaactgctcgtgggaacactcacatagacatggaccatcacgatctcatgtcccttcagacccagctcctgctccaccgtcctcactcccgtgatcacacaatcatcctcacaatccgaatcgatcatcatcccatcccctatatgcacatcctcctgctctgacatagcagctatccctgcaagaccaaaatcagcaaccgtatcgctcgatctagtctccgacataactcgggaacactcggccacatccgttctcacacacctacccccgactctctcacgaaggtcatatcgcctggacgacagacccaaggaccgtccctcctcctccacagactccctaccacgtgatctctttagcggcattctataatacaaacaaagaggttaagacacgaaaatacaagcaaaagggtaagccacctataatactaacaacaaaggtaagccaacctaaataaaaagggttaatcctatgggttaatctacctaaactctagcaagtgactgaaccaatttcctaacagctttttgcgactcatttgactcgataaaacatttgaaaacacgtgtcccttacgagcatgatgaaccatactctaataccaccttgtaacacccctatcccgctataaaaatataaacaaaatagaagcttcacgttgaacgcccgcagtcggccaacccaggtttctgaaacaaattcgttcgaccgagttgtccaaccgcaagagtccagccttccggccgtggcctaaggcttttcaacgcgtaccgcgggcgcacgtggcgatagcacggaaacgacacatatcagcacttgtctccatatgaagttgagaaatccgtgtcttatctatatatatatatcatacgagaaatggttaccaaaacgtagatagttttcggatcctctttgaaaaccatataaaatttatttagtaagaatttacaaaaagccgtaaaacctacattggttcgtcctaagtcacgagcaccctctacaaggttggtcaactaagttttcctgaaaaagataagtagcgtcataagtaatctagcattccttaatgaaccccagatctagatagtgttatcataatacccttccttaccccctaagcagcaacaacacgtaacaataatactacctaacaagcaagacataaacaaagaaaacacgcaacatacaacaaaagcaaaatataatgcatcatgcagaatgcatgcagactcgaatttcctaatatgcagcctacaactaatgcaagaatgcttctatcaacctaggtaaggccttctatgaatccatgatcttccaaggacatgcctccatactcttagacacaaagtctataagagacataacattcctttagactacatcgtcatgtagcgcccggtcggtagcgatccaaccccgagccttcgtatgccataacggaacggagatacatgcgacgcacaacatacagacgggatcctcatgggtcggctaatgctagtcatttaattaaagactaactaacatgacaacagactcacatactatcatgcattaatcttatatgcaaaactctactagtgaaacaactaagcatacttaattactactaatccgtattattccccctaatcatgggttaactagccctaatcatgcttaggaaatactaatcctaattagtcatcactaatcctaagtaacaattactaaacctaattaactatcctaatcaaggattaagcgaataattaagctaagtaatcataattaacctcctaagctatattaaggaaataaatgaataaactatcctattcacgtgctacttcacgtgactcaaaactcacttggatttcccgagcggtttggcttataaaggtttcctcccgcgaactaagctcttctcagcgatttttgggtctgaggaatcaaatgagcagagagggtatttatatgggcgttaggtcggctatggggaagcacgaggtggctcggaccagtctgaacgcaacaaatatcgtcccacgggcattctgggacactaaacggcctctgattggttccttccgttttttggataaacatcatccaaaagtggataagcaagaacctaaatggataaggatgaacggcttgtagataagcttgagccttaacggataaacatgagccgcaattcactcatggtcgtccgtttcctcattccggcaaaacctttgatctgtcaccggaccccaagaacattgataagacacactccgtccccaatgtctcatgagggtccatgatacaaatcaaggcttctttaggactataacacgttgcatgccagaattaactgagtaagccagcaatcgtcacttatccacattctccgatcaatccctcgacccattcacatatccaactgcgcaaatggatttccctcaaccctctaaggtttcctagtctttaaaggtttcctagaccaaaactaaggtttcgttaagctacctagttcttagggctagcctaatggttttggggtttagcgatagtcgcatcgtagctaagcttggcccgtcagatggagattcattctttaacccatgtacttgatcctattcaatgctccttacccatgacttaccacactaattggcccgactgatcttgccttcccttggcttgatctcgcattttactcgacagaatgcacgttcgaccgtccgggtcatagtcaaggtccgaggcattatacatatggtcatcatatggttaatttttacacactggagataacaaagaggatgaaccatatatattggagtctcaagcaagaatggtatattatgtataagatccttcttagagaaattgaaagattgcagttcatatatattccgcatagagacatgtatgacatgggagatatagaacaaccgaatgatgaatttggccctcacaactccactaatgcttcctaagaaaatatttataatgtcggcatatgtggctgctagtaattgtttctccataatcataatatttgtgggatctttaatcaaatgtcatacaaattaggtgtatttaccggaatcttgtagaacatttttttattactatcatatttcggacctatttggtatacccatcgtgaacctactaaacgttacagaaaaaatataattacaaggaatgccattgtcacgtcagcaaacccgcgtcgccacgtcagaaataattgacgtgtattaatgaactcgactgttaggagatacagcgacagttacagctgagtttagggtatgttgcgtttgactaaagacaaaatggctgagttatgacaaaacgacggaattatgagtataatttagccatagttatggctgatttataaaatatgtctaagttatgagataatccagcctacgttacggctgagttaatgaaatttgtctgagttatgagaatttcaagcataacccacacaacgttatggctgagttatgagaaaacggctaagttatttcctcgacacggctaatttatcattttccggctggctgagttatcaaagatgccttagttatgggatgtcgttacggctgagttattttcgagtgtcataaatcagccgtagagagctggattagcggataacttggccttgttaagcctgacttattagcaaaagattaattactataatatcatgcaattacaaccgaattattaatcgatacggctgagttaaagattttcggttgagttacgacattagaaggctgaattaacttggcgtttttttgtttttaattactgtaatagtattcatcttgcgactgacttatagctttgcttgatagctgattgatttaggcaaatttacatgttcgtttggtggcttacttgccacttcatcaattaaaaaatgacgtctgatgcaacattccatgtcatcatcatcaacggaaatacaaaacatccctagttttttcaacttctctcttcttctttgtgttgttcttcacccgagttgtctttaacctgtgtctttcacatcaccagaacttttaattcgtcatcgtcttcctcatttttcttcattttctttaatccttctctcgatatgcttgcctccgattgttgtaaaccagcaagaaaggcccaagaaaattaggattacattatctttggaagtcggcattggaaataaacgccttagaaagcaacatgcatgttctctatctaaacaagttgggtataatgctaaaacttgtcggacatagtattgtttgcaagaattttctttctcttctttatttattagcagtaatatgtagttcgtgacaaatcacctatcattatagactctaagaaccataacacattataactcattgagttttaacctttcgtgacaaatcagccatacgcattataactcaactgtaacatgtaaggttcggtaaatttacatgtcacggctgagttatatgtttcagtaaagatgaaaggttgtgtaaattatatgttacagctgatttataatgcttcagagaagacgaaaggttcggtaaatttacatgtcacagttgagttatatgtttcaggaaagatgaaaggttgtgtaaattatatgctacagctgagttataatgcttcagggaagacgaaaggtttggtaaattaacatgttacgattgagttatatgcttcatgaaagaagaagggtttgtaaattatatgttacgacagacttctaaagctttggagaagacgaaaggttcggtaaatttacatgtcacagctgagttatatgcttcaggaaagacgaaaggtttggtaaatttacatgtcacggttgagttatatgcttcaaagaagacaaaaggtttggtaattacatgtcacggctgagttatatgctttagagaagacgaaatgttttgtaaattatatgttacgactgatttgtcacgatttacatattacgactgagttacatcacattacagctgagttataatacatatcggaaaacaatatttttgggaagaaaatataaaatttattggtcaaataacaacaatcaaattaaaaacttaagaatatatttaagggagacataggaggaagactaaactgtatgaattaaaacatagatagaagtagaagagtcactagtcaacaaaactgtatgaatcaaaacatcgatagatgtagaaatgtctccaaatagatcgattgagaggaagactaaaagagaatcatgtaaaaccaaagtaaaagagtagctattactgctttcaactcaaacctgtaacgaatcatgtagaattccatagacctctttgatttggatttttatttttgatgtttttcgtgaacgaggttgtgtgtagatctgacgaagcttttgatttgggaccctatagcaagcgttgtggctctgaggtctaggaagatccagcccaatcatataatttgaagacctatgtccatgttgtacccaagttgcaattattagatctaaaagcttttcttggattttgagacaaaaaaaaagaggagggaaataaaatgattttgaggagtgtgagattggtgacgtgagttaatgacatggacagtcaaatttttatttattattttttattaaaaataaaataatcaagagtgttaattgtaattacacaaatactcaaaatatatgagtaatttttaaaacatgtataatatcactacaagaaaacagacaaacaacgactacagaaagcaacaacagatgtagtcgtcgtttttggcgactacgtcacgacagttttacgacacatatacgacaacctgaacattagtacgacgcatatacgacaacatgaacattagtagtcaattagtcgttattttacgactaaatatgttagtcggcatatactcgtatagtaacgactatttaacgattatattatagaagaaaaatgtttgttgttacatagtcgcaaatggacgactacagtttccgactgcgggtgttagtcgcaaaatcggcgactaaaatacgacacatatctgtaatcgtaaaaaagtcgcaactgagtcgcagaatagtcgcattaagttattggaaaacgttttccgcattgccaagtaggtacacctaatttgtttgttgtagtcgtaaattagtcataaaaattcgtctatataatcaaaattcacgacactcttctttcgcaaacaaatcaaaacaacaatcaaaagaaaaaaaaaagaaaacaatagaaatttagtttattctataatggcgggaaactacaattatggcggtagtggcggtttctatcgagattggatgtacaagagattcgatgaagtgacggggaatttgtcagccgaatacgtcgcaggagttgaggaattcatgacattcgctaatagtcagcctatagtacagagttgtcgaggtaaatttcattgtccttgtagtgtatgcaagaatgaaaaacacatcatctcgggtagaagagttagtagtcatttgtttagtcaaggatttatgcctgattattatgtttggtataagcatggagaagaattgaatatggatatcggaactagttacacggataggacgtattttagtgagaatcatgaagaagtgggtaatgttgtagaagatccatatgtggatatggtgaacgatgcattaattttaacgtggggtttgatgataactatcatcaggatagttatcatcaggatagtagttatcagaatgtggaagaaccggtccgtaatcattcaaagaaattctaggacttgttagaaggtgcaaatactccattgtacgatggttgtcgtgaagtcagtcgcagttatccttagcatctcgactcatgcagaacaaagcggattataatatgagtgaaaaattggtggattccgtttgcgaaatgtttacagattttttaccaaaagaaaaccaggctaccagttcccattaccaaaccgaaaagttgatgcgcaataaagaacttccatatcatacgattgatgaacgcaaaaacaagcgtctgttgctttggaaagaagacgaataactagatcagtgttctttatgtggcgcacaaaaatggaagcctaaagacaaccgtggaagaaccaagataccatatggacctgtgtggtatctacctattggtgaccgattgaagagattgtatcagagccataagacgacagcggctatgcgatggcatgccgagcacaaatcaaaggagggagaaatgaatcatccttcagatgcggcagagtggagatatttccaatctttatatcccctgtttgccgaagaaccccgtaacgtttatctcggattgtgtactgatgggttcaatccatttggcatgtctcgtaatcattcgttgtggcctgtgatcctcactccatataacttaccccctggtatatacatgaatacagagtatttatttcttacaattctgaattctgggcgaaatcatcctcgagctagtcttgatgtcttcctccaacctcttattgaggagctaaaagagttgtagtctactggagtcgatgcgtacaatgtttcattgagtcataaatttaatctaaaagcagtgctactgtggacgataagcgactttcgggcgtatagcattttatcaagatggactactcatggtaaattctcttgtccagtttgcatggaaagtacaaagtctttttatctacccaatggatggaagacatgctggtttgattgtcaccgtagattttttcctcatggtcatccatctcgtaggaacgaaaaagactttctgaagggaagagaaccctctagcgagtaatagtatccactcgagtctttgacaggggagcaagtttattacgagcggttggctagtgtaaatccaccaaaaacgaaggatgttggtgggaacggtcatgaaaagaagatgcgaggctatgggaaggaacataattggcacaaggaaagcatcttgtgggagttgtcttactggaaagacctcaatcttcgacataatattgatgtgatgcatacagagaagaattttcttgacaacatcatgaacactctcatgagagttaagggtaaatcaaaagataatatcatgtcaagattggatattgagaaattttgttcacgcccaggcttacatattgatagtagtggcaaagctccatttccagcgtatacattgacagaagaagccaaacagagtttattacaatgtgtgaaatatgatattagatttccagatggttattcttcagatttggctagttgtgtagatctggataatggaaagttttcaggcatgaaaagtcatgattgtcatgtatttatggagcgactacttccatttatctttgctgaactgcttgaccggaatgtccaccttgcactatcaggtacaatatatactaactatattttattccaccatttttttaatctaatcatttaacttgcacatatattttaggaattggagcatttattccgagatctatgttcgagaactttacagacaagtcgcgttcaaattctcaaacagaacatagttttaatcatctgtaacttcgaaaagatctttccaccatcattttttgatgttatggaacacttacctatccatctcccatacgaagctgaattgggtggcccagtccaatataggtggatgtacccattcgagaggtttttcaaaaagttgaaaggaaaagcaaagaacaaaagatatgctgcaggttcaattgttgagtcatatatcaatgacgagattgcttatttttcagagcactactttgccgatcatattcaaacaaaatcaaggtaaatatatttaattatttaacgattagatattcttcgatattaattcatttacatggatcaggttaacaagattcaatgaaggtgaagttcctgtatatcatgtccctggagtacctaatatatttatgcacgtcggccgtccaagtggtgaaatgcatgtagattggctttcagagaaagactaccaaagcgcacatgcatatgttttaagaaattatgactattttaaaccgtttgagaggtatttttaatcactcgttgtttgtaaattttcactaagatcactttgataaatttttcctcgtttgtaaatgtagtatgttcgaagattatctttctgccaaatatccatgcttgcccgaaaaagaactctacgcgagaagagcggaagaatatcatctatgggttaaagaatatgtaagtctacatcaattttggttcattcgaaaggtgatcatttaatatatactaattgatattgtttatctattatgtaggtaacatactggaacactacttctccatttcctacttgggttcaagagattgtgcaaggacctttgaacaaggttaaaacttggccaatgtatttcacaagaggatatttgtttcatacgcaaaatcacggcgctggacgaaagacatgtaactatggggtctgtgttaaaggtgaaaattacgctgattcatcagatgaagcggatttctacggtaccttaactgatattatagaactcgagtatgagggtatcgtcaatttgaggatcacactttttaagtgtaagtggtatgacccaaagatcgggagaggcactcgacgaagccatagtggcgttgtagacattctatctacgagaaaatacaataaatacgagccatttattcttggtacgtaattattcttaagtccaaaatacgtttcttttttaattattaataatctatctttgatatatgtatacaagatctcaagcagatcaagtttgttatattccgtatccatatacgaagaaaccaaagaacatttggctcaatgttttaaaagtcaatccgaggggaaacatttctggagaatatgaaaacaatgatccaactcttttgcaaacagaaaatgatgatgatgttttgctcactacaattgaagatcttgttcttgaaactccggtagccaacttaaacccaataatccttgattacgatgtcggggatgctgaaccagaagacgaattccgatgtaatttatcgtcctcggacgaagatgaagtagaagatgaagatgtataactgtgttaatatatgtataattatttgaataaatattagaatgaattttgtttcataaaatcattgaacttttttatgatatacaaatatttcttcacatctataattatatcaatttaaaagtgactattatgcgactaatgagcgactaagataagttttattgggcttctaaacgttgaaatccaaacccattaaaatcggcgacaaaacgacgactattatgcgacaactgtttgatatgttgggctttaaaatttcggggcccaaacccattagtataggcgtctatattgcgacaaaataccgacatgttttgatttgttgggctttgaaattttgaaacccaaacccagtataattggcgacaaaattacaactactcaacgatacttgtttgattagttgggcttcaaaatttcgaggcccaaacccaaattagtatgcgacaattatgcgactattatgcgacctctattgtgttgaaaaccctaaatcgagtcatttctcttcaagccagacacttagccatttcttcttcttcttcgtcttcttcgtctcgcaaaaccctaacccccaattctctttcttcttcgatcttcttcttcttctttctaagatcgatcgatcttcttcgatctctcaccttaaacctattcgatccaacctcctcttcttcttcttcttcgtctcgaaaaccctaatccccaaaactctttctaagatcgatcctttctccttgtagatcgatcttcttcttcttcctataagatcgatcgatcttcttcgatctctcaccttcaacctctccgatctgcttcgtcttcttcttcttcttctcttcaatctcttcatttggctcactatcatgcctatcgccggtcgaggtggctcaaggaagcgtaagacgacgccgaacgtcactcagagagccggcgccggcggatcaagacctgcaaatcttcctccccaatacaacttcactccggcgctggcggttcaagttcctgcgacagagccggctcaacaacatggaccttcaacgtctgcaccccacgtccgcaactatccaccgtctctgcaactcttccagaactcaacgactcaaccacaacatcaagctcctccgcctctatctgaagaggtccactacactccgccgccaacagcgccacctcagcaaactcctcctcagtcgcgagattcagacgctccagcaaacagccacccgtcgtctcaagggaacaacttccaagaggaagttcctgggacgttgccggagctacaagaagactcggcgatggctctgcaatcgacactctctgtgccaaacagggagcagtggtgttgtgtcttatctccaattcccaaacctaaaaccgagtggtatgttttcttcctctattttattctagtgttcttagcctgtgtagtgtaactcgtgttatggtctgtagaatggcttgttagggtttgtgtaacatagtaaaatctgcctttgttggagttggatgtttgttagggtttgtgtaacatagtagaatctgcctttgttctaaactcgtgtgtgatcttgttaagttcttcactttgtctataatcttgttaggttatttattgtgttctgttgtgaatcatgaacataattgtggaacatttgttgattgttgaacttagcatgttttcggctttgacattgaggatctgtctttgttctatacttgtctataatcttgttaagttctttattgtgttctgttgtgaatcatgaacttaattgtggaacatttgttgattgtatcccattgcatgttttcggctttgacattgaggatctgtctttgttctatacttgtctataatcttgttaagttctttattgtgttctgttgtgaatcatgaacttaattgtggaacatttgttgattattgaacttagcatgttttcggctttgacataaaggatctgtctttattctatacttgtctataatcttgttaagttctttattgtgttctgttatgaatcatgaacataattgtggaacatttgttgattgttgaacttagcatgttttcggctttgaccatgaggatctgtctttgttctatacttgtctatttttgttctttactgtctatgatcttgttatgttgactattgtgttctgtgtgtgatcttgtcggcttatacttgtctagaatcttgtagaatctgcctttgttcaattatatagtctactgtagttgttgtgttttggattttaaacatgtttactttctgtctatgttgcatgtgtttggaggtttactcgcgatagaggatctaaattagttagaaagatcacacggatttttactcaaaagttcaatgctccctactataattggtcatgtgtgccattggataaaagagaaagattgtttttagagtttgcggtaagcttcttgtatttctccaactttcttaactttccggcttaatcttttgaatttcactaactcaagctacaatgttttgtagnnnnnnnnnnnnnnnnnncccttaataacaggcactgtgcagtattacttcaatgaggtctgtaaacggcgcttgaaagacatggttagcaccgcgaggagaactagagagcagcctccatggattggtgaaactctgtgggctgttatgtgcgcttactgggacaccgaaccaacacaaaaacagagtcggacctattccaaagctcgtctctctgacggtaacggtctcggtcctcacatccacttctctgggccaaagtcttttcaggaaatccaagacgaattggtaagttcttctgttacctctttcagttaccccacatgtatgtttttgagtatttgagctgtgttggtttcattgcaggaggagaaattgtgaagaacggtcactattggtgaggtgtttgtagagacacatactaagtcggatggtacgtatgttgatcggaaggcggagatgattgctcaaacttatgagcagaatgtgagagatagattgttacagctagaggcggaagcttctgctgtgtctgatggcacttcacgaccttgggagctgacaaatgaggagtacacaaccatctttctcgaggtaaaatgttgtagtctaaacctcttgactttgagtttatggttattctgtcactaatctcttctttatttcttttcagtccaccgaaagggattccagaggcaatccttatggacttggcagtctcaaagacacattaggttgtgccaaccgcaatctccctggagaatcatcatcatcctttctagatttagaagaacggctgaaggaagtgcaacgcaagattgaggagcaggctgcctacaatgagaagcgagattctgagattgctgcgcgtgaagctgagacagcccgaatcacggctgagcaaaaggacaagctcgaacacttgtccttagtggagaaccatctccgacaaacagatctgcaattccttgacttcatggcctctcaatcttcgacaaccatagagcctctaccagctactccacaaaatgatcaataggtttagatttctgtcccttttcccttgaactttgaacaataatgtgtgtgtgtttagaactttgaacattaggtgtaagttgtgttttatgtatttgataggattttcaataataaatgtatttttaaaacactttatagcatttcaaacaacaaacaaaccgaattatcagattcgatgaccagccaacaaagaatcaagatatgaccaaattcttattcggaaacaaaatgtcgtcgtaaagtcgtcgtaaaatagtcggaacatagtcgtatcatagtcgtaaaatagtcaccaatattatcgactattatctgacaacataccaaagtcgtttagtgatcgtaaaggcatcgtaaagtagtcgtaaactatttagcgactacgatacgacaaccagaatagtgcctacaatccagtacaattgatcgtaaaatagtcgcaaagtagtcgtcaataaaagtacgacaattttacgactacaagaatcatcccccgtggaaagttacccaaatcgtaccttcaattgccacctagctcgccaaatgttacgaccaatgg

SEQ ID NO: 37455 - DNA, 2775 bp, Arabidopsis thaliana landsberg
gtaaaaaaaagaattatatatctatctgttattctcagttttgatcttcatgaaaactcaattgaatattgtaatatctttctttttttggttttctgttttgccttcaacttcacacctaacatattttttctaaatctaatccatacatttccctactttatctatacgtatctttgtcttatttatagattgagaaccaaacaatgagaataacattttagctacctatttataatacaccaactcaagaaaattgttgtattaccaattcaatataaacatgttaacctacaagaccttttagccccacttggtattctttttttactatatgtttttcctttctatgaaccaacttaatatatttcatacaaaattagtttctgattcaaattttgccctactaagtctctaaataagtttagaatatgtttaatcagggatagtgtggttgactgagagggcatttttgtcattatacatcggtaacaagtcttgataggctcttaaggccagtcttgggttatataacaaggcatctcccttttggtgctcatgtaaattgaggaagagaaaaaggatctgaggaacaatggctacgacaagacagatcttggagcagccacaatcgccatttattcaacgtatcaagagctcggggaacattagcatgaatggcagtcctatgattgatgagaaagaagaggagctttcacagtctgcttttgctttgtttaaggcaaaggaagatgagattgagaggaggaagatggaggttaaggatagggtccagacaaagcttggactcgctgaggaagctactagaagattagccgagattcgggaagtaagtttggtttgtaacattttcaagaacttgaacaaagattttcattttgagagagttttggtttgtacattttcaggagcttgaagctcttaccgatccaatgagaaaagagatatccgcgataaggaaaagagtcgatgctattaaccgagaactcaagcctttaggacagagttgtcagagaaaggtaaactaatgtttgtgttaatgttcataactctttatctttcttgcacattcttgagaccattggttgttgttgttgtcacaggagagagaattcaaagaagcacttgaagcttacaatgaaaagaacaaagagaaagctatatttgttagcaagctagttgaggtgaaacattctgtttccatttgtaattttctttacaaaatgattattgttttctgaaatcttttggtatgaaaatgtgtttcttcagctggtcaccgaaagcgagaaactgcggatgacaaagctggaggaactcagcaaaagcattgaaatatcgctacgctaacacaaaatgataacaataaaggctgcaaaagcagccagctttggtttcttctttcttctgctctttgtaattgtttgattcgatatttgctttttggtgtgatcttatttgttttcctgattcagtaaccttagtggaagggtgataaagattcagtatgatctcacatttttttgttttcatgtgtgtgacaatgttttattcctgacccttcgagttttgtaaccggaaactttaacttctatcaaaatttcttacaaaagctttcctaatccagtgtatagtgaaacagagaaacatactcaaataggttaaagaactcagtgaatagatgaaactaaagttaaaacttaataaccaggacgcaagagttttttctctcttttagcaatcttcctcatcttcttctgttgaatcctatcaataacattctctgatctcttttgctgtttctctgccctaaacttctgttgcacgtcaactctttccttccacttctccgtgttcttctcacgcatcttcgtttccttgtgaattctcttcttcaatcgctttggatcatcatgaatcttgataccagcagctctgcttatagccgcttgccacgagtgatttttcgcaacaatatcccctttctcttgatctttcttcaaagcctctaacgtcatcgccatttcaagctctttagccttagaaaccctctttttctttctgtttttcccgtatatctcgtcaccgtccccaatcttcatataaccataagtaagatccttcacaacctcttcaaaaacattcaaacctgagtctctcttcctcttattcttctgaagacggctttgtctcatcttctcaaatgtatcatcttcttgcaaactaagaaacttaggcttcttcatgatatccgattcaagatcaagtttctccatttttcttgtcttctacaaatataatttaaaaaacagtcacaatcagaacattttcgtttgcttgtgtagtcaagtgtagaagccaagaagacacaagagttgcagaaaaaccctaaacctaaagctttgagcaccaccaaaaggcaaaaaacaagaggaaataaatttatagcgaataacacgtattgggctaagttttcattgggcctttcaaataatagatgtcaagtatcggttagaaaaccaaaaccaaagtgaattgaaaacgatttagttataaaccggacctatttttgttctctgtttactccggttaaaattgataaatcggtgcggcgaagagagagagagagagagagacgaaggcgatgatgatgttaaaccctagcaatggcggaatcgagggagagaagatgaagaagaaggcgaaggtggttgtgataatgggtccaacaggttctgggaaatcaaagcttgc

SEQ ID NO: 37456 - DNA, 6754 bp, Arabidopsis thaliana landsberg
attttttgattgaactcctttttctttgttacaacatttcgttttcttctttaacgctttctcaatttggtagtgtatgatgcttgactccatcgcctcttgaatatggtttcagtctgcattacgccaatgtatctgtgggaacaccggcgacttggtttctggtggctctggacaccggcagcgatttgttctggttgccttgcaattgcggtactacttgtatccatgacttgaaagatgctagattttccgaggtacctttcccttctccaagcagttgaacatttttttcagactatttgttccttatctcttgtcgttttctcttctttgagacagagtgtaccacttaatctatacactcccaatgcatcgactacgagttcaagcattcgatgcagtgacaaacgttgttttggatcgggaaagtgttcttctcctgaaagtatttgtccttatcagattgccttatctagcaacacagtcacgacagggacattgttacaggatgtattgcatctagtcacagaggatgaggatttaaagcctgtcaatgctaatgtaacgcttgggtaagtaatgactcttttcctctgtctttcttctatgcacctttaagaataaagggttcattcctggagtaacctattgaatgaagtgagattccggacatgtaaaaagtttaggtcttttgcctctcttagaactcatgtacggttccatcaactgtcctctgtttagagaaatgaccaaggagatgctaaagaactgaatccgtgtttgtggtgcagttgcggtcagaaccagacaggtgcgttccagacagatattgctgtgaatggtgttcttgggcttagtatgaaagaatattctgttccaagccttctggcaaaagccaatatcactgcaaactccttctcaatgtgcttcgggcgtgtcattggcaatgtcggaagaatcagttttggagacagaggctacacagaccaggaggagactccattcatttctgttgcaccaaggtacaaagtcaacatagtttctacaccgattccatttctttctcccattgttttctttttgacaattttgatccaaaatgaataaactagtaccgcttatggtgtgaacatttcgggagtatcagtggcgggagatcctgttgacattcgcctgtttgcaaaattcgacactggctcatcatttacacacttgcgggagccagcatatggcgttcttaccaaatctgtatgtataaacttttcttcttctgaaaatgttgtgctgttaaaccattagatagatctgtaacttttgcagtgggtattgctacatcggcatgacgttcattctccataacttttgcagtttgacgaacttgttgaggacaggcgacgcccagttgatcccgagcttccgtttgagttctgttacgacttgaggtcacgcccgcactcttatcagtgtagttattagatgattttgcccactttagtaaaatgtgttcgaattttaacgcacgctagaacatctaataagtaagaaaagcctgaggaaacattgactttatagaagaatatgaagtaatcattgactttgtaaaatggactgatcggtaccacatttgaattctgatgttcttcatcttcacatgcagcccaaacgctacaaccatacagttccccttagtagagatgacttttataggaggatccaaaatcatcctcaacaatccgtttttcactgcacggactcaggcaagacatggtgtttaatttttctttctttgatttactagcttatgtatttacatatttgtttttggttatgtaacaggagggtaatgtgatgtactgcttgggtgttctgaagagcgtaggtctcaagattaacgtcataggacgtaagtatctccacactgatacacaaaattctgtatatatatgcaaaatactaatgggaatatttgtggctcgcagagaactttgtggctggctaccgcattgtattcgatcgggagaggatgattttgggttggaagcagtctctttgtgagtgaccagaccaggaagtgattaactgattatatatacctaggaagaaagcattggtaatgaaagtgttttgtgttaatggcaggttttgaagatgaaagcttggaatctacaactcctccaccaccagaggtcgaagctcctgcaccaagtgtatccgctccaccacctcgttctcttcctcctactgtttccgctacaccgcccccaatcaaccctcgtaactccactggaaaccctggtacaggcggtgcagccaatctcatccctctcgcatctcaactcctacttctcctacctcttttggccttcctgtgaatcacagaagccatatgttttccttggtttgaccattttgtgttcattcagtaacaaacttcgtttgatgtgcaaaacaattttcattggtttgagagtggtaatcttgtctcccctgtttttgttacataaagtgttttggatatgtcaaagtgcatggagcaatcatcaattacataaagtgtataaacttcgtgataatctgacagacttattataacggctaatgtcagaagttatctcacttaaataggaaattatttcacgaaatagaaaagtaaagaaattgttcgttgaacagaagagaatacagggagttaagtgaaatatacgaagaataaaggggttttccgaaaaaaaaaaagagttgactaacagacttattaataacggctaatgtcagaagtcaactccctccggataagagactctgccttcgtcaaccttttaggttcttgggaagaagaagaggatccaaagtaatggctactactccgattaaacaactcttagctcgaacattcaaatcagcatgtctggaacaatgcgaacaagtcaagctgttgaccttttcatttcctcaatctccttacaaatacggcattcgtaccagtgtacatcgtttatctgagaaattaaacagagttttactctggaagttgtattattttatcggaaaagcctcgagattgaagttatgaacgttgcacgccaagtgtttgtgttattgtctatgttagttttgatcttttggggtttggagagatgtgaggcttctgggaagtttagcttcgaagttcaccacatgttctctgacgtagtcaagcaaactcttgggtttgacgatctagtgccagaaaacggaagtttggagtacttcaaggttttggcccaccgtgatcgcttcatcagaggtcgaggtcttgcctccaacaatgaagaaactcctctcacttccattggaagcaacctcacgcttgcactcaattttttgggattgtaattcctcttttccttttgattcacaacatttcgttttcttctttaacgcaaacacaatttggtagtgtatgatgcttgactccatcgcctcttgaatatggtttcagtctgcattacgccaatgtatctgtgggaacaccggcgacttggtttctggtggctctggacaccggcagcgatttgttctggttgccttgcaattgcggtactacttgtatccatgacttgaaagatgctagattttccgaggtacctttcccttctccaagcagttgaacatttttttcagactatttgttccttatctcttgtcgttttctcttctttgagacagagtgtaccacttaatctatacactcccaatgcatcgactacgagttcaagcattcgatgcagtgacaaacgttgttttggatcgggaaagtgttcttctcctgaaagtatttgtccttatcagattgccttatctagcaacacagtcacgacagggacattgttacaggatgtattgcatctagtcacagaggatgaggatttaaagcctgtcaatgctaatgtaacgcttgggtaagtaatgactcttttcctctgtctttcttctatgcacctttaagaataaagggttcattcctggagtaacctattgaatgaagtgagattccggacatgtaaaaagtttaggtcttttgcctctcttagaactcatgtacggttccatcaactgtcctctgtttagagaaatgaccaaggagatgctaaagaactgaatccgtgtttgtggtgcagttgcggtcagaaccagacaggtgcgttccagacagatattgctgtgaatggtgttctcgggcttagtatgaaagaatattctgttccgagccttctggcaaaagcgaatatcaccgcaaactccttttcaatgtgtttcgggcgtatcattagcgttgttggaagaatcagtttcggagacaaaggctacacagaccaggaggagactccattagtctctcttgaaacaaggtaagaagtcatttccagattagcggcgccaaagttttataatttgtgtatatctactacaccaattctgcttctatctcccactatgttttccttttcacatttttgacctaaaatgaaaactagtacggcatatggtgtgaatgtgacgggagtatcagtagggggtgttcctgttgatgttcccctgtttgcactattcgacactggctcatcatttacactcttactggagtcagcatatggtgtttttaccaaagctgtaagtgtttagattagactataccatgtattataatgctgcctgaccaatttcatgtaaaaaagcgagatatgtgtaaactattcttcctcggagaaactattgtgctgttaaaccattagatatatctgtaatttttgcagtgggcattgaaaattgaaatgaagatttctcagaagaaagccattcctccaagctttgtttgttacatcatatgacgtacatcttttacttttgcagtttgacgatcttatggaggacaagcgacgcccagttgatcctgattttccgtttgagttctgttacgacttaaggtcatgcttccactcttatcagtgtagttatatatgcttttgcctatattaatagcacattcttttaacgcacgccagaacacgtaaaaagtaagaaagatgggaaacattttatagagaagaacatctgaattctgatgctcgtcctcgtcatatgcagtccaaatgttacaacccctgtagagatgattttcgttggaggatccaaaatgactctcaggaatccgtttcttacagcaacgtctaaggcatgacatggtctttaatttttctttttcttttcctgtattaacgtatctatttacattttctttttgtttttggttttgaacactggtaacaggagggtactaagatgtactgcttgggtattctgaagagcataaatctcaatatcatcggacgtaagtatctcaacaaccaattctgatgcacaaatttatatatatatatatatatatatatggatataatgagagtatttgtggaatgcagagaacttgatgtcgggccaccgcattgtatttgatcgggagaggatgattttgggttggaagcagtctaattgtaagttcctaaatcaggaagtgactgtatatacttaggaaccaagcattagtaatgatgtggttttgtgtcaatgcaggttttgaagatgaaagcttagcatctgagtctcctccaccaccagagatcgaagctcctccaccaagtgtatccactccaccacctgctgcttctgctacaccgcccacaatcgatcctcgtaactccaccagaaactctggcacaggcggtgcagccaatctcagccctcttgcagctcaactcctatttctcctaccacttttggctttcctctgaatcacaaaagttcgttttgtgttggtttaaccatttttgtgttcatttaataataaacatcgtttgatgagcaaaacacaatgttcattggtttgagattgttgaatcttattttatctcccttgttacaatgtatgtttttgttatgtaaaatgtttcggatgtgtcaaaagtgattgaagcaaaggaggacatgtatccgtaaagcaatgattcaaattgtctatttgtgattcacttaattcataatgccctcatcgtatgttgacttttctaaaagagctaatctttttctcaacttgttgcatataattcgaatttgagtttagtattgagatactctaatgcggcataattaaatcagcaacaattatgagcgaatgattgatttgactaggaaattatttcaccaaaaaaaggaaaataaattgttcgttgaatataaatagtataaactataaaaggagttaagtacgaaataagaagcgtagaggggcttttatgcaaaaagaaagagatgactaacagacttataataacggctgatttaaaaagtcgtctccctccggataaaaaaactctgcctttgtcaacctttcagcttcagggaagaagacgaagacgcaaaataatggctactactccgattaaactagtattagcttaaatattattagggccaataatcaaatcagcttctctggaacaatgcgaacgagtcaatctgttgacttttccaattcttcaatttccttacatatacgttattcttcgaggattatgtctttatctgagaaattaaacgtctttttatcccggaggtgtttttgttttctcggaaaagctccgagattgaagtcatggtcgttgcacgccaagtgtttgtgttattgtctctgttagttgtgtgttggggattg

SEQ ID NO: 37457 - DNA, 4411 bp, Arabidopsis thaliana landsberg
agactcctacatcaaattagtcaacaacaaatgtcaaattcatgttagatatcttaaacacaaaaaaacgagaacgtaagaaattggtaataacttttaacatgtgggtttgttgtttgagtaacatgtgattgtgtggtttgtaataactagttgtagcaataatatggccacaaaaatgaagaaacatacacatggatttatagtgttgagcacattcattagatggtaatagaaaaggttgcagacaaattaagatagagacaggaactgaaagtgggggagagttcccatgcaaataattgaagctacgattagattttccgatgcgacttgccggttggataagcttgttgcttactacaatcatatcacagggtcaacatgacgccacgtggttatgttcttgcattttaatcctttttctaatcatgttatgagatgacgatacacatcttcgagtcgcaaatagttgtggttccgtaacttatgttgactatgggcctggtttaaacgcagcgggtacgattgcggttgcgggaatttgcggaaacgggcggttgcggtttcaagcgttatcaagtgttttgaacgactggttgagcgtttggtaatgggtgcgtttgcgggagttttatgactggtaaaccagcgggtgcgatagtaattaaataaaaaaataaccaaaataaatataatatattactattaaaagaaaaaaatacaatatattattatgataaattgataatatttgaaaaattaaacatacttaataattaaagccataaataaaactgaaaattcaaaaataaataaattttgtaagaaaaagcttaatactttatgcatttggtacatcaccaaaaattgcatcaagtagtgtgataaactgtaaataacgttgaactcgcgggttttccggattgcctctatacatatgataaagtttcttcaagatatccaaacgatttttaacacatctccaactcaaattttttccaaacgttaatattcttaagaatattttctttttgaacatcacttagaaatctgattttggggtctttggattcttccgtttatttctccacaataacctgttgcagtaacgcaaatgtggtctcgtttgaccaaatgattttctaatcgagaaaacaaatcaaaacatgtattcaatcaaaaaactcaaaaaaaaacaaaaaaaaaaacaacaacgatgccatgaaatattccgagaattacactagctaatgaatggatgaaaggatagatcatacttacgtttgattcttgattttgactttgttttttgtcagtttgggtggatgccataattgagagaatagggtttcattgattagggttttctgataagaataagtataaggtttgggtggaagatataattattttaattaattaatttttttttttttaacctaaccgctaccgcccgcaaccgcaaatacttgcgggaaggaccttttgaaatctggcgatttcgagcggtatttagcggtttctatgattggtgccaaccgctaataaccgctaccatccgcaaacgctgcgtttgcaggtggcagaaggagaaccaatcaagccctaaggctattcattaagagacaattgggctagatttctctaaatttaagaaactcatctaatatttaaattatataaaaaattttattatttgttaagagacatgtttaaaagctcccattgaggatgttcgaagtcttaggatttttgaattctttacgtttaaactaaatcaaattattttgttcaataaccttctagttttgctagtaataataagatattacaaatttgcaatacatatctactgaatcttttttcactgatcaattatgtataggtatagcatatccctcacttgtggatgtatcttattttcctaggagttttttatttttaatttctgtggatatgttgaagtctgcaacatatcttaaagaaaactacgggattgacaatttcaaaaagacatccgagaatataatgaggattcagtttcagtatccgataagatccccctaaaatatatcgtaaaattctatatgcccgcataattatccataattaaaggtcatacatgtttaaccttcacacacaataaatcaaaacaaaagaataaaaataggttaaacaaaaagctcctctatataagcttgatacattttcatgaaattgctttcttaaacactcaacaatgaagagcctcatcttcctcgtaccaatcctttgtctcgtcatttcaccaaccacaacgatcgctagttggccaaaaccttcggaagtttccaatgaggacatgttgatgaataccgaacacaaccattactttggtaataaattgaacttcaaagattccaaagtctggaaatgtacatacaacaacggatctggagctgccgtctctatttcctacccttcacctccacatccgccgtctccgaagccaccaactccgtcgtctcggcctccgtcacctctatcaccgaaaaagtctccaccatcgcctaaaccatcaccgccaccacgaacccccaaaaaatccccaccaccgcctaaaccatcatcgccgccaccaatacccaaaaagtctccaccacctcctaaaccctcatcgccgccaccaacccccaaaaagtctccaccaccgcctaaaccatcatccccgccaccaagtcccaaaaagtctccaccacctcctaaaccatccccgtctcctccaaaaccatcaacacctccaccaacacctaagaagtcttctccctctcctcccaaaccctcatcaccgtcaccaagttctaaaaaatctgcaccgctcctaaaccatctccatctcctcctaaaccatcaacgccaccaccaactcctaagaagtctccgccacctcccaaaccatctcagccacctcctaaaccatctcctccacgtcgtaaaccatctccgccgactcctaaaccatcaacaactccaccatctcctaaaccatcaccaccgcgtccaactcccaagaagtctccaccaccaccaacaactccgtcgcctagttatcaggatccgttggtgcatttcgcgaactgcattagcgaatttggaccgtcggcaatatgtaagcaacagatggaagtaagttactacagaagagggtttcttgttagtgactattgctgcaaccttattgtcaacatgagacatgaatgtaccgatgtcattttgggcttcttcaccgatcctttcttcgttccacttattcgttacacttgccatgttaagtattagttagctcttatttggtttttcttttttttttttttaattatagggcttttttttcttctttggttctttatagtcatgcaattttgttgttgtccatgtcttatggactgctcttttgctacatttcacgaataattcataagttttttttttttccttccttattttctccaatacaacaacaaaacgaaatattgatcgaacgcatcctcattcaactacttgaataacatttgttttttcttaaggaagtcgataaattagatgactgcggctagttaatgttgttaagtccagtcttggccgaactaactaaataagtgggagctgtgccccagtccagcatccccatcccgtccacattattttggtaaagcaaagcaagtccataagagcatctctatcggcgtttctaaagttaggccttagccaccgcaaggctttcttcctgtccaagaaacagtttaaactttccaaacataaaaccctagaaaacagttatatcacagcaacttcagagatatgggaaatattaaacttttccttcaccaaatagaagagaatcgtgatgatacacattggttcgtttcagagatgctatacgtgtaaacatgatctcattttattttgatgtatcatgcatgctacattaactggttcgtttcttttttttttttgtcaaagtaactggttcgtttctaaactaaattttacatgccaatgatgaaagacgaaaaaaaccgaaccaaactaatcttgaccagttctcattttcattttgggattagtaaacttccaaaaaccggtcatcctataagagcggtgttatggtttcgactcaagtctctttctttaagaatacaaaagcaaacggagccactgacgatgtcgaacaagttaagccttagccacagtgaagcttccttcctgtgcaaaaaacagttgaaactgtccaaacctgaaaccgtaaaatacagatctatcacaacaacttcagagtctcgtgagagattcatgtgaaagtcggatctgactaaaacttggtggagagcttcatacttcatgctttatattcaacagtgggattgtg

SEQ ID NO: 37458 - DNA, 4225 bp, Arabidopsis thaliana landsberg
ttttctttcaagacaatgaaacaaactttcaatttgtttatgtataaatatttgactcatgcctcaaggaaaaaatcctccaatgaaatccttgtgattctgtttctttatttgtaaattacgataagaataaccattaccaactatagtagattttagtgatgataactggatgactggatcaaatggtatatatcgttggctttgtccaaaaacaatatataggaaattggtatatatcgttgtatattgaccaaaatttgattcttgttattacaataacacttggtattacattattactttgagtttgagtggtaatgtcagataaatagtggaataacaaaataattgttaacgaacgaacttaaatggataaaatattcgtagaatttttataaaacgctgaaaagtgagtttaagtggattaatcatgttatgtcttttctagttatattttaacgcaagtaatatatagcggaatcgcttttcaatcgtcttggtaacagttttgccaaagagttttttttttttttttgaatttaatgttaaattagattcaaaaagataactgaacgtttttacaacaagtacaacaatttttaaagaagttttgaaaattttaaaaagaaactcttaggtactgttctcaatgtatcctccttgatgcaaaccaaagttggagtccattgttgtatttctgatcgccactgattttgagagccgaaagttgattgcgaatgtgtctatcaatccatttgataagacgactagatgggttgggtcttgtaccatgtttacgctcattgcgttctctccaaatggtatgtatcgatgcttgccaaagagttttgcatattctcgtagattagttttgcttgtagattctcaaaggcttttagaataccttatcaagaattcaagatacaataatttgatgattagattttgtgtagaatcaataaaccaataacataatattgtaattcaatgacaaaatgagttacagtacttactattttttcatcttaaacctaatgtatactaaacgagatgtcatgaaataaaacaatgggaaatttgattttaaacttaaaagatgtcaactgatgatgcataatcagtataaacaacaatgggacttctcacgttatgtgttccatctgaccagattaggtttgcagacgagggcaattttgggttgagatcgttgcctgaaacactcaccgtgaaagactgcttctcgttcactgacttcatggatagaacactaggcgagaccttgactttgagcttagatccgtgatttatcacaacttttgatttgtatgttgagttggaggtacctacgttggttacggttctgttgaaagtcacggtgaaggagcttttagatttcggcaatttagctgacatagaaggatagtttaaagtttctaggtacggtcttgtcaatgcaagtgacagcttcaccggagatgagtcttaagttctttgcagtgtagttcaagccgcagagaaaggcgatgtggtcggatttattagcttcatagactagtccaggatgaattgcagttatgggatcgacatggccagctccgtaagcaaactcggtcaactcgttaaatggagaagtagatgcattcattggccaagctacaaaaaacaccaaaaaacagagtattataagttttcttgcaatacaagaaaggtgtgttgtgagtaaaaaaaatgatgagaatattcagaaaacagagtggatgtgattttgcataccggtagtcatgatggctgattggatcatggagggagaccagcgtgggtgaaacgattttaagtaggcagctacaccagcaacatgcggacaagacattgaagttccggtatcaacggagtactttacacgtcttgtatctgatatgcttggtggggcatcaggagaataagcagctacgatctctgatcctggtgccgttatatccggctgcaatacatattcactttcagtcaaatttacagagtaatttaatttttctccttttctatatataccttcaatatgtcaggaatgattgtgtttgggccacgagaaaagtaggaagccacgacgggagctctctggttaaagattgtctcacttttcagaacagccgctttgggattcctggccaaagcaaacaaaagtttgagctttaggatggagtatttgtaagaaatataataagacagagttatggatattacttggtggagttcatatacgagagaacagtgttatagtcgtcttccaatagaacagagactggaaaagagaagatacttgccacgtctgtacggtggctcctaacaatagatgcaatggctcccatagcttgagcttcatcgggattttgcggggaatcacataaaacaatctttcctttcacacgtttactatctaggcaccctggtgagcaaaacctgaaaacgaaaatcacggtttaaaccctcatgtgaagagcataatagatgcaaagaaaatgtttcttgggattgaagttacccggctgaagaagcatcgcatctacttgaagctgactttccgtatactagagggtacttctttccgttaagatcaaacgaatttactgatcttccctgtttcgcaacaagcagtaatattgatagaggacaagatatgtacgataatgtgttgtcttaaagtaacaaagatttgtttcttggtactcaccacaattgtcttgccgtttccgagaacaactttggtgatgaacgcacgattcatattactagcagcaacagtgaagagccacggcgccatactcacgattgttctacgttctggaccattgtttcctgcgccattcacagtgaggattcccttggccatggcatggaaagccccaatcgcaagcgtgtcctcctcaaatgtaccaactgcatccgcaccgagggatacggtaatgatgtccaccttatccgctatggcatcatcaaatgcggctagaattccatcagatgtgcaccttatgacaccagggtcacatactttataaaccgctattcttgcagctggaacgccacctctcacagttccattaccgagcccgtaaaagctcacatgcttcacagcgtttccagccgctatggatgctgtgtgcgagccatgtcccgtgttgtcccttgcggactcaggaaacccctctagtttgggtgtgtagtaccgtgctccaataagcttgctgatatacaacaaacagatcgttcacattcatttcaactacaaaatgacaaatccttacaccagtattataactttgaagggttttatacttgttgcaagtgaagtttttgccgcctttacaaacacctttccatttcttaggaggaggaccaaatcctttaccggagaagctttctgactctggccaaatcccagtgtcgatgacaccgataatagtatcactctctacggcgaagtttctctttgtattcttaccttccttcattcccatgaagtcccaagacgccgtcgtttggagtttgtagttcttactccggaacacagacacaacttcctccatttctaacaacacaaaagagtttcaaatggttaaatctttaaaaacatttcaacataaaatgtgtctcgatctaagaacactaaccggctactctctctcgttctgactcagtgagtagggccgagaaaccgttgaaactcctcttgtaacttctcaccaaacgaccttctatggaactatagtatacatatgtgtatatcacttttataatcctcataacgtaaactaattataaccaatcatagattagagaatgaattaataaaaccacacctttctccggtgacctcttgaagaatatttatgtgattcgacattggtgtgtagtttggttgagacggaagtgagcccatatagacaacatacaccttcatggattatcatcatcatcatcatcattatcatcatgtaagaaagatcgtataataaggagaaacgaaatatattgacaatgatttaaatacttgtttatcttgaggatcatctataattgctgagactgaactcaaaaacaatataatgagacatgagaggagacaaaaggaagctcgtttcaccatccttttcttatgaatgaataaactttcaaaaaataaagagatccaaaggatgtataaatgatagaatcattcctaaacggt

SEQ ID NO: 37459 - DNA, 1544 bp, Arabidopsis thaliana landsberg
gcatcgaatggataagaaacaggctagctagcaactttgattagacgtctgatttgttccgaggactatgggtaaagctgtatttgcagaacaagaaacccatgatgccaaagaagggggtattattgctctatggtgttataagagcttattattacacaggattgaaactaaagccataagctgacgacatatcttgttgtcttacatctctaatgacgacaccatgttgaggctctacaagcattctaaacaccggagagtgttgatctgtgggagagagagtaaagctaaacctcgacacaataagtgagacaagaaccttgagctccatcataccaaaattctttcctaaacacaaccttgtccctaagccaaatgggacgaatgactgagggtgtttgcaggctttagagactccttcgctaaatctttctggattgaattcatttgcgtcagctccccatatctcagggtctctgtgcaatgtagggatcaacgtccagatgcacactccctttggcaccacgaggtttccgagttttgtgtcctcaagggcttctctcgacacgaatgctgctggtgggtatagcctcaacgtttcctggataaccattgtcacctatatttttattcaagtgatgttaggttatgaaaatagtcatacttggagtccaaggaacatttttttttttggtttaagagagtttaaggaacttgacatgagaggcaaggttgtaacttgtaaattaccgttttgaggttggaaatagagtctgcgtcaggtataccgttcttgcaatgaagaaagacttcatcgcggatacgagtttgccaagaagggttgagagcgaggagcataagacaccaagagacagcaaccgcactggtctcatgcccggcaaaatagatgctcttgcaattgtccaccacgaaacttttgtaagattgtgtcttgttctccaagttgccatcacaactactcctggccccttctagtatcaactgcattagatccttcttgtgatctcccacacattccctttctctttctttaacggtttcccatatcaaagactcaatgtgtctctctagctcatcaatcttcccgttcccatgcttcttagtcccgaacacaacatcacttgcaaccacaaaatttaacaccattacatgacactgccttaataaaatatatatagagatagaaatgacttttgaattcacttacgtgaagccattgaggctgaagaggatgttgttgtgagtgatggccttttgaagacatctaagcttagagaagatctctttgcctttggagaaagagctcccaaagcaagctctagagataacgtcagcagaggcagctcttaggtcttcgtctacaattatgtcacacaccatttctccttctcttttcatcatctcttcccatttactcagcattggcatcgctgattccaccaccaatcccaccattcccttgactttgtcgaggaaaaacttaggtgcaatgatacgacgttgatgggcccaatgtggcc

SEQ ID NO: 37460 - DNA, 8973 bp, Arabidopsis thaliana landsberg
  unsure (1)..(8973): unsure at all n locations
atgggagcaggtccgaaaaagaatgtaagagagtctacacctaggtcagacagaacatttaaccacctccattcattattgatatgggatgtttcacgaatactggatatgaaaagttgtccattatcgatttgagtctattgtggactagttttaactctactaacttgattactgctcctttcacagatgattaagagcagctgctcatggcgaatggattgtaaacctaaatttctggtgctagtagttccatttatgttgattttgttgtcagtccttgtgatctaagggcgtgtatttatcttctgttgtcgattgctgacataccttctccgaaccagacagcataactctgtagtgatgatcttgttctattatggtcgattttccaaaagaatacattgaaagctataaaattccatattattccaaggcatttgatttttgttttgacagtggaccttcgttcaatcatggttttcttaactgacctgtccacttaatacaacattttagcttggctagggcaccctcttttctttgttctttgtaatctgtttcttttgttatctcatatcttagagtataggtagatctgcttatcaatcgcagaaaaaatctggatgcccctgctctttttagtctgggtattttacaattaactttcttggtatgagcactaagtatctatatttgttccagatttggtgacagagaatttcttcaaagttttcgaaacaaagacaaaagacaagcaggctcgcttaaaagagagtggtaaaaatggtttccccaaatttgatatgttcttataggaaattgatgttttgtttctgagatttgtatatctcttgattgttttataggccgcgagcttgctgtttcatgggccctatgtgctgtatgcttggttggccatttaactcactttctaggggttaatgctccctggattcatgcgatccattcaacggggtttcatgtgtctttatgtttgattacgttgcttggtcctggacgcaagctagtacttgatggtatcaagagtcttttaaaaggttccccaaacatgaacacgctagttggtcttggtgctttgtcatcattttctgttagctcactggcagccatgattccaaaattggtgagttaactactctttccctcacactctctactttccagttgaaagaagttttgttgtatggttccaagtgcttgaaaaagattatttggagttgaatgaatggtatgtagtagctgcgtctccttttcagtacaggctcgaatcattcaacagaacagtttggctgcattaacatattttaaaatcaaaggcataagtaataatgcttgtttttgttttctttctggatttttccttgtaagctgggagtatttaaacccttgacctccatatctatattggttcttgcgattgatggctgatattccaacctgtaaaactgttttgacatccagggctggaagacattttttgaggaaccagttatgttaatagcttttgtattgctgggaaggaatcttgaacagagagctaaaataaaagccaccagtgatatgactggccttctgagtgttttgccttcaaaagctcgccttctgcttgatggtgatctgcagaattcaactgttgaggttccttgtaatagtctctctgttggtgatctagtcgtcatactaccaggagtaagaagagagaactttcattctcatgcatagtatgttgttgtttcccatttagtgatattttactgcaagggatattctcattcatttttttgcaaacaacagcctattcaaatgtttttcttcgtgtatcctttttgttgacgcttgggttatgttttccttatttaccaggatcgagttccagcagatggtgtggtcaagtcaggtagaagcaccattgatgagtcaagtttcacaggtgaaccattgccagtgacaaaagagtcaggggtaactttctactccacccctatctatatctagtgtagcctgagatagatgagaatgttatcacgactgtttgggttgtctctttgcacatattatactcacgttttttttgttaaaaaatattttgggctagagtcaagtcgcagcaggatctataaacctgaacggaactcttactgtcgaagtgcatagatcagggggtgaaactgcagttggggacattattcgtctggttgaagaggctcagagtagagaagcaccagtacagcagttggttgacaaggtctctccttctttcctagtgcatttgaatatcagtttggactgaccttgatttcccatggaataaaaacctgtcaacaaaatttaaatatataaccaggactacaatttttttgcaactacaggtcgcagggcgcttcacgtatggagtgatggcactctctgcagctacatttacattctggaatctatttggtgcacatgttcttccttctgccttgcataatgggagcccaatgtctttggcccttcaactatcttgcagcgttctggtatacttctaagttctaatatatatacatattgattttaatgtttaatattttatgagatcaagaatatgcaaacaaagtttttgaaagcctattatacaatccctcaactgcagcctatgatatcaattgtaatatttagagagaatacggaggaaatttgtgtttcacttctgattctattaccttagtaattaaaattgatcaaagcaaggatggcttaaaaatagtttctccctcttttatttggatacaggttgtggcttgtccttgcgcccttgggttggctactccaacggcaatgctggtaatatttttactgcataaacagtttttctgctatgaatcagacagaataagacgttgaatatcttgatatattccttaggttggtacatcattaggagcaagaagaggattacttctttcgtggtggtgatattcttgaaaagttttccttggttgatactgttgtcttcgacaaaactgggacactgacgaagggacaccctgttgtgactgaagttattattcctgaaaatccaaggttaggcttctgggcacagcacttctatacttttaaatcatatttttgctgaagtcttgtactgtttcagattaattttttttctttcttgaaattttctacatacttctgtgttctgtgaaaacatctgactcttcatgttcttacgcagacacaatttgaatgatacttggtcagaagtagaggttttgatgttagcagctgctgttgagtcaaacactactcaccctgttgggaaagcgattgtaaaagcagcccgggctcgtaattgtcaaacaatgaaggtaggactgtaaatgataattatccccctatttatgataattatttccctagttttgatgaagttaatgaagtccaccactgcaggcagaggatggaacatttactgaagaaccagggtctggtgctgttgctattgtcaacaacaaaagggttacagttgggactctagaatgggtcaagaggtataatatgttcatcctttattcgtggtttgttaactagtttaggagtgatttggcacctgataagtagccattgtagtctcatatatctttcatgtttagtataatttatatctgtattgctgtttatacattttccgttgatgatgttgtccttgctgtcacaatttgatctacttttgctgcctggccattaatcaagattatacacatcttcttttttttttttctccaaagaattgtacatagagtacttaaggaacttatgaagctgaataatgaataaataatacatgataaaaaatatttttgacaagcataaggatgtggcaggattttaaactagaagaagatttatttttaatttgctcttccgctatgcagacatggagccaccgggaactcattgcttgcattagaagagcatgaaattaacaaccagtctgttgtgtatattggggtggataatacacttgctgcagtcatccgttttgaagataaagtcagggaggatgctgctcaagttgttgagaatttgactcgccagggaattgatgtgtacatgctgtctggtgacaagaggaatgctgccaattatgtagcttctgtcgtaggaattaatcatgaacgggtatgttcttcttctttaaatggattgattcaacttcttcagaagttttggcatgcattgtttgctaaaaggtggtacttggtgagaattaccaaacatctaaagtcatggcattgaatcagtgattgggctgtaggcataaacctcgttttgaacaaattaaaatatatctatattgactttcattagccagatttagttcctgcatcttaatccttaaaaaatgcctgatcgaatttgatatacaggttatagcaggagttaaaccagctgagaaaaagaattttatcaatgaacttcaaaaaaataagaagattgttgcaatggtgggggatggaataaacgatgctgctgctctggcatcatctaatgttggagtggccatgggtggtggtgcaggagcggccagtgaggtgtctcctgttgtcttgatgggcaatcggttaacacaggtttcgcatattatccccacaacacttgtacctttttcattttattgtgctataaaatgcgagatctgattgattactacatcaaatcatatagccactgctttattgatgaaacttagaacatgtttaagatttttggatttgtcgttatgcatcttcatctagttgtataaatttttgattgatgcgtaaaatcgctggtcataggaaactgcattttcttactaaatcaatgataatagatgtttccctttggctttcatgaatttggacacatgaacttagtagttacatgatttccatgcagttgcttgatgcgatggagctaagtcggcaaaccatgaagaccgtgaagcaaaacctttggtgggcgttcggatacaacattgtaagttgttctgcattttcatgtcttaatttcttgctttgagtttcagtgtgaatatataattagttaataatgtattttgtttaaaatacctatgtaggtaggaatcccaattgcggctggagtgttgctaccattgactggaaccatgttgactccatcaatggcgggggctctcatgggtgtaagctctctcggtgtcatgactaattccttacttctaaggtacagattcttctcgaaccgaaacgacaaaaatgtcaaaccggaaccaaaagagggaacaaaacagccacatgagaacacaagatggaagcaaagctcttagacggggaatttccacttcactgaggcactatatcatgatttttgcagagataaatctctttttagttttttacttttcattcttaacgataatttcggctcttggtcttgagagggtttgttaggacttagggtattgataatttggagaatcatctcaacgtgatttttcaaacaattgctttgagcttgtaacacagccacagtaacacatgtccaaactctgcattggctttggcatttgatactctgaaatttgattttgtgtataattatagtgaataagcagcgggatttcagttattttatgtacccagccgtgaatgatcatgtcacatacgaaatggagatacaaaatttatgtcacgtagcaaaactcattgcaagagcaagtccttcattctatattccaatactcaagactgggacaagccaatacaaatcaatcaataaataacaaacacagaatcaaatagcaactctcaatacaaaaaaatcattttgtttctcctgtacttttataactccatcacacttttgcaacaatgtgtaaaagaaaaaaaaaatctcttgaattggtaagtgtttcatgttcttcgacaattcatgagacttgcgagtagatgaaaaccagtagtttgatcggggtcttgttcataccatataagtcattccaacttgcatcaaatgtgtatgcggaacgcttaggtttgttatccctctcctggagttcttcctcaagaaagcatacaagtaatttattaccagcttcttcagaaaccaagaatccttagtagcccttatgtccccatgtcccagtagatacaccacccctgactctttcgctttgtgtataaacgacaattctttttctagactctgctccacatccaacgccgatgaaggacctgccccaaaatctatgctggcctttcttctctccatgggtcgcttgtttgacgaattcatgtgctcagctaagagaggcactccaagtgaatacacacttccattgggtgctatcagaactctggacagagtcgtatcatcctcagaatctgtatcattatggtctccgtcactctcaagtgcacgctcctgtgcttccttacgtataaatttttctagactctcaatcagtatctgctcaaacgcctggtgactttccttccgcacatctttgtatccatacctgttttaaatacacagcactttatatatgaaaatttggttattgtacctaaattttcttccatatcaaaaacggttcctttgtttacctggctacacagcggaataaatgatagcttcttgggcatacacgtctgaaaagaaatctctcggtctgaggcacacttggaacagggacatactttatacacacgaagataaccatggaatggattgcaggaagggtggttagaaaatgaccaaatattgccggaactcctttagctagctcattataaagtagaccaataccaggtgctctaattgtcccaaggttactgcccagttctcgtagtaggtccattggtagctttttctggacttcagtttcatacttcagtttactcccgtagttccaaacaaacattatgagaaacataattgtagcaaaaaccaagattatccaacttccatcagccacacttgaacaaacggatgagaagaaaaccagttcgactatcagggaaacaattgcaaacatgctcacaactatgatgttcgtctgccagataagaagcatgataagggtcaccaaaattgttgtagtcatcataattcccagctctgcgatgcctgaaaatccaaatccaaaaccacatgcatgaatgtctctaggattaatggacaagccacagaaaaagtggacataaaagttaaaaagtaaagaacaatgacggaaattacatcatctttataacacattaaacatcatgtaccagaacttatggttcaacaacttgtgccgtaaaactattttaaagtaactaaaacgggttccaattatttcaactttccccaaatcaaatgctacgagaagaaaatattaccataagcgtttccaatcgcgaagatatttgaggtagagcagacaacgatcagacacaccaccagaagggaccagttaagaaccggtatataaatctgtccaatgaatttctttgaggtgtgaatgattttaagacgtgggaaacagcctagtgctattgactgtttgatgcatgtaaatgtggctgttgtcattgcacgactggcaattaaagcagcaacattagaaatgagaaagactggccagaacaaagaacctgaaaataaaaaagagtgataaacagttagaaacgtgaaatgagaggtaaaatcaagccagcaaatgaaggaatacccttgttgatcttgacgtactgtggaagctagtggatcttacttggaactgacgaaaagaaagcatccccggcagcgctgaagttttcagagaggtatgcggcttgacccaaataacccagcaagaggcaaggtaacaccagaaggataaaagtaagctgcagataaacaccagtactgaatcaaaagttcagatgactctaagaaagacaactatcagaagagcaataaatgagtatttattgccttaaagtacctggatagagtgaacagagaaatagctaagatctgcaaacatggcctccgatcctgagacaagatccacatgtatagaaatgagcaatgacatttagtcaaaaagtcattcaatgtatttaagctttctaaaatatttcccagaatatgaaacttaccagttgcacataaaacgcaacccccaagtgcataccaagcatttacagagtttctcttgaaaaagaaatagatatatgcaggattgaacgctttaaaaacgctgctgtcatattttacgaggttgtaaattccaatgcccgctagacaaaaaaaccacagaagtaaagcaggacccaaaacaagccccaatttgctggttccatatttttgtacactgaacaagatcacaagaaagctgactgatatcacgaccacctgatctgcaaatgaagccatagtcagaaactttacacaaaaaatagtcactaatcactcatcaagataagattatgttttttgaaagctttgtacaatcattagcccctattcagggnnnnnnnnnnnnnnnnntcttctttgttgtatctataatctaattgaagtcaagggacccaggatgcaaccattaaagacccataaaaagttttctggtccaaggaatacatatatccaaggaacgattacaagttttgaaagccagacgaaatcatgctcgtgaccatacataggcgctaataaacgtcaactagaattagttaccttgttctataacaccaactccaaccttcagaccaccgatagcagacattactgtgtccaaaaaagagggtaaaatttagctgcagattattcatgcaacgataatgctcacatgctttttctctatacttgatatgtgacataggaacaaaaaatgtagcctgacagcatataagtacctgacattgctggcgtaacaacagcatcagcaatcaccatagcagtgccggcaagaactaa

SEQ ID NO: 37461 - DNA, 2124 bp, Arabidopsis thaliana landsberg
  unsure (1)..(2124): unsure at all n locations
taaagtctccgcttcctttttcattcttcatagccttttccttttattattgcttcaaagtttttttgggcttttggatttgatataaatatatgtgttactaggttatacaggtgttaattagatgcaagacaaggattgatcagacataaacataattaaagaccaagcttcactctgtaactagactcttgatcgataatgcgtgaacggacccaaactcttttcgaatttcggaagccaaatgtcttggtcttgccgtgagacttggtgtatattttcatatatcttattttttttttccttttgatgtatgaaactttttttatgtgtggttaatgagtaaaacaaagaatcgaacaccatcacattagtttaaggttgatgtgtgaaacatagcgtacgtgaaacagttcttctaattaacccaatttgatgttattgttaaattatcttcaagagtgacaaatatacgaccaaacatgtcagctactttataatgccggttatgcttaaccaccccaaatttgatttgcctgcctcagaccggttatagcagtacgggaagaaccggtttgataatgggtataaaagtttttcgtttttcttcttgcaaccaaacccaaaattgaccctaaaattaagcatgccatgatagctagctagtaacgatcgacggtgccaaaccccgaacgatatgaagatttacttctgattcggtaaacatttttataaagcaataaatacaaaattaatgttatttgcttctcaattactctattagtcttccgtttccttccctaataggatttattttggtccatttctgctataattttttacctttctagtggttttatttggtagacttttagctggtttggattctctactataatagactcttatattcctctactacataagtatataccctaaatgtgtcactgcccaagaaactagaaaaacaaactatggaacaatcaaattttgttaatatgaaactctctctagttccaacacttcttcttcttcttgttcttctcgtcttttatcaacatcactcttctccaaacctaaactcgaacgctctctcttctttcgtcgacgctacgcccttcgccccatctcctttactttccctgtccatggagtttagtatcgcctcatcaaacctttcaacaatttcgagtcctcctgaaaatgtatgtttttattaacttacgtgattttgttcaattatgctatagatttgttttgaatatatataatttgttgtaataagaaaggaaagaagaggaacagaattgaggaaggtttagcaaaatcaagatccgccatacgtgaagccgtgaggttgaagaaggttgtatcggacaaagaagaaacctttgttcctcgaggagccgtttacagaaacgcttttgcatttcatcagtaagtttctgtttccatttttttcttcgtttctcccttttttttgtctttcaaattttcatttaaagttactttccatactaggaaataaatgtaatatactaagatttcattgagaacaaaaactagataatatgaaaattattaagcatacaactacattttatgcttatgatatgacaattttcatttaagttacccataattttctccccagatcatttggatttcaaagaagagaaattcaaaatttacctcaaaagtgtaaccgacattcgacaatgatttttaagcaaaatacatttattgtttacatgaataaattattttcgaaatcctttttattcccttcatttggagtatgtataaattcggttttcttgaattatttactcgtttgctatgggaaacgaagcgattgagtataattctaatccttcctcgttctttagttctctgcgtctcgttaaactcaagattgaactatttaagtattcattttcactttgttatatggtttatattataactatttaagtgtccatgctcttatacttgtttttacttcaatacattgtattgcttatattacacacaaccaagcgtgtgtatagtaaataccaaaataaatcattctcccaaatattaatgcanattgtacctctcttaaagaattgcgtanacttt

SEQ ID NO: 37462 - DNA, 7164 bp, Arabidopsis thaliana landsberg
gagagtgtcgttttcgggatttgacctgaattttggcattttttctcgtgccaatcaggcaatgggcttagaggccaagcaattcactttgccttttgcttaatgtaataaagaccgaccaaagaaaaatatgtacatagattaataacctcatatcatatgaatatgacctccatagatccacattgttgtactcttatgtcatgatatatcacttcttctctgtatcttactagttacttcagaaacaagacaaaatttactcgtattattcttttgtctcctttttttttatgtttcaaaacttctcttcgattgttctcatagcttaaaccaacaatacaacagccagttttttactcgtgcaaagcgaatctaaaacattaccgataacttatcaaaatcccaaaacttgatcagttttttctacaagcggcaaaaaacagaatacatccaaaatgagtaaccgaccgaaacagagcaccactgccggcatcttcctctgcatcaccatagtatctttattatccggcgacgtctccgccttgggagtaaactggggaacgatgtcaactcaccagctccctccaaagacggtggtacagatgttaaaagacaacaacgtcaaaaaagtgaagcttttcgatgcggacacaaacaccatggtagctcttgccggctctggtatcgaagttatggttgcaatccctaacgatcagctcaaagccatgggaagttataacagagctaaagattgggttcgaagaaacatcactcgtttcaatgacgatgttaaaatcaagtaaacaagttttgatctttcaccacaaatcgaaggttcttcaattttggagctaaatttagtttctttgcagatatgtcgccgttggaaatgagccgtttttgacagcttataatggatcattcataaacttaacttatccagcactcttcaacatccaaaaagcattaaacgaagctggagttggagatttcatcaaagccaccgtacctttaaacgctgacgtctataattctccgctggaaaatccagttccttctgccggaagtttccgtcaagacatctttgaagagatgaaactaatagtcaacttcttagctcataacaaagctcccttcactgtcaacatttaccctttcctaagtctttaccttagcagcgatttcccttttgactatgccttcttcaatggccaaaacactgtcagcgataacggcgttatctatacaaatgttttcgacgccaatttcgataccctcttggcttcacttaaagctttgggtcatggagacatgactgttatagttggagaagttggttggccaacggatggtgacaagaatgctaacatcccaaacgcagaacgcttctacacaggtttgcttccaaagctagcagccaacagaggaacacctatgcgtccgggttacattgaagtttatctctttggattcatcgatgaagatgcaaagagtatagctcctggtaactttgaacgtcactgggggatattcaaatacgatggccaaccgaaatttccagcggatttgtcaggagcaggtcagaagaagatcttaaccggagctcaaaatgttcagtacttgcgaaaccagtggtgtatgttcaaccctaatgccctcactttcagcaacaacactaaccagctcggggataacgtaaactacgcatgtaccttctccgactgcacagctttgggctatggttcctcttgtggtaatcttgatgaggtcgggaatgcctcgtatgcattcaacatgtattttcaggtacagaatcaaaaggcagaggcttgtgactttgagggccttgcaattatcactaccaggaatatttctcgagaacagtgtaattttcctattcaaatcggagatccgacatccggacatagtgatcataaccaccggtttatcagcttctctctggtgagtatgttgctactctttacagcactatgagcttttccagttttgcttcttggttgttttagcattgtttatgcattgtagtatattgctgattcttgtgtcaccactaaattgcaatttgaatcctgcagtttcaaacttcttaatggtattgattagaacactacttcaatactttaactttcagataaacaaacataacccatattcatttgaggaatgcaccattagcaacaataacttgtccattgatccactcaccaccatcactagctaagaaaccaacaacagaagcaatatctttagtctcaccaagcctaccaaaaggactcctctcaatgatattcatcaccgtctcttcactcttcccgtcaaaaaacatctccgtcgcaacaggccctggagatacacagtttgcagtgacgcctaaacctttaagttccttagcaagaatcttcaccattgcttcaacagctgcctttgatgctgtataagctccttgccccgggattaacgcctcggttaacgacgacgttagcagtataatcctaccaccgcctccacgttttagcctttttgctgcttctttacagcataagaatgatcctcttgtgttcaccctaaacaacaacaaacaacactgataatcataattttaattcttaatctctacaatgaaattaactataaagttttttcgattacttgaagatgcgatcgaattcttcaatgggagtgttggcgatggtagggtaattgggattgaggattccagctgagttaactaggatgtgaaccggcgagttaaaggctttctccgccgcgtcgaagagagacttaatttggcttggttctgagatatcggcgaggaacacgacggcgatcggttgcggaacggtgccggcggatgagttgatttctgcggcgacttgatcggcctcggtggatctggtggtgtagttgatgactatcttggcgccgagctcggcgagatgtatggctatagctcggccgattccgcgagaagaaccggtgactatcgcgactcgtccggcgagagaggagactgaggaagccatgaagaatcaaatttggtcaaacgaaaattgacttattagtatcttcgttgactgtgtgactgtactctgttttgagttttgactgtggaactgaacaagtcggcgttagtgttgctaaacgacggcgttagtgttgctaagcgacgccgttcggggtttaagattttggacttctcaaaattctagtacattttacttaagggaggttatctccatctttaattttactgtgtaaccagaatgagaactagagccagaatctaactagttcttatattgttttgttagaatgttgatcatttttgtctaaaacccaactaaaactttgtcattacaactattcagtgtcaaatgttgagaggaaccaatgacaggcagaagaaagattaaacttttataagaaaaacttttctaagaaagatgaaaaaagaaactaatgaatatagaagaagagttgttaggctaagaggtgattgttataacagcttagtcttcgtccatgcctgcaccggctgctgcagctgcatctctcctcggcccacctgctggtttagccattataatctgccatttataagcaccatagttagccacactttgcatataagcatcggctcagtctttattcattcctaaatcagaacaataatcataaacagattctaacattacagaaacgatagatttcgaatccgacgacgagaggcaaaccattggggccaagagaagtgcgggtaatggtggaaagctccttgcaagcttcagtgtttttgatgacggcctcatcaagaccagcgagatgtctgtaaccttctttaagcatcgattgaattccatgagactgcgtagagattcccattgtttccgacgaagatctacgccttgaacgtaaaccctaagctataagcaagtgaggaagctctctgtgtttttttcactcgctgcttcgagtttttgagaaagaagctcttaaaattgccctttaaaaacattttaaacgacgccgtcaagcatcgtctggtttggttcgaattagtggtttggttcgggttaattggtttgatgctgaatttaaaagctgattgatcaaagaatcttcttaatgccctgatatgagcttgttttacaaagaactacagtacatgcattgtttacatcagtgttatttgaatcaagctgaaacatcttcctcttcaacagaggagaaaaagacaattgaatagtgttttttagagacttgcacataaggccaataactcaacactaatcacttccagctgaactttaggttgagactaaaaaaccgggttcaagtaaggctaacttcccgcataacctttgctacatcctctgggaaaacagggtttatgtaacaacctgtgccaatctcaaacccacctaccccagaaagctgaggtacaatctgtaagaaccagtgcgtataaggtaattgtgattctgtaaccttgagtggagaagtatggatcatatagttatacggtggatcgttaagttgctttgctatcttctgaagcatgtgtttcagaagtcctccaaggtcaacagcctgataatcatcaaaacaaagtgagtcaggtgatcatctaaccaaaccataaatggaacatagtagatcagtaaaaggtaaccttaacgtcatcgagatgatggaagtgggaagaatgatctttcggaataatccaaatctcaaagggatacgtagcagcaaaaggaacaacagaaacaaaatgagacgactcatcgatcacaaaatgttttgatttagcttcacagagacaacatttcccagtctcctcgaaataatctttagtaccatcaaggcgtgaagaaaccgttggaggaacaactggtagagccatcatttgactgtgggagtgactcattgatgctccagccgacgcaccttggttcttgaaaaccttcaacatacgaaaacaaacgtagcagatgaatgtaactatgcaagcaacacaaaatatccacacataacacaagtattgacggctaaacaatgtataaatgcacactaatagagctactacattgggatctatggataatgcttacctggatgtaattgatggaatcatgttgcgcaatctgattgatcctcttcttataagcgatcaagacatcgccgatacccaccggatcgatatcggagagctgaatcgaatgaacaggggattcgatcactacgtcgtggaatccgaatccgactattgtccgacttgttcccgtctcaggttgggtcgattgggtctcgagattcctactaagagccgggtacagattctcgatgacccggagtttccaattcgggtcatgatctggcacacgaaataactccggggcacactcttgctcacgaccgatgcaaaatgggcatgaggaaggtttgggattagggttctggggagatttggatttgaaatcagtcggtctcttggctctggcgggagagaatatgacccagcggttagttaccggatctttcctgagctcaggggactgattctcgactgagtcaccgtcgccgccgccgcgatcagaggcatggctcggtgacgtcatctttctctccttcttttgtgtgctctgtagctgcgacacttgtgcaatttcgttaccgttggcgttggacagaaatttagcaatgggcaattccggtttaaattgaaccggaaaactcgaaccgatttgtttcgatctaagattcgaatttatcggtgtaatccaaaccgaagagggttcatattgtattcacatgcctaaacaatcgagattttacactataatcctctttataataagatttgtacaagacaaaggatgtggattttacattaagcccttatacacgtgcgccttactggaacaacatacaagtcccattgtatacgtacgaacgtattaaattagtatattaacaaatttaaattcatgcgagcaaaacgaagcaagcagcaatattaagaccataaacattcgagaagtctacaagctttttattttttcaaaatatagatttattcataaattaaagcaatgaaaataaaataaaaatctaccaaatatttgccagaaattttgctaaagttgatcaatccatccaaagaaaaaaaagaaaattttggaccgaaaaaaaaaaaaagaattcatccccaaatctgcacctcctctcatcttcttcatctccttcaatcttcattatttataacctaaaacgactgaatctttctctctctttatctccattttctaggtgtgcttatcacagctagaaagttcttacatttaaatcgccctagttggagaaagccgtcggtttctcattttgaaatttccaaggagatctgaaagttttaattttttggatcgatttcatcgttatcatactccgatcatcatttctgttcaagggttaatcgtaaatcgttcatcgggtataatgtttttgacatctcgttttttattctgtggtggttgttgtgttttgatgctttgtttcatatatttctcttatgattatctggaaagatcttgtttttgggtgatgatggagcgtgtttttgtatcaaactgtcgcttggttacactattcttttgaatctatatgtttctgtgaagatgagaatctgtattgatggtttctgattggtatcttgagtagtgaatcgactttcttcacagattcttttgatgtgttggtcatcatcatcatcatcatcgaagagcctttgatggcgttttctcgagagtaacgatgattttgttactcttgaaccaaagttgatgagtgtatggtctgaatttggttgcagatgcctgtgattttgattgtttttatctgtttgattggaaagtatttctgtataaggatgacaataaagtgattttgatggaaagacaatgctctaagtgcaagccaatgtttcttgtattctttttgattgtatttttacttgctaacacaacggattggtgtcttttcttttggattgtgaaggaaatgcaaatgaaattggttgggttcacctttttatcaactaaatacgtactctctgcaacctctcttatactcaggtagtgttta

SEQ ID NO: 37463 - DNA, 3926 bp, Arabidopsis thaliana landsberg
gctgaggtttacttggctcagtgctatgctcgttatggggctctggttactatgacttctcttcgggtcagtccataaattaaaatctttatttcatttattagctattgctctaatttacgtaagttctttaattatattcgtgaatcatgcttagtgccatgataatataattgaaaattgtagtaatgaactgtatagaaatgtgtgagaatttgacaaaatttaaatttccgccgcttataattgagaaaatcacaagtctagtcgctccttggtagcacgagaaagttgaagaaatcataaaattttcgttgctttttttttttttgtaatttccactggaaagacaccattaagtattgaataaaatagaattaatcttttgaatcattcgttggaaaattcgagtatcatgattataatatcattggtcagaaaagaatgtttttgcaatatattattcttttctttataggcatagccacccatgtccccattttcaactttattttatatattctttatagcttgatcaatatcacatagtccaaaagtcattgcatcttagaaaatctaattcttagcttgatactatattgtccttatcttatgtactttaatttgtcacatacaatattaagatctttttaaatttgatgtaattttcgttattaagatccaacgaatggagatcacgtggggaaatcaatcgcgatcatcgtaggagtcattgctggattcgcaattcttgttgttctcctctccctttgtagaaactccatgcccaagtctctacttacttgcctaatcttcacatgattaagatttaagatcaaatcactcatttttagtatatatttagaaataagtatcatgatctcataatttttcttatctgatttgcagattgatataatgaaaggcatgattcgggatacaagattctagggacctgtttttttttttttgaactctcttgtattcccctattccttttattttgtaggaggaacacatccgttaccgttccttgctgaaatttttggtttatcaaaaggaaaactattagtgactgatgatataatgatttttagctttgaggtattaaatatttgtatagtgtgacccgtattgtctgccttaaaaagatgctaactttattccattaactagttttagactaaaatccactttccttagcaggcgcaattattcgatactcatacttagataagtagattatcatttccggagaacaacgtgattcgatcgattgagtatcattaaactttaaaaggttctgccggcaaaaaaaaagaagaagaaggcttataagacttgagaggttccattcaatcaattctttggttttctacgatccggatctacccggttctcatgggtttcaccacatattccattgagccattaaattattatggactgggcctcggcctactaagcttctaagccgtgtaacatatctaaaagactaaaacattttccatgcaaccattcctttttttgtattttttaaaaaattaattcaagaaattcttttaccaaaaacatataaacccatgacaaaaatagtaattttcactaatgttacaacatattactccaacaaaattattactttatatattattctattaaaatataactgatcattcatggattttgttttcttttcttttagactccaaatcctgaaaatttcttttatttatatatatatatatatatatcttacccatcgaaaattcgtaatagggggattatgattatatatcactaccccagtatataaaattgaggttcaatccagtatatatagccgtctctcagctcttgaagataataaacttatgatgaagaagaacaacttaaggttgtgttcttgacacatagacgtatacgtttactcactttgatacagagcgttgcactaatttacaacctgaaatgtataacgtaattaatgaagttagtctcatatgcatgggccatcaataatcatataaacaaaagcttacacatactctcacacgtgccttatctctctctccatctgttagattcctcgccaccatcttcatctacatttctacgacaagttccattcttcgtttgctgttaaatacacaacaacaacaataattatttacttaaaacgcatttcaagaaaattactaaacactacaacaatcttataataacatttactaaaaatgtccacgtttgtaaaagtcaccgacttaatcactatcatgttctttctagccattgctgccgtcataaccgcctcaaacacagccgagttggatgtacttgaaatggctagaactgctgtggttgaagccaagactagttttgggtcaatggctgtgactgaggcaactagtgaagttgctggtagttattataaattggggttaagtgaatgcgagaagctctacgatgagagtgaagctaggctatcgaaactggtcgtagatcatgagaatttcaccgttgaagatgttagaacgtggctaagtggcgtgcttgcgaatcatcacacttgtttagacggtttaattcagcaacgtcaaggtcataagcctttggtccatagcaacgtcacgttcgtgctccatgaagctttggctttctacaaaaagtctagaggtcatatgaaaaagagtaagaaaacttacacatacattcatgtatacataattaaataaaatgatacaataaatcgctctgttttatcactaaataacgattgtagactccaagataagtgtaaatttttgtttgagatatcatggtttatctattatggatctctaataacatttggtagggctgcatggaccagcgagacagggccatggaccaacgagaccaaaacatagaccaacgagaccaaatcatggaccaggaagatcacaccatggaccatcaagaccaaaccaaaacggtggaatgttagtgtcatggaatccaacaagttcaagggcagatttcgtggtggctcgggacggttcggcgactcatcggacgataaaccaagcattagccgccgtttcaagaatgggtaaaagtcggttgaatagagtgataatatacataaaagctggtgtttataacgaaaaaatcgaaatagatagacacatgaaaaacatcatgctagttggtgatggtatggaccgtacaattgtcaccaataaccgaaacgtcccggacggttccacgacttatggatcagcgacattcggtataaaatatttaaaattctactattaatcttcatacatagatcatgcatgttgaataattactgcgcttactcgttatataggagtgtccggggatggattttgggcacgggacataacgttcgagaatactgcaggaccacataaacatcaagctgtggcgttgagagtgagctcagacttgtctttattctatcggtgtagtttcaaaggatatcaagatactcttttcacgcactcacttcgtcaattctaccgcgattgtcatatttatggtattatttttaatctatgtactatttgtttaaactcgtatggaagctagtcatgatcatacatggattaagaatttttgggaaattttggaataggtacgattgatttcatatttggagatgcggcagctgtttttcagaactgtgatatatttgtgaggcggcctatggatcatcaaggcaacatgatcacagctcaaggaagagacgacccacatacaaattcaggtaatgttttgtttggccatcttttgactatcaatcaggggtcatcaactataccgaaattattagaaccaaccgattctaatcagattatatttttaaaaaaattgttcatatgaaaatatccaaaaactaatgcatgcgaaagggagct

SEQ ID NO: 37464 - DNA, 1506 bp, Arabidopsis thaliana landsberg
atccaagaacttaacatttccaccatttgagagtatccccaaaatgattctttttatcattttcatgggctttcccatgttcatcctccatctctgcatcaccatccgcggtggccccaccaaaaaccctcgtcgccggtttcctaaccgcacgacgactcgttttcctttccttcgttgttgcggccaccaggaccttgacggaagacttgacatggcatgaactgcgtttcttcttaccatatttccttcttcttcttttttattatgtctttcggatttgatttaaatatcaaagtttggttctctaatttgcaagttcttgaacgtggatttatataagtagaagaagaagtgagtgagtgatgatcgatgatgtgtaaagctcgggatcaaaagagctttaaatcattgaagaggcaatgattatgagcatcatgaaggcctatggtgagtaggataggaggttaacctttttgaataatattccatttcaatctctcaaatactatactaatcaagttaaagatagatcataaatctaagtcaaactgatccacaataatttcagccttacaaatacattttgagttttggggatcgtaaaactaatttttggtgacacatactctaacttcttcaatttctgaattagaaattccatagttagtggaattccttggacttgagattttattggttgagagataaatgaggaagtataagtcccctagcttaattctaatgttttagccgaaagttttcaagacttatacaaagtttccattagtttagtaagaacttggaagataatattggcattttgttggatcattggccactctacgatagtctataaagtctgttagggtaatacagtttcttttgtaacaacagggggattattaaaacatgttgctttcgtctgcaaattctagacctcaagcctacgtttagttgggagaaatactatttcttatcaaaaggttaattatcttaatagtgatttattcggccataggttttgtacctctcgtgctaaccatcattacaattcgtgtacatgtgaccccatgccattctccttttcttgttccaactgcttaatgcttaatgacaagattcgtcactaagtacgatcgatacaatacaactggccgtcgtttctttggtggaaatcaaaatggttttaggcaaataagatcacaattaaaaaataaaaggcatttgaaataaaccgatttattaaaataactggggatttattcggtttatttttcattacctagctaaattcatttataaccaaccataaggtatagaccatttaaattggacattcagttatatactttaggatagtaactttagagaataagtggttaataaatactttggaaatacaccaaaatcatgtattgttggacattcattttaacatattttttttggaacaaaatcagttgttaatctaatactagtagaattcagaagaaacgaaaatct

SEQ ID NO: 37465 - DNA, 3338 bp, Arabidopsis thaliana landsberg
  unsure (1)..(3338): unsure at all n locations
atatggaatttcagaaagaattagcagtagctactcaacctgcagttgatgttaaagttgttggaggggagccttctggtaaggaaacactaaaagaggtaaagggaaaagctaagagacaaagggaaaataaattcaaaggtactcttgctcaggggatggataaagagagtgcaattgataagagagacgtcggagcttctccaggaggaaacttgatcgaagctaagaaagctattgacggttctgtagaagccaaaactggcttgactgaagacaagagacgcaaaaggaagagaccaacaaaacaggttagagattcaaacaagaaacttaggcaagatgtagtagctggtgctgatacaacagaacagggaatggaagagaggaaagagcagccggttgaccctgagaaaagagaaatggatgggcctgggaaagtaaagattggtggattgatcttcatgtgcaatacaaaaactagacccgattgttttcggttcagtgtaatgggtgtacaagagaaaaggaaggattttgtcatgggtatcaagcctgggcttaagctttttctttatgattatgatctcaaactcctctatggaatttttgaagcatcctctgctggtggtatgaaacttgagcgcaatgcttttggtggatcctttcctgctcaggtaacattgtgtgtcacccatgtttgttagccgttttccatttgtacaacttgtctcgaagatgatatcagttttctttcgtcggaatttatttaacttacggatctagatgatgatattctttggattcaggtgcgctttaaggtttttagtgattgcatcccattggctgaaagccaattcaagaaagcaatcatagagaactacaataataaaaacaagttcaaaacagaattgactcataagcaggtgaccttcatattttcatcattttctctaatttatatcttactattaacacgtcttaatcactctgttcgtctcttctattatggtgttcttaaaggtatttaagcttaaaaagctttttcggccagctgcgatccctgcacaagttacccacacccagcaaatccctgttcctcgtgatactgacaggaaaagatctgatagagaccggtatgcccctggtagcagtaggggtcacccaacacgcaaacatgaaagaagacgtgcttcacctcctccacgcagagaagaacaaccgcgtgatttatatcttagtgaaagggagtatcgaacatatggcntgagaggaggagaaacaacccagcattaccaaattccacctccagaatcctcttcttcttaccacattgtcaaccgagaccgtgttcatttggattcttaccgttcatctatggaccatgaccggcttttgagacaagcagagattgagaggcatgaccgtagggaagttcgtcaccctcatttgtctgagagagactaccagacgtatgatcatcttacttctagacgggaaatcttggttcgaaactcgcctgacccaccagattcagcggttactctggattcctacaggagagatccgtattacatttgtgagcgccatgctcttgaaagaccaccaaggacatacatggtttctccaggtagacaagatgatgacctgtattcccggtatgtaacaccggattcattggctgagtactaccgatcatcacaaagatacccaagcgtaactgaacctgagcttccgccttcgttagtaacatcccggtatgcttattctcggtctttgccttattctcaccgctgaaatcagaatgtgtaattctcctattcctttgaatttatctgatgtttaatgtatcttggatatggatactaaagagttgctgccaaagggttcgacttaaatttggtcgttataccagtgggtttcttcaaataatatctcttctatctaatagatagtgctagaaccaagaatactagtcaatgattgcctgttcatattgccagaagtaagaggattgatacttcatagtgcttagttgatataagaagaaatccgatataggtactaaaatcctcaaatcgacatgcatgttgtggattgcttcaaggataacatgaaactccactgaaaaactagcaatgaactctaatataactccagcatagattctctgttatgtgtctatcgtaatacaaaatccgtacatgttctatctcttgaaatgctcttactttcttttcaaaaataaaaaagggtgaaatacattcagcggttcatttcctaaaagtagcaaaatccccttggattcttcacaactcatccttagaaccaacagcatcatcacctcccatgagctcatcaagtgagaattcatcttcctcaatcaactctccatctttaccatcccactccattgtcttcacgatctctggtgttccattcattggcacatttccttttccaccggttccagcatctttcacaaattctctgatgaaataacacgaacaatgattaccgtgttataagagcgaaaatcacctaaaccattgtgatccctagatgaaccaaacttacaagaggtgttgaagctcaaaggcgcttttaagaggagcatatactcctttcttcacattcatggctaccattgctggataaccgtatcctcctacattaactcgcttctccaaatccatttgagttacagccgccacccacataaaactgcagacaatatgaaatttttacataagattctcattatgccttaagaaatgataatatcatgagatgtgcatgaaaaataacgaggcttgtacatatgtgctcacagcaagtcctaacacttctattagaaccctaaacctctctctgctgattgtaaccgttaatactaactgagaacaagacaatgccacagcacagaggttataatctttcttagtatacctgtaaggctgcttcttaaacttctctgcaactgataataacatctcgaggtacttattccttccttcagctttggagtcaagaatgtcaggtaagaaagagataaagcaaatagcagcagaaccacacttcttttccatgacatcctatacaaccacaatggaacaagtgtcaatgtcttggattcgagtctagtagtatttaagaaataatgttaaagacgaaacaaaggatgtgaaaaataccggtccagttagttcagtcacttcaacagggccagcactggattccacaagttcagaagcaaaaaattctatcgctgaagcagatctagcaccctcgtaaggatatggactacttttgtctggaccaaataccaaaattgtagg

SEQ ID NO: 37466 - DNA, 1233 bp, Arabidopsis thaliana landsberg
gaccgaatggtacattaaccttgagctttgacatttacacataaattagataattttattaagatataaatttataattctgttaaatgagttaggttaacccataactcattttatttgatgggttaaattgttaaatgggttaactcatttaaataataatttaattaataattattataaaacaataataaataattatcatcatcattaattcattatcatcaaatttgggatatttacggattcacaattttttcgaaaaaatacttgggttcacccttagggggattcatcattaatttttttatattcacctccttaattttagccaatcaaaatttaccatctaataataaaaataataatttaatttaattaaaaaatctaacttttcattaaaacgaaattatgtatcggtttgggtttattagaggggattagggtttaaattttatgattaaataagtttaaatatcggtttgggtctataaacggatttagattttataattaaacgagtttaaatgtcggtttgggtttagaaagtacgattagggtttagttttttacggttaaatgagtttaaatggcggtttgggtttacaaatgagaattagggtttagattttgtaatcaaacgagtttatctattagtttggatttacaaaagaatgagtttttaataatttaatttatttattttatattgatattattaattattttaattttcttaatcagatgacatgtcaaattctaattggtcattaaaagggggtgaataaatgggttctttgataaaggggaaaaaccccaaaaatacatcatttattttttattttgtcgtttaatatctaacttttttttgttggaagaaaaatacttcagttaattatagagtttgtttgagaactaatacgtttctggaaaataattagaaaattagtacagttactatttaatattttgtttgtactacaggtcgttactgtataatttttcgtgagacccattttgccactctgaagcacacatatttacgattaatgccactgaaaccggaatcgaggtttcctgttgacgcttcatatttctcttccctcagacaactgttttacagtttttttctctcttgggtccgaaatctcagagaaatgacgaagaagaaagcacattaatcgaagattccaatcgctccagtccgagtattatgaagtgctactcataatt

SEQ ID NO: 37467 - DNA, 2207 bp, Arabidopsis thaliana landsberg
cgcccccactcgttatcgtcctcagtactggttttcttcttcttcttcatcttcttctttttcttctacttcttcctctacttgttccttttcttctacttcttcaaagctcctcttcttcaatgttttagcatcaatcgaagtcagtaaatcaatcaaaatcatcatttctattgcacagctcctcttcttcaatgttttagcaacaatcgaggtcagtaaatcaatcaaaattatcatttctattgcacatttggagtgtagtttactctagtctaccgtttccgagaaatcagattctttttatgttgaagttgacactttcatgaagaaaattgaattccagtttcaccaaaattctaaaaataaccttggagatattaaaacttgcctttgattgcttcttcaccatggtagtatcatgattctgatagtagtaccattccgtaagattagccaacttatgggttataggcctaggggccgtgttcagttcctgccaaatgtcaaaatgatttactaggaaaaccaaaattaataaccaaatagagggattaataattgggttgggatgcttacacagagtgcatgatctgtactcttgagatgtgtggtgaaatcttcatagcttttgccttggaagcttctgtctcctttgagggtgagaaactctgaatacttagtaactgggaaattctgcttcttggttagacaagaatttctgcatattgagcaaagccaggcagattcatccatttcacagcacttctccacaagctcccctgaattcatcccatctgtggtcaaaactaactagttcagacacaaatgagtttcaacatacacagagggaggacaaacacctttcaataagctttcccagagcaactctccagaatgaaaagggaaggacgcgtgttgaggatatgccagatgaatggtgtgtcccaaacgtcgtagcaaggaaaatttagtggatatagaaactgagtatgcatcagctccggaaataaatattaaagtagccggagttcgattagaaaatgcccatgatgacaaatctctccaaaacgtatctgaaatctgtttcattcaaggaaagcaactcaatacacacagccaattgaatctaaaccagaaaatatagaaacagagaagaatattcaccgttgaggacgtttttaagaaggattcaagtggaagagatagcttaagaacaccaggggttcgttttaaggtgtagttaaggtagccaatggcagtgattgtgagaggaccgggtagcctgccttcttcaactccgattctatagagtgagcgaccattctagcatcataaccatcgggaaccggacagctgttgatgtcccaccacaccatcgtttttggctcctgcttcgcctcgttcatatttcttgaatccatggttttcaacatacaaatatcagtcatcctcaaaattcggattaacaaatcgcttctttactcagatgaaatcaccgaccgatggatggtgcggcggaatagggcaagttacacatgtttaccgatactagtggctgttttatatgggctcagattcgtggcctattagttacgggcccacaatttttccttttctttttcatctggtatatattcatattaagctgaattatgtacaatactcaaaatgtaaaattgtacttaccaaaacaaatttgtaaagttttaattataataaggcactagtttacacataactaaccaaaaatgattgcaaagtatactgatatcgatgtagtgtggaattcacttcaacatgttaccttttaaaccatattaggttattaacccccgcatagcggggatttgtttttattgacttttttatttatttttgaccaaaataatatatttaagtaattatttatacattgacatttgtaatttaaaaaaactacatgatgtttattggtttttttaacagaaattttttatttgtatatttatattatttgtagatttgttatttaaaattttatttaattaaaaaaagattatagaataaaacaatgattaaaatatgtgataaatatggtgtgtattatttctctccgcttttatattatataataaatttgttattagtaaagcaaaaataaaaatattttgacaaaatattaaaattaaaatgccaaaacatgttcacgttttctgtagagaacg

SEQ ID NO: 37468 - DNA, 6125 bp, Arabidopsis thaliana landsberg
  unsure (1)..(6125): unsure at all n locations
aacaacaccgagttcctatatccaacaaggttcgagctgtgatcaaccgtgaagaaaaacgggtggatcaagtaaacggcaaaaaaagtacaaacaaaccactaataaactcttctcaatttccatggcaaagatctaagtatacgggatcgaagactgttactgcggttgtgaaaatcaggaagaagatcaaagagaagctaacagagagatttgagcatcaattagagcttttcatgaaagctattggtcaagggatgttgattcagcttgtcagtgaagaaatcgatcctggtaaattatctaaaattcaagtttccttttttagattttgagaaatcagtttgttactattttgagctagagaacaaagctaaactgatcacttagattttgagtggcggtgaccaattttgttcggttcttctgtggattttattgcgttagatttagcttttgattcttgctcgcattttttgctttcttgaatctgccttgatcgccttgtgcttgttcctacgctgccttcaagatgacagctatttacttgatcataatactcgattagataaaagacccatgggccagtcataattgaaattctatccttcctttgctatcaatgaccattatgcttgacacgttggtcattctaaagattgtatatttcattactatattacgaccaaatgataaaccgaatctttcttcttacttgctagatctgaaattaggcatagcttacattacaccaatttttgtacattattattttcttagattgccttgttcatttataaggcagatcatcaaatttatcaacccggttgttctttttcggtagtatcctctcggtaattggcccatagtttttgagtactttgtcacacaattattaaatcaaatgtaaatgcgtagggtcggtataaagttattgagagttttaaataatttagaaagaaaaaaaaagactcttgacttttcatagtttcatcatcccttttcttaatcccacgtcaccgaatgtatttaatgcatatttgttttgcttaccacattttttagttacatgttacgtatagagattagatatgtatatgaatagcttcttgatattttgcagaaactggtaaaggcagaaagagtttagaatctcctgtgatgggactcccaaaggctgtgaaagatccgagatacctcgtattcacagccgatttcactgtcccgattaactttggtaaacctggtgccattcttgtcaccaatcttctttccactgagatttgcttgtcagaaattatcatcgaagattccactgacaccattctcttccctgcaaacacttggattcactctaagaatgataatcctcaagccaggattatctttagaagtcaagtgagatatcttcttctttacgtcattgaagtgtcttaaaatgtgttttgctaacaagtggaaccattgtttcatagccatgcctaccttccgagactccggatgggattaaagaactacgggaaaaggacttggtcagtgtccgtggtgacggaaaaggcgagagaaaacctcatgagagaatttatgactacgatgtttacaacgatttgggagatccacgtaaaacagaacgagttaggccagttctaggtgttccagagacgccttacccaagacgctgcaggaccggccggcctctcgtttcaaaaggtgattgatctctctgtcactcactttgcatagttatggttcatagagagaacattttgtgtagtaatatataagttagtgtgagacatttttgtggttcttgacttggtgaattcattcagatccaccgtgtgagagcagaggaaaggagaaggaagaattttatgttccaagagatgaagtcttcgaggaaatcaagagagataccttcagagcagggagatttagggctctctccacaatcttgtacaatctattgcagcagcattgtcaaacttagacattcccttcacatgcttctcggatatcgataatttatataaaagcaacattgtcttgggacatactgagccaaaagacactggccttggcggctttatcggcggtttcatgaatgggatcctcaacgttactgaaacactgctaaaatatgacactccagccgttataaaatgtaactttgtctatgagattctctcattcagagtaatatcattttcttaaaccatatacatattttgaatcctcttttatgtgttgttttcaggggacagatttgcgtggctgcgagataatgaattcggacgtcaagctcttgctggtgtcaaccctgtgaacattgagctactaaaggtttgtttcattttaccatttgaatcaaaaatcttctatgaagagtttttgaaacttttgaaatgttttgataggagctgccaattcgaagcaatcttgacccggctctatatggacctcaagaatctgttctcacagaagaaatcatagctcgagaagttgaacattatggaactactatagaaaaggttagctattagtgtacatttttctggttgagataaaatcttctcatcttgttgatcgcgactaatgcaggcgcttgaggagaagagattgtttcttgtggattaccatgacatactcttgccatttgtagagaagataaactctatcaaagaagatccaaggaagacatatgcttcaagaacaatcttcttctattcaaagaatggagccctgcggccattggccatagagctctcgctgcctcctacagccgaatccgagaacaagtttgtttatactcatggacatgacgctactactcactggatttggaaactagccaaagctcatgtctgctcaaatgatgctggtgttcaccaacttgtgaaccactggtaaattaagttacttccttgctttgtagtctccattgatgttttcaacagtacataatttgtgttttttggcaactatcttaggctaaggactcatgcttccatggagccttacatcattgctactaacagacagttgagtacaatgcatccggtttacaagctacttcatcctcatatgcgctacacgcttgaaatcaatgctcgtgcgcgtaaaagcttaatcaacggaggaggaatcatcgaaagttgcttcactcccggaaaatacgcaatggaacttagctctgcagcgtacaagagcatgtggcgatttgacatggaaggacttcctgctgatcttgttcggaggttaaacatttttgctttgtttataacaaactaacaaactactccgttttaatctctcgctaatgcagtctctggcttcatttacaggggaatggcagaagaggattcatcagccgaatgtggcgtgaggcttgtgattgacgattatccatatgcagcagacggtcttttgatctggaaagccatcaaggacctagtggaatcttatgttaaacacttttactctgattccaagtccataacatctgaccttgagctgcaagcttggtgggatgagatcaagaacaaaggtcattacgacaagaaagacgagccttggtggcctaaactcaacacaacacaagacttgtcccaaatactaaccaacatgatatggatcgcctcgggtcaacacgcagccataaacttcggacagtacccgtttggagggtatgtcccaaaccgacctaccctgttgaggaaacttataccgcaagaaactgatccggactacgaaatgttcatgcgaaaccctcaatacagctttctaggctctctaccgacacagctccaagcaaccaaagtgatggcggtccaagaaacgctctcaacgcattcccctgacgaagagtacttgatcgagctgagagaagtgcaaagacattggttccaagatgaacaagtggttaagtattttaacaagttctcggaagaacttgtgaagatagagaagacgatcaacgagagaaacaaggacaagaaactaaagaacagaacaggtgctgggatgcctccttatgaactacttctccctacttcaccacatggagtcactggccgtggtattcccaacagcatttccatttagatgtatgcacaacagatttgtatcattattatgtcttatatgctggtagagtctctaatatgaggttacttctttttttttccaatatatcaatgataatattatgcacaagaaggtttaataatctctcactgaagttgacggccacatggagtcactggctatagatactctaatgttggagcagagcttagttgcaatattttttgaagttgacggcctcatcggtgaggaagccactgcaaaaaagtaaaattttaaatgttcagaaggagaattagttaaataagacatctaagatagagtccatagagactaaccacagtcgctcagccatgcgtcccacttcccatcttggactccatgggaactcagtgaggagattcgatttcactggcacactcgattggtttaaatgctgcatataaaaagcttgtcaatttttataccaaaataaataaagagaaagtcgaagccttctacttagttcgtttacaaatagttttgatacctgacaactttgcagcatcagagttggttgctgcttcggaaattgagttgaaaagaagaaatgaacctacagcaaagccaaaaacccaataatccactgctacatatttttgtgaaattgagatttctctagaagacaagtatgaaaatccactttggcaaagattgaatagaactttttaaacaaggcttgaatagtgatagaataattaccatgaaagtaaattgtccagaggcattaaggaatgtagccttacggcaaaaggtctagcaagaaaaacaaataagaaagttaagaagctcggaaatagttctaaatatatgtcaaggcgtgcgaagaaatgcttacaggatcggcttcaagaggtcttcccagattaagacttaatgcctcaataaaactcctccttaaatcaattgcagcaacagcttcatggatctagaaattaaggtaaataaggcactcgcactcaggaaattaagaagatttagtttaactgacctgtctctcaagtgtttcttcaagatggggaagatattcagccaagcacctttgaaatagaaatgtaagtattaccgattaatacatgtatggtttgcaggtatagtgaactgtgtgtacatctgtaactaacttacatcccgtccatccatggagaaagtttaacatcctcaacagagaatagcgattttaaatcataatatgatactaatttcaaaccaggtgctgacggtgctgcttcatatttccgaagaatcgggtatactacctgcatccgcaacaagtttctcaagaagacgccagcaattttaacagagtgaagaaaaggataaattataagaacgaagataaaacctgaagataaatcttctgctgatgcttccaagggcagccaaccaccattttgtttatgttcatatccatcacaagaggtactgcaaacttgacttcctctggctacactaaaaaataaaggcaatggaaagtcaaatgcctctaacttcaaaaagaaataatcaaaaatcttgacaacaataaataccttgtcaactcctgaagccatttgcatttcaattccctgagaatcagcaaacaagaagaacataaacattgagaacaataagaaattctaactaaaatagtggttacagttgttccaaaccaaaattacttatcaaaccgttgttagtaacaagcctaacgttaaacagaatctatatgctcgaagaggccttagctacacaaacaaaactaatcatgattcctgatgtaaagaaagtaacatgagtgataccttgcgagttaagacggtgctaatctcaaacttaacgcgatcatcatcaacttgacccacacgccttctttggtaagccacatattgatccctaaacgtcgatcaaagcgaaacattgattgagccaagctcaaacctcaataaaaaatatcaaattctataacagacaatagtgataaaaagctntaaaggaaaaaacctcaatccttgaatgat

SEQ ID NO: 37469 - DNA, 1602 bp, Arabidopsis thaliana landsberg
gatttatcccatatttagattgtattcatgtaagttttgatccggcgttataaatatttttcttaaattagtaattctaaattccaaatttaatttaaaatttgacatcatttttccctttcaaggataaatttgtataggattttagttatttaagttttaaatcattgtttatggtatataatagatatttaataaaaccatacaatctggcgatgtacaactatttgatccaattgtctccgaattttaaataggatattatcattgtctatactcggaagactccaaaattaagtctccaaattttcaacagttcccaatggtatatgctgactataatgacacatgtgcctctatattgtatcagacgacaacataatttttttggtttcttttttagttctgatccaacatctgttatacgttaacttagaatattagcatatattaaatatttcttgctaaccctatttccgaagaagctattaccgttgtacgctaacatttagatgctaaccattttaataaaccatttatttttatattgttccggttaggtggatttgatccataaataacatttattcgataacttaaattttagcatacactaaatatttgttgctaactctactccagaataaattgttaccagttgacgctaacatatagatgctcactatttaattaaccattcgtttgttttatactattatttttgatttttcctctatgagtagatgctaactattattgttccgattcaagtaacagttatacgttaatgtatgtattaacctaaatacattagtaaatgctaactctgattcataacacatgcattcaactatctaatacccttttatgtttgtgtggatctgaggaataaattacgttatgcgttaccgtctatattaaagtaagagaaaacttagcaactaacgtaaatattatgtaaacccttctaatatccatttgtgtttggggtggaaccttttgttgttctgttataagcatatgttatcctttaacatatatgttttccttcactaatgattagatactaacattaccaaaaaactctattcactcgccaaaaaaacgtcttcttatcccagctaaggatcctacaaatttttactttgttgttaattaattttattttttaaaggagttgttaatagataacatttttgttatcgtgatgggtcatctgtatgttgtcctatttggcagggttttgtccctttatttaatgagaatattaaatttgcatgtttctttgagcaatagggttataatgagaatattagatttgcatgttttattacacctaaatatcagaatgtcatgtatactttcttaattaattcatcctccatgtatatatatttaactaacccttttttttttttgtcaacttataaatttatgacttaacttttgggtaagtcaataaagacaaagaaaaacatacttagttgacataaaaagtaaaattagtagaaaatgaaagagttgacaaaaaaaaattattaaaaaaaaattcttgaagaagtttaaaataaaaaattctttaagaattaaataaaataaatg

SEQ ID NO: 37470 - DNA, 4199 bp, Arabidopsis thaliana landsberg
  unsure (1)..(4199): unsure at all n locations
tgaagctctctctcctctttgctttgtgataaaaggaaactctgtgctcgacgtggatcgcacatattgggctattgggcttatgcgaaaaatatattggatcatgatgaaaaggcccacttacatttttaataacttctcagcttaatatctacaagactacaactgtgcgcaagcgccaccgttttggtgttacaacgagactacagttttgttttgggttttttctttttaatatgataaattgcatataaacatccttttccggaaatttaacaattaccatatgcgctatcaaacagtcaaaagcatctcataaaagcatcttagccatacttctcataatttgcaatatataataaatccagatgttaaaaaacgcatgttaatcgatataccaatcgtttaaatcgtttaaaccgtttaataatgctcaaaactgtaaccatttgcttccacaccctttggtcctttttgctacgttttaactgttcactatagttttaaaattttgagccattgcttcagctactaacatggatttcaaggcagttcagtttgaaactgattagaaaagcttgatcctaacacggattggtagtacacaagaagctaaagttaaattattatcctcattcctctctaccatatatatctgtattacatttttattctcacaatcacccgatctccttgaaagaacccaatttagtaaaaacagacaacatttctttagccttctcatacaagaaaatatatataagcaagacctttttgccttatataaaaccctacaccacaaacaccctttcagtattactcatctcatttcaaaagcattagagattaagaaaatcatatttatataaaaaaccacactggcttatacgaagaaccttagaaataaaacaatggccatcttacggcttacgagcactgaggagcttaacatcatcgatcacgggcccacacagtgatgagaaatcatcgcttctcatcgagtaaaatgtgctgtaaaacataactcttgtgcgggtcgaaaccgccacaaaccgtagagaagcgcgtttgaaccctcctttgcctcgagactcataaggtacctttagagtgtcttttcccgcaaatgcctcgaccaccatcgatccttggcaagcattgttagcatctccaaccgcaaacgaaagcacgtaagtttttcccacaacggtcctagctacctgagcgattgcgctttctttgcctgccactagctccacggctcgacggccttgtgggaccgagaaatgctcgacatcaacgtatttgatggctttgagtgattcgaccatccacgcgggtaaaggagagtggtcatcttctataaagggaggaaccagaacgccggttgttgcgtttgggagtacgtaggnaccttcttcaaatcctccgttcttcaatatattctctgttttattatataatagcaaaatcatatcaattaatttattgttctgaatcttggctaacacatgtcacgtcatgtaaccgatccattaaaatatgttctaacaccaaaatgactatacttataagtggccacataaatcaaatccaaccaggccaattttttgaaaaccataatggaaatagaaatactttacaggtctaccaaataacccaaaccaaaaagtttatttacaagtatctagtacatatattaaaaatagatttataatgattaatttgaaaatatcaaaactggactaaaccaaactgaaattttgacaaaccaaaccggagtgtcaaatgtcaacccctaaggcctaacgataacgagttaatacataactacatatagttgtaacatgatggatcacattgcgtgatatctgaaaaaagatttgattatacaaactcaattcatataataaatgaatacttactattggtgggccgaggagggtatagagctttgattgccacaccatcaatgagtggtccacaagcaggatcttcctcctcaccaggattatgaatcacgatctctgccacgttactctcggcttggaacgcccacgcgtaaaggtcccatccactgctactgtacaccgtctgtataggaataacgcctgagtcaggtgccaccgatatgttgagccgttcgtcttgggcacatgtccttgcggcactgaacgtcagtgagtaatacattccttttgtaacgttaagtctttgtttgatcgatgcctcgttgcctagccggattgcgaactttccggccgggactacgagaagcatgtctccttgtttttgaccggactttatgtattcgacgaagcctgaaagctcccagctaggaatcgccttcttgtttattacttgcgttcctttcatgtccgatggttttggtcctagttcaaagtcgccgtttggtaacatccctgcgttgaaattacaaaattgcccaaattttttgattcaacgctcatataaaaaagtggtctagtacttatagatgttcatttatagtattatgtgtatatagtattttctgcagggttaacaaaaacacaacaacatggatccgaataaatatgaggaatggtttatatcccaaaagaaacataaactgggatcggcaaataaaagagaatttcgtgattggaccatttttatgtcacatttgattgaaatgtccagagtgtttgtgtcagaaatgggcaaaaaggtaaattagactcgtgaccgacttacaaaatcaatcaataataattattaaagaaagaaaaaaacagtaatagagagcnnnnnnnnnnnnnnnnnnnnnnnnnnnnnnnnngtggctatcgagcgagggttcacgggaggaagttctaggttcgtaaatcgtaatcttcttcctcagttcggggtcaacttgtaaactatcctctattaaaagcttcgtacatcttttacaaataaggttcaaactagggtgcaaaacattactctaagaccactagactacttacaagtcacaaccaaacttttttgtcaaaatgtctcgtcagggactttggatagaaactcaacagaattaagcttcgattcgctaaaacagaatttaggttttaaagaaaaatgtcactgaaaatgcaaaatcatatatatacgcttaaacatgattaagtacgtctatgtatgtgatgatgattaccgtcactgaagcaaatgacggaagtgatggtggcgattaggagaacgaagagaaacgagaggctgcctcctttcattgtggacgaccaaagtaaagagaagagactagaaagtgatatttagtaaattatgggaaattgggagaggagccagcaatagcttatatggaagtctaacttggaaaatacctctagattttactacaatttacggatttatgccactgatgtgattcacgtatccacgtggggccgtgactcactcttttggggtttagctaagatttcagaagatcgatcagagagggttattcctggaaactccttttttttctcaatgattttgtctgccgtctgattattatcatccttaaaccaaaaacaaattataaggccagtagtacaaaacaccttttggacataccaaattatgtttataaatatggctttaatagttaacatatatattaatgacaaatttcgacgttgttagttgttactatgcatacatttgcatttagtgcttgttaatgttaacgccgaatctccttttatttttgaaacttatactgctagtatttcttttgcatgatcgtagacaaaataaaacattagacaacttttgcatgttatatgtgttaattaaaagagcattaacaaaagtttgtgttgatcatatatccacatgcatggtcaatgtatcaacacaaatgccaactcatggagacatttgatctcatatctcattatctgtctttatacctacacaatactatttgatctgctaattattctagtattaatcgtaaatcattacttggaactagtcttgagaatattttcttagtagaattgcaatgagtgaaaagggtagtttgttgatttagtcatttggtcgagatacataatgtatgcggtggagttgctacggggaggatcgtgtgagctttctttgtcactaaagttatacgaagctgttggatctcacttttttagatttgcgtgtaatttattcgattt

SEQ ID NO: 37471 - DNA, 2718 bp, Arabidopsis thaliana landsberg
cttgtgttctgactccgttcttagcaacaggctgcattgtttggaaagaagaagaagagctagcaaagtctttaagatttggtaatggctttaaggcttccacaacttcactcattttcggtctggctttggagtctcggttaaggcattgcgccgctacttgtgtggctttctgagcacctttgatcgagtagtgaccctctaaccgaggatctaatagccggtaaaaccttttcttgtctaagagatgaggtctcacccattctaccaagttctgttccccgttcggccgacttttatccacagatcttcgtccagttaatatttcaagtaaaactactccaaaactgtatacatcgctcttcgttgtcagatgtcctgatgttcatattaaaacttctaagttcaaaagctcaatctataatgcgaaaaccaaaaacaagttcaagatagctgacttaccagtcattacatattcaggggcagcataaccataagttcccatgactcgggttgatacgtgggattttttctcgtctggagcatcttttgcaagcccaaaatcagagagctttgcattatattcctgcaatgggagcatttttttctaaaatttataaacatagagagaaaggacagagttgaggttatcgggttaagtggctttcagacataccccatccagtaaaatattagatgttttgaaatctcgatatatgactggcttctcagcttcttcgtgaagaaaggcgagacctttagctgcaccaagtgcaattttcattcgaacagaccaagggagaggtaaggtccctgaacccaaatgaaaaaagaaaaacatggtaattagacgagacacctcaaagccctcagaaagaagaagatgtgcagaggtttgcgatagacatatttctgaaaagatggttctccaaacttcctcgtggcataaactcgtaaacaagcagcctttggtcttcttccatgcagtagccaactaatttaaccagactggggtgaacaaggtttccaaggaagttaatttcagcctgcacaaaaagagcagaactatcaacattgttcatagaaaccaaagcacgaaaccataaccagaatcaaggtaaggaaattgatcattaccagccactccttgtgaccttgaaggccatctgggttcagtgttttgacagctacagttagaccagtaccaggcttgacaggtgcagttccattctcctctatccatcctttaaaaacacatccaaacccaccctcaccgagaagagactctggtctgaaattcctagtggctaacttaaggtcgttaaacatgaaaatccgtagcttagaagaatacttcaattccccgctcattagaggtgttgaggaaccgctctccgcacagccagtgtctttagtcggagctggatgaccttcaagcttctcaataacttttttaggttctgctgtaaaatatatataacaaaagaaagtgagcactaaagaattgaagtatagacgaaaccaagtcccacactcaagcagtaagataaaaggtgaagcagatagacagaaacacgggacagattgtaggatactacacgctagaaatgaaggcttgttatagaatcaagcgtcagcaaaagataataatctcaacaacaatctcaaagcaactttgtcatctacacaaaaacataaatacaaacaaactttaaactttatgatatgtatacaagggagaaagagattataccaataacagcagtagcattcatggaactatcaacttttgatctagaagagatacaactaaagataaacttgaatctaaaccaaaacccactttcactctcatctccatctttcttaacattcttttttttactcatcatcttccctttttcacctttctcaacacccaatttctccaccaccttaaaagactctaactttgtagccatgaaccctaattccaaatcaaatcaccatagccaacacacaaacaccaacaattcaaaaaccaaaaaaagtcaagcgaatcaaccctagagtagatcactctctctgatcacatatttatgtaccaaaaaacaaaactttgatcaaacccagataatgaaatcaatagaaagatgaagatcaacgaaacccaattctctcttaatataaagtttgatccttttttcctccaaaatcgaacagaaaccaaagatcaaaagcaaatggtaaaacccagttcagtagaagtgaatttgagctccttaattggggacaaagaagagaaggaagaacaaaagaaaacaaattggtggagaaagttttagtcaaaaggggagattttttttgcgtgcgtgagagctagagagctacgaaagggcatcttcagagagagagagagtgaaagtggtcagcaacgggcagattgggcagcttgagtaagagagataagtaatttggtcagcttgggcaacaaataaagtacgcctacaaatcttatttttatgaaaacttataatcttgtataatgtttacactaatcttacttaaattgttataaaatacgcgtacaagaatagaaatttaatgatgattgatttggtcaatataatctttggccaattatataaagttttttttataacaattaaagaaaaaattatatatttatttgtaagaactttttaccatatgttaataattcaatgcaataaattgaat

SEQ ID NO: 37472 - DNA, 2955 bp, Arabidopsis thaliana landsberg
  unsure (1)..(2955): unsure at all n locations
gttaataacgctaatcaaatattagaacttcaagttaaaacaattacctatgaccccacgaccatcacttcctgccgcatgccatatggtgcaaaatggctgaaaaaaagtgagaagatcttaaacaaaagtgtaaagttgatcttattttctccacatttaaaggaatagtgtgggaaaaagtaagcaaaaagaaacagaaaccttaataaggcgatttttgtggtaaacattgaagccttgcacatccacatgatgttttgcatccttcacaaatccaatggtcacaacagcagacaactgtgaaacatgtagcacaagcagccaaatttttaagttataaagctgcttaatatctttgacaaaattacaggaagaaatctaactatgttaaattatgaaaagcatacatttgagtacttagcgcatccatcagccgcttcttttggccggtaagtaattttttcggtctgcatcatgtcatttactatgttgtgatgctcaacatcttttcctcggagaatgatacggaactcatgtgaaatctttaggtagagaatagaggcgtaactctgtgaacataacaaaaggtaacaaataaaacctttagaagaaatgaaaatgcagccaaaaaataatgggattcatatttaagaactatcgctgtgattttagcaggagactgaaccaaactaacgtcgaaaataaccacaactaaggaaagatggaaagaacgtttataccctgagtgagtgcttgtacgtcaggtaatgtctagagttagggaattgagaagccataacaatatttttatcatcccgattaacccctcgaagctggatatcctgcaacaaacaatatgtcaattacatggagacagaagcttctgcatcattgaagaacataatctatgtatatccagaaataaaaacatatacatgtggatcagtgtcaaaatcaagttctagcattccttcgtcatcttcccagaggttatatatgattatccttgtgccatgtttcttcattagattaaactacgacaaatgaagcaaaaatttagtgataacgtttgttcacagagacagtaaaggggtggtaatagatggaaacccatatcaaaggagtgacagaataaaagaagatcaaatagcttagacgctctcatgcaaaatttcttagtatgaataagtgattaagcaactgctttgaacaaagggaaaatatacctgatgaagaagatcttcttcactagagaatggcgaccattgaattattgtttccacatttttatcccaatctctcgtggaagaccggattattttactccattcagggtcccttctttcatagtcaagctgtcattttaaatcacataacaagagaatataaggatataatgaatacaaaattcttttaaattagaaagtatacgttgtggacataagacatattagtgcttcacacatcctctaacactgaacaaagattgcaataaatagtgtacacgtaaccagctgatacgtgccactgaatcccatgttaaccaaagattagaagaatcatgttgttgaaccaagcaattgaatggaatttcatatcagaatacaactcataatagagcatgaagttgttctctaacaatgccataaatgaaacaaagaacgattaccatgggaacaacaatgtcctcctttcctgtgctccttagaaatgtatatgataggagtccgatgctctgcgtagagctaaaaccaacatcaagtaaattatctattaaccaaaaattataacttcaactattgttcatattcttcgggaatgaaatacaatccaacaaaaatgataaaagacatgatagccgaaaggtgtaacacattgataataaacaactaacctctttccatctttcccagggcaacgcgagaaaacaataacatcagctccaagtctcattgtactagtcttaaacccattgccatctataagcagtaaataaattaagcatcttcctgcaaactttcgatataagtcggataaacaaagaataattacattgtccaatggtgtttgcaagtttgctttttgcagagtatcctagagacatgcattgtcgcattttttcagggtccatcccacccccgttatctgcagttcaaaacataaggattctcgtagtacatgagtggacaaaagtgttgcattttaggcaaccaataaccacatgaataaattagggaagaggttctttaagaattgctaggtaaagtgtataccttcaattaataacatcctgtttccccctttgttgttttctagcatgtctactttaacataagtagctccactggcaacctgatatcaacgagagaaaccattactacacatcatacaatctgtctaagacaagtaaagaaacaaaaacctacctcatccaaggcattgtccaaaagctctgcaaaagctgcataagagaactcagataagctcaaaaaaatagaggcaaactcgctcatataaaggttgaccaataagaataatacctccaagagcccatttgtgactagttgcattagaatgcaaaaactttggatggactcttacatgatcaaaaccacctgagacacaaattgtaacactcaaaagttttgttccgaccaacattccacattactgtctaatgaataaaattaaaatttggtttacctgaagaaagatcccagttatcgccagctgctccttcataatctccagctttccaaaactgcttacaaccgccaatcttcccagacgtgccggcatacggtggcggcggcggcggcggtacaggcctgaagacattacacggattcgcaggaataggatgcgtcaaactttccggtggattcgattggccgaatccttccggtaacccaactcctaactcagcagtgttgntaccttcttcacattatt

SEQ ID NO: 37473 - DNA, 3042 bp, Arabidopsis thaliana landsberg
tgtggccaatattttctcatatcttttgagaagggtacaatacttatcttcaagatctgtatgtttcttggttttaagcccatactagctatactagctttgatgtcatcatcttggtttcatttatgtcttttcttgaaatctaattagccctttttgaaatatcttacagagaaatatcagtgaactggataagatcatttggggtaaattcgatcatttcccttatgagtaggctacagagacaaacatctttgatctttctttgcatttattgtcttagtaaggcactttggttcttttctctcatattgtcaactagcaattaaggttttgtctaccttacttttatttcagacatatacatggcctttagatgagtttcaggaccagatcttagatatgttaggtaatatgacactttcattgatttaagtttcctcattaatagctctttctgtcaatctagtgtacgtttgatttaaccctttcaagctaagacaaaactcatatctctctctcttgagtcttgagactaaatccaaaaaaggtaaaacttggtggagccaatttttggaatgtctctctgcttattttgctgaatttgagatctgtgtttttaactgaccataatgttttgttttcactctccaatcatttgtcactctttgagtaactttttcttaggtgcaagaggtctctaagaaacccttttgatttgatcatggactcaacaagacattcttataagtttacaaatctttctcactcagtagaaattatagataaagagagatcagagattgaaatctttttcttttactttcttgcaatcactgactataaagaagagatgattgtgtgtgagaaatcgagctgttgctgatccttcttcgtgtttcgaaactcttaggtttagtagtctccattgggaatctaggaacgtaactcggttgtgtcttgttcatgctgcttcttctgtctaaatcaccagaaaccataacagatttatgactcttgcagctcatcaagaaaccattccctccgctgctgctactcgatttccgtctctgcggtgctgatttagcggtaatagggattcgaagaatatgagtaggtcggtttcttctttctggttttggtgcacattctgacataacagagggatggggtgcacttgctgtcactatgctccactctacgcttacttcacttggcgcataacacgttggtgaagctggatcacttccttgcctcgaagaaaaggcttagggttccctgtaagaccctctatctcgaaaagatccgagcttgaatcactcccttcactctgtgtgtcgtcctcctctgttctcgatttccatggaggcaatggtagtttcttctgaacaacactactcttcttctcaatagccactggagatccaaaaacttcaagagacttcctctgtgataactcctcttgcttctgaatcttgatcagttctgtgttcatatccgcagaagatctcattgtgataacagagatattcggatcagcgcttctcttgaccgaggttttctcgtcgacatctacagaatccccatcagagcaggcgcatttacaccccaaatttgcgagaaaactcttcttattattggtcaccttttgaatctgaccattactgttcttcttctccttgaaggaactgttgcagctattcaccagtttgttctgaagcaacacgctctgactattccagcttgattcagaccggacactcggagttccagtagatttcttcgcgctctgcttcgagtcgacgacggttctctcaacttctggatttgtcagagacaggacactagaaccttggtcagaatccatgtctccattgaagtacttctcagctccaaacacactgatctccaaatcttcagaagctttcttgttaattccaagaacatcattggtgataccactcattaggttcttctgggtgagagcatcttccttgcttgtcaagtaagagaaagaagtagaagaagaagagaaaggaccatagagattgttactgttattattattgttcatcatgaaatcaaaagatacgtttggagttgaagaagatgaagttaaggtcaccattttgtttctttttgtgtattactatttcttagggatgatttagatttgagtaatataaatagaagaaatgaggaagttccttgtttttttttttgaagctatgtcgtgtgggttccattactgggacaagactgcctatttgccagtgattttgtgctaatgtataaacaaaatattaattatattttgtcttggttataaggaaaatgaaaaaagaaaaatagtggacatgattctcccaaggaacaaaattacaaattagaagacacgagggatgtacgtattttgtgatatactgacaaagacttgtcgtcgagttagttggtcgttaatgggctttgggcctatactgacataaatgggccttaaacaacgttattttaagtaagtaacggtttttttctacccgctcgttttagtcggatcttatcctcttcctcaatctgataatcgtgttggttcatgtgtggaagttctctaagaacaacagaaaatttcaaatggtttctcagataatctcgtgtttatctcaatcttcgtctcttctatgtttatccgattcaaggaggttaattcttccgaagacttgtacttgcggcggtttgagccggttttctccaggatttgctagccgccggttatttacggttaatcggaagaaatggagatcggcctgcattttcaactctggaaaggaacctggaggagagggaaaggttactggatcactgactctatctaaattagattcttgtttagtttccggtctgaatttttctgaggcagctctatgtaacttgttcaattgaatccaaattctattggaatgtgaaaaaagactagacctttgagaaattatttgaagttttgattgttatatttgttgtagttacaaggaggtagctcagagtggc

SEQ ID NO: 37474 - DNA, 5616 bp, Arabidopsis thaliana landsberg
  unsure (1)..(5616): unsure at all n locations
aaaataataatatgaaaatgagttttcccctgaataattactagtttccaacaaacaaaaactacattaaaaaaatatatgaataacacatgccgatcttttttatatgattaaaaacaaagaatttatctattttttcgtcaaaaaacaaaaaaattaatatgctcaaatgaatagacatgagttgatttaggttatttttgatgaaataaattctattaatttttaactgaaaacatgaatgaaacggtgtaagctatattcataacatttgtacatataccttcgactttggcttctgttgcgttggtttcagtatttcgttctaaagtgttcctgctaccttctaccactacaagcaaaaatattacatacaccaaacgtgacattacaaaatcagaatattttcttccccacgaccgttgggatattaataaaaaaaataaaaaaaattgaacagtatatttatagattcttttttctttttctttttttcttttttttttcttttttttgattttattgtgagcaaaaatcaaaggagattgaatgatgaaacatgtttatatagtgaggagatttttcgaaaatagaatgccaaagttttggcactaccacatgttcactaattgcatgcctgtccgtctaattgagccgattatttggcctaatgcttgtgtttgacatttaatttcataacgatgatgtactaatctataaaattttctcataggttggttcaaaattagagacgccaaaattgttgctatcatacatatgtagataatatctttccacaaagaaaatccacgttacaactatcattgggtcatacatatgtatataaaccattcaaactcatttttctaagaaaagaattgcaaaactttattcattccaccaatatattatcattgttcgaccatacgattaccaatcggaccacctgagttgttgtcctttcatataaacatcagtcaatagaaaacagagaacaagctgatcaatgaatcttttaaaatgtgaaagaaaccaaagaaacgactttttagtaatagcaacagtgaccaaaccaagcatgtcacagactcacagtattcaaaatccttcattcacaaagaagagacgtttatttcctttagtttctttgtttccttctctagtcctaaagcttaaaatattgttacgcccgtgaaatcagcgattcattatgcaattcatatttccactaagagatacgaccaatgatcctttattctttgatcctagaaggttctccgaccgtgttctccattcgagaataccattcacctatgcgtgtgttgtccaccatatccttacccgatcgaaggtaccttattggcctcagaacaccgaatacagcgagatcgcccaagtttggttttgacccacctgatattagaaactacaatcatggaccaatccagaaagcagggactagattcagtattagattagaagttggacataccaaggtatggacgctctttcaaggcatcgacccatgtctctgcagcatcgtaaagagccgcacgttcatctgtaatgttatatttcttcttcaatttctttgatacaaagtacattgccgttgctcctgcatactttgccactaatctttcagtgaaactgaaattccctgcacagggtacaacaatacgacttagacaataagactatcctcttccaaaagatttctctagatgtctaatgacgtataaaggttcccaaaactgggactcccatgaactcatctagttaaaatgttaacccatacatatcttccaaaggttataaaaacaaaatgagtacaaagaaagggaaaaaagtaagaagctaaatcgacgataaccataccatgtgtggtgatatattcaaaggactcaagagcctctgaagtattcctgtatatgtttggtgacaaaagatgcacaaggtggttgtccacccacctacaacacatagatacattatcagcctaaggtcctgtagtgacacaaatcttcgaactcaatatcagtcaataaattaaaatcaatcgtacttgcgccatttagtctcttcatcatcttcagacttggaaatttcagggtgcatcttttggaataagctatcgattatcactgcaccataaaacaaaagattactcaactaagctaatacacatttttgatctgaagagaaaaatacaagtcagaaacagaacatgagacaaacctgaagaatcaaccatttgttcaccatctacagtaagaataggcaccttcttataatcagaccatttgatttctttcttactgataggattcacttcaacaaccttgtatggaatcttgttgtaatccaaaaacgctacaaaccataaacattcgcccaaatatcataccagcaacgatagatacatcattcaatcatcaatctcttactgaatcacagacaatgagaaccattctccattcaaatccatcacattcaagtcaatcatactgaattcaacctaagtctaaagcaagaatcgatgagtagaagatcaaattctgatcagatccagcaatttttagattagtgtgataagattacctttaaccttgttacagaaagggcaagcttcgtactgatacagaacaacttctttaggattaaacttctgagccatttccttagcgtgaacttcttgaccaagagacgatacagcagcggcagagaagaacacaaccccagcgactccgccggcgaaagacggagttttaatctctggaagaccaccgaatcttcgggagataggttcggaggatgaaatggttgtaatcgccatggattgagtgagacgtgaattgatggcgacggaggatgagattgtgcgcgcggcaagtccggtgactctcctcatagcttgtggcggaagatgagatctggatcgagattttgatttttgaaggcgtttgattttttgttttttcaacgaaagggttcttagggtttaagctgtgtccacgatttacttccagagccttttagattattcgtaaggctgtttgcgaaaatactttaaaaaaaaaaaattattttgactttgaaataatctcttgtataaaaatacattttaataaaatatttaggggcttttatggtttatgcattaaattgatttcaaacttatgaaatttggaaatctttacgatttttaaaattatagaatagtttataacatgttagtttatataattttaacatgaagatttccataatattcttctaattttttcatgagttatttaaatattttcaatagttaaaaaaattgatggaagaataactcaaacagttttaccaaacaaattctcattcatatcccttattattattattattgaaatattcttaataacattattatcatatgttattagcaaaattgcatggtaattgtgtcacacttacagagatttttaccccatttaaataagtacacaatttttattttttttctaaaatatttacagattntgtcattactgttgtatatttttcgagtgagagtatagtatgggctatatgagtaaaagctgaaatctatgcaaccttgcttagctaatatatgggcttatatgattagaagaatgactagtaaaggagaaatttaattctctgaacttggatgcccaataatggatatcttaatttacacaagccttctatagcaatgtcgttgttggtagatccgttcatgatgttgattagcacctcgcaatcgcctttaaaacaaacgtgtataaaccctttaggccatgttttttgcattgaaaacaacaacgctgcatcttctgcttccatcggagtataccaagatcgtagtttagtcgaacttcagccttgagttgtgcctttactatcttgcataatccatcctcccaattgtgaatatcatattatatacatatctcacaccaattaaaaaaaaacaaatttcaagaaatacaaatttatatatatagattaatggaggtgtgttaagtgaatttatatagattaactgaccactactgatttgtttacagtatatgtgttcccataattttctctcaattttgggacaaaacaaaaattgtgttatatataaatttgtaaatttgtcgcaaattagctatgtatgtttagacttttggtcttaacaaatatgcgagatttatatattacataaagttttatcattattctcaaaatgtcttttaacatgtgtggaattatggattacaagaagcaatgatcaatctaaatattacatttgaagactatatatgaatgattggaagatcataactcataaggtggggtaccataaggagtgaaagtaagattgtttagaaaccaaaagaagtagaagaattagcataagcaaaactccccacggaaagtttccttctccaaaaagggacttagcctggtttgctctaacggagtaagaggatttgaagagaagtcgatggacgaagcttagagagacgaggacgaatacaaagagaattgggaggaatagcatgaagagcttgagattagcagcggttttctcaacctcgtacttgtaacgcggatatgaagagaggaagagtagtaaagatatgatggcaaggagagctagtagtgtaagaggaggagctgatgatgttaggagtgtttcctctaaccatcctcgcttccatgaacctcctcttctttccttaataaaccaccccatcttcctcgttgtctctctctctctctctctttttttctttggttcaaactctatctgccttctatatatatattgctttctaatggagcatatatatatgcctttattatttactttttttcctttgtgttttgtgtttagtttggaatgtgtgtgctcgatcactcgagctcgtaggcacaagcacactggcccatgcttaaaggctacccacgagccactatcgacaagcacttatcacatatgcgtttatatatcttcaaagttaattactgaattacaacatctataaagttaattaaaatcttggcacggcacgtattaacataatatctttcatcacaactttttaatagaattttttaatttttcaaaatcattagatgttttatgtttacttctcattaattattaacttttagttatgatattaattagaaagaatttctacttttaattacattcttatgaattaccaattaaaacaattatttttaaaagtaatacaacaaagatcaaaacacttccaaaaacttttcatttagtatatatacatattatatatatataatatattaatgagaaagtagtgaatatatacaagtaatgtaaagtccgatcaatgatgtgcataaccgcatatgttctctagaaaagagtagttctcgaacactctttagaccaatctttttttattctttattccatggtcctttttatttcatttctcctccttttctgaatttatcattatttaagaaaatgattccatagaaggttatgactttcagctaactgcgatgatatttggttagtaaaatttaaaaatttatctaatgaatagttgaataataattctt

SEQ ID NO: 37475 - DNA, 4429 bp, Arabidopsis thaliana landsberg
  unsure (1)..(4429): unsure at all n locations
gtgttttttacttttctctttttgggtccagttgaaatgaaattgccgaattggtttttgtttgttgcttttttttaaaaaatagggtaacgaggaacgcgtttgtcttttgaaaaagtgtaaagcatttcccatgcgattttgtttttttttaattttcttcaaaatttcgaacgtcatttacaataacttaataaataaataaaaacaattcaatgaaaaaaaaacaagcttattgtgagcatggtgaaaaatgggagggaaatgagctccagctttcatcgatcacaatgagcgccaacacaaaggacataagaattaagaatcaatttgttggattgtgagaaatgggagggaaatgagctctttgaccatttttgttatatttgtcctttttttccccaacgctcataatgtttttgtttccccgtgacagaaaattctcaaattcccttctttttcattgggcccaaatttttaaccatttgtaacgatatttccttaattagaacaccataacaaatagacctaatcaatcctagcgtatataagtcaacattttatcacacttttctcatgtcatattctccaaaccttacggtgtatgttgtgaacagtagtccagtggattttctctatgcatttctccaagctatgtgttatgggtccgacgggtcaagtaaacaaatccctgatggacattaatattcataatgtggttgaattaagatttctacacttaatactctcatcaaccgtcttcttccactactcacacaaatcatagcctccttaatattatttcgtaatgctgtttcaatatgtgtaaaaagagtatatatacaggttactagtttactacggtattaattgagaaagtcaacttatactacacataatataatgagacaatggctgggatgtgaaaaaggaattactaatatgaatcatatgattaaaaagctatgttagcgttttttctcttacgttttcctcaaacacacgcaacactcttgacttttgtttcttgggtccttttgacagcaaaagattacaaagtaggaccaatcattttcttttgttctggagtttggctggttcctttacgagactacattgtgttctatgggaactgctcgtacgtaaatcatgattctctgcaatggtccaacatgtgaccacaaattaaagtaccaaaagtaattactaaactgggtaacaaaccggaattaattattgagatggtttagagtaaaggatagtgaggatttcctgttacatatatcggagttgttcccttcttgcttctggttttatctcaaaccaaattttcagatggacacagaacagtatagggttttgtgacgaacaatgatatatttcgttttggattataagttggttaagcttgtggtaaaagttgaggtttgatgcaacatctaaaagtttgtgattctttggttatttaaatctttgatggtgcatattttgagtttttttttttttactgttcaacggttgcattgcatgattacatttgtctaaatatctgaaagaaaactgaagttgatcatattctattgcacccatcagaggagttctactaatagagtcattcataatatatatatatatatatattttatatgtatagtaataattatccttatagccaacgatattcttaaaaaaaggatacagaagaacttaaaataaaacatgagacagtaaacgcgtaagaaatattttaggaagaattagtcgtgcatgattttacgtggaaattttgagacaaatggaacaattgattgacaaagacttagacaaatcaaccgaatcgacaacttgacgcaagactagctaataagtcatatcccatcttagggttttctaattcctctttttctatttaaatagaatcagtgaagcacatataactcattacttacaatacaaactcatcaaatgatagatataataatgactcgaagccattgttattggttttattgtattattaccatatatttctccttccttatacactctctagcttctccttcgcttcacttttgccgccacgaccagagggatggtcttttgaaattcagagacgagtttccgatctttgagtctaaatcaagtccgtggaataagaccaccgattgctgttcttgggacggtgtcacgtgcgatgataaatctggccaggtaatatcactcgaccttcgtagcacccttctcaacagctctttgaaaaccaacagtagtctttttagactccaatatcttcgtcacctagacctttctggttgcaatctccatggagagattccttcttcactaggaaacctttcccgtctcgaaaatcttgagctttcttctaatagattggtcggtgagattccgtattcaatagggaacctaaagcaactaagaaaccttagccttggggataacgatctcataggagaaattccttcttccctaggaaacctttctcttctcttagatcttgacctttggaataattctttggtaggtgaagttccagcttccatcggaaacctaaacgaactaagagtcatgtcacttgaccgtaacagcttaagtggcagtatacctatttcatttactaacttaaccaaactttccgagtttagaatcttctttaacaacttcacatcccttccttctgacctgagtggcttccacaacttggtgacgtttgatattagtgcaaactcattttccgggcatttccctaaatttttgttctcgattccttcgttagcatgggtttctatggatagaaaccaattctcaggacctatagagtttgctaatatatcttcatcatctaagcttcagaatctaatcctcactcgtaacaaattagatggctcaatccctgaatccatatctaagtttctcaacctcgtactgttagatgttgcccacaataatatcaatggaccagtccctaggtctatgtcaaagttagttagcctccgtatctttggtttttccaacaacaagttggaaggtgaagtaccaagttggttgtgaagattgtcttcaacaatgctttctcacaattctttcagcagttttgaaaaaatatattcaaaagaaacaatgatccaagtgttggatctaagtttcaattccttccgagggacgtttcccatttggatctgcaagctcaaagggttacacttcttagatttgtccaacaatctcttcaacggttcgattcctttatgtttaaggaacttcaatcttacggggctaattcttggaaacaacaagttcagtggaactcttccggacatatttgccaataataccaacttacaatcattggacgtaagtggcaaccagttagaggggaagtttccaaagtctttgataaattgcaaaggtttgcattttgtgaatgttgaaagcaacaaaatcaaggatacgtttccatcttggttgggatctctaccatctttacaagttctcatcctaagatcaaacgacttctatggtccgttgtatcatcccagcatgtccattgggtttcaaggtttaagaatcatcgatatatcacacaatggcttctctggagtactcccacctaactttttttctagttggcgtgaaatgattacattagtccatggaagttatgaatacattgaagatattcagaattattctcttatctatcgctccatggaaatggtgaataaaggagtagagatgagttttgagaggatccgacaagactttagagccattgatttttctgaaaacagaatttatggcgaaatacctgaatccattggttgtttggaggaactgcgtcttctcaacttgtcaggtaacgctttcacaagcgatatcccacgggtctgggaaaatctcacaaagctcgagacgttagacctatcacgtaacaagttgtctggtcaaatcccacaagatcttggtaaactctcctttctgtcgtacatgaacttctcccataaccgtctccaaggtccagtgccacgaggcacacagtttcaaaggcagagatgttcttcatttttggacaaccatagactctacggtctcgaagatatctgtgaggagactcatgtcccgaatcctacatcacaaccatccgaggatttgttagacgaggaggaaaaaatgttcnnnnnnnnnnnnnnnnnnnnnncatatggacctggagtattttgtggtctggtgatcggatacatcttcacttcacaccatcatgagtggtttacggaaaagtttggtcggaaaaaaatcagagtaaccacaagtgctcgttaagcccatctgttgcaatctctctaagcatttgtgatttgtgaagcattattgtgtactgtcttgttcatgttgtattgaatttttcaggtgtctc

SEQ ID NO: 37476 - DNA, 1631 bp, Arabidopsis thaliana landsberg
ggaatcaattttatctatcataagaatattcttttgggcacacacatcctcttctgttttacatttcgtgtttattatcactcagtttcaaagcttgaagtgactcagtttctgtctctgtcttcttggcatgacgtgtacagaaacccttcagtctctcaagtgcatcctcaagcatatgagcttcgactccgatggttatcctcatccagttcttcaaacccagagcatcacctgcaaaacattccccacaaaccccagtttagtatcaaaactcaaatcaagattcatgctgcttagttcgctttacctggtaaaagcacgagattctcctctctggtcagctttacgcagaaatctatatcgtccttgatattatccatcaatgacagctccaactttgtctgcagtgagtgaaaactattcatcagattgaaagactagtaatggtctgaaatggatcaagaagcaccagtctaaagaaaaccgatcataactacatttgtggatgtgtgtcgttacagaagttttaccaataagtaagtgcaagactcaggtttcttgggacagacgacacaggggatgtccttgagcctatcacacaccaaatcaacattatgtttgagtatcttgttcttctttgcaaagaagtttttgtccgctttctccaggatcgctggaagtgcagcctatcaaaggaacatacagtagtgtcatgaatccatagactagttttgcaaagattctataacatatctaaaacacacaaacctgaattattgtggcagggtcaggagttacgtcaagattctgtttgatggattgtaacacctgtcagaaacagagagtaaacatacagtgagattacttgttacaaaacagcaagagaggatacaaaagaagtagcagtaaacaaaccttggtggtctcgaaaacgccctcgggatcattcaaggcgatccagccaattttccatccaggaacaacccatcccttagatatgcctgctagtgtcaatacagggactatcgaagcaaacttccccattggaacaaatggattgtctccgaatatagttcggtcatatacttcgtctgagatcaccattatcccgagcttcctagccgtctctgcaacctaaaatgaaccaaaaacgcaatctttagcaagctacgaatcaaaaatggctcaaagggtcaagctttggctcagttatgaatcagaaagatgagcatttttgtgtaatgatacaaaaacacaaacctttttgagatggtcgtgagagtagacatttccacagggattgttggggtaattacaaccatagccacagttttctcgtctgcaatgcactcgataccttcaagatcaatctcccattctttctcgggaagaagatcaaacttgcgaacctcgagaccactgtaagcagcacgagcgtcgtaatgagggaagccaggacgtgggagcaagatgtttgcgtttggtcgagccaacgattcgaacacgatctctatcccttggttgcatccagcggtcagaaaaatatcttcaggcgttaacttgtgcggaagatctcggttcatataatcagcaacggctctgttcacaacagagcaaacatcaacaaa

SEQ ID NO: 37477 - DNA, 8807 bp, Arabidopsis thaliana landsberg
  unsure (1)..(8807): unsure at all n locations
tgttgctaccgtttttccttgcgggtactcaacccatacccatttttgacgtgataaacaacttaaagatggggggggcctatttctcgtcaatctaaataatcttctctacaattttcaaacttctaagttggcgttgttcctagaaggaaagagattcatttgggttgcggtatgatgctgttggaaactcttaccggcaccacgattttctcatcatcctactatacggaagatttagtttcatcgtttcgatatgaaaactgtataactagattaacctatatcataaccaaactacagttagataaaataatgggccaactattaaagcgatccatgaacatggcttttggatagtaaagtcatgaaaggtttaccaaagaacttgcaacgcattacatatggttccgacggatacaaattcggttagaagactacatcaagtcatcaacaagcacaccaaactgatgaatctaaggacgcaaagcagaacaaaccaaatccatctgaccaactcatagaacatccaagataaggacactaaagcatatagctccaataatgagtcgaggcaataacttcaatactataatccacaacaaaaaacagaggtccattgtcaatcgccatcacatgatataaaactaagttatatcccggggaaagaagctttccattcacgatcgaactaaagaacaagacagacatgcttttctaatatgacacgaaaaaatcacccatccttgtgacagagcacacacattagccaaccacagaataattgcaaggacctgaaatgatgcaagtcgatgcatctcaccaatttaaagggtaaacaaaattttgaatccaacgtatataagtttacagcatcggtgttccaaactggcaaacttcaaaaaaaaagttactaaccatgaaaccaattggtgccaaattgaacagagtaaaaggaaatgatagaaagtttggagtcaaaacgaagtttcagatccatactcaatctcacaatgcacataaaatccttcagagatggtttggtaacaaaaaaagtttccatcttttattcgttgtaagttacaactatagtgtctatacatgatcattagctataaggaacaaaactgtagaagctaacttacaaccaaatgttcaaacttaacagaaaattcaatcttctgacttatcagttccgttcttgtttccatatatcaaaccagtaacctacaaatagcataagaaaaaaccattgatactctaaacgaagaatccacaaatgaatactaaactactaataaatgttggaaatttacctgagggtcagcgattggtttcctcttctcaacgtattgattagtatcagccattgcaagagctgccctagcctaaatcaaaccagagataactgtggaaatgagactagaggattcaataaaaacacaaacttttttggatgtgcaaaaaaatcaaaattggtacctcttgttcctttttaagatcttgttctggcttaatccagagaaagtaagcaatagttccggcgacgacccaagaagcggcactctgaccacctctaagacctcccatggaattaccgatgaaagatctcacgtttccaattgatcttctccagctgctagccattgattgatgcccaactatacgaactggtctaaggttcttctggatctcttctctgacaattgcttgactttgatgatgattcgatttggaactgaaattgcaagaaaagtaaaagcaggcgatttgattttgattcgcatttgcttggtgaacactgccaaaggctaaaccggtcgccgagacggttaatctgatgtttgggattgacacatcatgcggctgttgtttctccacgtaacatttggagacccgctcaaatatattgtgggccggagaacattgttttaccatatagggcccatagactttgaatatgtgtaggtaaataaaatacaatctgtggaacaaaaatggcaaaaatatttgaagtcagcaggattggttaacaatttgagcacagaaatacatttggtaacatctgagcatatcattcatatcatatcgctgtcgaatttgaaggaaaaaaaaaagactaaggaagtggatatattggtgaatgctgatgatgagaaaacttattattatatacgaaaaatttactaaagacagcaatattccaaaataatgatagggaagattctgagatggtgtgtggtcagtgtggaggcactacagatggtcaaacagtagcatacccacctggctatttggacaaggacaaggaagaagaaaaatcgagaaccatcttctcagccgattttagtaaccatcttcttgtttgctccgaacaatcaagagatcgaaaatggctgatgttcacaaaggaaaggtttgtgtaaccggtgccggagggtttttgggttcgtgggtcgtcgatcttcttctctctaaggattacttcgtccatggcactgtcagagaccctgggactgaatcttctctccttttactctcttcctctgtaaattttccgcctttattcactctgatgtctcgttgacttgtgtgtgcgtgcgaagtagaaagtctgttcccaaagtttgatttttttcttaatctactttctaggtgtttagattcgctagtttctgttctctcgacggataaaagccttagcttttgatttttgtttgttgttcccaaatcattttagtttgcttctcttcttttagtgtagttgttgttgttctgatgaagagtttcgcatggttcttgttatagataatgaaaagtatgctcatttgaagaagctcgagaaagctggtgacaaactcaagctcttcaaggctgatttgttggactacggctctcttcaatctgctattgcaggttgcagcggagtcttccatgtcgcttgcccggttccaccagcttcagtccctaatcctgaggtgaggatttcacttcactcctgtaatctcactggggatatataacatagtctcactctgcttccactggttttgcaggtagaattgatcgcacctgctgtggatggcacgctgaatgtgcttaaggcatgcattgaagcgaatgttaagcgtgttgtgtatgtttcctctgtagctgcggctttcatgaaccctatgtggtcaaagaatcaagtattagatgaggcatgttggtctgaccaggaatactgcaagaaaactgaggttaatgcatcctcaatccctcatctcatctcacttgttatatatcacatctttttttttgctgacttttaaattcctctggcagaattggtattgtctggcaaagacacgagcagagagtgaagcttttgaatttgcaaaacgaaccggacttcatctcgtcagtgtttgccctacccttgttttgggacctatactgcagcagaacacagtaaatgctagtagcctggttcttcttaagcttcttaaaggtatacaacaagccttatcattcacatctgggattgttagaagcagcgtggtatacatgggttggtgaatctcgggttttgattttacttttgtgtggtgcagagggttttgaaacacctgataaccaagaacgtcatttggtagatgtgcgtgatgtagctcaagctttactcttggtttatgagaaagcagaagctgaaggaagatacatatgtacatcccacacggttaaagaagagattgtggttgagaagctgaagagtttttatccacattacaactacccaaagaagtaagtaaacaaacaacacatctctctgcttagttttgtacactcaaaaccatccttgacaattttttgagcgaaaaccttttgtcttgagaacagactaattgctgtcagctcattactgatttcattcaataagcaatgacacttacctttagatcagtgttttgaagtttctttaagacctaactttgatccaacctctacttatccaatgttagatacattgatgcggaagatagagtgaaggtgagttcagagaaattgcagaagttgggttggacttaccggccgttggaggaaacacttgtggattctgttgagagctaccggaaagctaagcttgtggactgaaaacttggaaagaagagcaaaatagtgttttggcttcatatgttatagttatagtgttccattctgcacacacacacacactctctcatcgtttactcaataataagagttgtgcattcaccatggatttctgagtttttgttattttctttttagatatcattacttttattaccaatctacaattttctttccataatattttacaatatctctctattgtatatgttgttccaatttctaccgaaatcttactttcaaaggataaaacacacaaacttttatctcaattggtacgtcttgtttctgtataaatttgttaatcattgtagaaaataacataacaaatgtggatttaagctgaacataaatattaatgctttttccgatgaataaaattagtcgaacaaaagttgagatatggagctgaagcagagatggtcaaagtcaaacaaatagctaccatttgcacaaggaagaatcttcttctcatttgggtgatcaaaaatggcggctgtgcataaaggaaaggtttgtgtaaccggtcccgatggttttttgggttcttgggtcgtcaatcatctcctctctagggattacttcgtccacggcactgtcagagaccctggtactgctctcctcaccttttatctctccctctgtaaattgtcaacctttattctctcgcatttctagttcatcgaatttttgtagctcagcctggtcaaaattgattctttcgtctactttctaaggttttctattcccaattctttttgtagctccgatgtttctgtctacagacagaagattaagccttttgagtttgtctattgttctgatgaagagtttcgcatggttcttgttataggtaatgaaaagtatgctcatttgaagaagcttgataaagctggtgacaaactcaagctcttcaaggctgatttgctcaactacggctctcttcaatctgctattgctggctgcagcggcgtcttccatgtcgcttgccctgttccatctgcttcagtccctaatcctgaggtgaggatttcatttttacaatctcattggtggctatatgcattgtctcactatggtttcactggttttgcaggtagatttgatcgcacctgcagtggatggtacgctgaatgtgcttaaggcatgcgttgaagcaaaagttaagcgtgttgtgtatgtttcctctgtatctgcagttgctatgaaccctatgtggtcaaagagtcaagtgttagatgagaccgcttggtctgaccaagattattgcaaaaaaactgaggttaataatgcatcttgaatccctcatctcacttttttttcttcttttaaatctgactttcgtccctctggcagaattggtattctttgtcaaagacacgagcagaaagtgaagctttcgaatttgcaaaacgaaccggacttgatctcgtcagtgtttgccctacccttgtcttgggacctgtattgcagcagcacacagtaaatgctagtagccttgttcttctcaagcttcttaaaggtattataaacaagcctctcatttcatctgggattgttagaagcagcaacttggtatatgagttggtattgattttatacttaagtgtggtgcagagggttatgaatcgcgtaataaccaagaacggcatttggtagatgtgcgtgatgtggctcaagctttacttttggtttatgagaaagcagaagctgaaggaaggtacatctgcataggccacacggttagggaacaagaagtcgctgagaagctgaaaagtctttatctaaattacaactacccaaagaggtaagcaaacaacagctgcacatctctctacccaatttgagtgaaaacctttaaaccttaataagctgtttttgttactttcatcagtaaacagtgtcacttacctttacatcaatgtctctgaagtttcttttagaccttacctttgatctaaattctacttatccaatatcagatacatcgaagcggatggaaaagtgaaggtgagttcagagaagttgcagaagttgggttggacttaccggccgttggaggaaacacttgtggattctgttgagagctaccgcaaagctaagcttgtggactgaaaactgggaacgaatagcatatgagtgttttgggtccatgtgttaagtgttcctatctgcacacgctctttcatcttttactcaagaataagagttgtgcaacatattttccatcatgaacttctgagtttttgttactttcttagacaccattacttttatgaccaatctacaattactccttccataactatgttccaatatctctttgatacgttccaatttctacctacttacaaaggataacttcaccattaatacatgaaatcagtaacgcacaacttcaccattcgaattaacctctaagcctagcgtagcagatgcactacatcttggctgaccatgggactaaaaaaacattcgcaatatttaacaactaaagccaggttaatggacctgtattagggcccaaaccaggcccgtttagatatccgactttttttttaactttgcccatctcgatagctagattctcttttccctcttccttctccggcgaagttgcgttagttaaacagagagtcatggccatgaaagctcccgatcccggcggatctggggaaattctcccgagcactccctctctttccgaaactacgtctggaggcgccgcagcagcttctaagtcggctcaattgccgtcttcttcttccgatatcgataatattcacgtacctagctactccagtaagtctgcaacgccgagaaaactttgatttattctactttcttcactgtttcttacggattttgtacttgtaccgtctatttaaccaattaggttggttttcatggaccgacattaacgattgcgaggtccggtcactgccggaatttttcgattcgagatcttcatccaaaaaccctaagttttatctctacttgaggaactcgattattaagcagtacagagacgaccatcctcggaagattagtttcactgacgttcggagaactctcgtcagtgatgttgtctctattcgtcgcgtctttgatttcctcgattcatggggacttatcaactataatagctccgcctctgctaagccgctcaagtgggaagaaaaagaggccggaaaatccgccggagatgctgcttctgagccagccacaactgtcaaagaaactgccaagagaaactgcaatggctgcaaagcaatttgcagcatagcttgtttcgcctgtgataaggtttgatttcataatttgtagccatagtaataatttcattcactgagtttgtcacttagaatgattatgtacatttttgttttcagtatgacttgacattgtgtgcgaggtgctatgttcgtagtaattatcgtgttggtattaactcctcggagtttaaacgagttgagattagtgaggagtcaaagccagagtggtctgataaggaaattctgctgctgctggaagctgttatgcactatggagatgattggaagaaggttgcatcgcatgttattggtagaacggagaaggattgtgtttctcagtttgtcaagcttccgtttggggaacagtttgtaaaagagtctgactctgaggatggtttagagatgtttgatcagatcaaggactctgatattcctgaatctgaaggaatagataaagacggttcttctcccaacaagcggatcaaattaacacctcttgcagatgcaagcaacccaataatggctcaggttagaaagacactacaatttgagtagttgcgttctctctctatgttaatcttatttgtataagtcttcaacatgcgtggaaatgcttttacattgttaggctactgaagaatagtccagtgtctgcactaggctgttccacgacttgcgtttttgtctccttaaagaacctaaatctagaataccttgtggggcttgctttgaaatctagtaataacaaaccctagttgacatatataaggcatttaagaatcaaatatgtgttagataattctgtactgtgttatcacacctcaattgttatgcttcattggctgtctctgaataagatttatcctatcatgtcctcttcaggctgcttttctttcagctttggctggcacaaatgttgcagaagcagcagctcgagcggcagtgagagctttatctgatgtagactacgaggctgacaaaaacgccagtagagacccaaatcgacaaggtatcaaagaccaagctgtctctatttgcagtccatttctgtcttaagccaaacncaatagtgacagttttgttttcctgatacacagatgccaatgctgcatcgagtggtgaaaccactagaaacgaatctgaaagagcttgggcagatgcaaagtctttaattgagaaggaagagcatgaggtagaaggagcaatcaaagagactgttgaagttgaggttagtaacaatctgcaactttccatagactttttattatatggttatactcaatgatgatttatgttggaacaaacaaaatatgggattaacagatgaagaagatccgagataggattgttcatttcgagaaattggatttggaaatg

SEQ ID NO: 37478 - DNA, 2943 bp, Arabidopsis thaliana landsberg
tcttacttagcgacagatacgtttagcttgatcaatgaatcaactccagagtattacaaagcagcccgtctcgcttcacaatcactcaagtactatggactatgcatgagaagaggaagttacaaagttcagctctattttgcagagataatgttctcaaatgatcagacttatagtagcttagggcggcgactattcgacatttatgttcaagtgagttttgcagaacaaacaagaaagtttcggttttcctatatcactaagtaaatttgattttggattctctcgtgcaggggattttgttggagagggactttaacatagcacagagagcaggtggagttggtaaaccgttcctaaggcaagttgatgaagttcaagtgaatggaagtacgttggagattcatttgaagtggacaggaaaaggcacaaacgtaataccaacaagaggtgtttacgggcctctcatatccgctataaccgtcacaccgagtgagttttccgtccaatctttctcaactgttcaaaataattttggactgagtggatgaatgaatgatctttattgcctgctgttatagatttcaaggttgataccggaaaaccattgtccaatggagtagttgcaggcattgtaatcgcagcgtgtgtagctttcgggttgctggtacttgtaatcctcaggctaacaggttacttaggtggaaaagaagtggatgaaaatggtaacaaagaaaacatcattctcttgttcaaaaatgctctttgtcattttcaagacctgattgtttcttactttcttgtttgatcagaagagcttcggggactcgatttgcagacaggatcgttcacattgaagcaaatcaaacgtgctactaacaactttgatccagaaaacaagattggagaaggaggatttggaccggtttataaggtgatgattgctttggctttacaccttcataagttctgtaagattggattataagtattgatgtgtttttgttattagggtgttctcgctgatgggatgaccatagcggtgaagttgttttcatcgaaatctaagcaaggaaaccgagaatttgtgactgagatcggtatgatatctgcgttgcaacaccctaatcttgtgaaactttatggttgttgcatcgaagggaaagagcttttgcttgtgtatgaatacttagagaacaacagtctcgctcgcgcactctttggttagttttttctatccatctaagataggcaggccgaagttcttgatcttcaagctaaagtctcttggatttaacaggcacagagaaacaaagacttcacttggattggtcaacaagaaacaagatttgcatagggattgcgaaaggattggcctatctacacgaagaaatcaaggctgaagattgttcatagagacataaaagcgacaaatgtgcttcttgatctgtctctaaacgctaagatctctgattttggtctagctaaactcaacgatgacgagaatacacatatcagcacaaggattgcaggaacaatgtgagtgttccttacttatcttttctaaaattcttagcgagcggttaacacttatcgacttgataaatcattgatgcagaggttacatggctcctgagtatgcaatgagaggttacttgacagacaaggcagatgtttacagctttggtgttgtctgtttagagattgttagtggaaagagcaacacaaattacagaccaaaagaagagtttatttaccttcttgactgggcatatgtcttgcaagaacaagggagtcttctagaactcgtggatccagatctcggtacaagcttttcgaagaaagaagcaatgaggatgttgaacatagctttactctgtacaaacccatcttcaacattgagaccaccgatgtcatctgttgtaagtatgctacaaggaaaaatcaaagtccaaccaccactggtgaaacgtgaagctgatccaagtggttcagccgcaatgaggtttaaggccttagagcatttgtcacaagacagcgagtcacaagtctcaacctatacaagaaacaaagaacacaaaagctcctcctcgatggacggtccttgggtcgattcttccttctctgatccgagcaaagatgttagcctattacagcaagaagaaggaaattcatcatcttcgtcgaggagactgttagatgatcttactgatgtggagattgagtaatgaattgtatatattcttttattcaatctacaaacacaacagtatttaccaacatatcaactttcaaaattgaatcgttattacgctgtgaaatttctctgttggattgatgagtttaatttactatatacaatatagtcttttgacgagactacacaaaccaaaaacttgcccttacatattttcagaactcgaaagcattgttgatctgaatggagaaagaaggtcgagcaacgtttggaagaggagtatcagctctaacaactattcctgttcgtccaatgttcccattccacttagaccgaccaaactgcggttttagagaaaaactgaaatgagtgcaaataacaaccgtagagagtatggaaacagaaagaaagattagcttacggaaacagatgcaaatgttgaaggatgagctgtgaatgcgcagccacatatcatattgatattatcattcaacgactgaataacttcggttttaatcccgggattgcttccaccaaatgtagagcacacactgtttccatgtttgcaagttaaaaaaaataaataattttgactgtaagaaagaaggcgggtttttaatttacctaagttgaattgcaggtttcaacatgacaccggacctacgccaagccaaggcttgagaaacacccaatgccaatgatttgtcaggccagtttatcatcggtgtgattcgtgttccctgttt

SEQ ID NO: 37479 - DNA, 3247 bp, Arabidopsis thaliana landsberg
gatgcagtttggcgaagcattttcttcatctcacataaacaacttcagatatctgtcagatcccaaccatttcagaggaactcaggtaaagtaattaagaattgaatagtaccaaaggctccaccatttttacctgtttgcttatttaactaaacaatgtgagagggtgaaattgatatttgcagcaagacgatggatgaatatgtttgtcaactgcacaagtttgcagagagactctccaagctcatgtgtgagaatcttggtcttgatcaggaagacataatgaatgccttttctggtccaaaaggtccagcttttggaacaaaagtggctaaatacccagaatgcccacgtcctgagcttatgagagggctgagagaacatacggatgctgggggaatcatattactcctgcaggatgatcaagtgcctggtcttgagttctttaaagatgggaagtgggttcctataccgccatccaagaacaataccatttttgtcaataccggtgatcaactagagatactgagtaatgggaggtacaagagtgttgttcaccgtgtaatgacagtgaagcatggaagtagactgtcgattgctacgttttacaatccggctggtgatgccataatatctccagctccaaagctcttgtatccaagtggctaccgttttcaagactacctaaagctttattcaactaccaagtttggagacaaaggccccagacttgagaccatgaagaaaatgggaaatgcggattcagcctaggatgcatctggaatttgacgcttctgtactcacatcataaaaactttgtcttcttcttgtgtttccttataatttaaataaccagccatgtcagaatcttgctgattcagctatactacttcactcttctttcttcacttccacttgaaaagttccaaagccaaactgaagcagtctcatcaagctctgtgtcgaacttgagattagacaaagagcttgtaatctaagctctaagattgacagtcaatttcatgatttataagatgtaattcaactcttaacgtaatccacaactccgccatcatctctttccatattctctctgatttgactcatttccttcccaattcctagaatcaaacaaatagcatttctatatcagcatctaaaactgaaagctaagtgtgtattgactcaaaattcttctccaatcgcaataaaatcgagatgagaaaaattcatccatatgttttggttcacacattctattgagcagcttgtgtgcaatcccaatcctctgaaccaaaacaaaagcttatctcttgaccattacccgacatttcactcatcagccaacgacaaatcctgctccgaaacctctaatgcttggaaaagaagaaaattccgatttccgaacaatggaacttactccattttgcattctctgtcgaaggtaacatacgttcaatgcaaatgacccaaagtcgtcggtgccacgtggatagttctcactggttgatgcattcggtaactcgcagaatggaagaatattaacacaaaaggcatctcgcgtatccacgtgtcccgttcaagattccaaattctaaaccaaaagccggtccgaccagattaacaagttctctttattacatcacaacccaaaacttgttcaaaacctaacttttcattgctaaacatattttattctgacattcacatgttaactttaatccaatatctaattcttttttcttaaaaccaccgttgtcgaaaaatccaaatcagcaaaatcagtgattaaccggaccggaccaaaccgaacatcgttttctgtaaatagcagtaactggtttcacacatcccatcatctctaaccaccgacctcataagtcattaagacaaaaacagagacactcctctcactctcattatttcattttctttccataaaaagcacgaatcttcaagaacaaagagagagagagagagaaaatttaatggcgttagcgaataacttaacggcgatactcaacttactagcgttactctgttccataccaataacggcgtcaggtatatggctagcttcaaagccagacaacgagtgtgtcaatctcctccgttggcccgttgtcgtcctcggcgttctcatcctcgtcgtctccgccacaggcttcatcggcgcctacaagtaagaatcaaaaaacttcaagactttgaaaacatagacacaaattgaatcataaagatgtaaaatttgagctctcatatttcaggtacaaggaaactctactggcggtttacttgtgctgtatggcgatattgatcggacttttgctggtggttttgatatttgctttcgttgtgacccgacccgacggatcgtatcgggttccgggtagaggttataaagaatataagcttgaagggttttcgaattggcttaaggagaacgttgttgattcgaagaactggggaaggctaagggcttgtttggctgatactaatgtttgtcctaaactcaaccaagaattcatcaccgccgatcagttcttctcctcctctaagatcactcctctccaggcatgttctttcttcttttattctcttttataaaaagaaccccgaaatttctagtttccggtttaggtttggtttagaggtaaatctagactaaatatcggttatgcaactatgccaacgaatcattgtgggtttaattagatattattagatgattaatggagataagatacgaagtaaagagaatgttttgtaaaatctctagattatgtgagacctacggtttgttcttgccatagaaagataggttattttttctttcaaaaagtaaagtaagtggttttaaatcaaaaagttaaaaaatttctctttagcttttgtgaagatgtccaaaagagaattgatcttattctctatattcttttttttgttttgcagctttaagttatttcgttttggatttcctcatctttgaaaaaactaaaaaaatattttctgacctaattaatcttatgttttctagtgttggagagaaacctacattagctttcttaacgtatcgcagttagtgccattttgtggtaaaactcatagattaggcatatgtaatcaccattattgaacacatatttattcctagtagactggtgtagaagttgctggagaccaagtccacaagattatatagtaagatagtcagatttcaaaattatacactatcataaggacccac

SEQ ID NO: 37480 - DNA, 4695 bp, Arabidopsis thaliana landsberg
tcacctggacgagtttgataggctctacagcttaacaaagatcaatggagtcagtgaggatggcttcaagctcagattgtttccattctctcttggagacaaagatcatcagtgggaaaagtcgcttcctcaaggctccatcacctcctagaatgactgtaagaaagccttcctggctaagttcttcgcaaactccaaaactaccagactccggaatgatattttcggtttcacatagaaaagtgttgagactttctgtgaagcatgggagcgcttcaaaggatatcaaacgcaatgtcctcatcatggtttctcctaagcttcacttctcaacaccctctacagaggtgtccttccaaaaatcaggatgcttcttggtactgcttctaacgggaacttcttcaacaaggacattgaagaagtatgggagctggtagagaatttggcatattctgatggcaactacaatgaagattacggtggaagcatccgcaccagctctcattctgatgagaagcaccgcagggaaatgaaagccatgaatgacaaactggacaagctactccttgtgcaacagaagcacattcattttctgggtgatgatgagacgttccaagttcaggatggggagactctgccatcagaagaagtcagctatgtgcagaaccaaggaggatacaacaaaggtttcaacaacttcaagcagaaccatcccaatctgtcttacagaagtacaaacgttgcaaacccacaagaccaagtctacccttcacagcagcagaatcaacccaagccgtttgttccatacaaccatggtcaggggtatgttcctaagcagcagtaagggcacctatcagcagcaacttccaccacctgggttcacacagcagcaaaaccaacaaccttcaccaattccagatacagacttgaagaacatgttacagcagattctaaagggacaagcagtaagagcaatggatctcgccaaaaagatggcagaaatccacaacaaggttgattgcactttcaacgatctgaacatcaaacttgaggcactcacctctaaggttagatacatggaaggataaactgcgtcgacctctgcttccaaagtaacaggacttccagagaagtccatacaaaaaccgaaagaatacgacactcctcacgctatcactatcacacatgatcgagagctgccaactcgatatgtccctacatcaaacactaaggacagtgtaattctagagggggaggatttttatcaagatgatgttttagctgacaacccaatcgaagaggccatactcaccagtcaacccactcgaccacaagctcccccagctactccctttgccaaaaaaactgaagctgcaaagaccaaagacatagactttgtgccaccgccttacaaacctctgcttccattccctggtcgtttcaagaaagttttggtctataatttgcatgacttaggcattcattcttcaccactttgtcattgtttcatccatatttcatctcattaggagtcgttttagtgtgttttacatacttaggacgattttacattaggattgcatgtgcatggcatatttggttgttttcaggtactttggatgcttttggagttcaaacagaggaaaaacagaacatgaagtcagaatgcccaatgacgccttcagcaaaagtactctatcgcagcctcggagccctgccagggcaaatcactctatcgcaaccccggagaagcaagcagctcagtttcactcaatcgcgaagccggaggaatcaccccatcggaaccactcgatcaccactcgatcaccaggaagcctatctgctcattctgcactcaaccagacaagctgagaacaaagaagagaagagaagccgaagaaaccactcgatcaccatctcatgactattagagtgtatgaagaaaggagagagaggccgatgaggccgagccatctccaagaaagagaagaagaagcagaaaggagtcaaggccgaagtcatgaaaacaaggccgaagatctcctcatcaaacgctgaaaaagccaagtaaagagccgtgaagaacaagtctcggcctaagagagtgtccatacggttttatgtggataaggccgagactatacctcaagatgaaggcttgagcttgtgttaagacccaaaggaaataaaagagagcccaaggaagaggcccattcgtttgagacaagaatagggaaacaatgtgtgtgtgcaaccatgaggggctgtcactatccacgccttggggatgcttatggacgttggagtatgcaaacaagggatgatcacatgttctattcaggatttgaatgttaggacatgtcactttcagtcttaggattcaacctctctctcttcacgtcgctttctctctttggtctttgtgtagagtttgaactctcctctttgcctatttaaaggctgtgtttctctttgtaatacaacaagaataatagacaagctcttatatcattttgtgtagctctctcttatttacttgtgtttaactaaagagttacaatgtagagagatagtgttacacaatttaggactgctttaaggcagcctattgcttgtcatacacactcttaaatacactctaaactcttctttagttagtacttattctctagcttactgatcctaaatcctctttatcttaagtacacaaactctaagtgttgttgttgatataacccgatttgaaccgattttatctatgttttaagtataggattttgagtctttatgttatttctcgagtctttttagtatcttttcaggtattctatgcaatgagacaacaatggagataaggagacattttggagcaaaaactaagaaaaaggaagctaatgacgattttggttcaagaatcatcgaggagtgtcgatcgacacactcttggtgtcgatcaacaccagtttccgcccggcaaaaaccctatacgctttcaagtttatagaatatcaaatttgccccagaagactttcctatttgcattattagtccctggacttttttagggtctatatatattgtttgtagacctagttctcattatcaagtcttttatcaagttttatgcaaacactattgggagagacataagctattcatccattgttcttgagacattcattccaagtcttaatacagtgaagaaatcttttctaactcttatctcctttgttgtgtttatgctttcatcaattatgttatttgtctcattcaatatgtctgagtaatttgcttgttaggaatagggtttctcattagggattcatatggtttagtagattgccccctttgctaggttatctgtagaattcttcatctttaattatgcttaatgttagatctagagtaattaactagatcttgaatccagacaatagatattcccgccataggtatctgtagttggatctattatttgatgagtctggtttataggtgtgtaataagaatcggcctatctactaagatgaataattgaactcgttaagaatgcatatttaggttgatagtttctcggtttctccggttattattagctatagatatagagagttttgcgcacgcccaccggttattccataattagagtttgagtttaagaatggttcgataacaacctagctttcattaaatctactaaccaatagtttcctgagattaccctgttcctagctctttattaaatcgtttacaacacaatcaatctgctgtctttttactttgttctctttcatttttactactaccctgctagcttaatctcgatatttaactcattgtttgaacaaaagaactccgtgaattcaatcctaaaatactgcaattgatctcttatttgagagagttgttctaggtaatttgaaccatatcaataacaagtaattatatgtgttatatgagaaagtggaatcaccatcttttgagattacgaaaagtggaacagtggaaaaatggaatattggaacagtggaaaatggtctacattgaattgacgggttctttgtagctcaataaaagacttacgagtccagtggaactagataggttcaaaggtcagagaaatgatcaaacctggtattgatgaggagatcttgcttaagcaagaatgagatgtgtgatatagtcttgcatagtgatgcaaactatatgagtgttgtgtctgtttctatgtgattgttgattatagtttaaaggtagaatcgtgtatcgtattttcagtgggcggaaaggatcctctcaatgagtaattctttactcaccccctttttcccctttttccccaggtcacagtgaaaatcgtgtgtagtcgcgcaagtccgtctcgcttacagtgtattttgggaacctcgggtttattttctactattgttattttcttatacgatttattaaagagttttcaatgatttaagattatttttaagacaatttgttatttgaattaagaaagtggaatagaggaaagatataagtaaggagaaagcacgccgtctcaacgttgaaggagacgggtgtgacaaatggtatcagagcggaggttaaagtctagtaggtgctgatcaggacggctaacccggagagttttcttaaaaaatagatttgaaaacctaatctatattctgagtttgaaaaccg

SEQ ID NO: 37481 - DNA, 4170 bp, Arabidopsis thaliana landsberg
cgtaattcgttcatattgatctagttatagctgatatctgccaagatttgaagttagtatcttagtagcatgaatgtgtttgtattgtatcttgaagatcacaaaagcatagggaattgactttaaatcattgataaataacttatcacaagagttttagttgacattttcttcgagaaagcagagaaaaactttattgtatagtctttcgatccaaagaacgtagatgcaaagaatgtcaagatacagaattacatttcggattcaaacccgatgttccaaaacccttcaggagtcattggaggagcgtatctgtaacgatgcctcgacacaccttcatgatgttcacatctcaagcttttgttaccatttccttcattctcaggatgaacagcatcatagaatttcttgcattgtttacattctatacctttcaaattctccctctcggcttttttcctcactgactccacatgcttgaaactctttttactcgtttctgcaatttgaattcgctgtcgtgatggactcggtttaggattcatgtcctgtgtctcgtcgtctgaatcatctttcttagcaacatcatgaacatgtttttcttccccagcgacccttttgacattctcaatgggagtatctagaaaatcatcatgaggatcatgtcctccaggagattgacgagatcttgtgtctctccaaatggaagctggacgctttaatccgcttagctgtggaggttttgcagcaccaggtgaccgcacaattggtgagatggaagtgataggtgtctgcactgttttgattatactctctttctcatagttgttgccactcgagccagtaccaattctcactttgtctgctccttcagcagtttctgagtgtttcctttcaagatctgtaatagagagagtaaaaaatcaagctgggtgagtttactaataccaataagaaacctgcagctaaaggatgactgactatagcaagtaatttaacgcgagaggtagttcaaagtagtctaggtcagagacggctaatacttacaactcgagattgctgatttctcatgctgaccaatttctttattctcatcctcaaggctgctttggtgaagaacactgtcaggagtaaaattaaaccttttgcagagaaaagtatgttgggacttccactttttgcaagtacgagagagttctttatttttctttatctccatagctaactcaaatgatttctcttcactctggcaacgtaaagcttctaagtcagccaagtagcttacgtgcctgccctgcatatcattctttgcttttcccataaccactgtcttttctttctcatgagctgcaatcttttgtttacaattcaacatttccctctcggtcaatttgagtttaccctgcaaaacctcaagagctgtgtttccttcctcaacctcagcggtcttttgcctaagtatctcttcaagtctaccgacattctcctcaaaaacctgcaacctaggcttcaagctttgatcctcttcttcaacgctgctcaacttcctttcaccatctgcagcttctgtagacaagtactccagtttcttcagcagattctccgtcaccaatgtcttctttgagagttcctcctgaagaaattcagtcttcatcttaaggctcttcacttccgaaacaatcatatttatcccatcttcgctaagctcatccaaacccttaacctgcaacaactcaactaacctataatacaaatctcttgcatcaccaaccatcttagatctactcttcatcttctttttcaaatgatcgatgtagccttgtagactcgtcaatctaagaggcatagaagcagttttaccaagttcttcagctaacttctccttatctgacttaatctgttattcttctcccttacgctcttcaatttgatctaccaaacttttctctctatctttccaagtttctcaaccagcaagacgagcttctcaataacctttttcaaaccctttggatttggattcaatttttggatattcactgcctccaaattatattctcgctctaagaaattctatccttgccttcttgaattgtagcacccattatagtactgagaccagatatatacttggcttcgataccgtcaacagttttatctcctttcttcaagctgtaatcagaaaacgggaatggggtcaattcaacgattcaataactgggttttctcctacctaaacattacaataaatttcgatttcttacaattcgatctagttttgagatctgtgtaacaactttaaagaaaaaatgaatagaagaaaactaacatttggaaacgaaacgacgcgagagagatcgaagaagcttgagtgattccggtgatgaaagcaacaagactaatttgggattttgagtgtccaaaattttagattgtcgcggtgattttccctctataatttcggaattttcgcgcgttgagatgcgacttataaattttcaagtttcagtggaggcttacccgagaagcttttgctgggagacccgacccgttatcaagttgttggagcggataactcgctggtccgacccaatgcagcctgaactcagatcagttatggcccaataagctcgtttatggcccgtaataaagaaactcattcattcccttcccacgtctcgtttctttttccacgtggattggctagtgttattaaataaagctgcaacggtaacaagagaaagccacgtgtccacatggacctgtaacgttcactacaacggttacattcgtcttctccttttctttttctctccaaccaacaactccatcctttctctctgtatctctgtgtattcttctctcatggagcctgctcatatcgattggaagagaatcgattctcgttttgttgaagacgttttttacgaacacatcagagctcctaaatggttcgatttcttggcccctacccattttgactccattgacgacgatgcttggttctgcaaacctggtaaataaagaaactattcttgtatctctgcttctattctatcgttctttactgattctggttttatcttcaactccagaatgtaatcatcccaagagacctgaggactttttctcaacgccgacttcttccaaggtttgtttctcccttcttatttactttcttgtttcctcataaagatatgaaattacagtttcttgacaatcacaaaggtttcacctttaataatttcctgcgttttctgtttcgaagcatccaagtctgagggatacgaatgagactctaacagagcagaatcagaggtggtgatctcgaacttaagggtcgccaatctcaattctgtgctatagcctttgaatgctttttggttcacactctgtttcaatttacttgtaggaggaggggatatgctttatcaccttctactccaaacaaccaagaaagtgaaaatcagaacccgaacttagccacacctccaagctaccaagcaaaatcatggagagcagcaattaaatcaacttctgtcaagaagatgaataaagaagttccaagactaaagagcacacaatcagctagaaatctgttttcagggagagacatatttggtcatatctcagatttctgctatgaattgaagagattagccacaagggttactgagagagaagatactgggaaatctgaagtgaaggagagtcatcaagtgggtggaatagtaaatcagccttactctgttcatgacttggaattgaaaaaggaaagaaagccactgcttgaagtaagcaaagataagctccctgagtccacggatgttaaaggaagcacatttaaagagaaccgtagaagaaagaagtaagttttgtcattttttcagtaaaatagtgttatgcacaacctacatagaagtgactttactaaacttctaatgatgatttgcaggagagtggatgatgcagagaacattcctgtctcacttaatgtggagactgtaaaaaacaaaggagaggagggtagaagaaagaagtaagttcctttatatgtttgagccttagatatgtatacaattgatgcccttagctcagtaaagtactaaactttggattaagtgaggattttttttaggagaatggatgatgcagagaacatccgagttc

SEQ ID NO: 37482 - DNA, 7918 bp, Arabidopsis thaliana landsberg
  unsure (1)..(7918): unsure at all n locations
atagaagaaacactgtcaccttatctagattttggtttactaataaatcccatgcagccgggggggggtgtttcattcagcgtatcacatgatgtgacttctgtacctcccactggttctttgcaacagaacttaccattaaactctccttttgtagatcctccagatctgagatcatcatcaattactagtggctcaaacactggtgagaatcagacaaatatagtccacctcccagctttgaccaggaatatacaccaatttgcttgggatgcttctttcagttctagagccagtaatccttcgggtattgggatgcctgcagagcgattaggaccacagtgggaaacaccgagaagcaaccaagagcagcccttgtttgcacctgcaactgacatgagacagccggtgcatgatctttggaatttcgcacgtggaagccctggttcatctgtagattctctctttgttcctcgagcagggccgagttcagctattcatacgccacagcctaatcccacatggattcctcctcagagtgccccaccacataatccatcgagaacatcagaactttctccttggtctttatttcctagtattgaatctccatctgctagtcatggtggccctcttccattattacccgcaggcccttctgtttcctcaaatgaggtgacaatgccatctagttctaatagccgaagccatcgctcacggcatagaagatcaggtttgttattggagagacaaaatgaacttctccacttgcgtcacatagggaggagcttagctgctgacggtaatggaaggaatcaaatcatttctgaggtatgagttccataaaatacttgatcttgtatgataatttggtagatgctatatatgaatctttatagtatctttcactatcttttattatccaatggtttgatagaagaatcctaccctcataagcatctcatgttagagtaagtggggttaagagtgtgcatttatgggttgttgtcttggtttgtagtttactttttcgtctttttgttttgaagtttttctatatgagaactagagcagtttgatgcactctgatatgacttccatatgcaaaccatattgatgtcttacgttttgggaatgctcgttttcttaatctagtttttaacctccttagcagctgctacatgtatttagttttgatggacttcgataagtgtttgaatagtgagttgcactttttactctatttgttgccagatacgtcaggtgttgcatgccatgagaagaggagaaaatctacgggttgaggtatgattttgaccctagtgattttcgacaatcctacctgttaatatcagttaatggatagaacacattccatttcctggtgaatctgttggcctgatgtgtgatcttccttttttcaatttgaaaaggattacatggtgttcgatccacttatctaccagggtatgactgacatgcatgataggcatcgggaaatgcggcttgatgtggacaacatgtcgtatgaggtatatatccttcttttttttttactgttaatcacaatcttcccgttttctaacaatgtgtgggaatgaatgtaggagctattggcacttggggaacgcataggtgatgtgagcactggcctaagtgaagaggtcattttgaaagcaatgaaacaacacaaacatacatcttcgtctccttcttctgttgagttgcatcagaacatagagccatgctgcatttgtcaggtatttgattaagtatgaactagaagttttttactcgtgtgatacttacctactaattgataagcataacataaagaaaagttggtattgctgagcttgcttccattattgataagcataagataaagccccaacacatgaactgatgtttaaaagctattgctgctgtttttgacaggaagagtatgtagaaggtgataatctaggaaccttgaaatgtggacatgaattccacaaggactgtatcaagcaatgggtcatgatcaagaatctctgccccatttgtaagaccgaagcattaaagacgccatagtacgtctcatcttcgccgtgccttcgggctccattcatcatcattgcgacgccgaaaagaaaaaaataaaaatagtgatcttaaagttctgttatctcatatgagaattaattgttatgcttaactcaattgtgtcacactgttcaaaaaacattaaaacaatttcataaaaatttcatgtttaagagatttattcccatttttactagaatcatgggtaactggggatagctgatggtagatggataacaattaaaaggccttataattttgccaaagactattttgttgctgacacaacatttacaatggagccgtatatagtcctaagtgaaatctaatctacgaaatgtataacagaaactgttccttcgatttggtcagaaactgtggaatataaagatgctaaagaaagacaatttgaaacttgatccatagaaacaaaagtacaagacggtcatggtttggttggctgcttaattatatgaaatgggcttatgaaggaagagagggagaggcctttttctaaacggtctcgttttggttgttatgtaatgtcggaagtccgcttcaataaagaaaggaggttgtgtttatttattatgagaatgataaagatgattgtccccaaaccttcggggacatccgataaaattggaacgatacagagaagattagcatgggccctgcgcaaggatgacacgcttaaatcgagaaatgatccaaattttttttttcgaaattttccacaacgattcttttggatttcaaaatnnnnnnnnnnnnnnnnnnnnnnnnnnnncttactaatgccatgagtcttaacattgatttagaaagcaaaatcactccacttacaccatgttaagtctgagtttgaagagcagaagaacatgatcgatgaaaagagcaatttgtattttcgaaacatttgaccattaaaacttacaacatgtattgcatacaaacaaacattcaattgttttctctccctatggttacattacatccccaatcaaacaatccagcaacaagtttttaaccgtattttttctttctcttcttcttaaaaagaattcttgaagctcatcaaattttacaacaagatgtaacactttgtgtctcaagaatcaagatcctctgccgcctcgttgtctcttttcttcgagctgagctgcttcgttcaacatatcggctgcgtctgtgttcatgttcagcttcgctaatgccacagactgcatgtagaaagctgttggccaatccggatacacacactgcgcttgcattgcgtcgcgtagtgctgcatctggttgatcgcatagtaagtagcatagacttcgccgaccaaatacagttggagataccattgttccaacgtcaatgaactgtccacagaagcaatgtatgtaaccatatgagttctactatatccagataaacaaaatttttttggcaaatctggctttaaccataaccaaaaatccgatactaatactgagcggaaatgtaagaagaagtagccagaaatcaagacctgtgagtaacagtcgatggctgttttgaaatctttctcgcggaaagattgatcaccgcgtttccgtgcatcaagcatatctttcatttgttgagtccattcttggaatgataactgaaatccatagataaaccccaaaagttagtcaagactctttttaaagcattttagcaattgaaaccaaaactaccatttgattacctcgtttgtgccctcgtcgtctctgtaatgtgtcatgaccaaaatctgatgaatagctgtgagatccattcttgagcaggcctcacctaatggcgaaagtggtctctgtggagtcgaaggtgcctcctcttgcttctttattccaagcatcacataagatggaacctgtacccaaaatatttaacacttaaaagacgaaatttaagaactcggtcaagattgggagtttcaagatgtctagcttacgtctgatttagtttgcaatggtgcaagtgttgcaacaagatcttttgtatttggtctctctcgaggctcatattgtaaacattgagaggcgagttcgaccactacagtagcctcttctgttgagaactttccttcgaggtgtgaatccatcaacagaataatattcttgcctcgtatcatatcgagagcctagagaagaagataataccacaaatcttattcaattgatactatatgacatggacatttatcaagattaaatatgcaagaaccaagaatcactaataccttgcccataatacatattgagagctaaatctgatagacagtggttaaagaacaagagcgtggcacatatcttagctaatttcaagagagatgatgacagagcagtattatacagtttctagaaaccatggtcaatgacctactacgagagcttcacataacttaaaacaaaagcatgaccaatgagaagataatttcaccaaaacacatattagtagtagtacaattcatcctactaaaacataaagataggaacttacatggcttggagggatgtgttttccgctaagcaaatccagaaggacagttccaaagctatacgtaacactttcaggtgtcactcttcctgcaacacaaaatttatcacactgagatccatctttgcttcaagaagtttcagtgcaaaaactataaatttgagttttatgttgattgtataataatctatagagtataaacaagttgctttaccatttcttagatattcaggtggtgtataagctaaatttgtgctataacttttaccatccctactgttcttcatcaagccaaaacatgagagacgaggatcaccatcctaccatattcattccaatatacttgttaggcaccgcaacgagacagtgcatctcttaaacacgaaataaataactcttgagaagaaaataataatacctcatcaaagagaaccctataagcattcaaatcatggtacaatggacgaccctcagtactacaataatccaaagcctcagctatgtaatatcctactcgcaacctcatagcccactcaattgtctgattttcccctgtgaataaccaaaacaacaacaagataagaaacaaaaattcaccttttaagacattataattcacctaaagtagtctcttttcatccatctaacataaaccataaatgcaagctcctaatatcagcaaacattactaaagttcccagctttagacaagaggcaataaaagaaggagaaaaagcatacaatggaacaaatgcttagcaagagtatcattaggcatgaactcagcaacaagaagcctctcatctccatcacaacaatatccaatcaaattcgctaatcgattatgcctcaatttccccacaccccatgcttcttcctgaaacaaattgaagaaacaaaacaaaacagatttcagaaaacaaatattcaatcaaattaaaaggttctgtttttttttttagcttaccgcaaattgtttaggctcaggccaagccatcttagtaaacttcttgacagcgatccaacgacggttctgaagtcggcctttgaagacaagatttggggctttctcaccactttctgatacgatgttgtctgagctaaagttgtttgtagctgctttaaggtcagcgtaaagtatttctcagagaaagatgggattcctcctcctcctcctccgccggctacaccactagctccgccgcttccgccgttatcagccgtcgtagctcctccgtgattgttttgagatagtggttgcggctgaactccatctttcccaagtgggttatcgccggaaaacaaggattgacaacaacccatcaaactctttttccttacccaagtcggaaagtgtttctctttcgctccttgtaagagagagaaagagttgatagtggtcgaaacaaatataaaaatccaatttttatttcttcttttttcttttcaattcttctgttttgactcctgaggtaagtttctgtgacattgtctcccttcttgtcaatatggtaccactaatattagattattaaaattcaaagattaacactttgattataattatgaagtccaattatgttttattttaaaagcaatggatttgaaaactgaagagccaaaacaaatcagaagaagccaacttcttttgtatactacgatactataatacaataaattgattccgatgttcaatgatttaaaacattgtggtaccaaaagagattttgggaaatcacattattgccagctcaaattgtttgtgaatggagtgacttatcatcaaccattcctacttttgctttctcgatttttttcttatttattcaacgaacattcccatttcaacccaaagttttttgttttgttttttcttataaatattaagtacctagcaacttatttcaaaaggtaattcgtactttgtgtataaatgtaaagagaagcgtgtgaagaaaatatgaagttttagaagttgactttgtaaccttgtgatattttggatttatgtgttcttttgcattatcgcatgcacttggtttatttttctgaattattgacgtgccttctaaatagagtaaaagtgaatatcaatttttcttaatggatttgacagactgacatatttctttccgtttgagttctgattatcttgtttaccaaaaatgattatttctttgtgttattcctagaaataaactggaatcaaatctcttggaattaaccttattttaagaagtttactctcaaggcagaaatctttctaaaccataaaagacagtttatttgcctttggaactatgtattatttggaacctaagacaaatatggctaaaatgttataaattctttaaaatatgattttgctaatttagaacctcatattagagattaccaaatttgaactagatgtagttacgcggtacttttttaataaagacggctagcctagtactacaaaacatggtcaaaatatggattaagcttccaaactttcaacggtttacttgtatatattttattaattatagatagattatgtggatataacaccaaaatgctacagaaaatacaccgtaaaattatcaaacatttgtactttcattttaatttagtttggaaacctagaaatactatttttcaacattaaaatcaattattacattatatacacattactattaaacgataagttgatatttatcttaaaataatttgattgagaaaataatataatagtatcatttaaaaaatgatcaaaggtttggaaaaaaaaaactgcaaaatcttaatgaataaactccaatgaccacccaaaaggacaataattggtatattctcaatttagatgtatggaaatgaaaagtatgcttgctatttgtaatacccatcacatatagcttnnnnnnnnnnnnnnnnnnaagctttcaagaacacaagagctgtctctttgtgtagaaaaggcaaagagtgaagtgatccgatgattctccagagtaattggcttttcttatatgattagatgctcaagcactatctctacttatattttaatactaaataagtactgattatttaacctttggttggatcgcaataataacttctggcacttattctctgcatgttattaactttatttcattttattattactaataaagagaaacaaaaaaaaaagattgacacatgagacgtcaagttcacgctattcatgttaggcacggcagcttcaagacgagaactattggcgcatggactagtcgagattactcttgagaccactaggtttaaatattatatagtttcacacgaatca

SEQ ID NO: 37483 - DNA, 1854 bp, Arabidopsis thaliana landsberg
aattgactcctaaccctaacaatctctacaattatatatatatatatattaaaaaattagcagttcttgaatgtgtatactgtttcatatggatatttattattgttttatttctagactcgtttaatatttgatttattttttttcttaccaaaacatagagtatgatctaaccgaatttaacattggatggattactttaagatcgtttgatttgattgttggattacattggaatatgacataataaattaaatacataaaattacaaatagaacttattaaatagaaaatattatgattatgatttattatgtaaactagcaaactaaaatttctgcatatttccccaagctgaacagcgtggatcctatctagtttacctttagattttcaaacctctaaaattgaaataatgtttgataattttcaataatgcaaaaaaagaatgaagaagaaatttaatcaaaacaaaagacaaacatatcacatataaacttcattgttctgatgcttctttgatttagcaattttgggaaaaaataagttcgaatgcaaaaataaagtttgtaattattcaacaaaaaattcgggcataccaattttttttctttcttttaatcgtttgaatgcaatttttttgttcggaatatgaacatgacatgtagaaagatgaaatgcttgctagagcgtttgagtttagagaagcgtttgttagcatgaaagcttttgataccaatgataaatttttgcctttcgaggatgagtggaaccgccgtgaaaagatttgtgatctattgaaaccttttagtgttattatcacttactttttaggctctaagtatcccacatccaatgtatactttacacaaatatggaggattgagttgttgctgaagaagtatgctatttgtgatgatgatgttgttgagcaagtggcccaagagatgcatggtaaattttctgagtattgggaagattatagtctcattttggctatgggagcagttttggatccgaagcttaaattgaagatgcttgaagtagcttaaaagaaagtaaattctactacttataagttaaaaattaaagggctcgagaagaatttgatgatattgtataaagttggaacttggtgaattaacttgatgtgagtttttgtaacataagatctatttgaactagaaagaagtattgaagacggtgtgaacaacacaaagacacacttggatatttatttggatgagagtgaaagtctttttcgaaatttggatgtcttaagctattggaaagataatcagaatcgatttggcggtttagcttctatgacatgcgatgtccttagcattcctattactaaagtagcatcaaactcagcttttagcattggatcgagggttttgactccatacagaaatcgcttgcttccagaaaatgttcatgtttgctttgtactcgcaattggctacgcaagtttgttgactatgaaggtaagagttttaaattgaaagctttataggtaattgaattatattaactaaatttcattgtaaattgtaggtaccacagaagataccaatgagtttaaccatggagatactcgaaagactacaagtagttcgagagtataaggttcaagatcggaaaaatcaagtgtgccatgaaacttttgttttttctcttttgtttttgaaatattttttattttaagttttgttttggtaataaaaccacttttgatattaaaagtctttatgaatcacatttgataaaaacatggatttgattttacattttacaagtgcgtatgaattaaatttgataaaacatggattaattctacattttataaaa

SEQ ID NO: 37484 - DNA, 5017 bp, Arabidopsis thaliana landsberg
ggaacttgagacgtttggaggcgagaatggcgttgtttctagagaagaagatctcaacagacccagtggcccactcgcaacacctggtgaagacgatccgtgagattaatgggtgcagagcctcgaaaagaatctcgcttagtgatgcagtaaaccgagcgccacccacgattatgcatgcggtatcctgtgaccacgtcctctgtcaccgacccataaatccatccaactctatctccccactccgttttatcctcataccaacaagagattacagaaacagactctgcgacagtggtagcatcaagtgggtcacgagggactctaagggctccgggaggacgaccgtacttgacagccgggtggtctgccaatggacgaccttggaactctgcaattggaattgactcagctaggagtgtggagttcccaaagcgcttggggagttgtgtgacatcaaggtccgggtcaaagtcactggtggttagagcctctgtttctgattccttcttctcaagaagcttgtcagggttgggtggatcaaaaccatagagagcaaagcgcctaaacatagtacctgttccaacataaactggtccctggaaaagaaaaacagagaatcatttattttttggtaaaggatctttatatatatatctgtctatagttggtttgcattgcatcaaaaataagtatatatacagtacctggacaccgtcgagagcacgcatattaccgtcaaaaaatacagtgttattgttagcatatctatcagaaggatcgatgccttcgaatctttgcggaaactgaatgtagcaaatgtcttcaccacctctgtccatcataaaacacatcccttctcgtacggccttacagttatagatgtaatgatcacaatcaagattaaggataaaaggtccatttgagaggatagcagaggcacgaacaagtgcattcatggctccagctttcttgttgtgatcatatccaggccgcttctcacgtgacacatacacaaacatgggtaaacgagtgtccgtatctgaaaaatcaatgactttatcgtcgctatttccaattaatggatcgctgctaggtggtttcaacatcacctggagaatcccagcatgatcacctttggaatgctctcgagtagaggctgcccaagttcctggccagtgggtgccatctgccatccacgtggctttggggactttcacaggctctgttggatcacctccgctctccctcatctgttttagagctttcatttcctcccttgcattaaatgcatctgacctcctccgtattgagtcagggaggccgttgatgcgaaccttgaattcatcatactccctcttaatctttcttctgtccttgacaaaatcaattctgctcttattctttgttggatctatcttcaaactgaaatacgagtctggatttcgaggctcaatgttatgtttgcgacaaaaaggtacccagagatccgcaaagctagcagcttctgccatagcttcaaaggatagaagagctcctccatcatcagaaagatagcatgacaccttctccaccggataatcaacggccaatatggacagaatcgtgttggcggtgacaaggggcggctctttctctggatctgccgttgacacaaaaaggtcaatacctgggagatccgacctccctgttgggttggagggagaaggcatgtcaaatttgtcacgaagaacttccaggtcagtggaccggtttattggacacaacttagggatctggtctagaatccatgaaaatccaaaccaaagctcgcatattatagacatgagccataaccatattgcgtcttcgttaggatttcggatcctccaagttagaaaaaaacatagcacgacaaaacgaatgacgattagtaatctgtaaggactaatgatggcggctggaatagggattcgtcggctcagtggccgccatggcttgtcagctgtttccaccatgccgcctctcatcccttcatccatatcatcgccatacatttcgtcttgaggccaatacgcattaccgtacccatatgtgccttgcgtctcgaatagccatctgttgtgatcaaattcaccgttttggttcctcttcatcatagacatgttgttgttgttcccacgttgatctttccctggagctggtaaggggagagcaccactagaatagtcaggcgtatcgtcatctaggtccccgattttgtattgttccttgcatcctggacaaaggcctgtctctttctgggcgtccatgaagcaatccctacagatcttaaacctacaaagacaatcatcaccacgtttgttggttagttagaattaaacctcattttcttgtgcaacaagtaaaagatatcaattagtgtttattaatatataccggcattcacatggcatcacgtcctttcctctctcgtctttcatgacatttccgtcgcaagcaggcatggcacacgaagagcctttagcgccagccatctgagggtgtgtgacatctgaatcgatcactttgtccataagatgtgcacgtgttacactgttgaaaccaccagtaaataaagaatttgacacgtattgctcttcggctttggtggccatgggctgattgtccggcgtcggaggtatgtgcaccgtatagttagaataatccccggagagctcgcctgataattctatattatctcgagataaactcacatatcttccgctagatgttcgtcttgcaaatttgacggtttggccgctaccggaattgttacggacctttttagaagtttgaggaggcgtggacgccattgtgaagccaaacaaaggagcttggtttctgcaatgtgatcatgcagtataaagatgaaacgtgacttttttaccttcttgttgattttggcaaaacagagagaaagataaggaggagaggattatcaggacacaaaactgtttatgccatggattcctatttttgggcttctatgtatcatgcactaacctattttaggaagctcgagggttttgttgtttattctattttgggattttaacatattctttcttttaactcaaatgatttattctggaaccccattcttcgctcatacaagccgatggaaaatttcctacttttttagttaacgcacagtccatattttttttattattcaactactaactatagaaatgatccttatcgtttgatttttttttttattttttttttggcaactattctcgttactaatttaaaatgtggattactgcataatttcatattgaataagattagatatccttaattcgtcttaacactacgcttgttttcaattttcaacttgtttgcttgttttttccaaatttagataattggacttagcttcaaaaccgatgatcttaatgtgaattaatcatctaccattacttaataaggaattgtgttaattagtattgtactgtacttttactttggaatttgaagaacttaacccaattagactaatttcaaatacaatataaaggagctaacggttaaatggcagatttctaatactaatagttttggaaattgatatgtaagagctatattataaactaagaatgatgcatgatttactgatagctaaatggatggacttagtttttgtataaacacatacaaaacattgtttagctacacaatattctactagcgtattactaattgacagtacaatagtgaaattgaagaagcatcaaaaatatacttgcaatacatagaaggttcagtgtaacaaaggggttatatttggggactagctagagagacggtgataaaatacggggacgtctgtttcagagtacacgggaatatcccaacgtccacaaacgcaaatatgttaagatctagctaggcttatgcatgtaaaactggcggtagaaaatcacgataacatatctcgtaggcttgaccagatcaagaagcaccatccaaaactcgtctgatgatcccatgctgtctagtgaggttgaacagacaatattgggaagtatacataagagaagctgactcgtgaggttgaatagataaagtgtaacgtactagtgtttttttgttgttgttgttgtaatagtactgttgatggattttgataacgttcgttaaattatgtttatggatttactagttggaaaggagttatttttatatggaatcaaagaacatcttgttaacgatgttaaaaaccacttaaatattttttgttaactttaaaacggtgaatttaaacgataacattatgttaaattgagatttaaatgattttttttcctatgggctattaaattataattaatcaaatacaaaacgctgaaaggtaagaattaagaatgaaagaaacgcagcgtttcgtttcgacaaagtccccgggttctgggttggccttttatcattttgaatcgccgtgagaagtcgaatatgcgttagatgtcgtcgtcgcagaaccttggtggcgccaccagatgcggccgggtgattgggccatctttggacaagatcataaaaaatgccgcctggcgcaagcacaccttccttgtttccgcctgtaagtctgtactcgacaagctcgaagctctctccgattctcccgatccttcgtcgcctctcttcggtctcactacctccgatgcagatgccgttcttcagccactccttctctctcttgataccggctatgctaaggttattgagcctgctctcgattgctctttcaagctcttctctctctccctcctccggggcgaggtctgctcctcgtcccctgattctcttctctacaagctcatccatgcgatctgcaaggtttgcggcatcggcgaggagtcaattgagctggcggtccttcgtgtcctcctcgccgccgtcagatctcctcgcatcctaatccgtggcgattgtttgctccatctagtcaggacctgctacaatgtgtatctcggcgaattcggcgggc

SEQ ID NO: 37485 - DNA, 1889 bp, Arabidopsis thaliana landsberg
tcaatcatgttagaaatgtagtatatgaaaagtgagattcataaaagaagatatgaaagagagataacacttatctttccatattgatgtttgacatacagaagtctaaaccaaaaaaagctcaactaccatataatatatccatcaggaggacattccaaattctgctacataacctcagaggtgtttttcacaacaatataaacgtactgcgtttcaaaatagccaattcacactaatgttaccaagccagatcaaaagaggaaactgggctaaagcaacaaagatcaagagatagtgatgcctgcttgagtcataactcctagattctgcaaagagaactcgcttcattgtcttcactaagaaaaccccagtgcataagcaggtccacggaatcaaaacatagtaagagtatccccagattatcttgccaagaacagctagacaaaggcctgtgaaagtatagcctgcatatgccacaatatccaagagaggggcttctccgcttccaagtgaaagcaatgttatcttcagcagcatcacttgcaaaaaccagccaaccattcctttcacaaaaagccagttcagagcttctggagtaaacctagaaaattcagaaggatcaaaatgttgaaaaggcactctagaagacttaaacctgaatagttacaacataaataaagaacttactttccatagagtcctagtgacaaaccagcaagaacaacgtaagtgccaaaggccatgagcggaatgtataagtctggtgcatttatatcgtatatcggtggtttgtatgaaagtctacccccaactggttctgatattcgagtccagtgtccctgaggtcgcagcaaaactcatatgagaaagaccccaaatacaaagaaaaaagcataccaaaaaagtgagatttaccctgtgaaggaatggaagtagaacaatcttcaacttgttcctcacatactggtcattcacttgaaaatagtattgaggatcggagaagtagcgacttatctgttaattttcaaccggttaaaacaaatgaaacgctaagtaatgaacagactggaaaaacctagagtgacagataggagtaacttacgttgctctgcacatactcagagctagaaccgaaaatcttctccccataagctcccaagccactccggataagtccagagccaggtccagagaacggattcccaaatgggctaggctgaggatttgcctgaggcattgccattccaggccggggtcccatattattatacatctctgacattcaaacaaaaccaacacaaagagcttaccgttaataatttgactaactataaactccataagcataaagaacaaaatttctttgcatgattcttgtttataagctttctttatacataaaaaaatccaaccatcaaaatatcaccaacactcaagaaaccatcaattacttctattctctctatctcttattgctcaatcacaacaattatttcacgttatctactttcttttctatatttccttcacagagaatttactaagcaaaccagaaaaattacgacattggtgatactccaggggtttcccatatttgccgtcactaagcatgcgcatagaatccggatttcgccgagacatatcccattatttagaaccgaagatggcgaagatacacacagaagaaagcgaagaaaattgtagcaatcaggatttggtaaaaatggagacgaactcagacctgatagccactgtgaagcagatagtagatctatagctttgcttctccggttgatttgatcagtgctcgtcggctaagttccggtgaattgcaaaagaaattagatccaatgtgcaatcaaataacgtaagaaaagtcgtgtgaa

SEQ ID NO: 37486 - DNA, 2406 bp, Arabidopsis thaliana landsberg
agactccaccaacaacgcctccaacatcgaagattgtcgacaagtttcctgatgtctcctctgacaggtactctcctccgatcactgcatcacatataattcagacaatgcatatatagtcagggctacaacactagaagtaaaaggaaggagagatgatgagaaacattactgttgtggctgacgtagaaaggaagccagtagaggaaagtgtatgagaccaactttgtgaagaagaggcagaaggcgaaaggagcaactccggggattttccaggcggccatgaacccgactgcctttctatcgaatccagtactcattctagattccaataagctctctgtaatggtgtcaccgagcctcatggtagagtcaatttcagttccatctctctctgcctcctcggttgtagtgattctccggccaataaaggtcatcggcggtccccacgggagtcatgagaaaagccgggccaagaaatgaccaaccccacccatatctaagcagcccagacgcgatcagagaccctgcaatgttaccgagggaagtgtgagcgctccaaacacccataatcattcctcttctcttcttgtcgaaccaattcccgagcacagccacgatacaaggccaacctatcgactgaaacaaccccgccataacctgaaccgccaagaaatagtagaagctgtggaaattcgcccagaatgtgaccccgaagagagctgtgaaaaggccggtcccgatcataccgatggtcagaaacgtcctgagatccaaacgatcgcccaagtgacctgccacaaacatcccaaccgcatagacagagaggaaagccaagtcgatctgcccaagcaaggctgttccatcaggtccatcaaaaggagcccaaccgccttcgattgttgatgcagaaagtgttcccttgacaatgctattgggctttcgggcagcatggaaggcgatgtaggcgacaaaggtcaaaatgaagacaagggcttggtattgcttgaaggagagtcttcctgaacgcttaaacttttccaagaactgaataccccatggcttggtttcttcatacaggaactgggatgaagtccatgacgccatctcttaagcaactcctcaagacgccagaacctgaaaagcagatgaagatatgaatttattgtctctattacttgtcgaacaagaaacctcaatatcttgcaaacaaggagaacaaaagtatacataaaactaaaggagaatgtagaatgaacctggaatttggatcacttttgaaattttaaaagaggagaaagttatctctctctccctctccgttcttcaactacaatggtgagaagctaggagggattaaaatcactacttaaagaaggtgaaactggctcttttataaatcatttggcccctttgctgtatttctttattgaccaagccatttgcttcactggcctccagttttctagatttttttttttttatcaaatgtacgcaaattagaaacaaatcaaaccaaagaagacgatatcagattagtcgtatccttcaacacagacgttgaactactttaataatagtttatgtgaagtagcaaagtcggcgtccgatctatcgtttgtgcccgcacgtaagaacagcaaacctctgactctaactcgtttcttcatccaaaaattgaactcgttaattgtttaatttatctacaaaactacaaacattctttggaatgatacttcattttagtgtccgaattcatttgtctagtttataggaagatgtcaacaaataaatttgtaaagatattgagcatattaaaatgcttagtttttgacttttgtttagaaatcagttattatacaatggtaattttatactgtacaacttgtgtgggttatctttatgtttctccttgtcccagatacagtctcgaatctgcaagaatttttccttttaggatgtgacaacaactcgtgaagtttatttgtaaaaatatttttgcgaaatttagtgacttgaaagaccatttttctgcttgtttgagaggtgatcatgatctcatgtttggtgatagcttacctttagtttaatgtttgattgaacatactccctgctcttcttgtaacatattcaagataaggagagctctgaccttattatacagtcatgcctcaagtattaatacgttgcttctttcatgttcgactggagatcaaagctcacagaacactggaacaggatgtgaaaaaaatgcgacaaataacgctgtcatctcttcacgacagggagagcggtagaaactcgatctacatgattctacataacattaactcggtgcacgtatcattctagtatcttatcaatatgcagattgcacacacatatgagtttgccgtctaactgtgc

SEQ ID NO: 37487 - DNA, 1852 bp, Arabidopsis thaliana landsberg
ttctggtcttggtacttgcacaacgctaaaacccccgtaacctttccctcaatatcagtccttttgttttataaagcaatgcctcgatgaagctaccatcacgatggtaaaagccaaataaaagcttctttatgttcttctggccagaaatcacagcattgaaacctattctcagcttcgttaaagtgtcatggtctttaaggcagcaaccataatcatctgtggtaaaaacctccccgagaagaattttattgacaacttcttctctctttatcccagagagcttctgcattgcgttgttccactctgagcataccccattttcattggtcataaaaattggtggaatgagtgtggaagggctccacatgattcgggcataatctccttgcacgcggctatagttttcagtaagctttttctggcctgtaacatcttgtccaatgaagcatacaccaagaacattattcgtcatatctctgctacaacaagtgttgacaactaactcaaccggactgcttttccttttaggaccaaatgctctgatcctgatctcagcaccacgttcttcactacctattatgtattataacacaaggcacagatgaaaatgtgcgaagtcagtaaaaaagatgaaaacaaaaataaattggagccagaaaccacagaaaaaatattttcttccatactagaccggaacatgtctgcataaccttcgagagccaaggctaacatgttcttcacggtttctacataatcgtcctcaccgagatctgacacaggtgtgcctattgcttgttcaagcggccaatccctagtaacctcagccgcctttaccattacaaacatttattacaccagaggcatcaaccgcaaagatgggaacagctgctgtatcaatcaaccgcaccatttcattcgcgataacacacaattcatctaccttctgaaccctattatccacaagtgggacatccacaacagtctttgaatgctcctcttgcaatgagccttttattattagctgcagagaattaattgcatccatttccatgtcatcccagggcacacttttccacctgactatttccataaaagccttgaatgaggatctgggatgcatcctcttaccatctctgtcattaggatcatgtcgtgcaccgccccacttgatctgttttgcagtgctagaccggaaccagaaaagaaaatctttttcggtaatatatactgcagccattccacagattgactccccaagaacagaagcatccggattgccagactccattagactttcagtgggtaagcccgtgttgcctccatgacttttgagaacccaagggattagatctctaatttgtggcgctgtgggagtaactcctagagaccagagcttgtctctgcaataaagggctgctccatcacatttaacaagatccattatatttggtgattgagtgactatacctattggtgcattgcgaaaaagcatgtcacatagcacactctgagtttgcagaatacgcttctctttcaacagaacagctgattccgcttctttgttgatctgcacgccaaatacttgagtcaagaattcacaagcatatcgtaacggaaacggaacaaatctaggacttgcgtgatgacaaaccaccaagccccataagtgtctgccagtctgtaaatctctgttcatctcatcactatcactaccattgatagttacagacatgacaagagacgccactgatcccatattactcatatactgtgcgtgacaaccatgaggagctctcaaagtagatccagaaagacttattggctgtgagagactcttatcttgaacgac

SEQ ID NO: 37488 - DNA, 2229 bp, Arabidopsis thaliana landsberg
catatattgaaagtctccatgatttgttttaacaattattaatagaaaacttttttttggacaaaatttaatagaaaatttatgttaacagagaaacaagaaactgtaaattcaaaaatagcaacatagatgttgttataaatacacacacacaaaaaacaagtcaacacgacaaaagaagatcaaaatatctctacaaaaaatgaaatatttcacaatttttctatttgtttttagtctttgcatgcttggtcatgtatccggcgccggaatcagaatcgtgaacgaactcaaaaataagaaaaccctttggatgaggtgttattccaaaaatgacgtacttggtccaacaataataccaaatggaggacaatttacagattatttctttcataatttatttggtacgacgcgttttatgtgtaccttaaaacaaggacctggatttagtcacagtcagagctttagagcatttaaaaattctggcttatgggattggagagctagagaagatgggatatatttaagaagaatttataaggccaaatttgacgacggtgcagacaatctgcataaagagcaaagttggatatagtaaatatttacaagctacctaatttatatataagattcaatactcttcattaagacaaattatgtatacaaaaatagtcttattttaattttaatttgtctactaagcaattctttttttttaaataagctgtaaaactattaacactaatttatgtgtgatgtgccaccaaaaaactatgagtaatggcttctaagaaaataatataatttcattcatgtgtataataatttatctataattaacttgcctttaaactcatatgtaacaaccacaaaattcgtgtgtaactactaatgtaaaatcaaaactagtatctttagctaaagaatgatatctattgtaacccacaatcaataatcatgattcatgcacgcatagacccttcttcgaattttcatcttggatttgttttctactcccagttaatctttgtcaaattccgttgcgttaggatatatagttaacagattgattcgccatgtgcgcttttttgtttatatatgcaaaaacgatggacataatcagtaagtatatatagattatgaagatagtatcagtttagcaacttatttgcgatttcattttggtggacatattgtatgctgcaaattatagagttgacatattggatacaatctatgaatgagataattcataaattggttcacttactttttccaccataaatgatctgatacctcgattatattgattaatttggattaacataaattgatttgatacctcgactataggcattagtttgttggcaaatacaaaataaaaaaccactttttctattggtgtggcacagacatgagataccaacctattagctttttaggctggacatcaataatttaggattttattttttaaagatttctttaaacatggttattagtcaatatatattaatttggatctttttatttaccatagttgataattataggtgatccggatcaacatcgaattaagggtctaggattagatagatcttggtctaacatcaacaacttaagttatccgactaattctagagatgtgacatcatgacagaatttctatttatttatcagatgttcaactggacctcacaaccacccaaccacagaaacggtcccaatcccacattccagatccctccagtttgatgtcgaggtccactcaaaaacctaaaaaaccaagctaggctggtacttacaaattcaaatccttttttaggttgaccacaaattaatagtcttcgatcatttgttacctcaactatcaatagcaaacttatattaatagagaaacaagaaaagctttaaatacaaatgtagcacacacgaaaacaagtcaacacgaaaaagatctaaacatctaccaaacacaatccaaatatatatgtaaaaatgcaaaacctctcaatactacttgtgtgtagcttttgcatacttggccatgtatctagcgctggaatcaggattggtaacgaactcaaaaacaaaaaactcttatggatgagatgttattccaaagatgacgttataggtccattaataataccgatcggagggcataggttcaattattttgggaccaacatatttgcttcgactcgtttcatgtgtaccttgagacaa

SEQ ID NO: 37489 - DNA, 1949 bp, Arabidopsis thaliana landsberg
ctttttctatcctctaataatatataatcatattttagtaattatttagtagataatatgattaacacgtgaatagcaaagtttctatcatttttattcaaaaaaagattcataagtaataaaatagatagtgttgagagatagtcaacttttctttttctttttgtgcatggccttttgatgcagcgtcattgttgtacaccaccagtcacactattgtgggatgtgataatcggtaccttttaatgacaggagcttctttcttacattttccacttcaaacaaaccgataactccgaggaagtgactcttcctctctctctctctcttttttatattttttcactgggaaaaatgtggttgctttcgtcttctccatggctctctgagctctcatgttcatattcggctgttgtagaacatacgtcttcagttccagtaccaatccaatggctcagatttgttttactctctccttgccctcaacgcgctctcttctccgccgttgattttatattcctcctcctcctcctctgcttcgctcttcacaagctcttttcttcttccgaaatcaacggacacgctgagattaggaaacctcttattggtatccgtggaagaaccccaaccagaacaaccgcatggttcaaaacgacggtcgcagtcaccgttctattgtcgttttgctccgtcgtgctctgcgttttggccttcactggcaagcgacggactcagagaccatggaacctcatagacccgctcttttggcttattcacgccgttacacacctagtcatcgccgctctcgtcctccaccagaagagattcgctgctctaaatcatcccttatctctacgaatctactggatttccagtttcgtcctcacgtctctcttcgccgtcactgggattttccattttctctccgacgccgccacgagtctgagagcagaagacgtcgcttcattcttctccttccctttaaccgcctttcttctcatcgcctccgtcagaggaatcaccggcctcgtcacagcggagaccaacagtcctacgaaaccatccgacgccgtttcggtggagaaatccgataacgtctctctctacgcgtctgcttctgttttctcgaaaacgttctggttatggatgaatcctttactcagcaaaggctacaaatctccactgacgctcgaacaagtccccacgctttctccagagcacaaagcagagaggctcgcgcttctcttcgaatcgagttggccaaaccgtcggagaggggtgggaccctatccgtacgactctactcccatctttctggaaggagatccttttcaccgtgattctagccatcgtccgccttggcgtcatgtacattggtccccttctcatccacagcttcggcgatttcacctcctgcaagagatcctccccgtggcaaggttattacctcgtcctcatcctccttgttgccaaattcgtcgaggtcttgacgacgcatcagttcaatttcgattcccagaagcttgggatgcttataaggtcaactctaatcactgcactctacaagaaaggtttaaagctcacaggctctgcgcgtcagaaccacggggtaggacaaatcgtgaattacatggccgtagatgcacaacagctctctgacatgatgcttcagctccacgcaatctggctcatgcctttgcaagtcactgttgcactagtgcttctctacgggagcctaggcgcgtctgttataaccgcggttattgggctgactggagtgttcgtcttcatcctcctggggactcagagaaacaacggataccaattcagcttgatgggaaaccgagattctcggatgaaggccaccaaccagatgctcaattacatgcgagccatcaagtttcaggcttgggagaatcattttaacaagaggatcctcaaactcaggg

SEQ ID NO: 37490 - DNA, 3471 bp, Arabidopsis thaliana landsberg
  unsure (1)..(3471): unsure at all n locations
tcataaacatttctggaattatataattcagcttgatttatgttgatgcaaacgtgcgttatacgacaagagaatctctcaagaagtcagtggagatgctttgggcgaggtacagattccatttttcttactttgatctaatgagtgtgaagattagcatttcgaagcagatgatgatgttttgtttatgaattgttgttattgcaggagttcaaaggatacgttttcaagatcaagggtggttgcgataagcaaggtttcccaatgaagcagggagttttgactccaggccgtgttcgccttttgcttcaccgaggtaactaaacataataccttttcttacacttttgcatctataatggatttgtatttgtgtgtgtgtgtgttttgctgtagattaacattgtttcgtaatgggtgaacaggaactccttgcttcagaggacatggaaggagaactggtgagaggagaagaaagtctgttcgtggttgcattgtgagccctgatctctctgttctgaaccttgtcattgtgaagaagggtgagaacgatcttcctgggcttaccgatactgagaagccaagaatgagaggaccaaagagagcctccaagatccgtaaactgtttaacctcaagaaggaagatgatgtcaggacctatgtcaacacttaccgccgcaagttcacaaacaagaagggtgagacactgaacttgagaaatagtggtttctgaatcacacttgagaaataatgttttctgaaacttgtttcttctgtttggatttttgacaggcaaggaagttagcaaagcccctaagatccagaggcttgtgaccccattgactcttcagaggaagagagctagaattgctgacaagaagaagagaatcgccaaggctaactctgatgcagctgattaccagaagcttcttgcctccagactaaaggagcagcgtgatcgccgtagtgaaagtttggccaagaagaggtctagactctcttctgctcctgctaaaccctctgtcacagcttaaaaaagcttgagaatcaaatcaaagatgtcacctttctagttgtgttctcttttcttctccggctattaaaaagttagttcgagttcatattcagctgtttttgttccaagacatgggtacacaatcgctttgggcttgtttcatgatttatgcttttagttgaagaccattttaaactcaatttttattgcttatctttctcagtttttgatcaaagcgtttctccattgaaaaccattttaatcacctgtttcaatcacctgtttcaatcatacataatgttaaacacatgtactggcgattacaataggtatatattttgactgaaatttatggagcattgtatgacggtttgataaatttctgagaaaactcattcttaagttttaagattatctcaacaactggtgaatcaaaactgtgatgtgtggtttgggccaaacgacccataaacgagtacaacttaacagagaaagaacaaaaacaattatatattttgacagagagaggtaacacagcaaaggggtggtggcgcagttggctagcgcgtaggtctcatagctattgagtgatcctgaggtcgagagttcgagcctctctcaccccacaatattcttntatntaatcgttaaaatggtgaggagcagccaaagccatttgagaagagcattatcagcctctcttagtgcaaaagcggacatttgcttaaccattgccagaagtgtgtgcatgtccattgtgtcacgcataactaacagatagctttgtacaatgagcttgtcaaagtgattcaatatcatatcactctggagtaatctgatgctcgtgatcgatccccttcagacgggtctttccatataagtaacatattatatgtataaagatgaatctctatcatggccagcttgtgatgtttaattcattccgacttgcgtatacagaataccaaaactgtgtgtaaaattcaaaactcaaaacactcaggtttgcaatgaaagaggttataacagagacaacgagaatgtgcaaatatcattcctgcttcaatcctatcacgtacacacaaacatggtgaagctgatagtttacgatgatactcatcaatcttttggatttgcgaatgcatttttttgtcacatattccagtcaaaaataactagcttcgaagcttccaagttttttcatgaagtttgatgcatacagtgagatctagagagagacattgatctcaatgttgtctatgagcctgaccgttccaaaccaagcagcaacacaaatcactaccccactctttatctcttctactccttcaagagtttcttggtcaactatctgcatatgcacacaatcgcatggctcacatcaaaacacatgtgtgtacagattgatccaaacaacaactgaaattcaactccacttccaataaaatgaaatgcttacctcgacataatctactcgtcctgcagatccaacaacttgttgaatgatcatatccttaagctctgcacaattggttttcccttctgcaacagaagctttagccatggccagtgacctacttatagacaaagcctaccatatcataacaaaacaacagaaacaaagtaagccatccttgatccttgttcacataccagaacataaaggagttgttactttaccctttgcctttcttcatctgaaagacgcacatttctcgaactcatcgcaagtccatctttttctctagctatatctgatcctacaatctcaataccaaaattaagatctcgaacctacataacaaacacagcaacatcaggcttaccattctctacaatctctataccagcaagaaattgtgcaaaatgttaccaattctcaccattctctgtataatcctccattgttgataatctttcttaccaaacagagcaacatcaggctcaacaatattaaaaagcttagtaacaatagtagcaacacctctaaagaacacaggcctactcttcccacacaaacctttctccaatctctcaaccctaatccaagtctcatgccctaacccaccttcctccacacaactcactaccctcccaccattaccaccaccgtcgtttatcttcttcgtctcaccgccgtaatcatagaggttttttgggttaaagacgacgactttaccaccggaaagagccgcgagcttagtgagatcgccggagaaatcagatgggtatgtggagaggtcttcagtgggagagaattggcctggattgacgtagattgagacgacggtgacgtcagtgagggctagtgattgacgaacgagagataagtgaccttcgtggaggtaacccattgttggtactaaaccaatggtcttgccttgtgatctcatggctcgagaccattttctcatagagtctttgtctctgattacttctggttccattgtcggaaa

SEQ ID NO: 37491 - DNA, 3587 bp, Arabidopsis thaliana landsberg
  unsure (1)..(3587): unsure at all n locations
tttctccaggtctcgaaaagtcccctttcccgagactttctattccttatttatacccgtccgtatagtagggtacgcaaggtgaattcccgagagtgccccttttctacgcagccgaactcacatcctgaccaggccgggcttcggcctggtgggccggctcgagttctaaagtgatggtcggggctgggtcgttattccttgaaatgggccggttgatcactgaggcccaattgatgtatcaacacccttgacctaattttagtttggtttgtctgtgggaaaagtttttaataaagatttattttcactcttatcataaaaaattgtaaaattgaagttttattataaaatatagatcgaaaatattttaaatgacatattgaaattagttttggataaagttttatttcgttacatagatgttcatagttgacaacatcggaatcgataagtattttaaagtagtaaaagatacgtgaagccatgcatgaacaaacttctgtagcttaggaagatatcattggagagaaatatactccaatagcatcaaaagaaccaccatctcttccatggaacccactgataacattacctttagtctccaacacaaatttggtaccaatgaccaatccaaatgtctgagagattctcccttttgacgttttgaaagttaatgacgtaagaaccaaatagttaccctcactgatatggtcgtatgtaccctccacagatgtcatatattcattcggaaagtccacagcaaactgcaataaatacacaattagtgtatttgatatttcataccccaaaaaaaaacttaaaagcttagtatatttatttcatataccattcgaaatagaaacatttatttataaaaacctcgttcagtttattgtatataccgaccaagggctatagagattttacctcctgcgtttctccattcttcatcccgtgataacgtgtcaccacttggccaccttggtcatagtcaatgttcatactccttatatgagtttcagtaaaagtaacatacacctttcttacaccgtcgaaattaggaccatcatcccaatattcgcctccggttatgccaccctggagttctgatttggtaggagcagtctttacatatgcaccaagagatcggaggctacgccaagcagatccatggaagccaacgatgacttttccatcgactccaagtgaaaacttagtacccttttgatatccaataaattctgaagtcttgaggttggttttgaattggagtgcttgcatcacaccggtcttccagtcgtagtaaccctcaacagatacaatttgttcatactggagatggtcaatctcaaactgcaaaccaaaaatgataaaaacaattacaaaatgtcaataataataactatacaatgaaaatacttaaattgtcatattttgaagacatacataccgtttgcgtgaatcctttacgcgagagaccatggattgatccaagtttgggttgaccaatcttgagattatcaaacttaacataatcaaacttgacgtactgaatcccttcatgaccacctcgtacatgaatctttgcgatattgtcatggtcaagtaaatcatcccactgattgcctcctttcccgccttttgcttgtagtttctcggcaggtggaggcggaggagcaggagcagaaagaatcagcggagagaaatatgccccgatggcatctacggcagcagcagctcgcccatgaaacccgataagagcactaccattgctttcaaacacgaattttctagcagcaacttttccaaatatcggagaggttctcccttttgacgttttgaacatcagcgacctcacacggtttttactagtatcgcttacaatatcgcatgtaccctccatatatatgatgtattcagtcggatagtcgaccacaaactgaagtaaaaaataagcaaaagattatatgtcagaaaatataaggcagccagagaagagtatttaaatatgtcagaacttggacctcctcttgtcgtcctacgttacccccgtactctcgtctttcaattaagccacctttgtcataatcaatcctgatttgccttatctcattggcatctaacgcaaaggaaatctttctcacaccattgtagttagtaccgtcatcccaaagttgggctcctgaaccaccttggtagtcaaatttagtaggaggagccgttacgaaataagctccaagagagtttagataagtctgagcatatccatggaagccaattatcttttttccgttaacttcaagtgaaaacttcaaaccattttcatcgtatcctatcatgtctgaagtcttcttgttggttttgaatttaagcccttgaaccaaacccttagattcatcatagtaaccctcaacggatacaagatgttcattggttggatcaatctcaaactgcaattaaatggttgataccaaatgattacaaaatgtcaataataataactatacaatgaaaatacttaaattgtcatattttgaagacatacataccgtttgcgtgaatcctcctctacccaagagaccatggactgatccagtttggggttgcccactcttgacataatcaaacttcacgtactgaatgccttcacgaccacctcgtacaagaatctttgttacattgtcatggtcagatgaatcatcccactggaggcctctacctattgcttctaacttctgagccatcacgaactgttttgattttctatgaaagagtaatatattaacttccaaagtcattcatcaagatcattattagtttataccttaaccatgtgagaaagagagagtaccttttgtggttgaagttgagagagacaatgaacggtgtagtgtgatgaataagcaggtggtgaatgtggctttttatacacccatttagtttcctaagtacctagaaatcagtatttttaataacattactcgtggtaaacaaggcattataaaatatatggtaagttgttttagtgggagttacctgccagtcggtacattgtagaagtattacgtgtcccttgtttttcctcctaatattattatataatgtaaacagaatgaagataagatttagaaataaaacataccctttgtgggtagagttgggagagataatgagagttgggagtaaagtgatgaatagaataatctggtggttgtgtctcagttttagtttatttttttaaaatgaatgcaaaattttattcaccaaaaaaatcagggttacatcaagtacatcttgtttgagttgttaagctcatactttgtcttaaataagtcaattaaaacttagtagaaagccaaaataaaaataagtcatcataatttgggtttccttttttctgaagaagagtgatctggttgtgaatgtttttgcgaatgtttttcccaatggccacaattgtgatagggtcctcctctccgtatcttcgattgttcctttctctccatatggtgtgtaccgngatctgacgcgtgtatttcagaagcagaagtgttttcctcccaacaaatgaacctgtgaggagc

SEQ ID NO: 37492 - DNA, 2108 bp, Arabidopsis thaliana landsberg
aaagagcgacctctatccagtctccagcctatataaacaggctcttctcttccatttcctcttatcaagtgacaaaagacaaacaaacgtactcaaatggctctttcttcaccttcaagaatcctctgttttgctcttgccttatccgctgcttctctctccctctctttcgcttcttcccacgattactccatcgttggatactcccccgaggatttggaatctcatgacaaactcatagaactcttcgaaaactggatctcaaattttgagaaagcttatgaaaccgttgaagagaagtttcttaggttcgaagttttcaaggataatctaaagcacatcgatgagactaacaagaaagggaaaagctactggctcgggctcaacgagtttgcggatttgagccatgaggagttcaagaaaatgtatttagggctcaagactgatatagtgagacgcgatgaagaaagatcttacgcagagttcgcttacagggacgtcgaagctgttcctaagtctgttgactggagaaagaaaggagctgtggcggaagttaagaaccagggctcttgtggtaatatcaaatcttggtctctgatctgttaatggaagttttgactcttaactaaaccatttaactttaaaaaacttgtttcgcaagaagttgttgggcgttttcgacagtagcagctgtcgaaggtataaacaagattgtgacaggaaacttgacaacattgtcagaacaagaactcatagactgtgacacgacctacaacaatggctgcaacggtggtctcatggactatgcctttgagtacattgttaagaacggaggtctacgcaaggaagaagattatccttactctatggaagaaggaacttgcgagatgcaaaaggtcccattctaatatcaactcttggtctctgatgtgttaatgaaaggtggtcccattctaattatctctgttttgaaaacaggatgaatctgaaacagtaaccattaatggacaccaagacgtacctactaatgatgagaagagtctcttgaaggcattggctcatcagcctctcagtgtcgccattgatgcatctggtagagagttccagttctatagcggcgtaagtacattataaacctataaataaagaaaatggttgttagttaattgctcttgttgatgttgaatcattttgtatttggtatatgaagggcgtgtttgatgggcggtgcggggttgatcttgaccacggtgtggctgcggttgggtatggatcaagcaagggttcagattacatcattgtgaagaattcttggggaccaaaatggggagaaaaaggttacatcaggctgaagaggaacactgggaaaccagagggtctctgtggaatcaacaagatggcttctttccccaccaaaactaagtgatcatcagatcattctctcttatctgcatttgatcagcatcttacagtgtcttcgttttttctcttttgatttatcaacggaagtcttgtaacaactatgtgcaataatacctatatataagaagcagagaattgacaaatttctagtaccaaccatgaagaaattaaagcagagaatattaaaaataatgattattgaagaaaagaacagagtattaattgaagaaaaacaaaaagtttcttggggaagaaataattgaaaaaaacagagcaatctttagattgaacagtttacaggataataagcaactgaaaaaaacagaggaaatgtagattaaacagcttcttgggtaagaagcaattggaaaaaaatacctcaaagcaaaatgtaaacaaaatctagaaaagattagcagaaatatacaattgtatgaacttgaactgatcatgtgttcaatatgtcgagatcatcatcgtgtctgaagcaaagtgctcacggaggattgcccgtcaacaatctgtggctcatcttcagactcagcattgttatcttggtcatgctcgttctcttctaacgatcttcccatagtttcacgcgtgaacaaatacgttacgatcattcccgcgataccaaacgccgccaggatcaaaaacgcgattctcacacgtttcacatctggaaa

SEQ ID NO: 37493 - DNA, 3058 bp, Arabidopsis thaliana landsberg
  unsure (1)..(3058): unsure at all n locations
cttttcttaagagcagttcataccagtaaagattcagtcatggtggtggttgcggtagcaagatatgtgaaatcgatgtggtcaactagtgagggtgttacagatctaatcatggcaatgggattaccattcgtaggtttgattatttacgaacagaaaaaacaacttgttatcatcagagagcacaagaaggttttaggacgatttttgggaggaatggtcatagttagagaggagtgatcggtcctaaataatccaaaaagggtgtttttcttttagtaaaggtttttatattattctctataaatgtttccatgaaacaagataactcttttgtataaagagattaattgattttaatttaagagatgatttatgtctacaagatactcaaagatatcctatggataggatttatctgtttcaaaatttctatgattcactgtttgttttaataaactatttgacaaccaaaagtagaannnnnnnnnnnnnnnnnnnnnnnaagtacctaaactcaagaccgatatagaagagtgccaaatccttcaattaatggcttctcaaaaagtagctttgaccccggaatcaatgtcgtaaattaaatacacataatctattatcactttgctgattgatctggatttaagcaagggtttttgaaagcataagtaaccattggttaaatccatagaatctgacaagtgataatagtgatctcgcaagctaacctaataatcaaaaccacttcttaggctgttcttgttgccaaaaaaaacaaaacgtctatgcccatatcgtgctaccttcaacgcagaattagcaatttcctaaaaatttgggaaacattgtactattatagctccttgcatgttttgactgtaaaaagacaaaccaaaacaaacatgtgctgtgacaaaaagaattaccaaattaaatagagatgatgatcactgaccttcggaatcaaccttgtggagaagaagcccgagagagtttgtaggttaaataaaagttacagtgcatcggacgatattaattacccatgaaaataaagttagggtttagaagttagagaaaaagtgtctctctgtatctttgtcctttgacttacggtgatatacagtagagggactgcactaacattcgacacttacgatgtcgacaaatagaaaccagttgttactgatgccttcaaaagtacatagaatatgacaagtgataatagtcacttcactaattagcctaataatcaaattatcaaaagcattcctgaatagtaatccatataacacattcatcttaatataaaaactaatatcttcatatccttttgaaattaattaatctctattttagtatttagtttcattgaatatatccggatgtgatctttacaaattacaattatcaaatggcattgaccacgtgggctaagttttgttgatgctgcgttatgaccgttggatcacactggataatttctgtgagcgaagacttgacttttctcaccgttggatcttacctaggatagacacacggttgataaatagttctgcgtagactgtacctcactggataagttatactcagctccattgttcctgcttgcttcttcttagcaaaaaaagaaaaagaaagacgttagtagagacattcataagagctaagcctacgaaacaatcctaagtaatcgaacggagatggcggttggaatggagaacgcgacggcgtctggtgaatgtggcgagatacttaagccacgcaccgacaagagagagtatcggaggattgtactcaaaaattcgctcgaggtgttgttaatcagcgacccagagacccagagaccttgttctagttttactgatgataaaaatcatgacgattccttctttgccttttttgctttttagtgtgctgcttcaatgaacgttagcgttgggtcgttctcggacccggacggattggaaggcctatctcatttccttggtactttttatttattcccgttttaattcttcattgcaggattcaatcactgagctgagtctaaactgtctctataaacagtgtatttatcaactctttcctgtcatttgaagtcgtgtggattcttgatggccatggtgaataacttgtgatttttattgtttttttgggggtcagagcatatgctgttttatgcaagtgaaaaataccctgaggaagatagttactccaagtacatcacaaaggtagtgtttctctctaactctggaatataatcgatgtcttgcatcggtttcttttgctcagttaaaggcaactttaataggaataaaatgggatgtgcttattggaattctgtttttgtagcatggagggagcacaaatgcttatacttccagtgaagatacaaactaccatttcgatatcaacactgattctttttatgaagctttggacaggttagacttccatttgtttttttttttgtttttatctcttgcttactaatttttcttttgacagtgttggatttttatgttattgcctgaccaggtttgcacagttctttatccaaccactgatgtcaattgatgccaccatgagggagatcaaggctgtcgactctggttagcttttgaatttctcggtagctttcctgttgaagtttgcttatagaacaaattcctaacaagttctcccatccagagcatcagaataacttgttgtctgactcttggcgtatggnnnnnnnnnnnnnnnnnnnnnnnnnnnncaaatatctgtgttaattgtactatatctatccatctagttattggcactgaagtgtgcatttcactggtttcttttgagcaagtctgttgatgtgtttgtagtatctaacttggattttgtcttccttttcgtggacacagttacagaagcatcttagtagagaagaccatccatatcacaaatttagcacaggtttatcttcgacctattttaatctggcattgactggcgttcatggaacatggtttggtaaagtgatatataaaataagtaaatggtccttcacaattttata

SEQ ID NO: 37494 - DNA, 2099 bp, Arabidopsis thaliana landsberg
gtcagaaaggatagaacataaaagaatgtataaaattacaagatccctttttatggaccgaaattattacacaatgtaatcaatgttgaaaaaacaaagatagaacctaaaaatttggttagggacgaatctcatcccagttggagtcatttacagatgccaaagcaagaaaaaaaaaagtgtatgtaggagaaaaaaaaaaacgagaaataaagacaattaaactttgcagaaattgagttgtccatttattgtgttgtttgcttctgtacacccacccaccaatgcgtacctccttttttacactgaaacacctgattcaaaagctccacctctgttcatgtctggatctttggacgctcctctcgcctgatgttttccttggtgctgcgaccaatacccgtatgccctcaagactctgtctagcagttcttgtggcaccggctctcctcttcgttgctgtggggatatacttgctgtgtgaactagcgtcttccatttgtcctgcatattcacatgttcttgagatattaacctgactgtaagacgtgatatgttccagattacatgtttgtgtctgatgtgtttaccttcaagtccacgtaagtccgatgatctgcatcctcgaaagcacgcaattttacatcacgccatctgtgtgatcagatatatcgaccattagcttttgagctttgacattatcccacgaccaaactacatgagttatgaaagaactagtgttatataccttccagtcccgagttcctcaactgcttgtacaagagcttctacctctgtcacagagaagggtctcctagttctcctctgggctagctcagtacgcttaggtttctggttcaacggaactatggcaagcgccttgacttccaactctggaagtgggacaagctcttttgaatctgatgaaggttcatcaacagatatgtcaccctgatatggaactaattcgaggttactgtccacaatatttcttgaatcaatcacgtcatctgcatgtggaattccagaatctagcataggagacgccgcagacctgggatgataattcagaaccgcttttgcttaggaatcttcaagaagaatgaacaccagtgatattcaactaaagcagcacaaggatatgatagcgaatttcttagtaccgttcagacaaacttgtagggtcggttggcacagcaggatcttcagaacacaaaggtaggggaactttgctgggactaggctccaaggtgaacccaaggttgtctagattttcatcacatgagatcccagtctgggacagagttttcctttcatctctaaccttcttcccatgcattaacaccccaacacgtattcctccgctgagtaaaacactgacagcctccatcacagtcctctgcaaccaaaagggtcaaagagcaaaatggtaatttgttaacacctcaatgtccacacaagagaaccaaacaaatgtgaagaaatacatattggcatatacctttagtgatcctactgttgcagtttctggaacttcaataaaaagctctggaatcctaaaggacttaatgcttagctttactgcaccagagataaaaatacatgagaaccacattatcctgtctccggataaatgtctcagtatcatttaccatccagtcaagtaccatgggagccttttgagaggaccacaacagctaagataagataactgaagagttttgagatagactacaataaccacctgtatctcccttcttgggtaacttggaaacacttccactactgagtcctccatcagaagttacgaccgagcttctgtcaggtgatcttcttctcttataaatgatctcacgctgccatgcgctgatgaatcccctaatgattttggtaaaaatcattaagttaaggtggatacacatcttgtcatatgatcaaatggattcgctaaaaatcaataatcagacaacaagatgtgcgaactcgatattttacacgactctctttaccaattctgccccgaattacactttagacgactcaacagcttaacgatggcttggcccgcattacttgactgttgaactataactcttacc

SEQ ID NO: 37495 - DNA, 2945 bp, Arabidopsis thaliana landsberg
actaatgaagagcacccacaaccaaaaagcatgtttgaaagggagagcttttgactgtgaaatcttgtaatagctttcactgttgttttggctccaacatcgaagtacacataacgaatcccaactctccctttaatctaatctcttttacaactaaccctcttggctcattcctcttgccttccactactcattacctaaagattattttgaatttaactacctaaagattagacaagctattaacctggggcacggctatctattagattgcaaaccattccctccgtagtactgctttgtcgtttcacgtgaaaactcggcaaaagtcatcccatcccttaaccgagacgatagaggtggaacaatattctgtaaatctggtctagggacgacctcatccgaccttagatgttccattgtatattctgagactgagaaagtttggctccactttgggtgcaagaagacaacaaatgtctcacggcttacgtgatccagcttctctggtttgcacacacagtgaagggtcgaccgtagcttccctttggacaaaatatcagcagattctccgatttggaccaaaaaactgtcttgtggagtcttgaccatgtagaacttgttcttgctgggatgatagatctgcaggtaagaatggctgctcatcaaactgaattcctgataggaatacggcgatagaaacataggatccgtgagaacagtaaagatgccataatcgtaatgccactgctgccacagattgaagtgactcccactcaaaccagctccatttctacggttcagctcttgctcagcagcgttctggactctcctcttgcttgatactcggttaccagattggtttctcctctgggattctctgagagcatatttatcagcagcggagtggtaatgtatgagacgtcctttggctgtgcaagaatccagtaagctctcctccagcaagcctccgccaatctccctgtcgcatagacgagctatggacaagcccaactccctcatgcagaacccgagttctttaaaagcaccaccaagatttgtgaaagcatcatcatcatcctcctgcaagtccagttttgatccagcctcatcgaaccacagctttcccagtgaggatttataagttgttctttcataattgagctgcattgcaaaagaggagacatctcgttctggattcttgagaggaacgtcgctacccaagtggtgctccttttggcagtaaacacaccgaatcagtaacactcatgaaccaactaacactaatcaaagtttcaatcttgagaacaaagcaccagatatacaacttggattaatggaaatcttgaaaaattgccggggggttaccatgagaatgagtttccgcttgtccggatcgagcagagccagcttccgagccataggaaggagtttacggcggagaaaggcggagccaagaacgccggtgatacaaaggagaccaggaccggtggggccaagagcgtccatcacatttttcgagatccattgagagcgattacgagaggacaaaagaagatccgagaacgacagttgatagggctcaagaatctctgtttctgccatttcttctctcttcataagcaaagctcctttcactatcacagtgatagtatcactttctcccgatttcctcgttcttcgctaaattctctcacaaagtttgtttattgataagaagaaccccgcttttttctcaacctctacgaaacgacccaaacattttccaccaaattcaaaatgtccaaacaaatccactaacgaattggcccaacaaggcccaaactgcaagctttcggataaacatttaagcaatgagaaccgaatgcgtcgccgtttttatttatatacaaaccacacaggacaaaagcaagccaagagaagaagagatagagcgtttgttatggttgcttcatctacacggaagcttctttgaagctcttggtcaaccagatggccgtctccctcgatgacaccctctcggctccaaagggtttaagcagaaccccgagctcatcgtaccgttcctgctgcaaaagctttgcactgaactccagcagtccctccagagcctccgcacgctgctgatacgatgacgtgtcgaaccttctctgttttacctccgaaactgaccttttctgtacagtacacttgtcctttgtgatcgaaccgttggaattgtcctcaccatgaggcggacaaggaggagaagaaaaagagtgcctagctacttctcttcttgacgctgtctctctgttttggttttggaagatatcttcagggaattcagcgatcttgtcgaatcttggagtgtttacagaaacatccggtgaatttagggaacaaagagctgtaatatctgattcataagtgtaaggattttccacgaccaacggcaggaaaacactccttctcctctctgtaggattcgataccttcatctgtacacagcacagaacatatatagtcagatcactccctgattgtatctcaaatacataaagctttaagtttttcttccttactagttcatgtttaaaaacagtacgcggcgtgcttgctttagctgaggtcccagccactcttggtgttctggctgcacctgattgcttcttggcttcctcttgccgttgaggaacaatttcttctctgacgactcccacagttacttctgacacttttcttccattaaacattggtgtaggagatgcttttcctgaagaagaaacagaacctgcttctgtatcagagacactcggattcaatctcctgtcgttgctgaatgatgaacgccttctttccttcaatgtagcgtccctctcagaaaattgaagtggaaaagtgcttcttatggggctctctagcttcatataaaccatactgatgtaaggctgaagatgaggatg

SEQ ID NO: 37496 - DNA, 6838 bp, Arabidopsis thaliana landsberg
  unsure (1)..(6838): unsure at all n locations
gcatttgtctcaaaacgttaaagtacgagtgaaaactgagaaggaagaagcggcggctaacttcattgcatgcgcacatgtttatactcagtttgagttcacgagagagtatgctcgatttaggagaagatttcctaatgtcggtccgtatttggatcgatgggctcctgtggaaaattgggctaggtgctattttgaaggggataggtataacatagacacgagcaatgcgtgtgaatcattgaacagtacgtttgagcgtgcaaggaaatacttccttttacctttgcttgatgcgataattgagaaaatttcagaatggtttaacaaacataggaaggagtctgttaaatattctgaaacaaggggtcttgtgccggttgtggagaacgaaatacactccttatgcccaattgcgaaaacgatgccggtgaccgagcttaacagcttcgaacgtcaatacagcgtcattggcgaaggtggtatttcttattatgttgacttgctaaggaaaacttgttcttgccgacgttttgatgttgacaagtacccgtgtgtacatgcgattgccgctgcccgaaactttgtggggaccgaatggatattagatggtctcgaaatggaagacctaacttcgcattattaccatatgaatacgtggatattggcataccacagaaccatttatccagtcccgcattcatcagtttggattattcctgatgagataagacaattgatagtcttaccgccggataccacaactaaaccggggagaaatcaagaaacccggtttccatcaacaggggaacgtcgtcgaaagaagactaacaacaagtttcagcatgggattaatatcaacgcgtggttgcagcccgaggagtccgcttcataattaaatgtgtattttgtgttgtgttgttatgtctgtaccgtgtacttgtgctgtctgtattattgcttcatgtattatgtctttatttttaagtactttggaattttgttaagtattttgttgttatgtctgtaccgtgtaattgtgccgtctgtactattgtttcatgtattatgtcttcatttttaaatactttggaattttgttaagtattgttatgtatgtaccttgtacttgtaccgtatttactagttctttcatgtttatctcttacaataaaacccctataaattaagactcgataaattaataattgtacaaaaatatcaactatatatataagaaagaaatattattttactattgtttctttttacgtaaatttgcttcaatttaatttaatttaaatatttttattatattaaaaatatgggtttttgtatgaaaaactacccagtttatgggtttttgtatgaaaaatacacctctctatacttttaattaaaactataatttctaatatattaaataacaatttttaaaaagctgtatttttaatatatttttactatttatgagacaaatacaggttatttattttatctactaaaatatgatattattaaaaaggagataattttttaatttttctcataattataaagaaaaagttatcatacttggaaaatctttctatacattgttctggaacatttattaatcacttatactaattatcatacaatctaaaaaacaattgaacatattatactcatcaattcagaaaacacttcttacattatatggtatgcattatatcatgttggaccatcttgacataaacatggcaaaacgcatatatttggaaaattatataactaaaacatgatatcttattattaaatatattatatcatctgtccaactaaaaattaattctcttaatgaagtccaactctaaatactaaaacttccacaaagtacaaataaattgagtacgggacaactgaataacttatggcacaactatggctaatgcgcaatattttgtctgggcccgcattccacttttattaccataataactattgtgtgttcacactatgcgttcacactatgtgttcacactatgtatttcaatttcaattcaaaaaatctttctcatctcattaaattacaaacttttctctctctttctttatttccttcttctcctttcttctctcgaaaagttttcttctctccttctctcttctttgacgacgaacctccgccgacgaacaacacaacgaacctccgtcgacgctgaatcttnnnnnnnnnnnnnnnnnnnnnnnnnnnnnnnnnnnnnnnnnnnnnnnnnnnnnagaaattagggttttgatttccctatacactactttcaatattcaaacacaatttacagaaataaccatttacctcagattcttcttcttcttccccttctttttcctcttcttcagggttttcttccatcccctgagactgcattggttccacatcatcaccttcctgaaaattcatatacaaccataaaattaatatttcgcgttatctcagaccaacattataaacttttctcataatccaattttctaatgcaaatcaatgtatgattgatcacgtataaattcatgcatgcaccaatcaaacaaaccaatactattaagttgtactcattgttttctagttgtgccctatacactattttcaatattcaaacacaatttacagaaataaccatttacctcagattcttcttctttttcctcttctttttcttcttctttagggttttcttccatcccctgagactgcattggttcctcatcatcaacttcctgaaaattcatacgcaaccataaaattaatatttcgttgtactacttgtactagttatctcagaacaacattatcaacttttctcagaattcaattttctaatgcaacccaatgtatgattaatcacgtatatccatgcaccaattacataaacctatactattaacttgtactcattgttttctagttgtccctaaacactatatcaatattcacacaaaattttcataaatttgtatatacctcagagatattttcttcttccggttcgttaaggtttttcggaggctcttgttcacagttttcgtcttcaaatttgttttcctctgccacttcttcacggttcatatccgcttcacggatgatcgtgaccctctcgtcttcactttcactcgaactaggagtgactaaccttacacgacccatgattaccttgcaaaatcactcaacaatcaaggaaaccgttcaaatcaacacaacgaaaacctattctaatgtttcaaatcaaaaaccgttccaatttctatacttaaagccctattcgacacttacaatttggaacgccggcggtttggaacgacgacggttaggaacagcatcggtcacggcggaattacaacggcggctaaacgggatgaacgactatgcgaaatcgaacacgacccacacaatcggcgacggagataacaagtgatgtcgccggcgacggtgaactgaacggagagaagagaaagtcgacggttttggatttttgaagttcgccggttgagagagaagagaagagagttgagagtagtcgacggttttgatttttgaaaagttacttaggttaaaaaaaaatgatttgggggaacacccaataatactgggtcggattctgggctaaaccatgaactgtggttggatcctataatttcactaaatcaccgaggttatttggtaatctccctctgttttggtatttaaaaataaatcaaatagaaattcttttttttgggtggcagaatggaatttttttctccgaatcatggcagaatagaaattcttcctcggtatttaatgttttggttcggttttttacttttttctactcgggtccggttcaatgaaaaatttacattaacgaaaattaatccaggattttaaaatgctgatttagttacggctgaaatctttttgggtacatttaaaccataatgtagccatcgtatggttgggttcggtattaaatgtgactttagttctaagtttcacagaaagaagtgtaagctgtctgaatcttgaattatttatttttccaataataatccataagctgagatatctggccacagctcagagaatgtgtaaagtttaagactctacataaaacataatggatatgggtggggtatatttagcagcagcacaaaaacaggggatgatcatcatctacaaaaagattcaagattctgtaatggcagcaacatgaagctgttgttgttgcatgaggaagaaatagcaatgcgcatctgagtgagttttagaagccggcccatccagcaggttgagctgttttctggttttctctcatctttgagttcccatatctctgtgaagtgctgtttccagagcccatagatctttgtgttccagatgcagaagtagcagctgcagacgttgcagcggctctaaaggattctgtctcgaaaccccatggctcaaaaccttgagtacctgcagcagaagctggtttacttctggttctcacagactgattaatcgtattattgttaccctttgatgcagattccatcacgggtttcgcttcatcactaaaaggttgccatgaatttgtatcagagctgccagttgaccagttagatctgtcctgttgaagttcccacattgttccttccatcttatctctctgtttcatcaagaacattagaattctaagatatacattgatgaagacttttgtatgggtgtctaagcttagatgaacaagaaccaagaataataccgatggagttgatgacatggaatgcatccctggagagggttgattttgtgaagagtctctgctcggtgacggtgaggcacttttagaggcaagtgtttgtttgagatcctgcaactcttgcctttgcgatctgcagatagcagaaagcttttcaaacttagcagttatttctgccttctctgattttgtttgcttcaactcgtcttttaacctctgtatctcagcttccaatgcctcttctttgccaggtttattaccattatcgaactttgtggtatcgaagtcagcaacaaacgagttgaaggcatcatccttggacactcttgtcatgttattggctgcagcaggagttgtattcttctgagaaatcgtagtttcaagatctttatttctttgaataccacgagcctctcctctcacaggacttggttttttgggttgatgactatccacacgaactctttcagatttagatgtgttactgtttggttcatcaaatttaggcatgtttttgttatcttctgatacaactgaggttttagcatgctgagtcgcccaaaaggcaccgagcggtcctccactatctgattctccagaagatggtggcggcggtggcggacttctacgaggtgctggagaaggtttagttgctgattttgatgagcctgtcaaaattcataaggatcaaaagaaatcacatctttctttgagaagctatccaaaataggttttattcactataccatcatggactccagtagattgcatttcaggtggtcgatccggtaatgatttctgtaaattagcaggaagctgctcattgacacgaaaccaaatctgtagatggacatgttgttagagacattttacatttcctcaactgagaagaaacaatgagtaaaaattgacttttaacctgtgtaatatctggtcgttcatcgggtgaagcttggagcatttctttgatgagatccgtaataaatacactgtatttaggcgattctggaatacgataattcccgtttaagatttgcagctttgattctccatcaaatgcattcttgaaatagcatatccgaaacaagagacatccaagagcctatttttttttaaaaacaaacctttactttcaagtttcaaccaaatagattagcaatctggagagattgaaaaagtgtcatcacatacccatatatcgaccttctcgcttatcatctcccttcgaaagagatcccacatctattgccaataaagacataaatcaaacattttttcaccacttttaaaactcttataatctgcataggtgcatatccagtcaaacctcaggagctctatatgttggtgttgtgtattttctaatattatcttcttcaattcccatctcttctgctctttcaaaaatcttgtgatttgtcgaaacgcttccaaaatcacacaatttccattgtccatctgagctcaatagaagattctcagccttcaagtctctgtcacgattagcaacaccaatacagtatcaattcacatcgcttgctaatgtaaaaacgaaacgaaatctaataatacaacatgtatacctgtgagcaatgcgtggggattgacaatgcattgcaaagacagcattacacacatctctaaaaatcgtaagagcttgtttctcttcaaagtaaccagcacctctattctcaagcacatccacaagagatttaccacaaaaatccatagccaaaagagcttcttttttattcctccccatatccaagataccatgtgcgtagagcgtgacaacatttggatgtcccttgagggatttcagaaccgagatctctttcattacgagttcaagtgactcctcgtcattgcatatcatgtgcttcaaagcatattgctttgacgcgtgatttacatcttgagctaagtaaacactggagaaacctccttccgcaatgacatttctaacttgaactttcagatttcctatctcgagaaatcgacctaaaagacccgcaggttctttttgagcaaaaggtttaaacttccacatgtttgaatcagtggaagtaataagaatg

SEQ ID NO: 37497 - DNA, 4251 bp, Arabidopsis thaliana landsberg
tccatctaacatgatcatatgtcaaaacactgcagctttgcagaactgagcatgaatggcataaagctgagcagccaagttgttgatagcctttatgcacttgttaagactccatctctgtcaaaacttttggttggcagcagtggaataggaacggtaatgatatgtttagcattcaaaattgaattcttatattgtgataaatacatctttttttatctgacgatactatacaaattattctaggacggggctataaaagttactgaatctctatgttatcagaaggaagaaactgtgaagctcgacctttcatgttgtggactagcgtcctctttctttattaagctcaaccaagatgttactctaacttctagcattcttgagtttaatgttggaggaaatccaatcaccgaagaggtatgttttctatgactcaacatcctaaagctcttttatctctgttgaggctgcaatggtgatagaataagctaaagaatttgcaatcattcaacatgtgattttaagttcatgtcttctcaaagcataactgactctctgaaacactaaacaaacagggaatcagtgcacttggggagctgcttaggaatccttgttcaaacataaaagttcttattctaaacaagtgtcatctgaagctcgctgggcttctatgcataattcaagcactttcaggtctgaagtattcttgtagctgctattaaacaaaagatcttctcctttttaaactatcaactaaatgctctgcagataataagaatcttgaagagcttaatctttctgacaatgctaagatggaagatgagactgtgtttggccaacctgtgaaggaaagatcagtaatggtagagcaagaacatggaacatgtaaatctgtcacctcaatggacaaagaacaagagctatgtgaaaccaatatggagtgtgatgatctcgaagttgcagacagcgaagatgaacaaatagaggaaggaactgcaacctcgagtagtcttagtttgccacgcaagaaccatatcgtgaaagagctttctaccgctctttcaatggctaaccagttgaagattctggacttaagcaacaatgggttctcagttgaagccttggaaacattatacatgtcatggtcatcatcaagctcccgaactggcatcgtccaaaggcatgtaaaagaagagactgtccatttttatgtcgaaggaaagatgtgttgcggagtcaaatcatgctgcagaaaggactgaagaagatcttgtctgaaactgtatttgccaataataaacctctgtttttaaatattgagtatttttatttagagcgtttgcagaaatttgtacatattgatatttacacatttgggttgtgatgtgtaaatttgctgcagtttaagcgttaatgctcatataaatttagtgacgttaatcttatgcaactttttaaaaaatgtaaaaatttcttaaaatgttgagacttgagagagagatctaaaaataaaaacaaaaacaaaactcatttctcatctagaagacgaaaaccctatctgatcactccaaaatgaggacgcgccggcaaacatatccgccgatcgctgaatccctcacggcgaggtccattgttcaggcgcttccggcgtcagccacaatatcgtgagcctttttgcttttgttctattttcaattgaaattccaggatttaggatattctctgaattagggttttgtgtaagagcaacacgaacgaatgatttcacttattaaagtttgtagatgaatgaggtgtttctctttatattaccctcacgtcttcttcttctaatgatcagaggaaatggtggaccaaagaagaagaagaactgtgttaatagaggattgtgggataaacagattccgacggatctgctgcaagagatactgtctcgcctcggattaaaagccaacatacatgcttctctcgtctgcaagacatggcttaaagaagctgtttctgtcaggaagtttcagagtcgtccttggcttttttatccacagagtcagagaggaggaccaaaggaaggagactacgttctcttacacccaccacggtctcaaacacatcacctcaaaaataaagagttaacgggctacagaaataaactagcttgtgctaaggatggttggttgcttgtggtaaaagataaccccgatgtggtcttctttcttaacccgtttaccggggaacgcatctgcttaccccaggtgccacaaaattccacacgcgattgcttaactttctcagccgctcccacatcaactagttgttgcgtcatatccttcacccctcaaagttttctttacgcagttgttaaagttgatacttggcgccctggtgaatccgtatggaccactcatcactttgatcaaaagcgttacggtgaggtaatcaatagatgtatcttctccaatggtatgttctattgtctcagtaccagtggccgcctctcggttttcgacccgtctagagaaacctggaatgttcttccagtgaaaccatgtcgggcctttcgtcgtaaaattatgcttgtgaggcaagtattcatgacagagcatgaaggagacatctttgttgtgactacacgccgcgtaaacaacagaaaactgttggcctttaaactaaaccttcaaggcaatgtgtgggaagagatgaaagtacctaatggcttgacagtattttcaagtgacgctacctctttaacaagagctggtcttccagaggaggagaggaacattctatattcatcggatatcgatgattttgtgaaaagctctcatccaactttctattattatgactgcagcgcttggctccagccacctcatgacaattttaatttttgactatcatccttaagtgtttttgtttttgaaaaaacatgttttaataccttttaaagcttttgattcaataaacaatggtggttaaatttatatgtttgaattgtagctcggactccgatacttttatctctatgaattggatcaattttctttcaatccagtgcatattctttaggagttgagacacaacaagtgttttcagtgtgattctaattctatttctcttgacgatttatatgtttgataactggactttattatttatggtcaattcgatggtagcaaataattttctctcttttgttggaaaattgaacaatctacttaggcaaggaagattaagtagttttcatgtccctcaatggattccatgaggaagattataggccatatgagttgaagaagaactggcaaggagatccatgtgttgttgctatagattattcttggggaagttcttaagtgagaatcctccgaaaaatcgtttacgtgtaagaattttcctaaactcatctctgttatgtgtgctttcagtctttgtacatgtttctaagacaacattggtgatttatttgtttgatgctatgaacactgaagaagggtacagaattgtgagctcaaatcgacgcaaccaatctttgtttcagcaatttgtcaaacgacatgctaaaaggaaatgtattcaattgcttcacgtatttaccgagttgaactgatttttgtaagtcatgccagcttgaccatacatttcagttatactcatatggttataagcaagtgatatatacccatatggcttatacatatatatgtgtgtatttctgcaaaagcttgtaagaaaaccaataaatgggccgggtttgcttcctccaaaagtacaagagcgctcacgaaacggatcacttaagctaaggtttcctccaaaactacaagagagatcaaaaaacggatcacgaatcacttttgaacacattacaaactgaaccaacttttgctcatgttcttataaacagattcatcattcgtatagttcttaccggattcttgcttttgcctaacgttttctactattgtaatgacaagcgtgggcaagaaatctatgtatgcatctatcttcttcatgtcaagagatcaagattatttagtttgattcatggagtgaagatattgttttggcatatataaacataacagatagtcaaaggtcctgatttctaccaaattacattgtataattggtaggaatgaaactttgaaaagcacatttaggaattatcgattctaaatcactttttcacatacttgataatagtagtgaatgcttttgttgtagtttaatatcagttatgtgaaatgt

SEQ ID NO: 37498 - DNA, 4983 bp, Arabidopsis thaliana landsberg
taccatgatagcgaaagctacatatttattcgattgtgttgacaacacaaatcctatgttaaccctagaagaaggcgaaaacaacaatcctttttcttccttagatgacaaaacattaatgatgatggctccttcgttaatcttttcgggcgatgtaggtccatcttcttcttcttgtactccagcaggttatcatctatctgctcagctggagaactttcgaggaggtggaggagagatgggaggattagtgagtaataatagcaataatagtgatcataataagaattgcaacaaaggaaaagggaagagaacttcggcaatgcagaggatagcttttcatacgaggagcgatgatgatgttcttgatgatggttatcgttggcgaaaatatgggcagaaatctgtcaagcacaatgctcatcccaggtacttttacctatatagttgtattaattagagtatttataattttattcgtgaatctatgacatcatattaaaattgatttccaaatattggatcgaccaaaaactttcgtggctacaaaacattaggttagcttaacaaccagtacgatctagtcttgtgtttaacattaaactgatatatgtagaaaatgtatcttttagttgcaaaaataccatagtttttaggtttagctagtaatagttatataacgaaatcaatcccttactaaagcctataacgaaatctgtcgtacgtacttttcgaaaatttatgatgtgatgataattttcgaaaacaaagcatgagaatagatgtgatttttaaaaaaggattatcctatagttttcttttctgataatttgattatcctataatatagttaattattgtgcaattatataatcttacaaacatgtataaacctgatatagggattctctttatgtgctaccacatccgagtatgaaattgtttggaaagggatgatttactcaaatatgtataatgtatccatcaatattctggtcaagaaaatgatcttaattagttctagatcagtataaaatatatagtttcttatgggcttatggctcatatatatatgaaaacttcatccagatgaaaagtaatttaatttgcttccttgttttttattcctttttgctagggaatcaaaagcagagataaatccaattctacttcattttatatgatatttacgttcttagcaaaaaatagaaaaaaaaaatagtttcatgagacttcatagaaattaaaatcagtcttgcatagacacccaaaacttctacttatttttcatatgaattataaaaaaaaatttgaagaattaatagatgaaactattaatcttgtgtcacaaaatgcaggagctattacagatgtacgtaccacacatgcaacgtgaagaaacaagtgcagagattggcaaaagatccaaacgtcgtcgtaacgacctacgaaggcgttcataaccatccttgtgagaagctcatggagactcttaatcctcttctcaggcaactccagttcctctccagtttctctaatctttgaatatataatggcttaattaatggtgtaattacttaaaggtgattaaggtgttaatcaccccactgaccgtttgacgacccacatctcccaagtgacaagtcacaagtgtgtagatcagattttaaaccaatgtaacagttacgactttttacaaatgtttctgaatattatcccctgatttctggtttatgatcggtttacgccgatgatttgacaaataccagacaaaacaagtttagttacatatgtaagtatgaaaaggtagtttcctctaacttcattaaacccaccctcattctctacaacttctttgatatttttctacatacttaacagagagaagttagggtccagacatttggtaactagagaattctaaagaagaaaaacatgcttcagagagagagaaaacttgtacaaataatcaaccggaagacatttgaaagatgatacgttgtcgatttttgtttgtgattactctttcaaatcccaaaattcatcactaaaccggccaaagtatgtattatggtcctttatgcataaatgtcttacacaagaaaaccaaaacactttgcatccaaaacctaactaactcaaactagttctgggcaaaaaaaaaccagttcagaaaactaagggaacttattgggtacaagagtaattgataacacttatagtttgatcgtcattacaagttaacagcaagctaaatacaaactaatccctcataaacagaatacgacttgcgcaccggaatcctaaactctgttcatggcgtgggaaagtgataaagttactaatttattatgttaagtgttgtgtcctaactcctaagtaccaacttccccttgttctagcctctcaagttctccatcaagatgtcggtccagtaggcctaacaatgccaggaggagcgggcaccggatggtttcggtttcctaaaactgtctcggttctataggcagccgttgtaaaaggtgactgagcttgagacgtttgaaccgatggtgtctgaaccggctgtgaactattcagcctagtcgaagtttgagactgttggctaggtcggatgatcatgtggtcaagagcagtggaatgagaaccgggcacaagacttcctcgcatcctcgggcgccagttggatgtatcaggaaccgtcaagtctacatccactaggtcacttaatcgagaaacagattgaacagtgggaccacttgaatgctgccttgaagtgcttgcatggctactggttaaacctctgacgccataattattaggctggctgagtactctagggacatgctgagacttgacaaaagaggatacattcgctggcgactggctcgttactggaactgagaccttccggctctgcaaggaacacatattgtcaacatacgaatactgaagaaagaaacaagtctctcaaacgaaatcacaaaccgtatatggagttgtcattggtggcgcttgagattgataagtctggttccatctcggactagtggttctaccaagatatgttccggtgggtgtaacaggtgaagcatgaacctgagagtattgtggagagggattcggtatggtgaagacagtggaagtagttgctggtctatctcttggagatggtgtctgcgagaatggtacaggtaccggcattggatctatggacattggtatttgggataagtttgaatattgttgaccagttccagtattcgaagcttgatgcggttgtggcgcagtgtttcccaaagcagataaaatctccgggtcaagtgcgatcacatcagagatatcaaatatcgaagagtaatcatcgtttgaaggatgtttatttgtgttgttattattagattgaccctgagcatcagacatacagggcttccggtcctcaaccttgttgtcaccaaaaacttccagttcagcatcatcatcccccgtaagatcgaaaacaacaggaccagagtttaataagctcatcgggtcttctagatcatgaatgatctcacgcacaggttccggggtctcgccagtattttttgtaaccttccatgtaccaccagcatcgatgattacatcagcagcattgtgttccacatcttttaatatctaaggatatgatatgagacgagttatcagtattaagctgcaacgcaaaaatgtagcagaaatcaaattacaacatagatagctaattgccttggccatgttttgatctaaacgaatgtcagggtagcaaacaggttgattgcaatgcgggcagcgccaggttgggttcctcatatttatgtgaacgtagtttgagaaatcaaaacactgcagcagaaagtatcacatcactaacaaatattacgagaaaaataaggtaacacccacattaaaacactgtatgccaatttaaaaggatggaaaaaaagagaatatcgcttgatatttgattgcatcacctgaagatgtttacataactggcccttgactggtagcttgatccgcttgcgactgttttattaaagactaaatcactgaccaaaaaaacaaccataagataacacagtagtacgtaaaaaagtagaattggtaccttatagggcaactgagagatactcgtgatggcccctcaatgatgtctgaatctatagacaggtaaaaaaaagtacagagcgattagattggaaaaaaaatcttacaggtatgtgcttgcaatcattgaatgattcaaactggaatagtatagagcattcaagaaaaatgttcctctctcctatcttatgctctttaattacctggacttgcttcaatgactccggactgaaggtaatctttaagaaccggtttttcaggtggcactaccagtcccgtaaaagcaattatgatgatgtaatttcctttgaacaatcaagcatcttaataagatattaattaaatagacatggacaacaaaaaagatatatataattgaatagaaacctttaaaattccccatcacttggagaagattagttccatatttcagctgtgcagtaacatttgtagggagttgaggccctgtatcctggaaagaaaaaaattgacataaacatgcacataaccagtgcagagaaacaaaatccaattaaaagtcaacttgcccaaaccattgcgatattgactctcttctcaaccccctttccatttagcaagaagctgcaattttcatatgaaagccaggaaggttaaattggatcacatttcgtgtcggtgaggaaaaatagcaaaaacaattcgcatacctgacttctggaggatttgaaatacaggcagacgtgtctatgttgtctgtctgggcaacaaataaccgctgaagagcaaacaagaatctggtgtaagaaatcatttgctaaccaaaaggtaaagaaagtgggcacatctacaagatgaaatagattcaaaaatgta

SEQ ID NO: 37499 - DNA, 3452 bp, Arabidopsis thaliana landsberg
  unsure (1)..(3452): unsure at all n locations
acgggtcggtgtaccggtacagcaacaagaggatttaacttgggatattgaagatgaagatgatgactctgttcaacaatagatagagtatacttgtgttatagaaaaggcaaagatttagtgtgatcaatgcttatacaataattcttcgatttgtatagtactctgctttggtgaatttaatccaatatgtttaaattacactagtatgctgcaattcaaaagacattgcagttctaggaaaaattaatttaagttcttaatctttttctctgtatcaatattttgagtaacaagaagagctaatgttaggtgtagtagcgattgctaatgtagaggaacaaagcttgtggttgtagccatcacataggtgaaaattttagaaccaaaacttaaaacttgtgtagccatcacatttgttttctctcttgggctgtctcttcataccactgcagttccaatagcaaacatgaagaattctctaaggagaaacacaatcacaagccgaatgtttgttaaaatgaggaccctttggtttagtcaccggattcacattctaacaaagactcaaatcaaatataaagaaaagcatataaacctgaagtggaagagtaatcaaaccaccacaataaacactctggagaaatttcttgtaaagatccatgtagatttggttcaaccaatttgctacatgttgaatcaattccgcaacagacttacaagagtaccggcaaagaatgttgtaggattcctcattcccggagaaagtcatcgttttagtgtctccttcataatctagtttcaaactcaattaaaaaaaacactacaaatagagctaaatagataagttagcagcagagagtcgagtcttatagcttccatctgaagattgctgagacagagtagtttcctgcaaaatcaccaacaaaactcttaacacatacaatatttgcttctctttaatggatcaagaaggcaatggaacagtactcaaaagacatcaaatataccaacgtctagcaactcttatgctgtgaccattatggaatatcaatattcaccccatagcctttcttaagtaagttagtgatatacttgaaaatatatatatatatcgatttaaatcttacaagtccgtacgaaataatgaacaagaatccaagagacanagtgaagacatgaagagagactaaagagctagcaattcataaatacaagaatagagactacgaaaaaaatcatataatgatataatagacactgatctgatccgaaaaggaaaaacaaagggtgatccagatcaaaactgtcaaaaactgataatccatcaaatcacaaacaaaaaagattcatcatttttccaaaaagtgcagattgattgggaacacaagaaaatacaaattaccaaaatagaggactaaaaaatagaatcgaagtaaataatacttgaagacagaaacgacgagtcttctagaattatgcaaagactgcagagactacaagcaatgatgcaaaggttgagcatagtgaaattgatagaagtagttttactatttacttaagtttcatcttaaccatggtttattgtgagagtaaaccatggttggtttagctttttctggtttggtcaatgtccttatatagcgtctgagagatatgtgagagttttatcgagtatttggtgaggtttcttagggggagtgggaggagctccataacaaattcctcaaggtcttgtaattctcgattgataagctatgaaatatcagtttctataagcaaatcgtatcagtctaataattctggtttctcccatttgcatatttctaatagctgggaggtttccgcctgtatgtagcaaggaaattaactgacgaaagtagtccaccacctcagcaaattcagcctgtggttgctgcaagcgcaactcctgagggggttcacactaatggctcagctacttcttcgtcattggctatcacaaaaacatcatcttcttcggcagacagaccacaaacactcgctaacaaagctgctgatcagggtttagtgattctccaatctccaacggttagagactagatcatttctttgaaactgacatgaaatgattaaaattcatgatctctcaactggatggataattatttgttgcaggtcggttatttcaggagatccaagaccataaaagggaaacgcactcctacaatctgtaaagaggtacttctctcctatgttttgaacaagtctttcaaaatatccatcttcaaggagcatttggaatctctcaattgattatatatttgcttttggttattctacagaaagacatagtgaaagaaggtcaagttctatgctacattgaacagctcggtggccaaatcccagttgaggtaacaatcgtaatccctttcggtttctttacttttttttgctttctcagacttcttattgtgttctttcttccagtctgatgtttccggagagattgtcaaaatactccgcgaatatggcggtaagaccctatttgctatatgtctttgaatcggtactcatatagctatcaattctctgtactgacttttgtttttttcttcttctgttttgtgtttcggcagagcctgtaggatacaacgatgctctcatcacagtacttccctcatttcctggcatcaagaagcttcagtaagaactgattttggcttaattgtgtttgtgctttgtgtattttgcttcttagtttttctccacatagacaaaaataagctctactccaaaaactctttgtccgtaccattacctttgttttaccaaaatttaattgaaacttttttgtttaccactgatattagaacatttcattcttatacatgatcgatgagaaaaccacaaaacaaatacacaataaagaaggaaaaaaatcaaacaaattcttcaaaaacaacctagcaagtaacttcaaacaaatacattaacatactcccaatttaaattccgcctctgggcttgacctagttcctgtccagtaactttagaactgttacaaaacaataagttaaaatgagaatcagttagatattcacggatactaacctgtactgtataaataaaattgatcagtacaagacattggacctcagaaattaggaggacaggtactcaagatgtacaaagcgtcacgccattcctgaggtgttttcttagaggccatggctcggccaattgtgaccagagccagcgggaggccatcacacttggctgcaacctcttgagcaactttggttatgtccgggtggctcttcactatctcttctccagcattcatcttaagcaagtcccaagctctctcccatggcagcttctccattttgatcttagtttgtgctcccatttcttgacaaacctcgtccgaccaggttgtgaacacgatcttagacctgttcagtccatcc

SEQ ID NO: 37500 - DNA, 6164 bp, Arabidopsis thaliana landsberg
  unsure (1)..(6164): unsure at all n locations
catatcatctctttattggccaatcttatttctctttgaagatgaaataccatatagtgtaaagtgttgtgtaactatttgcatctgtaacaaatccagattttccaaagagagccttttccaataattaacatatatattaacccttgagaaagatcctggactttcttctatttacaactattaatcactaagaaaacttaatgttatattttgtcacatatttttcttcctttcgaaagacaaatgaatataacatgcacacataaaagataacctataatttatgatgagttcttagaagcatcagttaaagcaggggatttgcaaatagggcaagagttcttcatagacaaccatttcttgatgcacctcccatggtagtcatgaccacaccccttaacttcccctaactcttctttttccttgtactcctcctatttgtttaccaattaccacatcacccttaagttagcctacttctaactttatagacacataatgtttcagacaactaaatcttaccaggttgtgaaaaaaaaaaaaaaaaactaaatcttaccaggcagattgcacattttctttgctcctctgtttgatatgatggataatacattgttgctaacaagcaactggagattgcgctgtcggatagaccagtgttgacactcccaatcctttctccaagatcaaggagttcctgcatatatatgtcagtaccaaaacttttcgttttgcctatgtgaggcttcaaaagataagtgtttggctattaacctcatagctcatgttatcgatgtcaagcctcatgtctctgtggtgatcaagcatgtttctggatccgtagtattgtggttggcgatcttcaaccatgaattcctattattacatacaccccaaaaaataacagattacagttcagcatgcagcagaaaatgataagattgcaaatctatatcttaatattcgatatgcactgtatcatatcggcttgatctttatcttaatactaaatgtaatttagacagacttccactctaaataatgcatctgtaagggaaatatatacctcagatgaaaaccgttcgtggagagcaacttcatcgaaaggaggctgaaacctctcataggaacttctgcgtctccctggccgatcaccgctacgccatgaaatgtgtggtggtggccttaaatgcctagacggataagtctcagtgaccaaatgagacctgtctccagaagaagatgctacatgtcccgatcgcgaaccgtgtgaagaagatctataggtggatgttgacctatgagagaagcggctgctgcttgtagatagtgttgaagttccaggaaccccgtgggaaactgtagggtttctgtttccggtaagctcatggtgatgatagccggaagtattaacagataagctgttgacaacacttcttgcaggaaggaaattatttgtctctggactaaagccatttatatctgcaaagtgggaattaatgtgattattagaaacaaagacgattcagatatcgagacaaagtgaactttgcatacctctaagaactggggacaatctagcacagttccagtctttatttccgtgagatgtctgaccaggaaattgacctgagccataatgatcaacactgtggtggtgtgtagaatgagaatcaaggctcaagcttcttggcaaattatttctacctaagctggtctctgaatcaagtgtaggacgactccggacattccttgaagagctctctcccctgatcgagagattattacttctgtaagttgggttcataagccatggcatgtaatgagggtcatgatcatgcgttattgattttcccaagtgcaattccgaggggaaatgagtgtctgcaggagttctgtcaccgtgatattggcttgaactacccatttcatagatggaagaaggacatggtcgttttctcttttgtgctcctctcacactttccatagattgatgatcaacataactagcatttgaccatgtctggctgttgtagcttgaagaagatgcaaatgtcacataattctcatgtggagcagagaaagttggaactgttgaattcacggaaggatcatgggacggccccgaaacccccggattgtagtgtggtctctccacactatgacctgagtcagtataagcatttggtcctggagaagagttccaatgagaagacactggcattccttcattcaacatgttttctgctggataaacatgtgatctgttctcactggtcccagatgttgctgagaaaatgtgggatggacaataattaatcagaaatatggaacatattaccctaaaactaaacatgcatcatcaaccaaatttcaataaataaaaaacagattaaggaactatagaatgaaggactaattaccttgactcgaatatggatgttctgggtgtgtatgattccagccttgatcatgttcatcatcaaaaaactgggatgaaccaagaaaatgtctgtgccccattaaacctgcacaaaaatttctctcaccattcaaaatcccaggaaaacatccgcaagctcagaaaaaaaaaaaatctataatttccaaccaacatagtttactttcagtctgatagccaaatttcccaagtaaatatataagaaatcagtccatagtttcaagctctagtaccattacctttgtaacatgtacctaccatattatatacctcagatctcatgatatcataagcaaacaagtttttgtggacttaggctctgtgctgcaggaaagttcatgatgcttatacatgaaaaataaaccttaatagtacagatcttttagttcataagaaaaacttacatagaagagtttgtcaataacaacagacatacttcttttaaaccaaaagaaaagagaggcagaaaacaagcacggttgggaaactaagaagcctttgcatttaaagtatcactaaggttctcgactctccaaaccagagccatcaaaagtgaagagtaatacaaggagttcatcaaattacacactttcaaaaagtctatagaatttacagaaaagtctataggaaactgattaggaaatagaagaggatgaaagaataaggcacgatggcaaattatcatatactgtatccgcataaaagagcatcagagcaagttcatgcaaaataggtaacacttgatatcatcttttcagtttctatcaatgtactacttcttcgtttatattcaagtaaaggccttgtacatgtatttcactaaacttacaaccatagatgacatgagcaagaaaattacatggaaaatccaatagcaggacttaagcttaaaatatttttctgaaccgaaaccctcaaaagtgcacctgcaggcaaataatcctagaaggatataggtttagaaagtcctaaccacgaatacactacactacccaagtgataaagccgtcgtgcttgattgatcactgattcatcatttctgcacacctttaaagtagaccaacaggaagcaattaggcccttgacttcactaatacaatgagaacaccaaattctattccttctcctctgatccacaaattgaatacactacagtttccttagataaacggatttagtccacaaaagtactagcctgcaaaggcttactacctcatttactatttctgcgctcttattgtcttcaaacccaccagcacaccttaatagactcctgaattcgggcttgtgtgaaaggatgctttcttaaaattagcattatgtttcacatcattgtgcatccaaatcaaatgcttgtacgtgacagcatgtcactctagaaaccattatatgatagatgtagtttgttaggaagattgaagttccccactcatggataccgtacctcaagcatcttcaactgactaaacacactctggtacacatgtgatggcagagactagttatggttatttccttacccctatggatcagaataacttctagatgacttgagttcaagttcgctttgctttcccaatcaaccaagaaggtccacaacacaatccgcaaatcagaatacatcaaggataggccagccaccaatcctaatgggctaacatgaggaactaacatctgtttgaaatgtgttatcaatgcaatttctttaagaatgatgccataatttcaaagtttctaaaagttctcaaagaggaagatgaattctgacctgaaactatagccgtactagttctcaaatcttccaaacacttgaatcactgattaggcttttctccagtttctcaactaccagaggttcgtggtggagaaaggtatgatagaactagaaaccaccattgccactaaacctgcagcctgcaggatacaaaccagctaagcctaggttatgctaatacactatatcccaaactagcttacccgcatcgctgaagtagcagcctgaacaacattatcaacagctaaccaaaacacaaagcttacaacatctcctctaatcaccgagctggtctcttctcagtatcggaatcttaaaaagctaacaactacgtgaaagagaacaaattcgaagtctgaaattatcagaaccgactccggttaacggacatgatcgcgatcatacccgaagattgtgggaaaagtcaccgatgtagcagcaaaaccgggaataaaccggattaaaccgaaaaaaagaaacaatccatcatcacacaatcacaagagaaaaaaggaaacaacgatcggcttgtttatacataccaacacgaaataatcagctcaacggcgaaacaacaataatgatcggagaaatgagaaacattaccaaagcgttccggcgatgagaaaagaagaccgatcggagaaaagcaaagagacgtatggattcgtatagatgacgcaaccttttatgaaaaagaggttttagagagagaaatatgttttgaagacaaattgctttcttttttggtgatggttgagcgatgaagagtatcggtttatatttaagaaaaatcaaattaaagcggttgagtacgacgttgccgggacattaatcccttctctgaccaacttcnnnnnnnnnnnnnnnnnnnnnntcactgtcttattgtcgactaaacaatttattaattaactatggttcttcagtaatgggcctatatttttggactgtacttgggcctcagctgtacgtatcaaaagggttcgagaaactcagagattaaagggatcttgaccgttgatcgagatgactttgattttatccattaatagtcaatttgattgatgagttaagaggatgattaagaaagcaataaaggaagcgaatcggaatccacattgtattaatctttttgatccagtagccattggcgaatccaggagtattaaagttccattttgattttggcgacgatgatgaacagagtttagagaaatttgcattgaagaagagaagatttttggattttgtgtagtgggagaagggtaaaccctagcttgggagggacatgatcggatgctctaagtagcttgtgaattagagaaagagcaagtgagcaaatatgatgaacacttcgaatgggatgatctctgggccttcttcttcgtcagcttcggcggcgaatcctcagtctccgggaatcaaaacgtatttcaagacgcctgaaggaaagtacaagctccactacgagaagacgcatccctctgggcttcttcactacactcatggcaaaaccgttactcaggtgaagatttgattcgttttctttggtgtttatttttgaattgaaagtttaatccaatctgatttctttgcacttgtgattgctattacgaaattgctattaggttttgtgtaagaatatcaaatgcacatttcatttttatgttttgaaagtggtttctgagaatggatttgtgaaattttggtgtcaggttactctagctcaccttaaggataaacctgctccatcgacaccaactgggacctcgtcaagttccacagctagtagcggtttccggtcagcaacagcaaggttattgggtggtgggaatggtaaccgtgcgcttagtaatgttggaggtaatggaggggctaaaaatgtgggtgcaagttcaaggattggggaatcattcctgagag

SEQ ID NO: 37501 - DNA, 2908 bp, Arabidopsis thaliana landsberg
aatgaatgaataataccttaagaccagaagatccattgtctccatctaaaccaagatactgaagagccctagtcccactctcaacagtcgtcactatataaacaaacccaccaaatttatccaaaaaacgaatcagaaaccaaacaaaagaaaagcagaaaacagaaacggaaacgtttttgcgtttcacctttacaagccgagatcttaagcaatctctcaagaactttacgatccacaaaactatcatcaacggcaagaacatgtaactccggtgaagaagaagaagaagataaatctctgagagccattgttttctctcgggaaagtaaacaacaaaacagatgaagaaacgtttaaagtttgaacgtcaaaggacgcagaaatcaatgtgaagaaggaagacgaggagttacataaataagagagagagagagagaggcagaagcggtgagtgagatacataaataaataggaaagagaaagaggaggagatttaaggaaatacacagaagagaatctggaggatcggatcttgatgttgttgttgttgttgttgttaagatcttgtgagggtcggaagagaatctaaaggcgatgagtgatgtgtttatgtcttgtcagaaaacgtaatattgtgtcttcacggtcataatctttttagggacccaattttctttgattttacgatccttttggctgctctttctttctatctgacaatgactactctcctctctttttatctttcgaattcagtaattacatgtactgtctattaatttctttcacttggtttcttttcattctttcacataaaataaaattttcactacatttatgttggaaaaagagtacatatatttgtacttttgaagattcacaaaatctatatagaacttataaaatcttcatgaggtgaatcaattgaaagttcacaaacatgattttttttctcaaaactttaaaatataattatttttgtaactcatcaaataaactttggtggacaccattacaaaaacaaacatatccattcaaggtttgattaataacataaaacggtacaaaaatttaagcagatagagaaagcggttaacgatatgtaaataattaaaagtggtataaagtaacggatagaaagaacggtgcggtgaaagtatctttttaatcgctttggtattattttcataatcaattacaacggatacgctatactcctaccgcaatgcatcaattataaccaatatgttttagatggaaaggcctggttagcaatcgaatctgctgtttggtttgtgagaatcgtcgaactcttctttgaactccacaatgtcttgtgagaccatttccaaagaatgcccaattagacccataaaccaactaactctgtacaatctgaaaaagaaagaaacgttccataaaacggttaaaacattatttagcggtaaacaaatgtgatacaactacaccaaattacccaagaagtcacttaaaaagacttttttcaaaacaaaataaaacaaaccaatcgatgaaacgtctttttagcaaatcgctatgtacttcggccgccggagccaatctcaaaccaccgccggcagattccgccgccatagctaagcttatcctctcttctccgaacacaactcaccaagacgatcaatttctactctccaccaaaacaaccccatggaccccaaatctcgtgaactctgttctcaagcgactctggaaccacggccctaaagctctccaattcttccacttcctcgacaatcaccaccgcgaatatgtccacgacgcttcctccttcgatctcgcaatcgacattgccgcccgtcttcacctccaccccaccgtctggtcactcattcaccgtatgcgctctctccgcatcggtccttctcccaaaaccttcgcaatcgtcgccgagaggtacgcatccgctgggaagcccgataaagcggttaagctgtttctgaatatgcacgaacatggttgttttcaagatttagcttctttcaatacgattctcgatgtgttgtgtaaatctaaacgcgtagagaaagcttatgagttgtttagagctcttaggggaagatttagtgttgatacagttacttacaatgtgattcttaacggttggtgtttgattaaaaggacgcctaaggctttagaagttttgaaagagatggttgagagagggataaaccctaatttgactacttataacacaatgctcaaaggttttttcagagctgggcagattagacatgcttgggaattcttcttggagatgaagaaacgggattgtgaaatagatgttgtcacttatactactgtggttcacgggtttggtgttgcgggggagataaagtgggcgaggaatgttttcgatgagatgattagagaaggtgtgcttccttctgttgcgacgtacaatgctatgattcaagttttgtgtaagaaagataatgtggagaatgcggttgtgatgtttgaggaaatggtgaggagaggttatgagccgaatgtgacgacttataatgtgttgataagagggttgtttcacgctggagagtttagtcgtggagaggagttgatgcagagaatggagaatgaaggctgtgaaccaaacttccagacatataacatgatgatccgttattattcggaatgcagcgaggtcgagaaagcgttgggtttgtttgagaaaatggggagtggtgattgcttgccaaatctagatacttacaacatactgataagtggaatgtttgtgagaaaaagatcagaagatatggtggtcgctggtaaactattgcttgagatggttgagagagggtttataccccggaaatttacttttaatcgagttctgaacgggcttcttttgacagggaat

SEQ ID NO: 37502 - DNA, 4948 bp, Arabidopsis thaliana landsberg
gctacatatacctgaacaaatcaaaatactcaaattatttaacaaaacagaggatatttcttagtgtgtaaagcacataagcaagatcttgttgtaacctgtaggcagaggaatccaataggatacttgttcatcaaggtcagtaaaactctgtgtatcagaaaaatcttcctttaacgctgagatagtattgttcttgagtttctcattcaagacaagtcctccttcttcaagctttaaagcgcagaaacgaagaaattctatggtgttgaagccaatgtcaccttcaaacttgctgtttgtgaaggtgatgagacatctaatgcagtctgcgtataccgttatctctgtctcgattatgcaatgaaaatgatcccgcacaattttctcgattgtctcgaaagctaacagtacaatgttcttcctctcatcaagcgctgcagttgtaaaaacctgaaaggaaattggccattcagtaaaacatgtggcccactagagtgtgtcttataaaaaccaaaacacgagcagataaactactaagcatagtatcctctatcctgggttgaacgttttttctcttaaaccttaatcatatactgtatattcacatacaggcagatgctaggaaaacattctgtaccttgaaaacacttttccaccctgatttcacattactgacacggctgagtaccatttgagaaatgcaccgaactattagttctcttatttcagcagaactgcttttttgcataacaatgacaaatggtcgaagaaattcattctgaaagttgtaattagccagctcctcacgttccaagaacttcatagacagttgtcgtagtgagtccataacgaatattgcaacagaaagattctctgacaagccaacagatacaaaaaaatctgacaggatgctccatatgcgagaccagactagcctgatgcggttcatgttgtagtggctgtacagcaagaaaagagatatgtaaatgatatgttgacatcttattagactatcatgatgctcactagatatccagttctgtagccaagatgagatgtattcaatatgtccatttctcattctatgtgttctaaagagagtatcaaaagaagaaattcttacgcgatctcaactaattttgtaaggctaaatactcgaggatccgtaggagactgcagttctgacatagagactttgcatagagctttaacaaatgctactatggcttcagtcttcagccgctggctatgagcatatacattattcaactgaaaactcccgatctggtcaagcaaattcaagtttgcaatgaagttattgatttggtcctgcttcacaagccccggcatatttggtccaattgtactgctatcatatgagccccctcgaaccacagccatcatcaccggattctggagggctccttttttcttcaagttaggaaaacccaaggctttcttctcttcggtctcggttgaagcaaaataagatgcatcacttggagcaccctcgcccaataattgcaaatgctctattctagaaagacaagtcaaaatgtgctcccaagcatcttgcaagtgattaccatcttcaatggcaattgaaattatggcctgaataacataagaagcaataatgaagttatgaagaggtgaatcacacatgcttctctccatcaagtgaaggagaagctttctactagagaaagacattaaaagcagtggaaacagaaaattgaaacatatgatatacttaggtcagtatgcctcagaatgcttcatctctctgtatacattaaaaatcagatgcgaggaaagaaaacacagagaggaacaactcctttcattctgaacagcgaatttaatatgaagaaagtaagaaacttactttaacagcatcgacattcttttgcttcatatctcctgcgcaatggagatttgtgaacttggccatggaagtgacaaatgcatctctttgcgtttgcatacccataactgctgtcacatgaactgcataccgaaagcctcgtaagcattcaactgcagcaagcctgtcatcactctgatcaagtgtcacgctgaatgcggcaagcattggtccccaggaaacttcaaccataaaacgcaatattgcaacgtctgtgactacatggtaagctgatctacaagaccaaaaaaataatccagtacattagatcaatgttatgattacagatcctaacatccgtccacggtatttgtcaatattaatccttttaaaaagatagtttctcaattctcaggaatacacaatttcagagacaaacaatgaacaaggtaaactaaggggaagtatggtttattaacgtataaggaaacgatggtttcatcttagttcgctaatgttgcaggtaacctgactcgctcataagcatctcttcacactagaccttaaggtaaacgagcttactctgattttccagacttcgacctgaacttttcttgaatatcctttataagaagaccattagcccccaccgctttttcttccgtctgtgtccaataaaccagattgagtataccgtccagacccagtagtttattcaggccattggactgcctgctttctggggctgaagaatcagaactcatctttatttcatttatgacaacttggtcataaagcgcaccttgatactcttctgggagatctttgccatcatcaatgcctcggttatttctgataaaatcagccttggtcatctgattgtcataaaccagaaagcagacgttaaatacactgtaaagacctttacaccaaaaagcatctccaatttagaatatttcaaaagcaattttctgagcacagaaatagccaaaaaagttaacacatgcccatacactccaaaagctatcagtcatggattgaataaattgtgacagccaagaagacaaaccttctctttaaccatgatattgtgggcatcagtgttaagcattattacagagtatgcaagaacatatgctgtgtcagcactgctgaatgaatttggattgcatttgcaaaagcgttcagcaaacttttccattatgcggtcaattttctgtgcttccccaggaagcctgaagccccttaagaaaaacctaattgcctcaccaaaattcatctccttgaaatcaaacgagtccacataggcatgcataactttcattggaaaatcctctctttcacccaaataatcaccaatcatggttgcattcaagcctgtggtattcctcaggaacgacaccacctcatccggggagttgccaacctttttagagctgataagaaactcaataccctttgacggctttctattgaatagagtgacgcctttctgcacataaaccaagaaagatgataaaggcaattaacatgaccgaagagaaaaacaattctactaatatcatcgaatgtggtggacaatattttagttcttttatgatgcaatataagacctggagcataatatacactctcttagctcgtcgttaccgcaaaggatgtggacgtctgctcgctcaatggttctcatatgtctaatctatcctaagcatcctctaaattacttagtatgttgtagtagctataactttttaatatttttttggtcatagaagcacctttccccagagcatatgtaaataacaatgttccattttataatagaaattcacatttcatcaaaaaaaaataacataagacctggcgttcaattttgtatgccctcctctgttcaagagttgcagcgtctgatgactctggattcaaatctgggtgaaagtcatgatctatagtcgtcccatcttcttcatttgagtttgaatgattgtttgcaggtgcctcattttctaagctcttaggcagaagtgaatctcccacgctcaattgttggtccatccatgttcccattgccttaataatgctaaccaagcacttcacagattcgtgccgaaaagtaatatcctggactggggacaatattgtcgatgaaccaggaggaggccctagagcagttttcagaagaccgttgacaatcctgcaaacatctgatagaattataagagctttaatacactttattaaagtacaacaccactaatggaatacaaatatgaaccgcgtacgctaccctggtggctcgatctgatctctaacactttcagctaaataactgtaatctgacaacaactggaatactattccggaaaaagaaaccaaaaaactatctaggggagatattaaataaaaaaactccaatacctttcgaagatgttgggagactccacatcgcagtcaaagttcacaaatatgtcaatgattaggtttgggtcgtggcaaatgttctcgagtaagctgagcacggtcattttctgcacgaaacttggctggagaacattttcaaggacccggaggacaagcatcggaaagaatatacctacttctgatttcatacccgatctatatttccgtagtaaggttgtgaagatagcacactgaagttgaaaaatagacataaccgaaagtgcgctattctttaacagcgacaagcagagcaactgcttgatggcatttagaaacctgcatattttttggggagggagagtgagctcttggagttcattactactgagagacgactagactaacctgtgaaatgaaagataaaacaacttgcctttcgtcagagagccaaattgggccgccgttatcaatgatgactttgagcaactcgagagacaaagtcttgcctctcacaagaatctgatcgtcggtgttctcttgtgacgagaacttcatagacaacttacagagatttttgaagagaaggaaaccgtcttccctgatcttgctgcctgtgccttcatcctcagttgaagaagcaccttcctctggtggttggactagcgcgaaatccggagg

SEQ ID NO: 37503 - DNA, 4455 bp, Arabidopsis thaliana landsberg
  unsure (1)..(4455): unsure at all n locations
acttattctatcgacaatgcaacgatcactacactcactcctcggtaacactcttgcttctgcactctgttgcattgcctcaactctgttttctaagtcaatgtataaaaaaactgaggattgaattgtttttggataagaaaagttctctcattttgattctggtttatgtattcacgttcatttttgttaagaataaatgcttggctcacctgcccaataacatctttttttgaccaaatcaaggttctcaaaatattactccaaaactagactatcctctgttttatcctctcacatagtttctgctttgtgtcttctttcacaaagatgcaggaactcagtattttagacccaacggtactcattccttaatggagactagagattttaaaacaataggaaccgacgacttaaatacttgtgtttggtcattgcttgttgcattgtgttgtggagtaagttagaacgttttggtgtcaaatagggcctggaagagctacagatcaagaattggtctacgttcactttcatcatatttacctaacgtgtttataaagtattaaattatccaaaacgttgacctaggtgacttgtgcattaatgcacgtatccactacttgacgaaaattccacacgcgaaagctgttttgaccaaatcaacgatccaaaataaacatttccttttaaagattcaagttctaagatctgcaacaagtatctgagcaaagtaaaatgtcaagagaaaaaatgtgtttgaacactctctttgcaatcctctgttttgtccttaccgttagtttcggcttcgtctctgcccaaaaatgtggggagtctctgtttttcagacctaacggtaattatgacactaaccgtcgtctcgttctatcaactttagcttccaacgtcagttctcaaaacaaccgcttctacaacgtctcggtcggtgaaggagctggaagaatctatgccttaggtctctgtatcccagggtctgatccaagggtgtgttccgattgtatccaactcgcgtctcaaggtttattacaaaactgtccgaaccagaccgactcattctactggacaggtgacaacgccgacaagacgctctgtttcgttcgttactctaacagctcgtttttcaacaagatggctctagagccgacaatggttataggagatctaaatagtggactattccaaggggaccttgcagcttatacaagaacatgggaggtgttcatgaactctatgatcactcgagttggtcgaactcgttacctggccgatatatcccctcggataggttctgctcgtatatatgcgctgatgcaatgtattccggggatatcctctatggaatgtgaaacttgtattcgagataatgtgcgtatgtaccagagttgctgcaatgggttcataggaggaactattcgcaagccggtctgctttttcaggtgggatggttctgaatatcttggtgcctttggtgacacgccatcgctacctccaccatctccagatgggaaaacaatatctacgggagctattgttgcagttgttgtttccgtggttatatttgtagtgctgctcgctttagtattggtcattcggaagagaagacaatcgtacaaaacactaaaacctaaaagtgagtttttttttctctcttaattgttacattgcttttttttggaaccagtaatagaaaccatatataagttattgcagcttgatgatgacatgacaagttcacagtctctgcaatttgatttttacgacctcgaacaggcaactgaaaattttcgaggaataccaagctaggtaaaggtgggtttggtgaagttatcaaggcatttatcaggtgagctctacatatatcaatgctagcttgatttgtcaaaaataatgatcacttaagaagctttgatagccgcttctccgcaactttggtttcatttgtcagtaattctaatattgtatatntgtaggnaatgtnaccaaatnnancanaagttncggtnaagcggctatcgagtaattcaggacaaggcacacaagagttcaagtacgaggttgtgattgtggccaaacttcagcacaagaatcttgttaggcttcttgggttttgcatagaaagagatgaacagatacttgtctacgagtttgtttccaacaagagccttgattatttcctctttggtaataaacaataacacttggtttaatttatgttcatttatcaaactttttttataattatagtgtaattagatccaaaaatgaagagtcaactagactggaaaagacggtacaacatcataggaggggttacacgagggcttctataccttcatcaagactcaaggctaaccatcatacaccgtgacatcaaagcaagtaacattcttttagatgctgatatgaaccctaaaatagctgattttggaatggcaaggaattttagagtggaccaaactgaagaccagacaggaagagttgttggaaccttgttagtactccgataatctctttaaaattgataaacctttttctatttgtttgtttctgattaacataaaactttttatgttgtatatatgcagcggttacatgcctccagagtatgtgacacatggccaattctctaccaaatctgatgtatatagctttggtgtattgatcttggagattgtttgtggcaagaagaacagcagcttctttcagatggatgattctgggggaaatttagtgacacatgtgagcagaaaacaatttaaaattttactttgtttagattgtgaccatcaaggatttggattctgaatatgagtttaatttcttggcaggtttggaggctttggaacaatgattcacccttagatctcatcgaccctgcgattaaggaaagctacgataaagatgaagtcattagatgcatccatattgctcttttatgtgttcaagagaatcctgcagatcgtccaaagttgtcaaccattgtctcaatgcttaccagtaacacaatcagtgtgccagcgcctggcataccgggatttttcttcaggaacagacccaatttagaccccttaacctatggatccgagcaggggcaatccagcagcatgtctgttcctttttctatagatagtgcgtcaatcactagagccactcctcggtgagatgattgcttttgcactagtcagtagcattttacttgtaacacaagcaactccagttttcaaaggtccagttaatttttatggtaatatgggtacatataaaaccaaacttatgtgtagccgtgtaggtagagtattcctttcttgttttttcccatggcaagatgagaatttgtcaaacctcaaatatgatacattaacctctaagaacaaccacttacgaacccatttttttacttcttcagtcatctatgatagtcaccagcttgcttattcagctttttgctctcccagattttctataaagtggcaacaaattttattatttcccctgaaatatccatgcaactacacttatattatgatgatgttccaatgattttgatcaccaacatttgtagatctctaaggtttttatgtttcatcaaactctatctagcagcttcacatgtgctagtatatttgtaacgtctctcatccaagtcctctctttcaaagactggttttcgctatttcaagaggctataaagacttccggaagcacacttaattaactgtgacaggatgtttcaccgaaaagataagtggactttggtgacatagcttgcctctccgaagcactatatacaccactatattcctttaatacaggtgttacaatatcatcttgataaatattaccaacaacatgctattgcttgaacactaaacgtattaactcataatcgctaacgaatttgaacatacgtcttgaaataagaccaagaatcgacacaagctaacgagttctcctatatcacgcgtggtgtgatctttagcgtacatgtcaatggaattaaacacactatctccagtataccaccagaacagagttttaacagtactgcaagtaacaaaccctttatatagtactgtttgtattataatactttaacagaaaaagtccgcaacactaacagaaaaagtccgcaacactaacagaaaaagattttatttttatcgcattgacttgactatgtttgtctcaacaactacttaacgaaaattcttaccacccatactttttgactaatcaacatctcaaaatgttctagtaaaaccattaccgagctgacttgaatatgctttcctcaattacttaacaaaagttctaaccaaccatgctttttgacgaaatcaacgaccctaagtgctacaggaaaataaattgtgtacattattacaatctgtaacacatacctgaccaaagtaaaatatccaaaaagatatgtgt

SEQ ID NO: 37504 - DNA, 2628 bp, Arabidopsis thaliana landsberg
  unsure (1)..(2628): unsure at all n locations
cttcttcagcagctgaaacgaaagaaccatcagatttggagacctcaacgaggtttgcctgagaaatctgtttcggttctacggaattggatgttccaaaacttccttcacccgtaacaatccttactcttcttaactatctactttatgatgatgacattgttaactcgattttataagcaaagttatgttttatttaatgcagttacccgaaagattcggagaaacatcttctagctatacgaagtggcttgacaagaagtcaggtaatgtctcatgtttgttttcttatgcaatgactcattgataacaagctttgttttcttatgcaatgactcattgataagatctttgttttcttatgcaatgacttattgataacatctttgctcacaatgatagcaaatatggtattcaaatgagtaatatatatcttgacatactagtcatgtctgaaaaaccggtattggttattttaagatgagattagggctaggaaaaaatcaagcttttctcttgaactacaaatgagactagattatgtattcttgaattcacaataatgttactcaagtcctaggattgtagtcgcacatatgttttgttactgaagtaagttaaagcgggcaaatgatatagagtgtgtctctttgttgtgtgtgattaaaggtatcaaactggtttataaatgcgcgggttaggctatggaagccgatgatagaagagatgtatgcggaaatgaacaagaggaagctcaataacagtcacattcaacccaacggaccaactcttcgaatgccaaaatctgttatgatgagccaagcaatgcataaataagacaacaattgtgtttaccaactttgtgataattaggcaattgctactctatgattgcccaaaacctaaaccatgtacgactatcattacgtatgttataattgtatatacaactcctttatctttgactatttaattttattatcctgtattcttatatcataattatcatcatcctcattaaacttcatgatcaccatttttacgtaaaaatataattaagttcatgaaaatatataaaaagtatgtaaccactgaagatttattttcatatttattcaaacaaactacaaaatacaaacctaaagttttatttcaccgtttgcatttaactttttttctcttacaagtgagttttattattccaaaaactgaaatgaataatgacgaaaatctcctagcaagcgacgtcgtattttggtttgacttgagaatcttcggtcaactaataaaaacgcagcgttttcatctggtacggacacaattagaaatagaaagtaggaaaaggaagacactttgctaaaactgaggaagaaagtgtaaagacggagccttttacggcgaatggaggaagacagagctaccatgaccggagctgtagccactcgagactcggtggaacctagcgaggacatactcatctgtatcgatgtagatgcagaatcgatggtggagatgaagaccactggaactaatggtaggcctttgatcaggatggagtgcgtcaagcaagccattattctcttcatccacaacaagctctctattaatcctgatcatcgatttgctttcgctactctcgccaaatcagccgcttgggtatactattacttttctctccgattctcccttttatgtgattcaattttgggctttcttttgattttttgagtatgcttctcaaattttgcatttttagatgaaaattctgaaattcatgataagctatacagtgatgcttcttggagatttgaatttgctttgtgagtttctctcttcttcttcttagacttagaggatgtaagtcaattgattgattttgcttccctttgttgcttttgttggtctctcaaaatttaaccaagcattcgattcttcacaactagattgtaattttgcaatagtgggaacatattctgaacctaatcctcaatcttaaaccttgtttttcattgatgcatgatttgctgaacattagttacctgatcgaaacttgatgggtttttcacctgagaatgctgttcttgttactgtttgtagcttctagatgtgttgtgagaatcacatttgatgcttnnnnnnnnnnnnnnnnnnnnnncgtggtgtgggaaatgatgtcaaaatgtggtttatgaaacttttgtttagatcctctctacgctattatctgtgctgattgtttcatttgaaaattgaacttgaggcctttttatgtttcagcttaaaaaggagttcacaagtgatgctgaatctgctgttgcttcccttagaggattgtcaggtaataaatcctctagccgagcggatctcacacttctcttccgagcagcggctcaggaagccaaagtttccagagcacagaaccgaattttcagggtggtaagttttactttgtgaaactacaatctcctctagccacagcctgaaaaataaacgatgttttactgattttgttcatgtcgccctgcagattctcataccctgtaggtcatctatgagaccaacccataagtgagcccttaaatcagaagctcttcacgttggatgttatgtacctgcgcgagtagccaa

SEQ ID NO: 37505 - DNA, 4362 bp, Arabidopsis thaliana landsberg
tccgtcagtgaagggtacaggtgaaattggagtggattatgtggctgagcctcttgacgcttgtcaaaatcttatgaataaaccagaacagagctccaatgaaacttctccttttgtgttgattgttagaggaggctgtagttttgaagagaaagttagaaaagctcagagagctggtttcaaagctgctattatctatgacaatgaagaccgtggaacattgatagcaagtatgaaaatttatgtcttgatcttgtgattctgttgtttctacattttgctgaaagttttgagatttgcagtggcaggtaactctggaggtataaggattcatgcggtctttgttacgaaagaaacgggagaagttttaaaggagtatgcgggtttccccgatacgaaagtttggttgatcccaagttttgagaactcggcgtggtctattatggcggtttcgtttatctcgctgcttgcaatgtcggctgttctcgctacttgtttctttgtgcgtaggcatcgaataagaaggcggacatctcggtcctctcgagtgcgtgagtttcacggtatgagccgccgcttggtgaaagcaatgccgagtcttatattcagttcgtttcatgaagataacactactgcattcacttgtgctatttgccttgaagactacactgttggagacaagctcaggctcttaccttgctgtcacagtgagtacattgcatacaaaatcctgtaactcagggcacatttgttagaacttagaactaactaacaatttctgattctgtttttgtgtgtatgttttcagagtttcatgctgcgtgtgttgactcatggttaacctcttggagaactttctgtccggtgtgcaaacgagatgcaagaacgagcacgggagagcctccagcttcagagagcacgccattgctctcatctgctgcatcgtctttcacttcttcctctctgcactcttcagtcagatcatctgcactattgattggtccttccttgggctcattaccaacttcaatctctttctctcccgcatacgcaagctcatcctatattagacaatcattccagtcttcctctaaccgtcgatcacctccaataagcgtaagtcgaagctcagtggatctcagacaacaagcagcttctccatctccatcaccatcacagagatcatacatttcccatatggcttctccacagtcactaggttacccaactatctcccctttcaacacgaggtacatgtcaccgtatagacctagcccgagcaatgcatcacctgcaatggctggatcatcgaattatccgttgaatccactgcgttacagtgaatcagctggaactttctctccatacgcctctgcaaactcgcttccagactgttagaaagtctacagaaccaaccactcttggttcaggtcatataagattatttcttttgcatttgagttttactacgaaacgtacttctggcgtttgtgtgtggtgtgtgtgtgtgtaacgatgcttttatagtcttttggttgagatgaaacatcatcggatttaggttagagagattttaacacttcgacaattacacaaactcggttcctttgtacaaagaaatatgagcttatgtatatacacgtctctttccttgttattactatctgatcactcttatctctatccgtttgcattgatacgatcctatctagtaaataggcccagtaggcctaattaaggtccagtaacataaactacaccattttagggactttgtaatttggtaagtgggaccagtagtggagaaactgatttgggctaaagtgaatgaagaaaactccatcccaccgttggccggtctattctcctccggcgtcgttgaggatctccggtggtttaaggaatcaatcacaccatgccaatgagatacctcaacgcaatggccgctctactaatgatgttctttactctcttgatcctctctttcacaggcattttagaattcccatctgcttcaacttcgatggagcattcaatagacccggaaccgaaattgtctgattcaacatcggatccattcagtgatgttcttgtagcttataaaaaatgggactttgaagtgggttgtgctcggtttagggagaatcataaagatgcgattttgggtaatgttagttcgggttctttacaagaatttggttgtggtaagcttaagatgaagcatgttaaggtattggttaaagggtggacttggattccggataatttggaaaatttgtattcttgtcgttgtgggatgacttgtttgtggactaaatcatcggttttggctgattcacctgatgctttgttgttcgagacaacaactcctccactacaggtaataaaattgcttgttgctaatcttgtcaaagtttgcgttttggaaagtagttatagatttggatgattgggacagattagatcacactgtctgttttttcttaccccaaattggatgtgatcttgtgatgtattcttcactctagcagatcttttagttctatgactcactaaaagatactttttcattgttgtctatatggttcaagaattttggtttgtaaagtggaaaatttcagagtttaattgtctacgtgagcttattgtaaaccagaagaagctttgtgtactgctattcttgttcttagtcaattcatttttgaaagttggacatagatatggataataaaggcaaactaaaatctcctatgttcttattttcccttcagtgcctgcttcactatagttttctttcaataattggatcccattgatgctgagtttcttggtttgtttccttagagacgtgttggagatccgctccgtgtgtacatggagctagaggccggaagaaaacgctcaggccgtgaagatatattcatcagctaccatgcgaaagacgatgtccaaacaacttacgccggttcgctctttcataataacagaaactatcacatctctccacataaaaacaatgtaagtaacgttttatacacccattccatactgttcttctttcatttcatcgttttttaattcggttgttaaacattgcacaggatgttctggtgtattggtcttcctcaagatgcctctctcacagagatcgtctagcaaagagcctactcgatttgattccccaccactcctttggtaagtgtcttaacaatgttggtggcttggactcagctctctctaggtatccagaatgtgtcgctgagcacaacgctgaagcaaaatggtacgatcacctccactgcgctatgtcacactacaaattcgtccttgcaatcgaaaacacagctgttgagtcatacgtgaccgagaagcttttctatgcgctcgactctggttctgttccaatctattttggggcctctaacgtgcaagactttgtccctccgcattccgtgatcgatggtagcaaattcggctcgatgcaggagttggctgcgtacgtgaagcggctcggtgatgatcctgtggcttactcagagtaccatgcgtggaggcggtgtggactaatggggaactacgggaaaacccgtgcggtgagtctcgatacattgccatgtcggttgtgcgaagagattagcagaagaggtgggaagaacgccggagtttgatgagccacatgtggtttcatttagtgtgggtttatgtaaatgtgatcctatgatctgtttctgttacatatgataacttttttgtcctatatagtctcagatcatcaagtaaatgctatcaaatcatgtgttcaagggacaaaaacagaattattcacttatgttagagttaaatgggatctcttggtgtagcttttccttaatcaaaaattcataatagattatgattgtgattgtgtagactaagttaaaaaggacaaaaatcaagtcataaccactttcctatatttacctacaataatcagaatcatttaaaacttatcaaaactaaaatcattcaaaatattgggtgaattaaagtttcgattgtttcaaaacgtctgtataagtatgacaaagagacatcaaaattcagattattgtcacatttttatcaccgtaaaatcttagaagaaagaaagataaattttttttttttttaatgataatcaaagatattatgttagtagtaaaatagagaatggaaaaaataaattaattacatagacaaacgtgtaggtcataaaatcatttggtacatcaaattcatacatgggtcttctggtattatctattaacagctttaggaaagaaatatgagatcagatttttaggctaatcaaacaaaattttctataaaaccatcatatacata

SEQ ID NO: 37506 - DNA, 2315 bp, Arabidopsis thaliana landsberg
atagtaattcgaatgtggtggtctcgtactactcttgagaagaagattttgattacctgaatcatgcgagaaaacaaggcttgagggaaagtacttggatgttgtcattcaatttatgccccttcacctacacattaagccaaccaatataattatcagtcatgtcttttttgatgaacaaaactgatgtttgattgatataaacttgagaataccttatgggagagagaatagttggtgaaatggcaagtctcaacgtgagatgctaaaagccttctcacgtcaatgattttgtcagtagaaactcccttgagtatcacttgagtttcgtacggagtggtgactgtgatttcaaccagactcggagccaacagtttatcgtctctcttcttcttatctcctcctttccctttgttgtttgatttccctttgcttgacctcggtgccattgatcccccttcatccaattacacacacatatacaataagagatcactatctaaagagtaataaaaagtgagtcaatccagacagaggtaggtaggtaccttggagcagcagagcaatcaagaatcttgagccttgagaaagaaaggtgaagagaagatatataacaaaaagaaaaaaaggataagggttttggatggggttaacactttggttttgagatttataaccaatcctggcctctccttgtcgctaacgccaaatctcttttttctatctctatctcttattagaacgttacatgtgattttgatgttcacattaaagttttaataacaatactccaatcacagtctcatgcaattcgaccgagacgaggtgatggttcagattcgcccacgtggcaactatgagagtggcggcggggacactgacctctttgtccgactccgctttgattgtttacgcttcttttaataacaatcaacggttcgaatcgtctgctcactgcagtgtgcttttagtggtcacccactcgaagtcaattgtcttttttttaacaaaccacacctacttaatgtctctatacacatgatgagcacgagttataacactccctttctccttcttacgatacttacaacgttaaacctttaaaaagttgtacaccaaatttttgaaattgatcaattgtaaaatgatgtcaacaccacagatattatacccacctgttcacctattattgattcagaatccatctaaatgagtgtaggaacaatgatattataattagatccccaagctttcattttacactttaattcctccctcaagtattccctttgtagagagtaccaagcgtgcgtgggacaaaattgagatttgagagattaggagacacaaacaagccttcttagtaatgtgaaagttttttattaactaatttcaatactgtttaatgatgattacactaagctaaaaaaaaaacagaaagaattggaaccttttcaatttttcataaagttccattttttaaccagtccttggtgcacaagagagcctccaaggtttcaccaggaagagatgtcctgtaattgtccatctgcttcacctctgtgtcgaatacggaatcaggagagacggtgctgaaggggaccgagagagttgggtagttggtgttgttgaccctccaccagctcagaacgttaaagtcttctgacctcggaatcaaattttcttccaaatattgatccagctccgttttcatatctgtcatgtacatctcgaagtctgacaatgactctcctattgtgatgagggtagacccttcctcgaaagcacgtttaccggaaatgctgtgtggtcttcctctaccattgcgtgtgcttgagaatcatcaccacgttgttgtcctcttctgttagctgactctcttcactcactccctcccaaatccctaccacattctgcttctctgccttaagctgtctctcatgttgatgtgactctgtggtttcctctacttgtggacttgtctcatcacttgattgtccattccctgtattggtagcttcagccatgtctgtggttttctctacttgtggacttgtctcatcacctgattgtccattccctgtattggcagcttcagccatgtctgtggtttcctctacttgtggacttgtctcatcatatgattgtccattccctgtattggcagcttcagccatgtttgtggtttcctctacttgtggacttgtctcatcatatgattgtccattccctgtattggcagcttcagccatgtcttgatggaagtgagattcctgagccacctctatttccgaaaagccatgatccacataagc

SEQ ID NO: 37507 - DNA, 2833 bp, Arabidopsis thaliana landsberg
  unsure (1)..(2833): unsure at all n locations
ctgaaatgtttaaaacttttttggtttttctatgctttagatgaatgcagactcaagagtatatacaatgtaacacatacttcctaagccctcccctaaacttaaatcacacagtccactgtgtaaccaaatttggaagagagtactcatgacaaaccacatcacagaaacaaaataaaaataggagatggtatagtacaatggtgaagttaggcgcttacctcagtcaagttttaatggagttggtcatcaatggctgcatgtgaattctcccagcccattgaagtgtctccctgttctgtctcagctccagctccctgaaggtactcgagctcatcgcctctgctacggccagcactgccacaagtatactcgacccctcttcttctactgcagtcagcaccgcggtcgagtgatcttctggcgtgattaagccaaaataaggtcaagtattttttattgtctatggtcgagtatttttctttgtctatggtcgagtacactgctgtactctcaaagccagaatccactttactcagctctacatacttatctcctgaaaacactaataacatgcatcaaaaataacaagaaaaaatagatatttgtacaaagacagacatgggacttcctcccaagtgaacttgttttaagtctccaagcttgacttctcatactcatttggcttaggctgggttgcagagaggagatgaggtctcctctccttcttgagtagggtgatcatcgtactcgttagtgtttcttgacaggtctgcaattgagaacttagtggccatgtcctcgaagtaagcttcttttttatcaggatagtcttctccactagaccattccaacgtgaattcacatatttctttgctgaccagaatagtggctccataatctgggacgtccttgatgttgagtggtacttggttagcttttccattgagctccttgattcgatccttcatctctttcacaatatatgttagctcttgtatggctttgtcctgccatttagatctctccttgagttctaaccaatcatttgacgttcgagtgcttgccttaagctgttcggtcgagcatgagctctcagggaaagttggaggcttcttcgagttgttggtggaattagttggtcgagtatgtgttgaacttacttcattagctttcataacctttgtgtcagaccccatcaagcccttgtaaacctctgagccaactgctgtcttgtgtgagtctaatgacttctcagaactcaaagtttcactaaggagatacccacctttaccactattggtaaaaacagtttttgaattatttgcttcttcaagttccactagcagttcaccagctaactgttccacttccttaactaagaaggtttgttcttctattgtcggcttcttcatagcatcattgatatcaaacttcatttccaaattcttccccagattaagatcaatctttccttgcttaacatctatgattgctccagctgtagccaaaaagggccttcctaatatcaagagatcttttggttcttcatccatgtttagcactacgaagtctgtaggcacctccacatttccaatcttgataggcaaattttctaataacccatgaggtagtctaacagacctatcagccaaggagatattgcagtatttatacttgttgaaacccaacctcttagctactgagagtggcatgagatttactgatgctcctaggtcacaaaggcatttattgaatttcaatgaacctagggagcatggtagagtgaatgaaccatgatctcctaacttttctgggagatcgttctcctgtatgatggcactgcactcatggctcgaactgttgttttctgaacctcttgaattctctccatgatcaagtctttgaggaacttttgggaatccgggatacgcgttagagcatcgggaagaggtatccttaattcgacttccttaatggtcttggccaacattggttttgacctaatcttctaactctttcttatgtcgaccaggaaatggaagtgggggcttgtaaggatgaggaatgaagactttttctttgtttttgacagcaacatgtnnnnnnnnnnnnnnnnnnnnnnnnnggaaggtcggtcgagtgaagtggtcgagtggccgctcgagtgacaggtcgagtggctgctcgagtgactggtcgagtggcagctcgagttgtttgacagcttgatctttattgagactgaaatcctccccatcttggtatgcactgtcctcagtgactgacttgggtctctctctagtggataactctcttccactccttatgatgatagcatgaacattaacatactcttttggattctgtatggacttccctggaagtcctgtaacttttggtgcagaggtagatgctgattggccttccaagtatctgactttggtattcaatgcagtcattgtagctacagtttagcttatggtgtaattcagataacttattagcaatttccatcgagctagatgcttgtccctgtagcagctgttggaccatttgtttaatttcagcatcaggagcaacaggaccttggtgttgctgtggggcaaacccaggtggtggttgctggtagttctcctgaaattgctgtttgggaacaaaaccttgattgtagggaacaaaaggtttgttctgactctgctggcaatcgagtatgatgtcgagtggtggatgatggtggaactcgacttggtggtagagtgattggtcgagtgaatgatgatggtgatactgcacctgttagtagagtgattggtcgagtgaatgatgatgg

SEQ ID NO: 37508 - DNA, 2214 bp, Arabidopsis thaliana landsberg
aaaatttccggaaaattaacttttcataaattatcagaatttttatcacacaaatcaccaaagttataaacaattagtcttaatttggtgccactaaaaaatcctttgctatatatatcctttttagttttttggtatgctagctcttactttcacatgtccatgataaaagtgatcaagttttgcgtatgaatattatgattatcttcaacttgtatcacaagaaatctccttttctcttttaatttgctaagctaagtcttaaatgattttacatgtacacataactgatcattatgtacgagaaaatcaaaacagatcacctagctactagtatcggattaccaaatctaagaccaaataatatgtggagctgaatcttaaacttgtgtgccactagaaaccacttttgtatattctaagaatagtacaaacagagaatagaatcgactacaagatcacaattcacaagtgattcattcaacaaaaaatgaatgggggctgtggcattcatatgtggacctcatcatctccagcgtgttttctttaacgtcttgatttcaatttaactccgattagtaaaagtgtttcctaattggttccacatacacatgacttctcctccatgactcaattagcaaaaaggctagagcaaaagtggaaaaatgttgaaatgttgaaactctgtatctgccatcttacttacaatagcacattgagctactagacgtcacttttgtggtttgacatgcatgaatccgtaaaagtaaatagaaatacatagacacggcttctggtggttagtgaatggaggagaaagtatgatgatggtgacagaaaaacagcaaaagttatatccaaatttggataaagaatctctcaagcgcgtggggtaggtgggagaagaagaagaagaagcaaagggaaaagcagagcagagagactctctctcggctataaaaacagagcagggggtcacaacacaggatcactacaacagaaatacccagagcaagatattcaaaaacttataaattctttcaaaacaaaaatggggatcgtagcattggaatgggcagaggggaaaaaccaaccaactcacgctgctgatgaaccgagacaattgggaaaacaggcaagtttaacattttcattctacgttccattaggtttgaattttgttcatcagacattgttgttgaatactttttgatgtttactttttctttctatgagtgattgatagggtcataagtggggcatcttggagtcgaaacggtcagattttgagtggtcggtgcaaagctaacaacggaacctggtttggtattactaaaggtggccgagtcgcttttctcgtgaatacatcgttgttgttggaccgtgttaagtcatacagcggctcggagttgtatcccgttcgtttcttggaggtttggtttgttagcatttcttcttttcatttatatataaactctttcgatctctgtgatcacgggattgcttttgattacagggcaacatgagtccagagcagtttgccaacgaagtgaaagtgcatgaaaaggagactaatgaaaggcatgcctatagtcttatcgttgcagacatgacttcgagttcaatggttcatatcctgaaaccctcggatactaagtctgatgtcgtgatagagactgttccgtttggtgtgcatacactttcttcttacgaaggtctcgattctacagattctgccagggtaatttaatgttcaagtgtcttgtaatagagtagagatgttacaaccattttgcaaatattttcgtctagattcttctttttatttctaaaatcaaactctctgtttttttttgtttttggtatatattatgcaggatttactcctgagacgcttgtttacccagatggttggtaatttgggaaacgttcaacaacgacagatggaggagattgctgggaggtttatgtatgatgctcaagcaggaagagacgcggtgttttaccatagtagagatgagcatcctaatggaaaagtaagaaagttattatcttctgtttttatgatcctcaccaaatcctatacttaatctccttttttcccatttcgattcagcttggaacgcaacgctttggaacaacaagtacgacggcattggttgtgaaacgcactagagaagtgttgctctttgagaagtacatgagcagaatggt

SEQ ID NO: 37509 - DNA, 1276 bp, Arabidopsis thaliana landsberg
actattacccaaatcgagtcatttcccttctgcgaccttggtattcctgtgacaaaatccatagaaactttctcccatttccactctgtgataggtaatggttgtagtttaccactaggcttctgatgctcaatttctacctgctggcatacaaaatatcacccttcataccattccaatgataaaaaggtttaagtgtttgatacatcttaggcacacacaatctacctttaaaagataacactgcgtcgtctctaagattgatcctagctgacgaaaatcctcgggtttttcacaaacaggaccgaatttaccatcttgcctctgagcatcccgaatacgtgctagtaaattcgactcaatacccaatgttgcaagaaatccaaatttttcctctcggatagaaatgtgaaactgactcatctgctctattaagttccattgcgatctaagagatgccacagttacttgctttctactcaaagcatcagcaaccacattagcctttcctggatgatatagaatttcacagtcatagtcacttagcaattcaatccatcttctttgtctaagattcaactccttctgcgagaacaaatactttagactcttgtgatctgtgaatatttgcacattttcaccatatagatattgacgccacaacttaagtgcaaaaattattgcagccaactcaatgtcatgtgtaggatagttgacctcatgtttatgtacttgtctagatgcataagcgatcaccttattttcttgcatcaatacacagcccaaacctgacaaggaagcatcggtgtacatcacataccttacaccaggtctcgaaagagttaaaactggagcagaagttaaccttttctttaatgctctaaagctctgctcacaagactcactccaaacaaacgtaactcctttgcaaagtagttgtgtgaggggttttgcaatttgagaaaaattctcgatgaatcttcggtaatatcctgccaatcccagaaaactacggatctctgacacattacttggctccttccacttagttactgcctcgactttagcgggatctacagcaacaccttccctggataccaaatgcctcaaaaatcctacttcttgaagccagaattcgcacttgcttagtttagcatacaactgctcttctttcaacctccgaagtatcaataacaagtgttcagcatgttcttctcgactctttgaatacaccaaaatatcatcgatgaacactataacaaattcgtccacttag

SEQ ID NO: 37510 - DNA, 10365 bp, Arabidopsis thaliana landsberg
  unsure (1)..(10365): unsure at all n locations
cgagaaaaaacttgaggacactaaatcacacaaaaaaaaattctatttagttgaaaaattataccgatcaacagaggtttggtacagtgatcggcgaaagaaacttaaatcccagtaacagagcctatcgacaagactttgggttcaggggtcaaggtggcgacgattggagtgataaagagagcgtaacgagattgaaatggttaatttgaaagtcaacaataaaaaggtggctcggcccattaggcccaaatatttaagagtttcctttgtttcactgttttttattttttaacgtcccttttgaatcaaactgagtttttactttttacatcaccaaaaatattgaagacaaatgcatttgaatgcattaccaaagtatcaaactgaatttttctattcaccctaattttttttttttttgtcgccctcttccacagtcaacaactcaacatcttgaaagatttggaacatgtttctctagtgcaattctcatgagctcgttaatcccttgtagcccaagatttggaacatgtttctctagtgcttccattctgctcaaatggcaacaagtaatttggacattgtatataaacatctatgtttacaggtcagatccttgtacaacacagtctgtacaatgaacttacatcttgtaggcatttctttagcgtgaattcggtggcagttgagttctccagtctcctgtgttcacggcaggttcttctttcacaagacaagtctttgaattgccttaatggaattgcacaagaaaacaaaactattgacctagaaaattagaacgatgaggttccagtttccttcatttatcggccaaaaacacttaatccattaattctccgaatcaaaagattctttttgttaaaactcaaagcgtaaataataacacaacgaaatccaagatttgcacctcaaatccagaggctatgggagagattcggccaggggtggcggagagtcaaagagcgtgacaaatatgacaatggggaaattgaatcataaaactagactttatataatcaaaacttataatatccgagtaaactatagaggttggttatacggccactgactgaaggtgagaggatgagtacattaacaaaagatggaaagtagaactgcaccattgtagaactgtagaagataattagtaattattagttacatacatctcatcttataaaaaacataacaagagtggaaaaaaaagcgagagctagacaagagcaaaaaacttgctacaacctaagaactgatagctaaaaggaaagacacaaaaaatcattaaacattcaactcgtctcctctgtcattagaatctttgtatgcttctgcaaagcaaagggaaaggggacgactattacctatctataaattcttatccaaatcgtatagttacatagttacgcatagtctagagaacgtgtcactgacaaaagaatattgatgtgaaaattgtgtcgtagttatatatcagctggttccatagagactttcagggctcgagttgttatccagagctatattaaggtcagggagcaagaaggaggaatcatcattcttttgtgactcagcctgcacagagatatgatatgttatttatactcaaaagagtgatactgttttagtataacgaatcggaaaatgaagttaacctggagtttctttaaagactcgtttcttgctctttgttgcttgagcagatcctgcatagttgcgagttcctgattcaggaaaacaagaattatattaaagatttggactttttttatatgagaacaaaatgggaaagaggttttacatttatcaagccattcctttcctttaagagcacactctcctcctctttaagttgagcaagtgtctgtggacaaccacatacagtgattaaactaagacataaaatcatacaacgttgtgattctaccagaatctgatattaattattcttttctggtttacctttttctttcttgatctcttgaaagggcttgttgtaacactcgtttgagttatctgcgtgaaacccaccaaacattcagattgttgcatgtcaaaaaacacatatagcacgttcatttttctttaatcaaaacgctaaatctaagacaagttaaacaccaaaaacatttaaaaaagaatcttctttcttggtcaacaacttatacccaagaaaagcaatatgaataagaagtgcatctttttctcctacctcgagacatactaaattcgaaagaatagaatcacgtgaatggagcgtgatttggaagacttatacgcgtgtctccccatgaccacgaccccacagttttgttgtcacgaattatccacataaccacttgtccttatcacgttcttttaatcacaaacccaaaactgatgactttgtgggttctactttggtaagataattcagcttcaaccatagagaaaaagagctaaaccaatatgaaaggagttagtgattttgaccaagagatgcttcggagagtttttgactttcttttttccatgtcagcccattattacctatgagacttattatgttccacgccgcatctgattacaccacagacgcaccaaacccccaaacctaatccgccacgaaaacgcctctcgacccataaaagaggcaaccctcattataagctattataaataacgccagacataacttctctcattgacccaactacccctaaaacacactgcgtgaacgggggtaatctcgtcattgaatcggtgatgactgggtaatttaactggcttgaattcagcgaacagtttcaggaaccaagcatcgtgacgtgaaacttggccaccaacaccaatcaccatcatctcgatgtgaggaggcactagattgcaaaaataggaaaaagcaaagaagatagataggttttgagtttcatctatgaagaaaaagaacgtgatcaggtcagagtaacagagtgatattatcggtcaacgctaagtcggagtatagatagaaaggccaagattgcgtgaccggcgaagaagccgatcccggactaaaatgacgtaaatggcctcaagagaaacaaataggcatagaggggcaaaactggaagtagttgcggaaaacaaggaagactgagattacgtgaaaatggatatcaggtaaaaagtacgactaggcttcgttataacccggtggctagtcaccgtcaaaacgccgcatcccgaggggtatagttgtcaaacacacagaacagagtaaagcagaagtttcaaaaactgttgaacatataaaccaaagggaaattatcgaacgaaccttagatctaacggcctcagacagtttcacaacgccacttgactcctcaaatccatcaacggcagcagcagcaccgcctccaccgccgctaaaagaggttgcgccgctccatgaaagtggggtcgtgggactagcacgcgtatcatgatctcgcttcttccttaacgtcgccgccttggtcctccgctgacgcacgctccacttcagcttgagatccgacgcgccgccgctcttcgtctcaggaagtgacggctcggcatggaggagacagatcagagcctccgccactaatgaatcatcacccatagcctcgtgaatccagtctccgccggtcatagtctgaggttggaccttccaccgaatttagatagagagagagaaagagaaggagaagaaatggtggcgaaaagtggagaagaagaaaaaatctcccgtggcacattaatgggtggatttttattatatataacgttttcacacatacagttattagattgaaaaattatttttaaatctgtcttttattttctttcttggtgagagtgggacccatgggaatacatacgtggcatatagtatttgtactttgtgcaattgcaaaggtactagggttagcgtctgaatacacgcgcggttagtgacatctttatggcttgcgtgccggttcagttacatccattactcttatcatatgcagtttcgggataaatttgtggacgtgtgaggtcattcttacttgaatcacagtttcgtacttcatgattgtagatagatgccatattgcctatgtaggataaagttttacgaaattaggattagttaacttatgtatttatattaagtatgcattgaactcgttttctttttcttttttggctaggattgaaaaatataatttaatgtccattcatacagtatttactgtccataatactccaaaaatttgaaacaaattatccaattattaaatggtcgctaaattcgaaaaacctaagggctttgttgtgggtacatgggtcgaaaacagaaagatgaattgggccttttcacatgtccgtcatgttgcaatgtaagaattatatccggttcttaatcagattttgcctgaccatttctgattcataactaaccggaaaagtcaacagttcaatgcacttaaaccggttctaccttaatctgttatcgtcatcacttacactctctcgcaaacacccaaagccctaaaatccttaggagcaaccaaaatcatggcgcttcatctcgccagacgccaccaaaggttaccatcaaacacatctttgattcgatttttctccaattcctcatcggactcacctccccaattcacgaacgcaccggttgaaaaaccgtctcagtcaccatcttctccgtcaccgtcagactcttctccgatcttcgacatcaagaacactctgaaactgaaattacagaaccagcaggagcaaggaaggaaaccatttgacagatccgatgcacaatctcagaatcgcggatcgactagtttctcccaaaacttggggaagaatctcgccaagtttcagcggagatccaccgttccacctccgagggattcaggcggcgtacagcctccgtcttatatttccttagcgggcctctataagcagagcgctgcaacaaactcatcggatcctagaaattcgaaagctcagggtttcaattcaaacactgtaagtgaaactttaaagaatttgaggacgcagattaacacttcaaacaacatggggaagagaggaggggttttaggaagtttcaagagcactgtaggtgaagcattgccaaaatacctgttcgaaacacaaatggatgagagtaagggaagtgaaggtgaaacagaggaggcgatgacggagttcttaacgttttataacgaagaagaattaggtgagaaactaaggacgcttaggccagaaggagagaaaaaagaaggatggttctcattggaggagttgaatcagagattggttaagctaaggcaagttgaagagaaagaggcacaatatcggactaagaactttgcccaactcagaaatgttatttcatcatttaagaatgagaattctgaagctagttcccgtacgttctgagcctctcattactctctctctctctctgtgtctaatctttgcgaattttaattggttgtctttgcttaggactcgaggtgttgagatcttggtttgatttttgttgttgaaatgatgtttatgtgatataacgaggtttctttgcttgcagagcagaatgtcgccattatgggccatctcggtggtatccctgaatacaagcttcttcctccaaaagaggatctagttgacactgtaagtttttcgctcttagactttagagctagtagcttgtcactttaattagtcatgaaccaaaaggcttatatgatagtttctacaattctgtgttgatctgttgtgacaatgggtattgatctgttttgtttgactgcatcaacaaagtatttccacccagataacatgtcctctgcggagaagatgaaaattgagctctcgaaagtcagggaagagttcaagatgtcagaatcagactgtggttctgcacgtgtgcaaggtaaactctacataaggccagtggtctgatcaatgttgactttagccatttaaaggtttacacgttctaagatagattgtcttgctatgtctctggtctctccttgcagtggcacaactcactactaagatcaagcatttatcctcaagtttacacaaaaaggtaaaacttcaaactgttttcgatatttttgtgaagctatccatcccagtttcttgtggaaccttatgtcatacctgttggtggctgtaccgtaggacaagcattcgcggaagggacttttaggaatggtgcagaaacggaagaaactgttgaaatatctaagacgaactgactgggattcttactgccttgtcctgtcaaaactcagccttcgtgacaacccggattacaagtgctaagctttatgcactagagacccgatgatggtatctgtgcactcttttggttcaaccaacttactgttgtgagtgagacttagctgttcaaaccctgttaggcattttccactctagggaagaaagtcgctctattctattttgtcctcttactccagtgtttcagctggagctcttcaatcatgcatttgtggcaaagaaatgaagttgtggatctctttcattgatgtttagtattccctttcacatttgagttgtgataataaagttatctacgaacaagcctcatgatttcattttacatttaaagcaatggtttgatgatcttttcccaaatgtcacattgaagaagagaaacattaggtttttggaagagaaattgtatctacagaatcaaaaacatcatgccgttttctcacaaaccaagagcaccgagaggcgttttcccctgcccggcctcaaagtaaaagatcaacatggcaaccattgcgagcctcgagtgcttaatctctgccaatttcagcctctccagcttctcaaagtccggctcataaacaccgtcgcggtttttcccggcgagacccaacggatcgaagaatctcccaccggggtatccctgatcgccggtatagttcgcgaaattctcggcggtcttcgaccatggcgttgcccactcaaccgattgagaatccgggttgaagaaatcgacccatcgtttgctctccacccaacccatgagaagcaattgggttccaagaagcgacccgaacgagaagggagcgatcgcgtctggctgggctccagcttcaaaccatgccacaccgctccaggcctggccgacgaagatcccaagaaccgctgccatcgcccatcggccatggatcagctcagcctctctgtaccatttcagaaaagccgggtctttccccaaacccaatgggtcgaacccgaaatctcctggtagcctgcgaatatcacacacatttgactcaataactgggtaacaaacaattcgggcttttcatgctctcttgagattcagctaacaaattagaaccaaatgagtaatcaggaccttgaattatcataatctattgtccaagctagtttatgagagatatgaatgaaaattcagcattgttcatgctagtaactcagatataaaagagaatagacttacgagccatcgagccattcagggtcaaggaagttgccaccacctttaacggcagggatccaagatttcttaggctgagcagccgcagcagcgacaataagagttttcctgccaactctctgagctccagtgcctacgccgcttcccaatgcggtggcactcctcttgcctccggtgaggaacgaagaaccaagcccactgaggacagctccggagaccgccatcgccatgagatctctaatatacttgctctgtttttttctctcaagatgtggagaaatgagtgtttggttgttgttctctctctctgtttttcggagcagaaagaatcaaagagaggagatttagagggacaatgtgagataatgagaatctatagacgaaatctcagaggctgtcgtggatagatttctgaccaattaggagtcagaaactacttcaccatatccacatcacccacactcaccactgtcttattctgccaactcagtatttacatttttctaatactttacttatctaaatctaaattgtgagaggaaaataaaatgacacgtggaaattaatttattttcttattgaaatgtaaatgacagcaatgaatttacaaaatggctgcattatgtggcttattgcgtttagattacacattacatgattaactgaagaaaaaaaacgaaaatttaaaaatatataaagagaattaacgattaaatggcggggaatcccaagtaggcggaggaagctcaacaaacggttgatttgaacccatgtccgggtttggtgtaaccggaaacggattatccggtattgttgggatggactctattggtggtgcgaatgacgtcaccggcggttgccatggatttgtgacctctggcggcgtggtaaagtcgggattttggggtgggaaatctccgaggactggtggtgtggagaatactggaattgtcggtggatcttgtacggtcggtggtaatgtgaaaaccggcgggatctcttgaaccggtggaggcaaaatcggcgggaactcttcagccggtggagtgagaattggcgggaaatattgaaccggtggaggcataatcggagggaattctagaaccggtggaggcaaatttggcgggaactcatcagccgggggagcgagaattggggggaaatcttgaaccggtggaggcaaaatcggagggaattcttgaaccggtggcggcaactcatcagccgggggaggtaaaatcgaaggaaggtcttgaaccggtggaggcaaagtcacgggaatgactggtggcgttaatgttgactggtcaataggcggttcaatggttacatcaggtggtggcggttgtccgatgactatatccggtgggagattgtttactggtggaggagatcccgtgattataaccggtgggagattgtctacaggtgcagctggtggcgttaatgttgaccggtctaaaggcggaggaaggaggaaaactggagatggtggtggtgatccagtagtaatatcaggcggcgaaaaccatgctagtggtggcatgggcgggacgtctgcgactagaggcggaggaggtgaaccggtgattcccggagctccgccacctaatagaggaggaggagaaacggtgattcccggagcaccaccgcctataagaggaggagggggtgaaccagcgattcctggagctccgccgccaaaaagaggtggaggaggtgaaccagtgattcccggagctccgccgccaaaaagaggaggaggaggtgaaccagtgattcccggagctccaccgcctaaaagaggaggaggaggtgaaccagtgattcccggagctccgccgcctaaaagaggaggagggggtgaaccagtgattcccggagctccgccgcctaaaagaggaggagggggtgaaccagtgattcccggagctccgccgcctaaaagaggaggaggaggtgaaccagtgattcccggagctccaccgcctaaaagaggaggaggaggggaaccagtgattcccggagcgccactgcctaaaagaggcggaggaggtgaatctgtggttcccggagcgccaccacctaaaagaggaggcggtgtcattgtaaatggtggctgtgaaaccgtgccgccaggtagaggtggtggtggtgataaaactaatggaagaggtggtgagggaagagaggaagataatggtggtggaagaggcgcagaaggtggaggaaggggtagcaccggagaaggcgtcacagatggtggtggtagaacaggaaataaaggcggcaatggagggagtacaaaaatcggcgtagggacaaatggtatcaccggcggtactggcggcggtccagcccccgctgggatgcaagttatgcaagaatgaaaaagaggcggttccggggctgctacacaagtaatgcaaggctgcggaggaggtgatgctgggnctattacacaagtaatgcaaggctggggaggagncggtgctgngnctgtgacacaagtaatgcaagnctncgnagnaggcggtggtggtgaagatggtgnaggtgggcaaggaaccggaatcggaggaggcggtggtggtgagcaaggaaccggagttggcggtggaggtgatacttgtacacaagtaacacacggtggtggtggtgcaccgttgactatgatcggaggcggaggtggtgagcaaggtgtgactgggagtgacggtgggggcggaaggggaagaggtggtggtaaggtcgccgcaggtggcaagaaagggttttgaggacaagggtcaatcgggaaattccattgaccgcaagttccgaaaatgcaccggaaaagtacgtcacac

SEQ ID NO: 37511 - DNA, 6168 bp, Arabidopsis thaliana landsberg
caacgcatacacagctctatcaatcgaaacagggtcaccaatctgaatagcagaagcaaatgtagtgtttgcttttaatggattgaaatcttctttaaacccagatttgtaatgcaagtaaagtggatttgcattagcagcttgagcacaaacaagcctagggatacgatcaacaagacctaactctttacacatatgaaaccctttgtaaaacgcatagatgttaccaagattgcctccaggaacaatgacccaatcaggaacttgccaattaaactgctgcagaatctcaatcgccgccgtcttttgaccttcgagacggaggctgttgagagagttcgccaagtaaataggaagctccgccgtaacttctctgatcaaatgcatacatccgtcaaaatcagtgtcaatactaagcacaaacgctccgtttgcaatcggctgcacaagctgagccatggagattttatccgcaggtaagaagacaatcgaggggattccagcggaagcacagtaagcagagagagcagcggaggtatctccagtagaagcgcaaccaactccgatgactggtttgttcattttccggagacgattcacctgagaaacaaaaaaataacataaagttgtaaactttattgaagatgtttatacagttgtaaactttatgaaagatgattcacctgagaaacgagaacactcatgcccagatctttaaaggagccagtgtggctgattccacaatgtttcacccaaagatcgttcatttgcagatactgtttaccaaatctctcagcccagaagagatttgagtttccttcaaaagcagagacgatgtcgtcatcgtcgatctcggggagtacccactctttcttcgaccacacgcctgatccgtacggccaatttgttttaccgacgcgagaatcgaaaaggttacgccagaattctccgtcgtagcgtttcaaggcggcgaaatcatgctggacgtcgaggagagcaccggattgtgaacggtagacgatctcgtcgagggagtaggattctgttgaagaaggtggagcgttgaaagggacgtaacgtgcggagaggttttggagttgatgaggacggcgacgagcttcgtctcgaatgttctcatcgggagaacgacggggtttctgtggagtttgtggaggaacggcgggagaggcggaggtgcaacggacggtgaaggaagcggcggagtgaggtttaagtgaggtttcagagtgggaaggaaagtaggtggcggagtggggaagagagaatgaggccattatgagtaagagagagagagtaaagtgaagagtttgatgatattgattggatagaagaatgattgttgacacctttagtcacaagtaatttatttataacctaataaatattgggacgaaagtattcatttattgtttgtttttcattgtcattccaatttccaaattatgtactctagtcatgaattttcttatgatggtagagaaagcactagggagaaatgaatctttgacattcatgaatctagtgtgaatttagtgtttaagatatcaaatatgcaacaaaaaaaaacacgtatgtatggagtacatgagacatgtgccacacatgaagtatattcttatgagtaaaatgttactattatttgtatggattattagtcatgaattttcttttgatggtagagaaagaagcactagggagaaatgaatctttgacattcatgaatcatgtgtaaattttagtgtttaagatatcaaatatgcaacaacaaaaaaaaacacgaatgtatggactacatgagacatgtgccacacatgaagtatattcttatgagtaaaatataatgttactattatttgtatctattgttctttgttcttctaatatatatttgtgatttcgtcccattttattaatcaaataaatatattacaagccacggaaacaaaaaataaataataaatgtcactatctttttgtcattttaaaggacaaaaataaataatgagatgagactatgagagcaacattcatacaaagtagacgacacttcatagttcatattaatgtatataggtatggagtttatgatcttaacgtttttggaaaagaaaaagaaagtaaaggacaccactagttatgggtcctccttttcgtcacattgggcggattgggtcaaatatacagtaaatggatgagcattgtgaaaaaccagcccaataagcttatacttcaaataaaagacttgaattagaattgattcaaactctgaatacctcaactaaccgttgtgtgttctctctaaatttgggtcatagtgttttggggtttgggagagaacgacacaataaatgagaagggatcccttttctgtattttaaagcgttttgatagggaacttgagaaatttgatttcatgattcgtgtacttttttgttatgtttgtgactcgtgatcttttgctcgataaaagctttccatagtttttgttggtgctttagtctgtggaaactgcttatgatttggttcttttatctccaagttgtgggctgaaatggtcatcatcagttgatacagaaccaacagtgttgttggtcactcaagcccatcacagctataatgttatttttggaatcaaatcacatggttggaatcactctaagcttgtctactcacttaaacatctaatctgttgaagataaggattaacgatgtaataagtaagcgtggaccgaaaaagaagtgtatatctgtttgggtagtgggcatttccaaatactatagtattgatttctgttgtatatttgatttgatactaaaatatgtgaaactcccaaagctaattaatagtatttttctaatcaagttatgtcagtaaatgatacaacgacagaaaattgatttctgttggtgtttggtagtatcatactattgtccaaggaccaccactgttcctagaaatttagcatctctaggaagaactctgataaatctttagattcttttttcataaaaaaaatatagctcgaacgatagtggaagtgtaacagtgaaaaagaatcaaaggtcacgtgacagatcacgtgcctctcacactgccttctgctctcttctctgcccaacgacccaaggatatggacgccacgtcatcttatccaaatcacaaaagcggatccattttctctctcctttgttgggtctgatccgagaacaagatcttagccgttgttttcaatgacgaccttttagctttgttctatctctgccgtcgatcttcttcgtcttctaagagtgctcccattttgtcgctttctttatccgtaagagtttaagaccttagtcatgagtgacacgtgtcacctgccagcatctgatttttaccagatcttccttatttccttaataaatcctttaatattcgaaaaaaaaaaaatctgtaattcaatcttaaattaagcaaaccaatttgcacatcgtgatcattttctgattacattttgcacaatatggaaacaatataaaatccattgatgatacacttagttgaatcaaaaactaaaacatttccactttatttgtttcggttaggtcaattttaaccggtaaatttgaaaactgtaaatggcattttgtaacatagagaaatcagctaatcgaaccggaaaatgcaagccggttaataatctataccggtatttcaatttggtttatttacaggggaaaaaaaaccggaaccctagactcgctcgtaacagtataactgtataaggtctcattttcgtgcgctctcgtcgcgattactctcttgagctctctctctctctcttctaacatcggtcttgtattggtgcttattggatatctccggcgaaagaaacgagtttcgcggttagattttctttatcgcttaccggcgaggaggatgatcgtttcttcggtaaggtcgattaatcggttctgttttcgaagatgttgttgttagagttagatccgcatggttttggtgatcgttttggatcgaagacgtggttccacagacgcaaaaaatgccgtcgtctcttgctttgagatttggcttctgaaatctttcctctttcgttctcgttgaatcctaatttttgttttgtcttttttagaaatttttggtctttctaatcctggggataggttacagtctccgattgtaaatagaaatttgcggcgaggttaggaaaagttgtacagatagagattgagctctgaaacacatctcaggaacattttttgttccttgtttaaaaaagttttttttttgtgtgtgtttctctgggttggttagaaagtggcgaagatgaatttgggtgcggccgaggaagaatcggctcaggagattcatttaccagctgatatcaattgggagatgcttgataaatccaagtttttcgttttaggcgctgctttgttttcaggggtatctggagctctttatcctgcggttttgatgaaaactcggcaacaagtgtgtcattcgcaaggttcttgtattaaaactgcgtttactcttgtgagacatgaaggtttaaggggattgtacagaggatttggaacttctttgatgggaactatccctgctcgtgctttgtacatgactgccttggaggttactaagagtaacgtaggctctgctgctgtcagcttggggttgacagaggctaaagctgctgctgttgctaatgcggttggaggtttgagtgctgcgatggctgcacagcttgtttggactcctgttgatgtggttagccaaaggcttatggttcaaggaagtgctggtcttgttaatgcatcaaggtgtaattatgttaacgggtttgatgcatttagaaagatcgttcgcgctgatggaccgaaggggttatacagagggtttgggatatcgattctgacttatgcgccgtctaatgctgtttggtgggcgtcttactctgttgcacagcggatggtttggggtggaattgggtgttatgtctgtaagaaagacgaagaaagcgggaacaatagtaccacgatgaaaccagattctaaaacgataatggctgttcaaggagttagtgctgcgattgctggaagtgtttctgctttgattacaatgccactcgacacaatcaagacgagattgcaggttcttgatggggaagatagtagtaacaacgggaagcgtggaccgagtattggacagactgtaagaaacttggttagagaaggtggatggacggcttgttatagaggattgggaccaagatgtgcttcaatgtcaatgtctgcaacaactatgatcactacctacgagttcttgaaacggctttctgctaagaaccatgacgggttttattctaaatcatagtgataacaactgagaatccacatagaagaatcttttatggaaatgtctctagttttcttacttatcttgttctttatctagctcttctgctatttcatttgtttccagtcatatgtaaggaatgtgttaaattcagttgtttttaaataaataaatgttctttccacattggcttgaattcagtttccaggtatcggttcaccataaccgtgctactaaaccgacatgatatgttgcaatgttaaaagatgacttgtaagactttatttggcaattgcagtcttacatcaataagcacacacgacaagctttgatttggcaacatgttatatttagaagtaattcatgaatcacttgcgaaagtgatatgtacaggattgtgactttatatatttcacaatgctgtctttttctttacagaagttaaattatgatcatttgttagtatttgagggacacaagtgtgtgtgtatctgtcccataagtcaacgtgttttggagcagtattttacgtttcttcttaccttatcaaaatattatatcttaaataggaaataatgcatagagactgccttgatattttgaaaaaaatattcatgaacgtgtggaagaaatggtagtattttcaagtgtatgacatcttctcagacagataaaatgagactcaaagtagaatctttcaaccttttttactttatttataagaagtgtatcaagaataagacataatctaatatatactggattcttcattaaatgttttcttaaac

SEQ ID NO: 37512 - DNA, 3108 bp, Arabidopsis thaliana landsberg
  unsure (1)..(3108): unsure at all n locations
cacatagtttcttcgtagacgaagagaagaaagtcttcatgggtttcggtagaaaccttgaccccgactctaattgtctcaaaacatttattagcatcgtcggagaggatggatacttagaaaaactgaatcttgtagacggaaactgtaaacagtatgttatctctcatattccaagtttggtccaaatcaaggaaggttcacgacgcaaaaagagaaaacaaagtggtttagaaaagcgtcgatttgatcaaaacatgttgagacttgcctcaattgaaaagtttgtttatgagcaatatatataactaggaggaggcgtaaaaggagaaaacaggtaattttttgctcttgtacctttgatatttttactgaaagtgaagcttatggtgattacacttgtggtctacaggagcagaacattgaacgtgatcgattttttgaaacgatacgagatatcagatatcttacgtaataaagaaccatatgatgttgggcttctattttactttctgctgtgtttttgtcagtaacttgtggggttgtatgaataatatattgaccttgcgtgtgagagaaaaacaaaaatacacacaaatgtttgcaactatttagggttactccatagcgctacaacttggtacgtgctataagttcaaaccttttgtcaaataacctgcaaataacttcctcgattcttgaacttttgacaaacaagttcatcttaaagcctattctgaataaaccgtaagcacaaacaaccttgtctaggtcagtaaatgcattaatgacaatctcatatgtgtggctgttccagttcgtccccgtctcttttcatagagtcttcttagctcgaaaggtcccagatttaaacaatgccatagtcaatatattatatatatgtaaatatgtaattacattaggctcataacctagctagcttgttcatagaagacatcatcgttatgactcctttcaatatcgttctccttgtataagccattgatatagatattataggtataacaaacatcaggatcagctcatcaaactacttgtctactttcgggtactgcccaacaaccacgccttgcaacaaacgattgtgtaacaaacaatatcgggctttattttgtcacaatataccagagaagtgagaaaccaagcagccatggaatccctgaaaatagattccggtatatcgaacttcttagagaactcaaggtgttagtctgttagaggttttccgctagcgttatgatcaaacccatatattcttaccgcccttaccaagaggacattttcagttatgctcttggatatgagaataagaaatcttgtcgtagcgttaaattcttgaggtttgtagactatttactccaacgacccaaagagaattttgtatacaagctgtttaacttaactgacgctaataagcaaacattctaaccagagtaaaccacatctaaaccggatatgataaccagttgatgagatatatggaactatcacttgtatacaagttatgtatgttctcttttctttaatctttatactgtttctctaaaatgtttaattctcttgggaataggcttaagtatataactgatggagaaaacatcgattgcttcattgactctaccggaaaaaacataagcggaaacgaaatataccctgaaaatggactcaagtctatcaaaacttctcaagactttcaatgtgattgaggtgtgggctcatagttattgatcttgaagcccacgattggcccagcttcgttcgtttagggtttttggtatcagtaattgttatatacttttccttaaccgcaagatgaaacttgaggaaaagaaaaatagggttttcggaaaacccaacaatggctacgncgatctccaatcttccaagggagttgatagaggagattctttctagggttcccttgagagctatgaaagcaatgagattaacttgcaaaagttggaacaatttatctaaaagtgagagttttatgaagatgcacattggtaaagctgcaacaagagaagagaagaccatgatggttgcggtgatgcctcacactcttgctttagtgagcgttgtcgtcgacggcgctaatccatctacagagcttaaaggtcagtttagtttccttgacaaggaattctttatatatcgagtcatccactatgagggtttgctgttatgcattttgaaagacgctactaggattgtggtttggaatccgtatttggggcaagaaaggtnnnnnnnnnnnnnnnnnnnnnnnnnnccacatggtgtagaccatttcaaatatgcccttggatacgaggataaaggatcttgtcgtagcgttaaattcttaaggtttttagattatttacctgaagaaccagaaaaccaaaatgtttgctatgaaatctatgattttgactctgatttatggacaactcttgatgtcacttcacactcgtggatatgttattctagctgtggcgtgtttctcaagggaaacgcttactggcctattgaaaaaagtagctcagaagctaacatcgatcacataatctgttttgattttacaagagagagtttcgggccgcctttacctttaccgtttggcgctacagatcgtggatattcatatgtgaatttatctttgtgttaaagaagagaagcttgcagttttttttcagaactacttttcatatgaatatgaatttgagatatgggttacgactaagattgaggccgaaatggtgtcgtggagcaaattcttgagaatggatttgggacctaatatagatattccaattactttcttcattgacgaggagaagaaagttttcatgggttttgagcatagagaatatcccaagagatttattaacatcatcggagaggctaaatatttaagaaaattgaatctccaagtacctgaaggccaatactgttggccacctttgtgctcttatgttccaagttcgatccaaatcaagcaacctgcactgaggcaaaaagatagagcaaaatagtttataaaagcgctgattaactcaaaactgcaattgaaaggctagtccagaatcatatttaatagttgag

SEQ ID NO: 37513 - DNA, 1091 bp, Arabidopsis thaliana landsberg
agcaggaaaggtcgatgatttgaatgttcatgtctgcttataatccaaacagcttcatcatatctactgtaatccaaacagtttagtatatcaactcatgtaagatgttaccatgttgactataaattgtagaagtcttgtttcgttctttgtttgacaaaattaataactcagtttggggtactgatacatctactaatttagaaacaaagaagccattccatgaaagcaacacaatgataccttataaaattatgatgcttttggtctcataaaatttccaagtgtgctgtttattgtgaaatcagttattgggtaacaaaatcaaagacaaaagactcctaaaagaatcgtatctcatttcttaggtttaagccaattggtgaaagaaagagagtttagtgatcttatagtccatgcctcccattgcctcctgctgactcgctttggtcttttgggaagctcaaacactacaaccagagccgtcctgatcactttcagagggtctatgattccagctttcaccatatccacatattcccgtagtttgttctccgcagttagttaaatgccatcttcagagagaacaaaagtgaagtgatgatggattgtgaaactcacctttagcagcatcataaccgaggtctgggttatcttgctccaagagcttgccaacaataacagcaccttcaactccagcatttgaagcgattgtgtaaacaggagtctggtaaaccaaaactcgttaaaacaatttcttgtcatcaattatcagatcagaggattttagttctaaagaatagaaaaccttcaatgcgttctgaataatctggacaccaatcttctggtcaaagttggctgttggaagtttttccaactctcttgctgcgtatagaagagccacacctcctcctgcaagtgttttgatttgtttctttagcacatagcaaactttttagcactatatcaaagagtcttcctcactggaagagacatacctggtaaaataccctcttcaactgctgccctagtggcattcaaagcatctgtcactctgtctttcttctcaccaacttcagcttcacatgctc

SEQ ID NO: 37514 - DNA, 3166 bp, Arabidopsis thaliana landsberg
gaacgaataagtttcagcgtgtgtcacaaattcagttcattgattcaagatcctctctgacatccgctaagataattgtgttaatcatcatcagctttatatacccaaaacaagtccattcaaacatcaatcaaacgtattatcaataatccaactaaacaaaagccgaacattaaataaaaataaaagcctcagtgtgtgtaacaaattcagatcattgattgaaaaacctcactgaaatccgctaagataattgttttctatcatcataagcttataagtggaaaaacatcaaccaacacaaaaaaacaataacagagaaatttgtcttcaaaccaatcaaaagataagattttgggtgaaaggggaattaatactcagacagccaagggttaatcttcaacttctgggagaagaatcccagatctgaaactctagtccacaatactcttgtatcatcaccatattcaaccccttccacatcccataaaactaagacatcacaaatctctttcccaaaaaccttaaatatcaccaatttcaacatatatacacaaacgaaaatagtcacagacctaaccctaaaatcacctaacatatcatttagacatgaaaaggaagagagttcctatgatttgcattagacgaaaccttataaatacacagacacagcagacaattagggtttacttcggtcggcggctaccatatctattttaggttctcggcccaattatactaaatgggccagctttcgtgacccaacaaacaacttacatttattttactttattaacacattcactttacaaacccaatcaacgaaaagtccaaaaacgtaaaaacagaaatgaagaagattgagctcgtgttcataccttcgccgggaatcggccatctccggccaaccgtgaagctagcaaagcaactcatcggaagcgaagaacatctttcaatcaccgtaatcatcatcccttctagaaacgacgccggtgatgcaaccgcctatatcgcatccctcgttgcagagtctcaagatcgcctccgctacgaacccatctccgtcgaaaaacaaccaccaaccgcaaattttgagccgtctcaagtctacatcgagaaacaaaaaccacaagtgagagacaccgtctccagaatcatcaatccaacaagaaaactcgccggattcgtggtggacatgttctgttcttcaatgatcgatatagctaacgaatttggagttccttgttatatgatctacacatcaaacgctacggttttaggaatcacacttcacgttcaacaaatgtaaaacgacaaaaagtatgacgtcagctagttatgcatcctcggtgatcgagttggagtttccggctctgactcgtccttatccagtgaagtgtcttcctcatatcctcacttcaaaggagtggttacctctctctctagctcaagctaggcgtttccggaagatgaagggtattttggtaaatacagttgctgagcttgaacctcacgctttgaaaatgttcaatattaatggtgacgatcttcctcgagtttatcctgttggaccagtgttgcatctcgaaaacggcaatgacgatgatgagaagagattggaggttttgcggtggcttgatgatcaaccgcctaaatctgttttgtttctctgttttggaagtatgggaggtttctctgaggaacaaactagagaggtagctgtggcgttaaaccgaagtggtcaccggtttctttggtctctccgtcgtgcatcgccgaatataatgatggaacgtcccggagattataagaatcttgaggaggttttaccggacgggttcttggaacggactttggatagagggaaagtgattggatgggctccacaagtggcggtgctagagaagccggcgataggagggtttgtcactcattgtgggtggaactcgatgctagagagcttgtggttcggtgttccaatggtgacgtggccgctttacgcagagcagaagataaacgcctttgcgatggtggaggagttgggattggcggttcagatacggaagttctttagaggagatatgttggtcggagggatggagatagtcacgacggtggatatagagagagcggtcaggtgtgtgatggagaatgatagtgaggttaggaatagagtgaaggagatggctgagaagtgtcacgtggcgtcgatggacggtggatcctcgcaggtggctttgcaaaagtttattcaagacgtgacagagaatgttgtctgatggtaggaagatggaaaatcacaggttgactctgagatacgagtgactgtttatgtatgtcatgtcacaaaatttcatgaatttgtcccataatactacgataggtgtatgtgtgtttttcttggggtcaaactatgtctatgtgtaagttctttagttgatgtaatgtatgtcgcgtttcttgaatttgtgtcataaagtgataataagtacgatggtgtggtgcgtctaacaaacacatgtaaccaaaaataaaatcttgtatcaatagagttttttttttttttttttttgtgttaaatatcaatagaatttgttaacaatggtagaaaccataacaaatacttaaaatagaaaaatgttttcttttttgtagtacaaaagtttgtcatccgtccacacaacggaatatagaatagaactagtagcagatacagaataaaccttttgatgtgccaaattctacaaatgtaactacataaacacttggtaactgagtcaccgatatcttatatagtcaaccctcagcttcaaattattgctcaaaaacaatttaaatttgagctagaaaacataaactgtgaatgatttgggaacaaatttaaattgttttgaatgatttgaaacacagcaaccatcaagcttatgttgttgaactctatatgcaattctggttttggtatgaacagagtttgacgaatttatactcctattgatctgaattaatggaccatgactaaccatctattgattttttttatttttttttaccagtttaccaatctactgaaaagtagctatttcatcatttaatttcttatataagagacattttgtcattttgtctcttatacttcctttaacttttatataagagaccattttat

SEQ ID NO: 37515 - DNA, 3345 bp, Arabidopsis thaliana landsberg
  unsure (1)..(3345): unsure at all n locations
aatgagattgccttgatgccactatcagcgcagtccacatcagctctgtactttttcagagctcccgctgccactgtgaggtaacagttgtcatcatccacgatagtgatttttctaccaaggagaaaattctttagaatcaaatcaggaggtcccttgtgttgaggtggttctctgattccaatacccaatcccctctgcaaagttgctgctagcatactcgccctcaatggtttcactatcactattggaggatctataccggtgcataaagcctctgatattgacgattctactgagtttgctaacaaaatcaacttaggagaaaggaaaagagggtctttctgtagctttttaatgaaatcatctgcttccctattccatatttcttgctctatgagtatcatattcacagtggtagtaccaatcttcagataatgtagagcctgttcaacacgtggaactacttcgactcgaattccaagacgctgaaaatggtaccacgagacttttgcccttgcaggcctatggtccacaaccacagctttcatgccccggaattccgagaatatgggctggttgttgtcattctttctttcagctggttgcatcccattggaaaatacagcagtaaatgtgaatgtggacccaaccttgggagtactcgagaatccaatttctcccttcatcagtccaactagacatttgcttatgctaagtccaattcctgtgcctccatgcgtcctggatatggatggtccgacttgcatgaaaggcgtaaaaatacgggactgcgcttctacagggatccctacgccagtatcctcaactgagacgattaggtttatatcagggggagatggttcaaagctccgatgcccgttggagctgaaagctttaaagttttcccagctcctctgccggtctgcaactggaagcccactcagtgtactttccggagatgatgctgtctctccatcgatagattcaaatagctcatccaccaaatgaacagttacaaagatgtgtcctttctcagtgaactgccagaatatatataaatgatcagctccgttgatcaactcggatgcaaggaatggtcagaaaaaaacataataaaaaagtttaccttaatggaattacccataagatttgtgagtatttgtcgaaacctcccaggatcaccaattaacatatctggaacacgatcagatatgtatactgccaactgcgttcatcagcaacactcaaaaaatcagtaagaaagacttgctatcagttacaacccttgctttgcagatcatatagtaagttacctccacccccttttgttgggacttgctagagaagagtgacaggacatcatctaatattcctctcaaatcaaaccgcacctcctcaagttcaagctttccagattcaatctttgcttggtccaaaacctcatttattagcgagactaaagcttttccacttgcctgtgcggtcctaacataatcctgttgcgtaacatctaactctgtgtccataagcatatgcaacattcctacaccccagatcaaagtcaacatgagaatatttggttaagtttgttcttcagaaaatattcatgggcataggtgagagaaggaggcaacatagtggccatttcgatactcacctagaacaccattcattggagttctgatttcatgtgaaacagtggcaaggaactgcataaaaaaaagttagattacaactcttctctctgtcatagaaaggtttatatgctgtggaaatttatcaactgaagatgatgtatttacctgtgactttgcaacatctgctgcttcagcctttttcttgagctgcttcattttatcacattcttcttcaactttgtgtattcgactaacggttgcgtggattatatgtgcaacaagtaacgcaatcacaaggataccgaatgatgtcaccattgatagcactggccatggtggtttctgtttaaatctacaaagaggaagaagctcacaacaaaatgttagcacctggattcttgcaaacaagaagaaattacagacatatgtatgtgccaactgcaagtacctgcaacgcatctcatgctttctcaatggatcgccaaagattagtggactaacacgttccaacccatcagccgacacatttgtaccatacatgctaatcggttgagagtgattggtgatatcgtacacattgacaagaatcgtttgcttgctagccagctgttgaagcaagttttctaccagggactcaatgtcaaacactcccccgagataccttcaggggcatcaaaagagatgaatgagcaaaaataatgttgtaaaacttatgcgttattatttatttagacgcctatgctacacacccgttagtagcctcaattctctcttttggcgttgcattggaggggagatctctcttgtacactgcaaatgtcaggatcaccccaagtctatttgtctttatcaatgggaaaggagctgtcaaaacccctttacctgaactcctggcccgcaannnnnnnnnnnnnnnnnnctatcaagaggaattgagtgagaataagtatcagttaaaacagtgctctaaactttaaataaaatgatcaaaacaacttaatcggtaagccgagattgaaatatgaactagccatgtcggcaggattcgcccggtagtgagtgtagaccatgatagtaaattacataaaaacagtaaaattagaaccagtaaagaagcttactttcccagacagcatatcgagagaaacaacgtgagaaacagtgtcctgagcaaagatgactggagcgtactcttcttggacaggggatggttccaaagcttccaggtcatagtcatccttgtgaactgggttttgttcaagagaatacatcttcctaatagtccaaccttgttgcctctcgaactcttccctctctgaatggagcaccctcatagcataagctaccccgctagtaagaggcctctcaaaggaagttctatcagtgtactctgagaatgttctctacacaaagcttcttaatgttagttactgttcactaatactcaagaagataggaatcaagctaccaagtgttagctaaatacaaagactgtaagcaacaatcagcaaaattgtaaatcctaactgaaattcgagagcaagttgaatgaaaaaagctaccatcatccaaggaccgttcatatactacaccgtaggaacaacttatgtactacaagcaagactagatctcaggcatcaatccgaacagattaaaagacaaaaagttgcggaatcgagaaaacctgatcgatagcagaaggaat

SEQ ID NO: 37516 - DNA, 3390 bp, Arabidopsis thaliana landsberg
ggtcccgcggtataccacaagttaaaatctagtacatatgtataatataacacacaaaaaaatgctttgaaaaataagttataaggttaagaaggtggcttataataagcgtaaacagcgtaaaaactttgagagaaagtgaggactagtagaataaccgcagcacagaaagaaacaattgcccatggattattgaagtacttatgtttcaacgtagccctccaagcattccacttatgatcgtagtaacgattaacctcaatcgataacctagataaatagctatcttcggtgtcgaatacaacttcttgacataaacggttgaacaaatccgcgacttcagaatcgctccctagccaatgttcgatgataccacagtagtgtaagtagctaacatcttcgtgagaatctattagattgtccatgaagattatgtaggatgttatatcattgctcgaatcgatatgacactgctcaaaagctataagattcagaaaaagagatttggtacctacaaaaaaacatacgaggatggctttacttattataaacatttagttgttttgttgagaaaatgtatttgtttcattatctaaactttttgccaatctgaaaacacatactcttttccattgcttagatcattctgaattagtcaattgatgacatttcttatattccaaagtagcatttttatgcaacataccacatcaatacatcatgattcctactaatatattctttgtcaatccatataaaccaatacaaacgagaaaatatcaatttatatggatttgatgaattaaaaaggtgatggataagaaaaaaaaactgtaacattttactcaaacaaaagaaaaataaattgtaaacatatggggcatgtgttaaaaagaagaaaaatgtgaaaaacgtgaacgtaccgtcatggataagtagcctcggtatttctagataaccgtttttgaattgcatatcccaaaaccggtcggtttcctttctcatgaactcaacacctgcgtttcttagttcagtcacgcaatgtatcagttgttgttggcgcttatccgccacgcgtgagtaatttgcctttccggatgatcttgggaagagcagacttcgatggaaaacatcaagacagtgcaactctccattggatacgcctcttggaggcgagttctcggtcaacgtctcggccgttggcattagaggaataaagaaccgaaccactaattccactaaaccagtttggttctgtgtaccgggttgtaactctaataaccggttgagtacgaacaaaggaagttgattttccagcattatcatgtcacgttgaatcgaatgcatcgatcctcgaaccgcgaaaactggatcgttatgatcatatctacgtaacagccaaaaatgaataatcaaaatcagtagttttagataacccgatttaaaatcataccggattagcaagataacttgacaaaaacaagaaattgaatcacgctaacccgagtttcaagaatccttcattgactccttggaggagctcgagaataaaacagccatcaagaagaagcatttctgtgaactcgttactgctcaaaacaatggaaccttcgtagcaagcacgagccttctcctccagctctatcatggcgtcaagaaacacttcaatgccttggttcgtacgttttaataccatattgacggcacgccatttatggcactccatggactgtgtttgctgtctcccatggtgatatggaccaagtgagacagtctgagggaaataggacttcttgtcgttctcttgtaggtaatgtggaactctgtagatgcagagctttccccaaattgttgtgtcgtcgtctctatctgcttgctcgagcttgtctcttattgagatcacccaactgtctcctgtggtctcttctggcctctcttctaccacctccttacctgactcggaatgagactgcttgtggttctgcacgttttggtcttgattcggtctggtaacttccggtaaaccgtggagattcggatcttgaaccggttccgagtgttggtttttggtttgaaatttttgtctgagcttgaggctgagcaagtaccaagttaacatgtctttgttgatgataattggttgtccatcggaatgaacattaactaaaaccattggttttgctggttgaagcttttttcaggagattgagagcaaaagctgtaatttcgaaatgttaagtgcaaacgctgtaactaatttaaagctgtgatttggccatacatttatttattttccaatccacataactcttataaaaagacttcgtactcttataaattaaaagactctcataaatgcttgtagaattttctataaatgaaattcaaacacccaacctctcatagtaaagactcataagtgcttagtactagactactattagtagaatatttttattattcattcaatgagtgagactaaagcttccaaactttcataaaaaaaaagactggagactcatataaaaagattctcatattcttcctgtaattgttctttaacgagattgaaaaatgtgctaatttttatatccaagctgtatttgtgtacactgaaaaaagtcatgagattttttttttactaaatctgatcaaaatacacaaatggtgaatcttttcggaggaatatgtaatcctcatttggtgacattccccctggtatattagcttaatactcccttccttctagcgttaatttgtgtagaaatttagttattgcttttcttgcacttgtttctttagaatcgcctaggatcgatcaagaccgaaaagacgatcagggtcattcaggttaccggtgttgtgcctttcaaagatcctcttacactctaattatataagactcagaacgagcttaagcatggaagcaaccacaagaggtgcgatgtggtcgttcttaagttttaagtgttttagttacttaaaggaaaatttagtattgtccctctctattttagatagggaaaaatctcgagaaaaacctcatctactttttatttgggtatttaatatccatggtttctcagttggaataaaaaaaactcgtttaaatatttttagtctaagtatgtccaaggatttttccagccagttcatgagttttgactgcaagaaaacagttaatctagagttagatatcatgtgatattatttcttcttcctaaataaaatagtaatccataataacgaggacataggtgttaaatcagagtccgaagcaaatagtttacaatagaaatttttgtttcgatgaagaagaacaaaatgtcacaaaaaccaaacattacaaactgaaaggaaacaacaacagaatagttataagacggataa

SEQ ID NO: 37517 - DNA, 3720 bp, Arabidopsis thaliana landsberg
  unsure (1)..(3720): unsure at all n locations
ccaagataaaagcagacactgcacataagcttcgcattctcttactgtgttggatacttaatttgacactcttctttgtgttttctcttccaccttctttttcggtatatcattcaacaaaattctctcttcatttctttattttgttgtttcttattattgaaatcaagagaattaaaacagaggctctgcaatttctgaagaagatgatcaaagcaatctcatctctacgcaaaactctggttctacctcttcatttacatattcgtacggtataaactggatatcttgttcttataatctaatgatctttgcttacttagagacataactcggatctcagatacaaacatgttttatgttctgttttttcttttttccgatgaaatagctacaaactttcgctaagtacaacgcacaagctgcatcggccttgcgagaagaacgtaagaaacctctttatcagtaagttttttcttcatgatccaactcatatagatattttgccttttagttaccattggaatgctctgttttcgaatttgtttgttttgtattatatagaaatggagatgatgaatatgtggatttggattgggataatctcgggtttggtctaactccagccgattacatgtatgtcatgaaatgttcaaaagacggcgaattcactcaaggagaacttagtccctatgggaatattcagctaagtccttctgctggagtcttaaactatggacaggcaaggatcttgtaacccccatatatgtttcttggtttgtttctcaactatatgatcaatggaggttttgggattattcataggcgatatacgaaggtacaaaagcatacaggaaagaagatggtaagcttcttttgtttcgcccagatcacaatgctgtccggatgaagcttggcgctgaacggatgctcatgccttctccttcggttgatcagtttgttaatgcaattaaacaaaccgctcttgcaaacaagcgttgggtaaaaacgctttcttgtgacgtatatatcttctgaagaggtttgtttttgggatctgatgagtgatgatgtgtttggtcaggttcctcctgcagggaaagggactttgtacattaggcctttgttgatgggaagtggtccaattcttggtttaggtcctgcacctgaatatacattcattgtctatgcatctccagttggtaactacttcaaggtatatacatttctcttacatgtccatgctttttggcgatggaacgattagcaaacgttttgttcactgatttgtaggaagggatggctgctcttaacctctatgttgaggaagaatatgtccgagctgctcctggtggagctggaggcgtcaagagcatcacaaattatgcgccagtaagtgttgaaaccaacttagtttctcaaagaccagagtcagaaaatgagttttgataaaccacgtgtgtgtaggttctgaaagcactgagcagagccaagagtcgggggttttcagacgttctttatctcgactctgtcaagaagaagtacttagaggaggcttcttcttgcaatgtctttgttgtcaaggtaagatatattgtggtgtctccagtgacttctctttgttgcatcctaattgtatcattgattcagggtcggacaatctcaactcctgcacactaatggaacaattcttgaagggattacgcggaaaagtgtgatggagatcgcaagtgatcaaggttatcaggtaacacagataagattgattcactctaaacacccaaatactctaagtttcacacctgacttatgatcaggtagtagagaaggcagttcatatggatgaagtaatggatgcagatgaagttttttgcactggaactgctgtagtagttgctcccgtgggcactataacatatcaggacaaaaggtaaatctcaatgcctgaatcaagttttactcaagccttaagcaaagaaatggaccgatgtaatctttctgaaacattcagagtagagtataaaaccggggatgaatctgtctgccagaaactgcgttcagttctcgtcggtatccagacaggattgattgaagataacaagggatgggtcacagatatcaactgaagaataacaatcttcaatattttgccacaaaggagattactctgcattttaagctgtgtatacgacaatgcatgaagaacactataaacatatatatgagatagaaacagaaagctcttttgctcatttctatttcgtaaagtcaatgtctttcacaaaactatgacaaagaaaagaatcgtctattgtacatgtagacaagtgtttccaaggatagtttcatttcctcctgcagtaactccaaatttacatttcattttaggaggcaaaactgtatatacgtttcaatggctttccccacttcttactttcatcacccataagggtttcaactactaaaattgtaactcaaactgcaaaaacaccttttcatctgcagagttgtaaagtatacattgtaactcaagtatctatgttcgnnnnnnnnnnnnnnnnnnncctggggaataacaagttggtgaagcactgggacaggatttcacctcaagatcaagaccagatctacttctctggaactcccatatgtaatcagctttaagattctctttctcaggcttcaactcttcagaatctggtaactcctgatctgagcaaggagaagtgcaaccagctttgctcgattcctcagaacacgttggtatctgagagtatgcaactttcaagttgttatgtatctcttccatctttcctgtcatctcatctgctctgtccatagcgataagaatctgaaagaaactcatacgtcaatatctctcaggagatgcaaatcgaggttatgaaaagatgagtaatttatatatatacctcggctggatatttctggaatatgggcgcaaaccgtttccggcaatactcactaaatagaagagtgagaagaattaacgggatggttataacctgaagcaaccgttgatagctttaaaccgagaaagcctagagctataatttgcgacaagatcagtgaaaagattgtcgtgttgtgaaaaacaggccaatattgtccaccgctttcatactttgtaatatagacgttgattatctgcaaaaaaaaaaaaaaaaaaaaaactaagtcagatccacatgattgtacttcaaacccacagacttgtctacctatggcaccactattagcacaaatacattaatcatatttccagaagcaagcactcgacgaatgcagggacagtcagacaacagcttatgcagttctcaaagttatatggtaaagcttcagatagatcatgagaaagctggtaacataatgcaaggtctcgacgacaatgtttcagcacagagttcttggaatttagttacaaatctttcaagaaaataaaataatactctttcatgcttctgaatcaggtttcatatcaaattgtgagaagtccaaaaacatttgaatatcaaggcataacagctaactagtagtcaatgatcatggatataggtgtctatgtcacaatttcttaaagtgcttattggcaactacaaaatgaggtctatgcaaaagagatcagagcaaatatggacgtacctgatttttgtatataagatatgcgaagaaaaagtagatcagcagaaacggcaggatcag

SEQ ID NO: 37518 - DNA, 3725 bp, Arabidopsis thaliana landsberg
  unsure (1)..(3725): unsure at all n locations
ccctttgattctttttttctacgccattgcatgagctttcctctgttgaaactgaaattttattttgtgttgtttctctctttcatagaagtcatactactactatttagtatttacagaaaagggtaaaggaaatactgctgtattgtaccattggtgcttaaaggaaaacagtttcggagagcctcctgataaacttacagactctaattggcatttcaatgatatattcatgaaatgagaccccagaggctctggagcacctttaggcatgaaaaaggggtctgttattatgatatctactcaatctaaaaccactttcaagatatttgaatcagactttgtatcctggagaacatatgaaggcaacattatcgaatttacatgtacggatgactaagggtatctctgaggccaataggtattgaggttttcttggcgttttctttgtgtccaacaatgtatctatcacctgggtaaataccagttcatccctaaatcaacacttgatgaatatataaacctcccaagtaaggattggattgagcttggaaactggaacaaacatgaaggtttccaagtgacttacatcaactgattcaacgccctgcccaatcatgaatagcacggcgaccatacagcggatctggtgccacaggaaagcactgcctctcattgtaaatgtgcaaagctgatcaccctcatgacttcacaagaaggaaaaacaagaagatcagatgttttagaaccaaaagacaaaataataaaagataattgatcagaagaatgtgtgtatataaagtagtgactggtgtgagtttaacaatgggtgccattgtgctcaataggatgcgcaatttctattgttcctagaacatgattttgtctacccttaattttttacaattgtattagtcataaccctatattactagtggtctaccattagaacctgaacaatcctacggttttaagcaagaatcttagttgacctaagcctttataggatccaaaatcagttcaaagaatactaatgtagtcagcggtcatcaaaagaggatcagaagatcagcttaaatgtgccttttaccaaagccaacctattttgacaaggggagacttcaaagaaagtaacacgccgtgtatagcaatgtacatttgccacatccatcttgcagaagtttctgaaatcatgctccccaatgaacttcttcccggcaaagtccatggcctagaggaagatgcgaataaaaattaacttctatattgtttcaattgtggagtattttgactttattaacaagtgtaaagatcactgcaccgaaagattcaggttctgcctccagaaaaaatatttgtattctctagcatagcaactaaacctgtacccaaggaaacaaaaaaaaggtaagcatccagtatccaatactagttcacaacgtattctgcagtcagggcggaatagcacaaacaacaacgaaggattacaaaaaaaaacgggaaaacacaaaccttgcatgaaagtcgataggagcaggagaccatccaataactcggatgtcatcagggagagcacgatttagaactcttacataatcatattctggtcctaaaccagagaaatcagagagttacagcaacaacattaagagggtgaaaaccaccaaaatgaattacattcccagagtaaacttactttcacccgttctcccattcacttgggctttagagtctcaggaggtgacttcagtctggatcttaaaaacaaagcaatcacctgcatcaacaatcgaatagacannnnnnnnnnnnnnnnnnnnnnnnctaccttatagacatttggaatgctcccattacagggttttggaaaaacatcagcacaatgagaaattggttcttaaactgatgagatcatatgagtagttatatcattggcacacaatcagtgagatcgaaagaaactattgcgagtaaaatgctagagatcaagagaggcccaagcaagccacctgccctgtggaggaaacacctttatctgttctcccacatctcgagtaacaagaatctttcttgtccccaactaaaagccgtgtcctttcaagtgctttaaaaacttctgactgcaggaaacacacaaattactcatcatgtaaatacaaattagttattactagttaacatacaaaacaaagagaacaaaaacacacctcaatacttggttccatttgtgcttcagccgaaaatccataaaatctgtaacaacaaaaattcattcattcatacgattaggaacaatgacataacatgaagaagagaagcaatccaaaaaacatacctcttaccaaaatacatgattttgagtgcaacatatctctttgagataagatgactcggtatactattcttatctccttttctaactctccttctcctaactaagctactggaatctgacaatgaccgatcatgcttcacttccatctacaacaaaaacaccgagattcttgacaatttcaaacgaaacaatgtgaagtcaatcaaaagttaagtatatcttcacctgttggcattggcagcttgaaacctgagacaacaatttagcattttccacttctaactcctgatgagagatatagaacaaacaatgaaacaatcaacaacttcactatctaacgtttctacaggagaattaaccgaagattcaacatagtttcaaactcaacctttaagcaatgtgtaatcgaatcgttccactaacaaaatgcttaacaacgaagggcacaaacattgagcgaagagactacagagacgttgaagaagctaagaagatgacaagtcgcacggagatttttaccttgacgcgattacggagaaacactagttctgtttctttggcgatttcagagtctcggtcatcgccgccgggatcggattttgcgtcggagatagtcatgaatcagcctcgaatgttaagatggatacacgaatgacggcgacgaaacgagattcgacgccggtgaaaagagccaacgagacggcgacgaaacgagattcgacgccggttgaaaagagttcaacgacggggacaaaacgcggcgtcgaagagaaactgtgttgggattagtcgagagtctacatatgtttctctatttacatattagtcactatagttattcatatttctctgaaaacccttttatgttattgttttttttttcttaaagataataatgtttttgacgatctatttattaatttctgaattgaataaaatacaaaacaagtttacgattatactttgtagttaaaattagtgtttaaccaaataagttgacgatctacatatgtttcaaatttatatttatgatctaacggtacgaatctgttgccaagtgtgagcagtaccagctcatatatttcatgtgccctaagacaaattttgaaaagaaatatattttattctctttttgtatgtataattttttttgtgtgtctcttttatatatacaaaaagaaaacaatttgtgctctttttatacagaaaaaaaaacaatttctcatatatagaatgatcgcactattcatcgttgtacttaaaccggcactcactgtgagaggaggataacttttcttatatctttaagcttatcgaaatagttaaagcctatcttgtaatttttttattaaatattcgaaattattaatattatcttagtagaaaaatt

SEQ ID NO: 37519 - DNA, 3307 bp, Arabidopsis thaliana landsberg
tgatattaattgtgtgtcaatatcattatacaatgattatttattttttttcagcaaccgctggattaactatttaatgatcagatatatcgggaatgaaagaatataagcttacagtattctcacttaggtgccgtatctgcgacttttttgtcagctaagaagataataaaaattaaaacacagagccgttcgtttggctgattcgattgtaccaacttccgacaaagattccaccttttccgattgttcgatttcttagaccttgagcttctccattggttcatcgatcatttcttcaagcaaaagtctctcttttttctttgcaaatttcgcccaaaggaaaagggtacacgttgttacagctcctcaccttatctctgacggaaaaatcgaagctttctctgggttttgctcagtagtaattcgatttccgtatagttttggtacaaagtggaagggttttgggcattgctctgtggcctgattcctgcgtttttaggtctctccttgaggttgaattcgtttgggaattttcagataacatttctgcctgaaagtgcctgttaactctggttcgatagagtggggattgtttaaagccctgagctttcaacttctttcattggattggtgtttgaattggaatgaagaaggagagattgtactgttgtatttttgggttgctctcttgattcctcaaggcaagagaggacgaaatggatgttttggttaatcgcagcgactgctgctacgggatatatagctaagcagttgcagaatgtaaccaaaggtaaagataacgttcttgaatcttcttctgaagatgtgaagccagaatctcctcctggttgcttgcttagcagattagtaagagtcaaaaaggctaatgaaaataagtttggggatgagaaaatgctatcagatggggataatccagatgcatctacgagtggggaaagctcaggatattacgaaactaaccattcagatactttgttcggtttgatgcccgagttcccggagatggaactggggacttggaaaaccagtggtaatcttgtaggtgacacacagttgaattcttcatttaggagaaaccagcggttcaggcgattaatcaaacctttgagttcgatggatagctgcttaatgtctcggtttcatagagaacaaatgaccatagaagattacatgactagcccatttccatcacctcacgcttcagtttcaaggccattacttgtcactgatggtactcgagtaattagcaagagtgctgcagattctttgtggctgagccaacatattgttctcagtgaagataaggctacattaagttgtggagtccccggagtggagtcttcgattgagagagtgggaaatgagaagagcaagagtagaaaacatggtaaagttgttgcaatctttgacttgtaattatttatactaaatgattgagtagactgtccatggcatttaagtttctttttttcaggactaggtgatgcaacaatgttgttacaaatcgggatctcgattggcatcatgtcctcatttatggcaagccaagccgaagtgagcaaagtcaaacaagagctgaagcaaacagagaacttggtgcatgatttagaagatgagcttgagatgaaagacacgttgatagtgaaggagatagatattgaaaaggcagctgagagttcagaatctataagtaatattgaagcagagcttgaagcggaacttgaaaggctagaaattaacatgaattcctccaacattgagacaagactctctgatataatagaggtgtgttcgtctacacttttaactatgctctttactttgccttgcctgaatcaccaccaaaaactcaaacaagatattcaaaagttcaattttgatttttgttgcagatggagccggattgtgaggtagaatttgcacagggtgaactgagagctgatcgggttaaagggaagcgtttagatgaaactgagtccaaccaagacccaagtggtaactccacacctgagtcaggaaactatgctgtctcacctcgcgaattgagcttgcggttgcataaagttatcaattcacgtcttgagaaacggattggagagctcgagactgcactccaagagagccaaaggaaggtagagcagctagtcatggaatcagaaagcaagaagaagtcatggtcaagattatgggaaacccgtgaagtgatgacctataagagtgaatcaaaaatcccagttgctatagagcacaccaagactaatcttgcggagatgcaacccctggttatgaacttaactggggaagcacttgatgcattcaatgagtcttacgacgaattgatgaaaataaacgatgactcggaagatgatgatggtgattcaccattggagatgcaagatagcgggatccaccaagaagatttatcttcaacaaacaaaagctcaccttggagccatcacaaggatgatttcaaggtgcaggagcaggagctgctagaccttattggtattgaagacgaagaagaaaaaagcagtgactttgagagtgaaatggagaagcaactgataaagcagattgttgagaaaacaaaacaagggtctcctgttgtgttgaatgcacagaagatcctatttctcatggaagaaactgaacataatctgtaacattaggcagcattagagttttgcgtggatggaattcttaaggtcaggttagtgtgtaggccacaagcaaagttgatacagagctcacttttttggttaaagttcaaattataccttacaaaacaatttcaagctacaaattattttcaaagatagcaaaagcagattgtttcttgataaagtgtttaattcaggaagcaatgtagaatagctagctactactaatcataggatttaatatgaaaagacagtcttgacaacattttttgctagttccttcaagctcttttggcaacatcttcgaattctccacctattggtccatcttccatcttcgtttcacttttctccatgcttccaaattgatcctcaccgccaaattggccaccagcagtaaactgggtattgtcaccaccgaactgagagctgttgccaacagggcttcctccaaactggctgtctccagcgaatccaccattgctgctaccataagtattggcgctaccataaccactacttccattgtagtcaccaacagcacctgcacttgcacttgaaccctccccataagtgttgccgctagatccaaagccaccgcttgaaccataacctccaccggg

SEQ ID NO: 37520 - DNA, 3156 bp, Arabidopsis thaliana landsberg
ggcctgaggaatgacgtgaacagagtgatgctgtattttctgggatgctacggaggtgtgactggcctccgtgtggccaaagacattgctgagaacaaccccggaagccgtgttctgctcacaacctctgaaaccaccattctcggatttcggccaccaaacaaagcgcgtccgtacgacctagttggagctgctctgtttggagatggtgcagctgctgtgatcatcggagctgacccgagagagtgtgaagctcctttcatggagctgcactatgcggttcagcagttcttgccggggacacagaacgtgatcgaggggaggttgactgaggaaggcataaacttcaagcttggacgagacctcccgcagaagatagaggagaacatagaagagttctgcaagaagctgatgggaaaggctggcgatgagtcgatggagttcaatgacatgttctgggctgttcatccaggaggacctgcgattctgaaccgtctggagacaaaactgaagctggagaaagagaagctggagagcagcagaagggcgttggtggattacgggaacgtgagcagcaacacgatactgtatgtgatggagtatatgagagatgagctgaagaagaaaggtgacgcagcacaagagtggggacttggcttagctttcggacctggaatcaccttcgaaggccttctcatccgcagcctcacctcttcctaattgttataatttacatttgggttataaacatattgtaagcatgaaatgagagtattatttgttaaacaacatctatatagaatagatgcatgtgactaggaatgttggaaaaagtcaaaagttgcaccacgtgtcgttaaagcaagtgcttagctacttggaaccacatgaacaagaagacaccaaacccgttacttccactaaaaacaagggctttcttctttttaattcacaccaaaacactttgaacacacacatgcatggagccatgaactcaccatgcattgatttcgtaatgttcagtcgtggacaacacgatgaggacaacatgtcacgtcgtcctccgtggaagagggagagatcgatgtccactcagcatcatcatcttaacttgtctccaaacgaagacgaagagcttgccaactgtcttgtcttgttgtccaattcaggggatgcgcatggtggtgatcagcataaacaacatggacatggtaagggcaaaaccgtcaaaaagcaaaaaaccgcccaggttttccaatgcaaagcttgcaagaaggtgttcacgtcgcatcaggcattgggtggacacagggcaagccacaagaaagtgaagggttgttttgcctctcaagataaagaagaggaagaggaagaggaatacaaagaagacgacgacgacaacgacgaggacgaagatgaggaggaggatgaggaagacaaatcaacggctcatatcgcaagaaagagatccaacgctcacgaatgcaccatctgccatcgcgtcttctcttcgggacaggccttaggaggccacaagcgatgccattggctaacaccttccaattatcttcgtatgacgtcgctccacgatcatcatcattccgtcggcagaccgcagccgttagatcaaccatctctcgatctcaacttagcttgccaagaatattccgtcgatccaacggccatgagcgtagggatgatcgagagagatggtggtggcaataatcacaacgctacttcatcttcgtggttaaaactcgcaagtggtgattggtcttgacgactgactaatttaattaagttgctaattatattcttttaactttcattcgtttatattctttacatatatacaattaagtgcatgagtttatatatagagtttatggatttatatgaattacacttggcgtcttctgcagatttagagagccataaggagttctagtccaatatatacaaagatataagtaagaaattaagtttcacaactagttaatatacaagatagataattgtatcattttttattattatatacgttgagaataaagtaagataaccaagggctccttgctcatataagcgcaaatgttttaatttcatgtttgtaatcttacagagtgatataatttacttgttaagccatcaagaaggagatataattttgaagttttccagaaaagaaattgtaaattcgaaattaagaaatcacaaagaagaaaaatatcaaataaataaacgaatatcacgtatcaaataactctcgtgatatgcccatatatattttaatcatgttaataatcaaaaggctcttactacactgaaaacacatgaacatgagtcaacgcctcaacggaattgataattttggtggttcttaattaagcaccgattgcaaggaaagggtcatttctctcaatacgattacaagaaaagagtcatttttatctcgcatttattttattactgagtggttgccattacaagttgtgaacttttgactttaggaggcgaccaaccatcagctgaaaactaggattagcggggggaatttgattaatgtcaactgatatcctccaatttctctttgagaaaagctcaagcaaagtatatgactctttgggccactcaaaagatctttaatcaattaacttgaggacatgtactttaacaacaattgacacatatagacacgtacaagagttgcacgctattgatacaaggaaattttggtctagtatgaggtaataacgtctcaacgagataaggttaaaattatttagacatgcttgggaaaatatttttgttagtagaaatttgtagagtaatgaaatttagattcttatattgaaatttcatccaaataaatgacaagaggtgagtcaacaccaaaagggcgtgtgagtatgagagtcaaagatagcactaactatacgatgcgggaagtcagcagtttagtcacacgtgtcaacctatgatttaaggagagttggtgtatttgtcacagaatcattaaaatttggtaaagttagaaatagaggggccagtgctagtgttgtttagtcgttacaacaaaacctcaacggtttttgtttgcaactttaccaaaatgaataccctcatccacaaactcttttctaatcaacaaagtat

SEQ ID NO: 37521 - DNA, 5083 bp, Arabidopsis thaliana landsberg
ggaaatcaccttcaccgtttgattgagtgatcatgggttatgcattcttcaccctttgatcaagggttgggcacattctcgatcctttactcaagctcgaatgattcggcgaccaaggagtgaggtcgagtggcccacatgttccccctcacttcaattattcaacagacaaaccacttacccaggcccctcaccatttccaactagcttttactatccttccaaagagaatcccaagaccatcctcctccacccattgaaatcgacaaaccacttttgaaactctatctctttcatcatctcattttcgcaaactctctcacaaagcttcaaaagtttcattccaaactctccctatcactcttcacgaattcgttttcacttcaccatacttcaccaaagttactcgatcacttccaagtccatcctcaaattttcaatcggtttgtaagctcaatttccatcactaaaaagcgaatcctttccactttgatacctcttggagagttgtttttactgctttgttgaaattccccaccaatttgcatggattcaagaagaaagagttcatctcgggctagaagatcctctattgataatgaagaagttgaggcttttgacatgagtgacatgagtgaacgccaaattcgccaagctcgccgtgctcaaagatcaagcttgattcaagggggaagttcaagccgttcaaccatgcaaaaagaagaggtagctcggggaaagagggttgttgaggttgagaaagaacaacatgaagaggcagtctttgaagaagcgattcctgaggaagagattgagatcattggggatgatacaccagccccagttggaagacaaaatcggccaaggagaaagagagagcctaccccaagcgagtactatcaataccttaaggaattgaagtttgagggaacaactcagcttatctgtcagaaactgatggtcttgaacacttggcgagtaacttgtcctgtttcatgcaccacttttgtagtttgttgttgtttctgtgagcttcgctcaaactcctgctttccctctcaggaggtatatgctcactgaaatgatacatgctcgtgtcaaactccgtcgcatctatatcatccgtctcatcaatatcttctgttgtagctcgttcggtatgactgatctcctcagttggcggactaccctcgaaataaagttcttcaagcgcaggcttgaagtcaatgttcctgccctcgagaatcctagtagcgtcaatgcaggggagaagaatgttggcgattttaatcgatgaatgctcgaacctgtagcggtgaaagtcaccagccatgtcaaactccaagaactcacatctgcgcaaatgatccaagtccatcatcctcggtgctaaacctagttccttgagcggtacttcacaagctttcaaaattggcgtcacaacgccacccacgcatagtgcttctctcaccttcttctttccgttcgtcaacgcccacttcctgtatccacacagatggatcaacagaggcattactggtggtgcgttgttgagatcgcctctcaagacattctttcctttcgtccgacggagaatccctgcaagcgcataatctatcatctccatgtccgtgttagacacggtgcctgtagactccctggagtaaaagacgttggcaaccgatcgctgaaagtagcggatcacaggactccagatttggttgctcttagaccgcgccgagtttagcggtagattgttccctatagtggcccacaaatccttaagctcctctctgtcaaatctgggtttggttcccattccactagggaaaccaaacagttcttctaacttcttgatcgaaagctgataccgctgttcattcactgagaacgtcaagaagcctaatcccatggtatccagcttaaagtctgtgagtgcttcatacatctccacttgcagggtggaaagaaactcgattgtctcctccatataggcagggtaagggtaagacatgagtgtctccagatgacacttctcgaacaaatgctgcacgtcctccagtaatcccagctgggctaaagtctcataacacggataccttgtcccccagaagtcattcatctcgaagaatctgatatactcctccactgtaacctcgtcgagtttgttcagcagcttcgtctccctgcgccatgactctggctcatactcaatctcgatatcctcatcaatcggctcatacctacttgacatcgccctctttcctctggcgatttcagctcttctctgattatgtcgggctgtagagcgttcgagttcatccctgaaactctggtaaacatgttgctctctcggtctagcggaccaggactcagcttcatccacattgtaatcagggtccatagagaattactccattgtagttactcatgatgaaacctgaaagcatgggtaactcaaaaataaacgttaatacgttagttccaacaaaaccaaaaacacaaaccaaccgagtaaaccgattgagtgtaccaattcttttttttttttttttttttttttcggtttggtgaactcgcggtcgagtgattccttggttgtgcttggcgatcgagtgacctttagaggcgacagatggtcaagcggtttgaaagaggtcgagtttgtttgcttaatcgagtgaaccggcgatgacgagctttcgtggggatgagagcatcggcgttggaaacgatggagagatgaggagcttgaaggtgataagtgttcagcggtcgagtatttgaagctttaatggaggagaaaacgatttgattggttgatggtgaagatggtcgagtggttaagagctagaagtggtgaaggtagcttggtgatagaggtcgagttgaagaaaatggcgagctcgagttgtttccttgtagagagggagcaggaggtgacgatggagaggcggtgtgaagcggcgaggtcgagtgatctcgcgtggtcgagtatgtggagagatggtgatgagagcgatgaagccgagtaagtgagagagcaagcggtggtgtaagcttcgagaactgagttgtggtcgagtgagagttgtgaggaagagagatggcggattgttgtgttctttggttgcaagaatgagaagaggaggtcgagtatatgaagagagagaaggtgatggggtcgagtggtggtggttggatgatgatggcattgaagacgagtgatggagagaagaaggggatggattttgttatcaccttgtagggagcgtgggagacatggccgcaggagtgagtccctcatctgtctctttgttctgaatcattactctatcttcactaggaaaatctcaggaaatcccgcaatcttctgtaaacttgataaactctctctaagactctatagcttctgttggtcgagtgaaatgatgatttttttttttttttaggtgttaaacatcactcatactcgaccaatgtactcgatctctaggccgtctgtagagtaaaagctttgaatttttactctatcttcacgttactcctctattcctcagaaccacaaacacaactaaatcaaaaataacaaggaaaataaagatatatacaaggatagacatgggacttcctcccaagtgagcttgttttaagtctctaagcttgacttctcatactcatttcaaactgtttgaggttcctgaaggtacactgttgatcattcgggaatgatgctgtctgctaggtactttttgagtttttgcccattcattttaaactcataaccctcttttgaaactattttaactgcaccaaagggaagtacctctttaatagtgtaagggccagaccatcttgatttgagtttccccggaaactgtttgaaccttgagttgaatagtaacacttgatcaccagctttaaaatctttaggcagaatcttcttgtcatgaaaagctttggtcctttctttgtagatcttggagctctcatatgactctaaccttatctcttcaagctcatgaagatctagagacctcttttcttgtgctgtccctatgtcaaggtttagaagcttggttgcccacatgcctctatattctacttcaacagggagatgacaacacttaccataaagaagctgaaaaggggttctccctattggagttttaaatgctgtcctataggcccaaagggtgtcatcaagcttagttgaccaatctcgtcttgatatccctacaactttagctaggatagccttgatctgcttgttactaacctcgacttgtccactagtctgagggtgatagggagtagctaccttgtgcttaaccccattcttcctcaaaaggttctcaaaaaccttgttgataaaatgtgagcccccatcgcttattacaacccttggaataccaaatcttgggaaaatgatggttttaaaaagttttaaaaccaccttggagtcatttgttgggatagctattgcttccacccattttgacacataatccacagctaccaagatgtacttgtttccatatgaagctggctcgaaaggtcccatgaagtcgattccccacacatcaaaaatctctacttcaaggatcgggttttgaggcatctcatttctcctggagatattaccaactcgctggcatcgatcacatcttgttatgtgctcatgtgcatctttaaacatagaaggccaccataatcctgcttgtaaaaccttctgaactgtcttgaaagtagcaaagtgacctccataaggtgaattgtgacaaagctctaacactccctgaacttcctcttcagcaatacatcttctaaacaaaccatctactcctttcttatacaagaatggctcatcccaatagtagtgattaatgtctctgaaaaactttttcttctggtaggagcttagctcattagggactattccagcagctaagtagttaacaagatccacataccaaggcgatttaccatttcttgttgcacacattgtttcaaccttaaacctgtcaaaaccgatcccaactgctttcttcgggcatagaatcatcgattggggctgctctgt

SEQ ID NO: 37522 - DNA, 6622 bp, Arabidopsis thaliana landsberg
  unsure (1)..(6622): unsure at all n locations
cacaactaatccagaagggatttaataaatttacacttaaccaacagattcgaccaggggttccacaactactctatcccatcctcagaaatcctaatcactactcagacaacatgcttaaagacaataacatagaaacgaaagatgaccaagcaatgaaagcaaaatcttagaagaaaaatcgaaatacaaagttgcaggaatgaaaagaggctgctgaataatagtgcaaaattcgtgtctaaaaagtgcatgtctcagggcgaaacccttagagacttatttatacaaaaataagaaagcgggcttcgagcccacttaacggcccatggacggcgtgatcaagagtgtcggctcaaagtgggcttcctgatgggcttcgaatgggtttcgaatggactttgaatgggccttctcttctgttctctttctgatgctcaggttgtctggttgagtgcggattgattagagggtcgaggtggtggtcgagtagattggttgacagaatgatctgggctgcttcttggcctctgtgatcgagtaagtgtgtcaactgtcaggatgtactggttcttctcctctgcgatcgagtataactggtggactggcaaagtggactgcctggtcgcctctacgatagagtagaattgcagaatggactgcctcctctcctctatggtcgagtatatctggcagaatggactgcctggtctcgtctatgatcgagtagaagtgtctagatggactgctgagctgactgcttccctctctactactggtgatcgagtatgtttggtggaagtgtgactttctgttctgttttccctctttctgagcaccaatagctccaaaacacctgaaacaactccaaaatgcagaatgtatgcaagactagtcctagactcgactaaagatgcaaaatgtacaaaaatgatggtgaatgctatgaaagatggatgaaagtagactcaaaatggtgataaaagtttgtgtaaaacatgcaaattataaacatatcaatcactgcattgtacttcatttgcaacttaaccttactttcatctaatccaagcttcgagcaaatcctactttctaacatggagagagttattttcccattcatcatcaagctgtacgctcgatctttccatctaaaatatatgatcaccttctccaccattgtatcctacaacaacaatacaaaaactctgtcagatatactagttatactacaattctgggtaacacaagtataactagtcatactacacctattgtataatacaggtataactaataatactacatgaaaatgggtaaaactcttgtaccaactaaatactacatgaaaatgggtaatactactaaacccaaataaatactacatgtaaatggttaatactagtgcaactaagtcatactacacatatttttcaattgaatcatgtgcagttctacgcagttctaccagatgtatttcctgacaagagctcaaatcgaatggattcgggttcaaaactgaaattcactatgattcagttgttggaaaccatttcttacccatttaaaaatctattcaacccagaaagtatgcataaacttctaatgtgcatacccaaacacaatttgcttaatctcaaatctaattgacaaaatctcttagttctaatcttcaattgtaagcttcattcagctcgagaaacttaccttttctttctatgacgacgaagctcgccgaagataaggatatggcaacaatggtgagcgagagagcgatgagtgagcaagagagcgatgagtgagctcgagagagagagaggagaggagaggagagagagaggagaggagagagagtatcgttttctgtttttttttttttttaatatatttttttttaaaaattatttagttttataatagatattttaaaaagaaggaggaggggtaatttagtctctacacatctcattaaaagagaaagggatatagagacaataaggggagttgagagacttgttgattgcataaggggagttatgagatgatttctcgaatgtgaagcttaaaattttagatctgaaatttatggcgctttagtaaaaatttcactaagtattggcggaataagtgattttagctttcaattagacaattcttttttatagcattttttcagtgctataatattaaaaataaaaaaatattatttttcatagcagttatagaaaatgaacaatcctcacatgctatcaatgtggatatttcttgtagtgtctatctcattgagcaaagcttcatcaacccatttaaaagtgtgttcatcgttccttagctacatatgaacattaatcttcataattaagaacaagctaaacatgaagattgaaaaaatcgaagatatagatgaacttgatgagtaacattaccctatgttttgcagcgaaaccacaacgatagtatctccggcaaggattcaaatccgattttgaaatgagtgccacgactccttccccgcaccaacatctttttggcaccccaacaactttccctctaccccgaggtcccgtagatccaaacgaacttgttgattgattgctcatccttaatgcgaagatcgaagatcgttggatccgattttagggttctttagttttcaatttgggggttttagaggattacttctttgggatattagcgacattggtcggattttttgtaaaacagtattggtttatttggtagaggtggacgggttcattatctgcttcgggtttatgtccataaatgaaggaaccccggtttgaggacaatcaaatatcacgacatcgcgatattaatggtatcagttaggctcatatcacgatattttaagacaatcagatatcgcgttatcaaatgtatgattatcccgtttcatcttactaaagcgattcacttgtttatgttactcgatttgaggacaatcagataacgtgacaaagctgtaattgggaacgtctgttatccgctattagttagcgacaaatttaccaacgaagcatatttgttttctgattaaatggggtagacaactcgtgtctatctgctaacgttaatatcgcgagttagcaaaaggttgtgtttcattgtgtgccgatatttttgacatcgtgatattagccttaccagctagaagtaatagattaacttctagttacacaaaaaaaaatatcctcaacacatcgccattatatctaacatttcttcataaaagttggatgggttccgataattttacatttgggaacagatgtcgtacgtatatacaatgaaaatttctttgtttccttttggtgccttatttatttcannnnnnnnnnnnnnnnnntgttaatcttggcaacatccatcccacaactctcagcgccaaaaaacgtgtttctccctgtcctctatggttcctaaagtattaacagcggcattacatccgataacgtatttgttaacacggtacattgcaggttgccctgttacatatccgataaagtaattgttacgatattttttatcgttattggtctattgcaggttgccctgttatgacctaacgacttgcaccttgaacatcttttccttgacgttctctatgaatgtaatagaaatttatcacatcaagaggtgtagataatgagagattttttagtgttaactaatttaaatcgttgttaccttgaactctcctctagagaacaatcttcgcttccttggtattcccggcggtctccgaacatacggtggagccagtttcccccacctacattgtttggtgatggagtaagcatctccgtgtccggcaccggcataattagtgcttggtaagacaaacggagttgaggggttgtgtgatggatctcaaccattgtgtccacccgtagacctttctgtattgttgcaagctatggggtgagagcaagggatcgttagcagctgaaactccctgcatgtacatgttctctcccatagattaaccgcaaacgacgcgcctctcgtttctctaacctcatagatcccatccccaatctttatcacagcacatcctgctcccctcttttaatttttgattaccatgtcgtgtacctttggctgcaagatattgtcttcaaactgggcagcttgcctccgaaacgcaaaccatggtatgagagttgttcgaatcgactctaatatcgagattaccggataatcgcgtgctgcagttaacacattatttagagactcaacaatattatttgtcatgacgttgtacctattgcccacgaaatgagacctcgtccaatgttcgaacccaatactagccaagtaatcagtgcacgacccatgtttagccttaatttcagcaaaaatcttgttgaagtcgattagccgataagccgtaactgcactcgataccaaggcgcctaattgataagatttaaagtaagcttcaatgtttctttttaggtggacgatgcaagcagcatgagatgacattgggtaaacctgcaagagttataaaaggcttagtctaacaaaaaaacgcatacatctaatgtaaaacgtaactgataagatttatgataacccaataccttgcagatactggcataaattgaggaatgcctattagacacaaacaccaattcgggatcatctggtatagcttttgtcagcttagtcatgaaccaagtccacgcctcattgttctcgctgattactatcccaaatgtaatggaaaacacttggaaatttgcgtcttgtgcactagctacaattaagcatgccccatatcgcctccttaggtttgttccgtctataactatgactttcgtcatgaaagggtaacccaaaacacacacatggagcgcaaagaacaagtacttgaatctctcgacacctgacgtatctttttcagtctccattgccacaagcgagtttggattcgtttctaaaagtagcttgaagtacggttggattagagcgtaactccccatagcaaaccccattgcattgtccattgctatttctcttgctcgccatgctttccagtacgagacgttgaggctgaattcctggcgcaacatccgtctaagctcattaggtcgaggtccccggcatactcctatgtatttcgttcgtatcaactttccaatcacagccgttgacgcttgcttgtggaagtcccctctcgcatccacgctacatatgtgggttgaagttgtggtcctaacctcgaacctatcgctatcgggcagcttagttgcgtaagccctccacggacatgtatggctaatgcagacagccgccacaatgttaggaccggatttcacgtaaatgaaatagaacttccggcgaatcgcatgaatggctagttttgttgcacaatcctctttgtttttaaaaacttgtcctatgtaaatttcatccccttcgtaatcagcatctttcaaggctcgttagagagcatccggtaaccagagaacaaagcaactgatgaagatattaagatacaatgtagtaattactttaatattttgatattgtcgctacgttgctaacatgatttatatcagatatatctaaaatataaagtatcgatctaaaacaattattatcatattgttaatatattttttctttaccttcttctcctggatcgtcgaaatatggtggggcatctcggtcatacaagaccgttggaactggtgtatccttcacgatcatttttgtaacactcctctcccaaactatccagagggcgtgccacttttcctataaaacactatttcatacttattacctatccttacacattcaccttattcaagaagcattcttattaaatccataaaactaacttgtcttaagcaacatttgaaaacttgtaaaaataaacgaagaaatctaaagaaaaaccatgtctttgttttattgaaaaataaacccaaattccaaaagaacactatgaagagcgacaaacttgagcagctattcaacatcatttttacgtgggaaagaaggggaaaaagggggtgagtaaagaatactcaatgagcgaaagatagaacaattttttaattaagctatacaacaatcatcataacacacaatattagatacaagcaatccacctaacatgctttaacttctaacaacacattcataataaccatcttatccataatagcaaatacatacatatcgttaggtccagtcatctttgtgacgactagaacctcatgagtggaggctggccctcgtggctcagacactccatgcattccgggctcgtcagcctttcttgaccagcatttaacccgtcggcgcatcactgtccacattactagggagaccacgacccatagctcggacatgagctcctgttcttgacgagatacatttttcagctcactctacactatatatggaaagagtgaaacggccgtcgacatggagaagtgccacagcccgcagctcaattgactcgctttcttgataagcaagttagaaatagaatctcatccattcaaaaccaaggggatagaagatgtgatggttgcatgacatgctggtttggatttagacaatgaggtctactatattttga

SEQ ID NO: 37523 - DNA, 6578 bp, Arabidopsis thaliana landsberg
gaagctcatcggaaacaaacagggtattgttgtcaacagggtttgttgactcaataacacccatgaacttctcttcgacttggacaacaattccagattttccaatgaaagcataagcggagtccaagatgaaactttttggctgctctaattcgctccggaagaaattccactcccatgctgccacttgaagttgagaaatagaacctggcaagaaagtatcagatgggaaatggagtatgttctccaaaagccgagcataaccagtaatgcattctgttgccatcaagttcttagttaagagtcttcctgaagaagcaattgtttgagcaaatttagagagccttccatctgatatcaagggtgagaaagccttcaacaatgcatcaggatcgtttcttcgaaaaaatattccatgaacttcatcagccatctgcagttaaaggtccacgattaagcaaacaacatatttggtaataatcaggaaattattaatttcagggtactcacatattttttcatgataggaaagtcaggtgttatgatagggatgccaaagctcatagctcgcacaattaatggaggaaagttttgttcctcttgggacgaagcataaacaagaatatctgccatccgtagaactctattcacatcctcgttcaaaccaaaatgccgaacagtgccttctgtcaacccgagcctcgatgcaacctcctgcattcatgtattattacacacaattatgtcttgagtatacaatctcaaccaatactaatcacacacagtagcattaaattgtctgaggatactctttccctgaccaaatttaatgtgtttttttagtagcacggcctaaatcatatagtattcacatggatataatccttatgataacaaaattactatcaaatgagcaagcaagatgaacttgaattaagagaaatttagaagaagttgttatgcacaacttaaagtttttagctcaagaccaatgagcttctgtggatagcattgattaaagaaactatttatcctaatcatctaggaagatatgattgaaggctaccaaaaatatttcttacctgtacagcatcactctggcctttggtagaattaccatatagaaaaacaaacttaaaggaaccgcttgtatcttttctcctcccatatcgtgttaaaagtggtcccaacatgtgcattgccacggcattatcccaagaaaactcatcataaaagaaggagctcccaagcaccaagatgatcacgtcatcctcaccaaattcgttaatttcccttagattttgttttgtatgggtttcactgtagctttccgcagcccaaacatcaactacagattctggaatcacaacgaagttcccatcatcaagaacgctatgcaacatctgaacaaataataagatcttagtcagatacaaaacccacaatttggtatacttgtagtggtaatgtaatcttattgcggacaggaatctaccggcagggtaaactgtggaaagacaaccacatctgctctcgcaaaagcacttctccagtgggagataagagaattctggcccatcctttggtaaacaggtaaccgatttgcaagaatatcttcatgaactatccatataagtggtactgaacgaaatggctcctgcataaggctgcataaatataaaattttattatcatagaatcttggccacggaagtaattgtcaaaattttgagaagcccaagagcttgttactcttcacatcttaggcaacaacagccaatgtagtgtgcaatacaaaaggtcactctgatagcaggcaactaaacaaacttaatttacccaccttgaaatggcttcttttgcttcaagcgaatcagcaataacaccttcaaaactgcacaaaatgaatcactgtaaatttatccagaaataaaaaagtatttaaaaaagcaatccgagaatcatctgcctagaaatctaatttgagaaaatggccaggaaaacgttttcaaagaattgatcggacacatacattgtccaatcagcgtgccccaactgctctgaaaccaaaactttgacatggccagctagctgttcccacaatgagcgtgcttcaccattctctacggcaaaaacctgacaacttttaaggtcacaagcttttctaagagatgcgggaaataagacacatatacgcttgtgtccacactttactgcatatttatggtggattaacaaattagagcatccattctgcttatactgtatatatgagtaaattctcaacatcaacgctagagctgcaagcataaaatgccataaagtttcaccttaaacacataaccaagtttttgaagattcttcataacagtgaccaacattagtgttcggggatctttcttcatattccctagtacctgtcattcataatataaaacagatgagtgaataggaagtgcatggagacggagacaaaaaggattatatgagatcgatcagagaaaataaaacagtgttgatgtacataacaacggtaattttccaaagctaatgtggacatgtagactgaaacgactgattgaaaatgcaagtaactgctaagtaaccgtgaaaactccactggcaagttccagcatgatgtgccagcagactctttgacgccttttacaaagttaatttagcttattccacactacaggcataccctaaggtgcagcatttaactgaaacacatggcatttgcccataagcctgtctatgtctagtcagggcgtttagttgatctaactactatttgtttctccattggctcagacccaacacaaagttttagatctttgatcccatcaaatcctactgacttgttcaaccttgctggaggttatctactttagctatgataagaaaagaacataaaccagggtccacatcaaatctttttaaaaagagatctctttctcatggaatcttggccaagatgtcttccaaaagtaaaaaccttttataaagtccattgccaatgacccacgactactcggaaactcctcttccaaacctaatgaataatgttccgtttcctcaatcaaatcctccgaacccaagtgctaaagatagaaacatctaatatatatatcactagctgtactagaagaaaggcgtcaatattttctgtctcacagtggacaacactagcgctcaaaccaccatcagtcataacctaaatcggactagtttacaaactcaagtggatctaacaatcctagcacttaaaaaaggtctctttcatgcatatattgaaaaaggcaatgaaggaactcacgagagctagcctgggcggacgaacaccgatcctgaccgctgaacgcaagggatcaagcccttttccttcaatgaatgttctcgcaattcctccaggaacatacttcaacgtactccccaatccaatttgacttctaacctgccctcctttcacattcccttgccaagtaatcgaattctgaagcagcagcgatgacataacgaacgcacaaaccgtaaacgcgacgagaaagtagagcaaacaggtaccacgaggcttaagcaaagaaagcaagcccttgcgattcaacgatcggccaatgtgatgaggtcgggtacgcaatgaaggccgatccaaacctgagtgagatcgatctcgcctatcgctcgaattacgcttgagacggagtcgatctctaatagaatggaaagaagtatctccgtttccggcgacgttgttagcgttgtgattaccgtctcttccggcgccgccattgtcatcgatctcgagcgagagagagtttctcaccatggagaaagaagaaaaactgctctgcttcactggtttgtttcaatacgaagaagaagcttctctctcagtttcaggtgccacaaaacttcaccatgagaaagagagaaagagattcagatttgagaatttgattttcgtaaaactttggagagttagcgaatctgttaagcggagacagtggtggagagattgaaccatttttatgtcaataattctactaaatttacatttttcgaatttaatatatctttgttaggacggtgacactaatttcacgcgttttatcactcaagtccaacttgctttctttgagcagtaattgtcactattagtgataatggaatcactatccttttcgtatatctctatctaattatgtcatttgtctaatctctatctaataatcagtgttaaccggcgatgcggtcatgcaaagccatttcaatttttaactggactatatggttcgatataaccggagtattcgactctatagttgttgtttatcgtaaccatttttcatctacatttatttttgaattgaaacttgatgaaaaaattagtagaaaatagtgtgaaccattgacttctagcgtgttgattgagtacgaatcaatcaaaattaaatgaaaacataaaactgttacttaccagaatatttacaaacgagcaattatttacttattttgtataaccgatttataatgcaaataaaactatctgtattctctgccaatgttattcattgcagcagactactttatttttgactcttcaatggggcatgtacatatatagttacatacaactttcttcaaactcagaatgtataagaacaaacaaattatgaccaaagacaatttaaatcgattagacgtcatttcatgaaagaataactggaagttaagtaacaacaacacatcatcatcctcatcatccgcacccttcgttctccattatgctagtattatactgtacctctgtcaatcgcttatgtttgagggtccatatttatagctagctctcatatacatgattttgtactcctttcttctttctttttgttttctactttgttagatattatcttcgttcgtgcaattattgagaaattaattgcagtactttttacatttacacccatatttgcatatacactggacataacatggtttttacaaatatatcttgggtagtaatttttgatacaattgaaaggcggatatttatagttggtttgtagtccatttgatagttttttcctgtttttaccattgagatcatataatatattgttttgtcgtgttccacaaattttctatgatatatactatgataatgtagagaacagctagtttaaaaccggaaatttcatccaagtgttagtatagtcaatccgtttttaaaaatgatgttttatctctcttggattggagttcagagttcagaccatgttgaagaatggtaatttatacaatgtaaaatttcagaccaaaagaatagtaacggtcttaagtactaaaatgttaggtcttctacaactagtaaaaagataaagtggcagaaaaactcaaacgaatttaattgttaaaaacgatttacaataaaaaaatcaattctcagttcaaaatattgtagatcgtctaagctttcagaatatatactaggttgagaaaaaaatagattcaccgtcataattagggtcggtcggattttacaataaacccaaaaataaagtacggaaggtaaaaaagtaaaaaacacaattacccgaataggccatgctcattggccatttcccaccactaggttagtacaaactgaccaactgtcccaataaagaaagacgaaattacaatgtgaggcagattttttgcattcttctcgatcaatcagaaagtgacacctcatagattacgtctttttagttcttactaacgaaacacccaaacaaaaaaagataaattacaaaatatcattttccttatcttattgacttgtcaagattctcttcttcttcttcttcttcctcctcctccaaactcagttccctccgtccatggcagcaaccttacctctatctccgatcaatcatcagttgtgtcggttcgggaacaactctttgacgactcaccggttctgttctcctggcttcttgatttcttctccttgtttcattggtttgaccggaatgggctctgctactcagttacgtgctcgtcgttctctgatctcttcagcagttgcgacgaattcgctgttgcatgacgtcggagccaccgtggcagtgcttggtggagcatacgcgcttgtcttaagcttcgagagtctcaccaagcgaaacgtcattcaacaggtctcttaataatcgttttagttatccacacaatttctccgtttacaattccagttttattcgaacaccactatatgttgaaagaagtttctcaagttgtgtttacagtagtcctaattagaaacaatgataagcctaggaaattttgttgtgaattagtttttttcagactgaattcctataggaattggtaacaccttacggcagggcgactagtaagcagtatccgacattaccgtgactactcgctaaagcggacaagagcaaagtggtccactaatatctaccgctcaatatgttcccacttgacagttagatcgatatagtctacattgctaagacgtcgttccgaccccatattatgacctgtaagtgctgatacgggcattttca

SEQ ID NO: 37524 - DNA, 3103 bp, Arabidopsis thaliana landsberg
ccaatcacttgttaggtactttgacctccaacttgtgttgttacttgatctgaaatctccaaagatttgtaattgaagatgacattcaggcattcagctgacacttggatcctttgttatctagttgtttattttgtaagaaggttgacatggtctaagttattgttgtgaaagttgcagttatcctggttctggttggtctcttgatgagagtcaaagctctactccatgttttccagaggacaattattttagagagaaaatctgtacaaaggacactcgacacgcacataagccaaaagctaagaagtacggtcctcaagttttcttgcttagatattgatactcgagtattacctatgacaatttgtttaaggaacatagaaaatttacttggtcgttaatactgtaggcttacctctcatatgtttggtatgggttgccataagaaagtttctggaggcggtaaatggaagaggtttgtattgcttttgtgattctcattatttgggtgtcttttgtccacattcatgctctaaagggtgatgataaataattgcaatcatatctttatagggacaatgatttacatcggttgctgtttttgccaaatgggctaccggatgggactgaattggcttactatgtgaaatcacaggtctgttatttgtgggcttaattgagtaactctgtttattcttgttgcaaatttaagtttgactgcttttgctgaaacttgtttttctcgcagaaactactgcagggttacaagcaaggaagtggtatagtatgtagctgctgcgacacaaaggtaacatgctggatgcagtgactatgtaaattggccgttagactcattttcttttccaagtataatgacagatatttatcgtgtttcttaaccacagattagtccttcacaattcgaagcacatgctggaatggctggtagacgacaaccgtgagttatctagttacgatgtgtttttgcactaatgttgtaagacatatctgaagtttctgtttctgttgcagttatcgtcgaatccacatatcttccggattgtcattgcatgatatagctgtgtcactggcggatgggggccatgtcattacaactggtgacagtgatgacatgtgttctatttgtggcaatggtggagatttgctactttgtgctggatgtcctcaagcatttcatacaggtgtgtattcgttactgctaaaggatagtagtaaacttgctctctcattctacttactatggcgaatctacaacttaatctcttgagcacatatttcaagaaaattttcctaagcataatgaaaaaggaattactgatatatgcctctttccatttaagttctaagataaattcttaaagatgatttgcaaaattagcattgttttggtattagctctaaggttgttctccggttcaaatacttggtgacccttttcatatgcagcatgcttgaaatttcaatcaatgcctgaaggtacttggtactgttcaagctgcaatgatggacctacctcttgtaaaatagccactgctagtgatcccaatttaaaacccatagttataagactgacaagagttgttaaagcaccagaaagcgaaattggtggttgcgtgttctgcaggttggttgtatacctattttaatttgaatgcgaatatacttgtactccactctgcttattcattatcccccatatctgataggtcccatgattttagcattggaaaatttgatgataggactgttattctctgtgaccaggtactctcttgattcataatctctataattcattgcttcccattaccagttcagccttttctgatagtcctcttcttcttttcttttgtagtgtgagaaagagtaccatgttggttgcctgagagagaacgggttctgtgatttgaaagtaagttgtgttaggctggctccttctgcgttgtgctagcagaactcattcaactttatttaacctctctcctgaatgctgtaggaaatcccgcaggagaaatggttctgctgtagcaattgcagcaggattcacacggcagttcagaattctgtttcttgtgggccacaaactcttcctacacctttgttagacatgatatgcagaaaagacagagaaaaaggaatatttaccgatattggggatacagtcgaatggagaatacttagtggaaaaagtcgatacccagagcatctgcctttgctttcacgagcggctgttatcttcagggtatgtctttacctgagatgtgttccaactatcttttgactttatcacttgaaaaaaatatgtgctctcgggctatttcttgggtcactttctcgcagttaactttgaccttcttaaattatgtataccaaacttgcagcctaattcttgcatgtctaatcttctaggagtgttttgatcccattgttgcaaagtctggccgtgatctgattcctgtcatggtgtatgggtaagttatgacgtgataaactacaatacaatagcaatgttttcgtagtggttgattcgcagtgtaattcttatgatataattgcaggagaaatatatctggccaggagtttggaggaatgtactgtttggtcctgatagtaaagtatgttgtctctttctctttatcactgatgtatctctttcaacttctgtgtgctctatgctaatcgttttcttcttctcatgatgtgactttagttctcttgttgtttctgctgcgctgctgaggatatttggtcaggaagttgctgaacttcctatagtggccacaagccgagagtaccaaggaagggtaaaacttctgtacatgtcatatttatcgtaatatctaggtgggttttctctaaccaatggattaaatgtgaatggtgtcactagggatacttccaagggctgtatgcctgtgtagagaatcttctttcttctttaaatgttgagaacctggttcttccggcagctgaagaagcagagtctatatggacaaagaagtttggctttacaaagatgtctgaccagcaagtaagtgatttgttctttcttttggaattgtgtttttctttagatgtt

SEQ ID NO: 37525 - DNA, 8837 bp, Arabidopsis thaliana landsberg
  unsure (1)..(8837): unsure at all n locations
acccacaaaatgtggccttccattgtgtatatttgtgctactttcgtctgcatattttgggataatacatgaatcacatagctgagttatagtgtaaatgtgggttaatccaaatatttaacatgaaaaactttcaataaaagcttttaaaacgtcccaaggtaggtaaatcattaccaacaatcaaatatcatcaacatgtatgaaaactatagttcgatgtgatcatgatagtatattagtttgtatgtatccgaagaataatcaatacaaaactataccataccaaactttgttaagaacgtcgtaagtatatcaaacaaaaagatttgaaaataccatagaatgacttttgaagggtgacaaccgtttgtctggtgacaacatgtaaagaggggaagaggttttcatttttcggaggtatcatctcattgtctaagctaagacctcactctatgtatgagttactgtatttagcggttcctgttttcttaaaaaggcaacatgtttcctctgaaaataatccattctacactaatttatccaaaagaaaaaatccaaaaattacttgcgacataaaatggtttagttctttaaacttctaaacttgcgcttgtactgaaaatataggtggtccttgtaatggtctctcttatggaaagatgtcctctatagccagtgactcaatttattctaaattttgagaaaattgtgattcaacatgttatatatgtcattttatcaaagatatggattaagtagtgatgaggataatttctaatcttttgcatggggttaaagtattgataatagcaactttgcaaacttatgctaaagagtccagatgattaaattaattaatcttcacaacatttttactagcaaagccatattgaaatgacagagcaactctaacgttacggattgtgagagtttctaaaaaaagccaaaaagtactaatattttaattctataattatattctaattatttaatatatgcaaacgaccaataaaatcacacatgtatcttcatttataggatcgatccttgatttaggatttttagagattctctctcatcttttttttaatttctatttattttcttgtttttaatagttagaatttctattaagaaactaccgatgcgtttgctctaagactctaattacatcagatactctatatacactaatatctattttcttcaaaaaaaaacaaaaaaaaaaatctatgatcctcactttttactagaaaaaaagagagtaaattctgctctcggatagaaaatagaacaggcctctaaataagcccacaacgatcaaaacaggcccagagtagtcattataaggcccaatatgatgatttgagatctgaaagtgggctccacgatgagctgtaaaaaaaagcaatgcaaggctgtgggataaatgatgatgacgtgaggtgggccacgtgggggaaggaatgttgttaggcttttttttagtcctaaaggcgtgcggagacacctctgtctctttgctctttttctcttttattactttttttttttttttttcattataattagagttatctgcaagaataacacttttctactaaaaacttaagaatatagcatattatatgtatcaattaaaaaactaacatgaagggtataaaaaatgaccaacggtggtggtggtatgagttccggcgaaggtttccggcgacggagctccgacgagggttttccggcaagggagttccggtggtgggtttccggcgatggaattccggcaaaaattccggcgagagttttccggcaaagaagttcaggtggtgattttccgacgacgtagttccggcgagggttttccggcgagggagtgccggcggtgatttttccggtgagggagttccggcggtggtttccggcgagggagttccggcggtggtttccggcgagggagttccagcggtgatttttccggtgagggagttctggcggtggattccggcgagggagttccggcggtggtttccggcgagggagttccggcggtggtttccggcgagggagttcggtatcatttacccttcaccgtcactccacaccactcttcgattggtataatcttcactcatatttcatttaccaatggaggagaaagtaaagagggctctcaaaagtcttcgtttttggcgattaatgccaaaggggagaaatattaagcccaaagcaaaaggaccgcaccaccaaacttcaaaaattttcgaaaatgatgatttatgtttgtcttttcaattggtatcttatgatagaaatttcttcaattgatatgatattttcaattggtatatttaaagatggaatttcaaaactagtatctaagtataagttccaattggtatctattaaaaccctcttgaaaactaagaggagaattttattcagggggagttttgtttagtcaaaggaaaagcatttgaaacagggggagaaatttcaaatcttgaaaatgctttgtgcaatcttattcatatacctttgactatttgcaaaagagtttgaaaaagatttccacaaggatttgcaaaaacaaaacaagtggtgcaagcgtggtccaaaatgttaaataagaaagaaacaatccatgcatatcttgtaagtagttatagtggctcaattccaagcaacctttacacttacattatgcaaactagttcaattatgcacttctatatttgctttggtttgtgttggcatcaatcaccaaaaagggggagattgaaagggaattaggcttacacctagttcctaaataattttggtggttgaattgcccaacacaaatctttggactaactagtttgctctagtgtataagttatacaggtgtcaaaggttcacacttagccaataaaaagaccaagtgttgggttcaacaaaaatgcaaaggagcagccaaaggctactctggtctggcgcaccggactgtccggtgccgaccggactatccggtgcaccagaggactccagctcaaactcgccaccttcgggaatttccagaggcgactccgctataattcaccggactgtccggtgtacaccgacagtgtccgtgcgccaagggaggtcggcctccggaactcgtcagcttcgggaaactccaacggctagtccgctaaaattcaccggactgtccggtgtgcaccggactgttcggtgcaactccggagcaacggctatctccgcgccaacggctctctaccgtgcatttaatgcgcgctctcgcgacngagtgtcaggcacgcccactccggcacaccggacaaggaacagtgcatgtccggtgtgcaccggacacccaggcgggccacaagtcagaagttccaacggctagaatccaacggcagtggtgacgtggcaggtgggcacggactgtccggtgtgcaccggactgtccggtgcgccatcgaaccgcggcatccggaactcttcactctcgggaattctcggaagccggcgcgctataattcaccggactgtccggtgcaccaccggactgtccggtgcgccaaggaagcgcggtctccggaactcgccagcttcgggaaacgcgtggcagccgctccgctataattcaccggactgtccggtgtagcaccggactgtccggtgtgccagcggagcaacgactaactgcgccaacggtcgtctgtaaaagtctacagtgaacagtgaacagtgcaactgcgcgcgcagaagtcagagcaggcgccagatggcgcaccagacagtgaacaggagttgtccggtgcaccaccggactatccggtggcccacatgtcagaagctccaacggtcagaaccctaacggccgtgatgacgtggcaggggcaccggactgtccggtgtggcaccggactgtccggtgcgccatcgagcagacagcctcccaacggccacttttggtggttggggctataaataccccaaccaccccaccattcattgcatccaagttttccacctctcaactactacaagagctctagcattcaattctagacacaccaaagagatcaaatcctctccaattccactcaagcctttagtgactagcgagagagatttgtcgtgttcttttgagctcttgcgcttggatcgccttctttctttctcacttgttcttgtgatcaaaactccattgtaatcaaggcaagaggcaccaattgtgtggtggccttgcggggaagttttgttcccggctttgatttgagaagagaagctcacatcgtccgagggaccatttgagagagggaaggattgaaagagacccggcctttgtggcctcctcaacggggagtaggtttgcgagaaccgaacctcggtaaaacaaatgcgcgtgtcacactcttcatcttgcttgcgatttgttttgcgccctctctcgcggactcatttatatttctaacgctaacccggcttgtagttgtgtttgtatttgtaaatttcagtttcgccctattcacccccccccctctaggcaactatcaattggtatcagagcccggtgcttcattagagcctaaccgctcgaagtgatgtcgggagatcacgccaagaaggagatggagaccggcgaaaagcccactacaagcaacgggagcacttcatcggaagagtcccgcaccaaacggagggagaagaagaagagctcttccaacaaagggaaggagaagaaatcttcttctcaccacaaagagaagaaggaaaaatcttcttcccacaagccgcatcggagtggggacaaacaaaagaggatgaggaaagtggtctactacgagaccgacacttcatcaacatcgacctccggctccgacgcgccctccgtaacttctaaacgccaagagcgtaagaagtttagtaagacccccctacactattctcgtatttctaaacatgcacctctactttccgtcccattaggcaaaccaccaacatttgatggtgaagattatgctaggtggagtgatttaatgcgatttcatctaacctcactccacaaaagtatatgggatgttgttgagtttggtgcacaggtaccatccgtaggggataaagattatgattaggacgaggttgcccaaatcgagcacttcaattctcaagcaacaacaatactcctcgcctctctaagtagagaagagtataacaaagtgcaagggttgaagagcgccaaggaggtttgggatgtgctcaaaaccgcacacgaaggagatgagatcacaaaaatcaccaagcgggagatgatcgaaggggagctcggtcggttccggcttcgcataggggaggagccacaaaacatgtacaaccggctcaagaccttggtgaatcaagtgtgtaacctcgggagcaccaaatgggatgaccatgaaatggtcaatgttattctaagatcacttattttttgtaatcctacgcaagttcaattaattcgtggtgatcctagatataagctaatgtctcacgaggaagtgataggaaagtttgtgagctttgagttgatgatcaaaggctccaaacaaattgtcgagcaaggcggcacctccactcctgaggtgcaacccgtcgcattcaaagcgacggaagaaaagagagaagagtctacatcaagtagtctccccatcgacgcctccaaactcgacaacgaggaaatgacgctcatcatcaaaacgtttcgccaaatcctcaagcaaaggacgggggaaggattataaaccccgctccaagaaggtttgctacaaatgtggtaagcccgatcattttattacaaaatgtccattatctagtgatagtgacaggggcgacgacaagaggggaaagaagaagaagaagagatactacaagaagaagggcggtgatgcccatgtttgtcgggagtgggactccgatgagagctccaccgactcctcctccgacgaggatgctgccaacatcgccgtcaacaagggtctcctcttcccaaacgtcgaccacaagtgtctcatggcaagagacggcaaaaagaaggtaaaatctagagcctccactaaatatgcaacatctagtgatgaggtgtgataaaaatgaggagataacttgcgcatactttttgctaaccttaacatggaacaaaaggaaaaattaaatgaactaattagtgccatccatgaaaaggatgatctcttggactcccaagaggacttcctaatcaaggagaataagaaacatgttaaggttaaaaatgcttatgctctagaagtagaaaaatgtaacaaattatctagtgagctaagcatgtgccatgacactattgccaaccttagaaatgaaaatgctaaattaattgctaaggtagattctcatgtttgcattgatcctagaaatgataatgttgatttgcttgctaggattgatgagttaaatgtttccattgctagccttagaaatgagaatgagaaactaattgctaaggctaaggattttgatgtttgcaatgctactatttccgaccttagaactgaaaatgatatgttgcatgctaaggttattgaactaaagtcttgcaaaccctctacatctaatgttgagcatatttccatttgcactagatgtagagatattaatgttgatgctatccatgatcaccttgccttaattaaaaaacaaaatgatcacatagcacaacttaatactaaaattagagagcatgacttagaaaacgaaaaatttaaatttgctagaagcatgctctataatgggagacgcccgggcattaaggacggcattggctttcaaaggggaaacaatgtcaaaattaatgcccctcctaagaacttgtctaactttgttaagggcaaggctcccatgcctcaggataacgagggttatattttataccctgccggttatcccgagagcaaaattaggagaattcactctaggaagtctcactctggccctaatcatgcttttatgtataagggtgagacatctagttctaggcaaccaacccgtgctaagttgcctagaaagaaaacttctagttgcatcaaatgatcatgacatttcatttaaaacttttgatgcatcttatgttttaactaacaaatccggcaaggtagttgccaaatatgttgggggcaagcacaagggctccaagacttgtgtttgggtacccaaagttcttgtgtctaatgccaaaggacccaaaaccatttgggtacctaaagtcaagaactaaacttgttttgtaggtttatgcatccgggggctcaagttggatactcgacagcgggtgcacaaaccacatgaccggggagaaaaggatgttctcctcatatgagaaaaacaaagatccccaacgagctatcacatttggggatggaaatcaagggttggtcaaaggtttgggtaaaattgctatttcacctgaccattccatttccaatgtttttcttgttgattcattagattacaacttgctttctgtttctcaattatgtcaaatgggctacaactgtctattcactgatgtaggtgtcactgtctttagaagaagtgatgattcaatagcatttaagggagtgttagagggtcagctatacttggtagattttgataaagctgaactcgacacttgcttaattgctaagactaacatgggttggctctggcatcgccgactagcccatgttgggatgaagaatcttcataagcttctaaagggagaacacattttaggattaacaaatgttcattttgacaaagacaggacttgtagcgcatgccaggcagggaagcaagttggagtccatcatccacacaagaacatcatgacgaccgatcggccgcttgagctactccacatggatctattcggcccgattgcttacataagcatcggcgggagtaagtattgtcttgtaatagtggatgattattctcgcttcacttgggtattctttttacaggaaaaatctcaaacccaagagaccttaaagggattcttgagacgggctcaaaatgagttcggcttaaggatcaagaaaataagaagcgacaatgggacggagttcaagaactctcaaattgaaggcttccttgaggaggagggcatcaagcatgagttctcttctccctacacacctcaacaaaatggtgtagtggagaggaagaatcgaactctattggacatggcaagaaccatgcttgatgagtacaagacaccggaccggttttgggccgaagcggtcaacaccgcctgtacgccatcaatcggttatatcttcaccgaatcctcaagaagacatcatatgaactcctaaccggtaaaaagccaaacatttcatactttagagtttttggtagcaaatgctttattcttgttaaaagaggtagaaaatctaaatttgctcctaaaactgtagaaggctttttacttggttatgactcaaacacaagggcatatagggtctttaacaagtccactggactagttgaagtctcatgtgacgttgtgtttgatgagactaatggctctcaaatagagcaagttgatcttgatgagataggtgaagaagaggctccatgcatcgcgctaagaaacatgtccattggggatgtgtgtcctaaggaatccgaagagcctccaattgcacaagatcaaccatcctcctccatgcaagcatctccaccaactcaaaatgaggatgaagctcaagttgatgaagggcaaaatcaagaagatgagccacctcaagatgatggcaatgatcaagggggagatgcaattgatcaagaaa

SEQ ID NO: 37526 - DNA, 2725 bp, Arabidopsis thaliana landsberg
gtaagtgtttactcaatctagttaataattgtaggtcatgcatgtatcattttgaggaaggtttctgaaattctaagattttacatatatatgtgataaatgaattagcagcatgcggtggaaagtgcattgtgagatgctcaaaggcaggacaacatgaagaatgcctcaagtactgcaatatatgttgccagaagtgtaattgtgttccttcgggaacttttggacacaaagatgaatgtccttgctaccgtgatatgaaaaactccaaaggtggatccaagtgtccttgaacgttctttgaagatcctcatcacatacatataacttctacgtactatatgtgtggaaatattaatcacattctatgtttgaaatatataaaataaaatcaatgcccccaatgttggaaatcttcaatgtgatatcttaatatatatcacgaataaaaaaggtttaaatttctcaatctcatttttaatctttaatctaatttcttaacacatcaacgaatctttaatctttaatcatgtagataattatcagagcacctaaacattgcgccgttttgtgattatacaaagtaacatcgtgctgtttttgacttttgaaaaccacacatccaaaaactgtttactttcctctaagagaaagcaaagccgagtgagtccaagcgagttttgagagattcgttgactcactaccggagaacgactctatgtcagagaccaccgtgtcaatcaattcggaccgatctaagtcggaggaagaagaccaagaagagtattctccaccggtgcaatcatctccgtcagcgaatttcgagaaagatcgacacttgatgtatttggagatgatgtacgagttgcttccgtaccattaccaatctcaggagatcaatcgtcttacactcgctcatttcataatcgcgggtcttcattttctcggcgcaagagaccgtgataagactctttctcctctctctcaaagaatcgatctttgtttttcccctgaatctgatttagtgaatttcatctataatttctgaaggttgataaagatgttgttgcaaagtgggttttgtccttccaggcctttcctactaacagagtttcactgaaagatggtatttttcttgaatttagttagaagtatgtttatgagcaaattgttaattagttagtgatcaatgaatgagatgttcttgttcttctctgcaggagaattctatggtttctttggttcaaggagttctcagtttcccattgatgagaatggggtaattataagtctatattccttatgctttatatgttacaagatttatctttgttttgcatctgtgtgggcttgacagtttagtttgttgcgtaggatttaaagcacaacggtagtcacttggcaagcacttactgtgctttggctattctgaaggtcattggacatgatctctcgaccatcgactcaaaatcattgctaatttccatgataaaccttcaacaggatgatggaaggtattagttcttagagcttaaaaaagtaaaatgcattttataatgccataagtttattacttattttctttgttctaagtcgtttaggctagcaatattctcatttacatggtgcaacaagtttggcttgtcagcatataatgattaaataagcaatggggtctgaattgtgtttgatactttttcattttgctacagcttcatgcctatccatattggaggtgaaacggatcttcgatttgtatattgtgcaggtaaggaatagctacctaacaggatttacataccatgtctttatactttaagtagagtatcaatctagttttttttttttttttgtggttcagctgcaatctgttacatgctggatagttggagtggaatggataaggagagtgctaagaactacatattaaactgtcaggtttactactgatcttgtagttgcttttgtctttttttcttccattgatatttgtcaatttctgtgttgagaagacattcttgtgcaacattctttgtgcagtcatatgatggtggttttggattgatccctggttctgaatctcatggtgagttgaaaacaatttttctactatctcacagttgattttttccatgtgcagtccaactaagtggcgcatatgttattactgaattgatcattgaggacactttagataatttagttccttcatctaggtttctacttcaatggcaacccataaagaaaagaagtttactatgttcttacgttatgagggaaatatgtttatttgactccactcgtgtatgatgcttacctacgttctgcaacttagttatgcaggtggtgccacttactgtgctattgcatcccttcggttgatgggatacattggagttgatctgctgtcaaatgattcatccagttcaataatagacccttcattacttctcaactggtgcctacaggtactgcttcataaaatctgttaactttcacctcataaatattacctttagattcgtaatggcctgagtgatctgaaattttttcttaccttgcctgtagagacaagcaaatgatggtgggtttcaaggtaggactaacaagccaagtgacacatgctatgcattttggttagtcccctcaacttttgccctcaccgaccataattgtctcatctgcttatgatgggccttgcatatttgtaggattggagcttatg

SEQ ID NO: 37527 - DNA, 4575 bp, Arabidopsis thaliana landsberg
  unsure (1)..(4575): unsure at all n locations
tgaacgagttagttcgttatctacttatttacaaaattaaattatacacaaattaatgttaactctcttggtagcgataataaacaaatatgttcaaatcgatattctaacaccctcccgttcatacgtgatgataacatgtatgaaattgaagatgttgataaatgtattttaaatatttgattacatgtattttgaattgtttacatgtaatcaatcattttaaaactgattattattaatctatttttaatgggatagacaaaattaatcatttataaatactactataactttaattaatcttctatttttattattaaaaaaaaacccaacattttctcccgcatgagctggatagtccgcttaacatacgatttctattattattgagccggcgtttgtatcccacatgtgcataccctaagtaataatagctagtgtacattttagcaaaaagtgaataatctcaaagtatatatgaacgtttcttgcttgtttgcttctcttctacttgcacaggatgtctctatatattattatttagtattatccactgcccagtcttctcatgtgctcacaaattctcttcattggcaccatctgttacgtttatctccattggatttttcccgttataacattgctttccttgatttgatcaaattgggccatgcatgtaaacggctttggcataaactagaacgatccaccctacaacacgatgggcaaagcgtagggtagggacgtagtaaacacgaacgcataatccgttcattgaacgaacaaacctttgaagatgattaatgaaactagaatggaaaaaatggacgtggaatagataagagctatgtactatccaattgaatgcaaagacattcaattgaagtaacaaaaaatggaccctatcgaagaaagaaaaaaacaactgtgacttagttgtcccatatatgttgaaggcaatggatcgctagtcacattatacctgtcgaagaaaaagaaagaaaaaaaatatgtggatcacattttgcgaacgtagatccaaatagtctctttgtccctacacttttgaaactaatcatcccaacctccttaccataaatgtcatttttctctagttacaaaaatgtgcatcttacttcggattatgtaaatgaaaaaatgaagatttcgttaggtcaataagaaattctaaaaacagcaaaagagtactcagtaaaaattcgacgaaaatttaacacattattttattaaatgtacattttaagtatattcctttgatattcctacaaataaatatattaatatttaatatgttaaacaataagatagaattctaagataattgaccacatgtctataaataaatttgataaaatatattcatacatagaaaaatagcatgataccaagaaaaataacgtgtcttacaacactgagaggatacagataaacagtataaatgagatacctacgtaaaaaataacatgttacgaaaaatgatatgtatcgaaatagtcaaatgaaaaaatgaaaagataatcgtccaacatggtcaaaatccacttttatcatatgtgcaaaaaagtaatcaacgagtgataatatgctgatatttgttacaagaattcgaatatgagatatgtgtatattgacatattgtgctggatagataaattatattagggttaactttacaagcatattttccttatgattactaattttcacatatatagattttatatatgactatcagttagtcaaggatttttgtgagaataaggtaaatggagaactgaaagaagataactggggaaaagtttaatgagagggtatggtggtgtcctcgtgtgcgtggctgcattctcgtggcatgccatctcaatgctaataattgaaatccaatatataaaattcatgaatcaacaaaagcaaaattaaagagaaaagtaaacgtgaatagattgagagagagaaggacagatgaaggtgggtgtcggccgaaccacggacaccggtcggagtctcaagacaaaggaaggtttgcgtctggggaccattcacactacctcaatacaacacccatgccaactccaaatccattcttaattctttttattttcagtaaccaaaacataaatctactaatatcatttaatggaactaatttagtttaaagctttttttaatgttgctaatgaaataagcaccttaagtatattctcccattggtgatatgttttcttatcggttggtttgggtaattttcgacacttttggaaaatggacaacccatgttgtcatttccctttagattttcttgatggttatggtgtggctagtttttttttttcttattttcttatttttggtatttaagaagagaattataaaggaaagagaaataagtgtatagtttaaaaggaaaaaaaacaaaggaatgtaaaggcaaatacaagtgtatcccggcattagtttggttttgcgtacttgttgttgtgagcttcatgttctttagcgacttttcgtcacgttatctttggttcccttcacttattttttcaatgtaccatttgataatacatattttttcgttgtttctgaaatgcaacgtataatcttggcgtgattttacatatttttaaagaatacacgatgaacaacaataacatgaaacaaatgtctaagattatactctcccggaggagaacatgcattcacccatcctaatcctatgaaacagttattttacgttttgaccattgactctagagtagcagctgtattaaaatctggtacaaagagatttcacgacacattttaatgcatggcatcagatggatgccatttatgtcgcatacgctacccaaatatgcacaccatcaattaggctacatagggccataggatcgcatgcccaacaaggtcagacaaaccaacatcaaagtctacgtactaactttgcagcagcaggcgaatccaacccaaagaccaacaagtatcaagatccaaatcatgtaacctctataaacatctccttaaggaaagcaaatcttgcagttcttcaacaataacggccagtttaagctaaaacaatgaaaccatgagagtgctcactattcgagatgaactatacaagaattaatgtctcgatgttaatagtatattatctacgatcacaagtaagaaagctaacttgaataaagcaaggattcatccgcgtttgcttagaagtcttatctcgagttctagcctcattcccatcgttttgcctttaccttctcaaatgcattcatcttgnnnnnnnnnnnnnnnnnnnnnnnnnnnnnacgaaaatgaacatcaaaggtttttgctttaatgcttaaaacctaatttatgtttgccatgtccttggtcatttccttttctctccatttgccatcctctccaatcaccttcttcaaatcttttaggctcctaaaaccatcaacgttgatgcatgatgataataaaggcaaactcaaatatcgcaaatttgcaactgatattagcacacatttttgcagtacatagactatatttgtattaattactctctattcccaaatttgttacacaatctctttcgattcttccaaaatttgttctgctttgacttctttttatttttttgataaacatgtgaagattcataccaattttaaagtttctacagagtacagagattcaacgaaaaaagcagaaagcagaaatctacaatctgctttgaccagctttgctttcataatttttactgtacagagaataataaccaacctaaatcagaattcaatatttcctctaccaacaaaaaagataaaccctgaaacgttttgtaagagaatcacgtgagagaccacgtgaccatttttttccctaagcatcgttaatcttaatgggctcaagaaaagtttcttaattggatcttattataatactggtgagtgagccttagtccattatatggacgtggcataaccctgccactttcagggtnatcgatccacatctgccgttaaaacagtaaaccgccgtctaggggttatgggaaagaatctggaccgttgataaacccctaaataaacgggaggactgataacggagaacgtgagcatcctctgacaagaaaaagacaaaaaaagaagaagaaaaaaagcacatgacatgattctttcaccaccctttcgtcttccactctcatcaatctagattctcttctctcttctctatattccaaagcttttacatttcttcaaatcttattttccttgagatcaattatggcaggagagattcaggacccgtttagtcttagttttcaggtaaattcttctactacaatgtcacacttttacttgtttttcttctaactcttttcataattgctcttgacgaatcttggtaaattatgtatgttcgttttaagatcaatctaaatggacttgaaattctactgtcttcagctttacttcaacgaaatttgctaaatttaaccgcttagtagcatgtttgcagagtagtgcttcatgtcttgggaaaaaagtcattgct

SEQ ID NO: 37528 - DNA, 10252 bp, Arabidopsis thaliana landsberg
  unsure (1)..(10252): unsure at all n locations
gatgcacacaaatgagatgtgatcaatcatacacatgatatattagacttgatagaaaacagaaataataacagagttattaaaatcactcgaccacaacaggctgatgccaaaagtaagatgtggtcgagtaacaggtcgagtaacagacatgatataaaacagatatactcaactgcacagtctgttgccagacactgggtgtggtcgagtatactggtcgagtaattgcaaaaatgaagaaacaggcaatgagaacgattaagcgataacgataaaacagagaaatcagatagacgagaaattcctaaggatggggtactcgaataaagggtatcctagcctattcgaatggttaacaagcgcaatcaagctatccctagacaactggttcaacaacagatcaattcactctcgtgatagaaatcctcaagcaaagctagcccagactaattcccattcacggaatctaactatgcatgcaataagaacagactgataaagtcaataaacgctctaaacggccaatcccttgggatagagacgaatatctcgtgaactagtggatctagcattccatcgaacaccttctgggtgcagtattgctttggatcgaattccagttgatcagaaagaaataagcagtaaacacaactagtcctgaagggaatcaatcaattttaaaacttaaccattctacagactacggattccacaactactctatcccatccttaagaattctaactcactactcagacaacatgctcaaagacataaacgcaattaaatgataatattgcataagtaaagagataaagagtagatgataggtgaaattaaatgcggactctgaataacttggaaaaatctcaaattacaggttgtagaagaaaaagcggcgcaaccagagtaaaacagaaaataaaactgaagcaaagactcaatgtcgactcgatgtctcatgacagaaccctaaaacatctatttatacaaaacgaaataaaatgatagtagacgggccaataacctaatcgcccggcccatagagtgataatgggctaagatgggcttcgtgatccgatggaggtcaaggccgcttccaaaccgtttgtcttctcctcttctcttccttgtgctcagcttgtctggttgagtgcggatttgagtagattgtgaagacgtgatcgagtgtccggtcgagtgtggtcaggtggtgtggcgaagtgatactcgaccagggggtcgagtagcgtcatcgagtggcctgagctgaggatacttgaccagggggtcgagtagatgggaagaatggctccaagatactcgaccagggggtcgagtatggtgctagatgtacacggcctggaggtcttgtatgtcctctgattctggctcgcttcttccactttactcgccaatagctccaaatcacctgaaaacaacttagaaatgcaatatgtatgcaaagctattttgggttctgaaatccacactagagatttgtatttaagagtatgagaaaggaggcctagatcttcactgaaatcttgagagttgtattgctaaaaacgaatggacttttgtattaattatgacaaagcttttacaatgtgaaaagggattacaagtgtaaaagtgtgtgtatcaatgtaagctggattgaatgtctcttccaagtcgtcctagctcccttatataggtctacgcacgtggtagctccgtccgggatctgcgaagatcctcctggatattcggcaggtcagtttcgagatatcaggtctgctccgcgaatatctcctcgtcaattcctaggtcattgttcgcttatctcccttcatcaggtgactgggcttatctggcccaaatacctattcgcgtatgtgggcttgtcagctgcgtaggtcctctacttggtgggcttggtgggcttttgtgggcttgcttagtattttcgcaggtggattcctggaggggaatccagctccaacattggccccccagcccattgagtgagttggcgaacccgatgaacggacatatatatcagatgagattgcaaaaatattctcgatgagatgatagatatggcgggatctgttggttttgaggataaactcaataaaaatgatttaatttgaagtcctgaaccgaaagatattgaggagatacgtgagatatgtgctgctgacgtggaccactgagatggagcgccttttcagcgcaccatatctaacggtccagattacgcacggagaagagatctctgcaatctcgaaaatcgtggtgatgatggctttaaataacttcccacctctccacttgacgtcacgtcaactcaagcgactctcaaggtaaattctctccacctttattatttactgcgttttgtctttagagatagaaaaatttcatctttttctgctatctccatcgtttctctgctactctcgtctttctcgatctgccctctttgctcttttctttcatctctctcgtctttctctatcgaaaccaaaagatgagcgccttcgaggattcccagaacaaaagcaaccacagttacggcgacgatgagagttcgtccgagacgaggtcgacggcgtcactgccgcaagtacaaaggcgcgtcataaccctagacagaatgggtccagtccggccgatgtcaaccagagccgacaagccgaagaagaaaaaggctgccaagcaaaaaggaggcacgctgatgacaaacagcgacctggtggacctctgaaggagatgccaggttccggtgggggtaactatgatactcctaaggccaccgctgcatcctgagaacgtgccggccgggtagtgttgcgcttatgccaatttctttgagaaatgtggcctagttttcccgattccggcgtgtatcttcgagatgctctactgtttgggcctcgcctttccccagatgtgcccgaacttcgtccgccatgtactggcgttattcacctgggctcgggaagtaaacagataattcagctgccatgaccttcttcagctctgccaggtcaagactaatgctaggagcgaccaggggacgtactacatcagtggtcgtcccggattcctggtcctaggcagtttgaaggcttgtcgagacaccaattggcgatccaagtacttcttcgtcagagtagatcgtcattcaatcggcagctttgatcctgcgaggataacgaggacctggtctaccaacctgggtcagatagagacctgagcctcttgagtttttttttttgttgtttgtgtcgaatccttgattgcttttgctgaaagttagtactgaaactaattgcttgtttttgttgatttgcagcaaggaccaaggaagttactctctcggagacggaacttgagctgttaacccttctccgaggtggtcagactgactggtccattttcagcataaatcacatcgtagctgctcttgtcgtagctccagcagttcccgtagttccagcagttcccacaatcgttcctccaggagcactgctagatccgatcgaagaggtcccacggattgaaccagttcccgaggctgatctgcctataggtacgagttccgttatattttctttgggttaaaaaaggtacgagttatcaagacagctgcgcaactcgaattgttaactaacaaatgtcgtgctctattagttcagttcctccagactccagctccacttcagaactcccgctcatcggaagaatgaggnnnnnnnnnnnnnnnnnnnnnnnngccaacgctgggggtcccgctcgtgccggtgatctgtcggccgaggtgaccgcggctcgaaacactctagctgtttctagcgcatctgcctcagcatctcatcccttgcttcctgacgtcaacgcccggacctcagctgcagcaggtcaatcggataacgatcaagtcgctcaggtatctgggccatctgcagttgttcattctgatggtgcaccgtcctctccgaagagggctcggacccagccggaggtgaatctggcggctgagttggtcttgagcgaccagagggtcgcctctcctagagaggagaggatggaacctgcggctgttactccggaggcagctgcgtccgtagataggcgatcctcgggcaggtcccatggaggaggacgaggctccagaggtgggggccggtcttcaaaccggtctcaggaagtgaggcagacgtccaactccgacggaggatccgcgggaagcaggcctttccactggtcttacactcacgaccgtgatcacctgatcgttgaggacaaggctgggttagcgaacctgcttcgccacatcaaaaggaggaactgccaggtttctggagtgaagaacatggccgaggcggcggcctatgctgacatgatggcgaaggagggccaggtaattatcgataattgtcttcttctaatttatatctttgcgctagttgtgactttctgttttgctttcggaaggcgatagctgccacaaacaagctggttgctctctatgagcagcgtttgagccaggtcccctcggcgaacgagctagaagaaggaaaggccctcatccgggagctgacgtcgagtgtgaaggctggtcaggatcgcgaagtctcgttccagttacaccttggttttgacttgtttataaataattcgtcgatgatttgatgattctgacctgattgttatttcagggagagatcgagaggctgaaaatggagctgtccactttaaaagacctcgagaaaggttttgctgagaagatcgggttcatggagatggagatcggggggttgcaagccgacaagcagacggcgaggagccagattcatcgcttggagcagaagagggaagagctctccaaaaaggtgattgacctaactttgactgtacaaggggcgaagaaggcggttgacgatgctaaggttgagctggctgctgcgtattcgaagctgctagctgggatcaaggagaagtgggtcgccaaaaaggagtacacggttctggaggggcaagcggccgaggtggattcaaacttggctttgatcgaccagatcaccaaggctgctatcgatctgaccatggagaaacctcggctgcaagcagagctggaggacctggaggcgcggtgcaaatcgaaggaggtatcagactttactctaagcaagttggatctcccgcaggtttccgagattttggtggtacgtccgatggacgtcgacgaacaagggacgccaattggcttggatgagtttgggagcaacaaagacgcgttttcgggaggtctcgccgaagtttctagtactgtctttgtacgccagccggagaatcgagggagtaatcactttcgctccttgcttgttttaggattttgcgttttgtttcatacttaatgcctgggaaggcttttatcctttcgtttattgctttntgaacttggtgcctgagaaggcttttatcctttgttcctttaagtacttgggtgtctgggaaggcttttatcctttttatcaagtattttttgtctttcgttcgagtgttgacacttcgttgattttggtgtacgatcacctcactttgtccacgtttcggataataattggacttgctttgaatccaagttatttcggatgtgatatggtatgttcttcgaaggttaaagctttgagtaagtttgagttgttttgtcttgggaacctgttgaagtgaggtcacacatgggacctgccagattttgggagctgggcttgtggtatcgccaagtcgcgaatgaaaccttcgtttcttccttgtttattatgttatgtgttgatagcgaaagagttagatatggttgtagtatgtgagctccaatgaagccaaagtgatgtgtttttataagtctagttcactatcgactttttggaagcgagatcacaaaatggatccgccaacattcaggtgttgggctttgggtatcgtaagattacgaatgagttttaaatcatagtgtaaatgattgtttttgcgaaacatgataatgagtatcaaaattttcttttattcttctctcgaaattgttaagtacaaaaggaggtaaagaaagcgacaatctggcgtttggtcattgagcaaggacctggtcgataccgaagagagattgaactgtcagtgagcagctgatatttgttgatgggggatgcgatatctatttcccttgttgaagtttcgtcttacagatagaagggttgagatggtaattgcgtttgcggaggtgactgccctaatacctggttaggggattaagcccttttaatttgattgaattggtggctacgctcttgggaggagttgcctacgtaccctgccaagggatcaagccttatcgtagttcgattgtttttgagtacctattcgtggtatttcttgagatgaatggcattccaaggccgtaactcaggtactccgttgataacttttacgagcttataaacgccgtcgtttagctctctcgtgttgctgaacacttttcgtaaaacaagctctcccacttcgaatctccgaattttgatattggagttatagtagcgggcggcagcttgttgatagttttgaactcggataattgcctgatctctgcgttcatcgatgaagtccatgttgtcctgtaatatttgcgtcttcaggtccgggttagcaggacaggcggttcttctcacgcttggtaccatggtttcgacagggattactgcttctaaaccataagtaagggagaacagtgtttcttgcgttgatttgcgaggtgtggttcggtaggcccagagaactccgtggagcacgtcggaccacattgatttttttgaatcaagtcttttcttgatgttgctaagtataactttgttggcggcttctgcctgtccgttaccttgtgggtaacgggggtggatatggtaagacggatcttccacttgtcgcaaaatgctttgatttttcccgaggtgaggttagtccgttatcggtgacgattttgtacaatatactgtgccggcatacgatattttccatcaaaaaaaccttgacatgtttctcggttacttgttggtaggctttggcctcaatccatttggtagagtagtcagtgaagaccagtaggaattttagtctcttttttcccccggaagcttccatgggtcctacgacatccttggaccacttcatgaatgggtagggagacgagattgacgacatttccttgggttcttggtgtagggtaggtgcgtggcattggcacttatcgcatttgagtgagtgagttatgcaatcggctagcattgtcggctataagtaaccttgcttcttgattctgagggcgagggttcgtccactgcagtgcctaccaaactgtccctcgtgcatgctcttcatgaggtctttatcttctgcatctaggtgcataccatgtaagggccggaaacgctgtgtaaaattgcacgttgccgaggttctgtcccagcgtgtttaaccgttaagttaacgctcgggtgttctattctttcgactgtgattatttgtttgacaaaaggatctgaagtggaagtgagatctctcccctagggatcctagtcagctcgaacgattcgaattgtttggacagcgttttgacaagttcgaggtacgcttccatgcattcgtctttagcctcgtattcacggatccccattccttgagctagctttatgccagagaggagggcttcatattctgattcgttgttcaatgcgttgaatccaagtcggaacgattgttcgatgacttccccagtgggggaggtgagttgtattcctacttcggtccttgtcggttggaggagccgtcgacgtggaggagccatttcttattgatgttggttccatccaagtttgctaacaggagcttgattacgaagtcggccaggacatgcgctttcaagctagtcctggtacgatactctatatcgtattcgctcagttctatggcccatttagcgagacctcctgattgagtgggatggtgcaaaatggtttggattggttgggatgtcatcaccactatggggtgcaattggaagtacagtctttgtttacgagctgacataatgacagctagtgccaattttctattgttggataacgggttttggcgtttactagtgttttactcacataatagattggtttttgtccttcgtagtcctctcgtaccaggacaccacttattgcggttcaagaaaccgttgtgtacaggtacattggttctccttcttcgggttttgcaagtatgggtggttcggctaggtatacattcaattgcttgaaggaaaactggcaatcctcgttccaatcgacctttttgtcctttcaaaagagttgatagtacgggaggcatttatcggtggatctagatatgaacctgttgaggcggcgatacgaccagttagtcgttgacctctattgttgtattgggtgatggcatttcaatgaaggcggcaatctgctttaatttggcttcgatacctcttttggttaccaggtagccaaggaattctcctgacgggaccaagaaagatcatttctcgggatttagtttcatttcaaatttgtttaggattttgaaacattctcttagttgcgagacatggttcttttcatgggcagacttaaccagcatatcgtcgatgtaaacttccattgtttttccgagttggtcggcgaacattctgttcactaagcgttggtaggtagcaccatcatttttcaaaccgaaaggcattactttgtagaagtaagtgccttgatcggtgatgaaagccattttttgtggtcatctggacgcatgagtatttggttatacccacagaatgcatccatgaaggacaatagttcgtgtcccgcggtgcctttgaccagtcggtcaatatgtggtagtgggaaactgtctttaggacatgccttattcaggtccataaagtcgatgcatactctccacttcccggttttgtttttaacgaggtccgggttggcgagccagtcagggtattttacgtctcttatcgatccgatcttgaacaaacgatcgatctcatcgtgcacagctttagccctttcgggacctagcttgcgacgtttctgctttataggtcggtaggtcggatcgacgttgagttcgtgtaaggttacctcggtggaatgtcctcttttgttgtggtacttgcaatattttccgaggtcaagttctggactctcgtcctcagctgcctcttctattgcgaataaggtatgctgcccttgcgtttggttttcctttttgaagggggttttaattgcaagaggagcattttgcgttttagattctttgaaccttaaggccagcacagcgagctcctcttcgcctttggcgaagtggagagctttgtgaagggcatcgtctaaagagactgtttgcctaacagtgagttcctcacggaatctagaggaaaaccacggaccgttacgaagggctgctatggctacctcctcgtttaggttcgcaatcttcgaattaattgctttgaatttttcgacgtaagatcgcagggatttgttttgaagttgagtgagactccagaggtcggcctcagacgtcctctgttcgataagtaccgaacactattttaagaaagcggcggcgagctgatcgaaggtatcaatggagcgatccgtcgtactccgggaaacggagtctcccgaggtctcggatgcgaaatcgagcgatcctatccgtgaatggggtgcgcctagtttcttcgatgacgcgatctatgacgggagcatcgctcactgctagatgcattcgtgaatgcatttgagccatgtttgcatttgtttgagctgcgtgattgcggaatgtatccatatccacgacgttacgcgtatcgaccggtgctttgggatcggttggactgttaaggaggtcacttcctggtatccggggaatggatggcggataagcgatagaggtccgttgttgcgttgagttcccgggaacgcgagaactagatgcggttgtttggtttctcgtccacgtgtacctaggggcgaatagcccatcggtagtaaaggtgggaccgatagccttgggaaggcaggcgttgtgcttatctcgtttcctgttgccgagtttttgacgagagtgttcgtaggtgcctgtaaaaaggcatcctgccggttgataggag

SEQ ID NO: 37529 - DNA, 1070 bp, Arabidopsis thaliana landsberg
gattctaaatttattttttttattttatttaatccagatactaatacaatcatcggcgttgtaataatatatagtttaacttttgttttcttttctaatatagttctactttatttttgggcttttcagattttgatcagacgaggtcaacagaggtgattgttataagggacacaaaagaaaatccgaaccttatcgtcgtcagttttaggggaaccgatcctttcaacgccgatgattggtgtacagactttgatctctcttggtaatatactgaatacttaggtttaggttggtttttattcggttaggttcaacgttagcttctactaatcaaagtaatgctgatttcaaaaataggtacgagattattatggataaaaataggcacaacgttatgaatgtgggaaagatccacggcggattcatgaaagctttaggccttccgaaagaaggttggtatgaagaaaaaaactctgaccaacccaaaataaaacaagacaacttcgcatactacacaactttacgtcagttaaaagaaatcctcgaacaaaacccaacatgtaaatttatattgaccggacatagcctaggtggggctttagcgatcctattcacggctgtgttggtgatgcatgatgaggagcaaatgctagagaggctagaaggagtttacacatttggacagccacgcgtaggcgacgaggagtttggaaatttcatgaaagattcactaaagaagtttgacgtgaagtatgaaagatatgtttattgcaacgacatggttcctaggctgcctttcgacgacaaaacactcatgttcaaacactttggggcatgcctttactatgacagtttctataaaggaaaggttggttgcatatatatgacaatcttgtttctttgctttaatcactcatccgtctaatctcgcttacgcacttaccctactgatgatatctatctacattgttgttgtttaatttgtattatgttcaggtagaggaagaggagccaaacaaaaactattttaatctcgtatgggttttaccaaagataatgaatgcact

SEQ ID NO: 37530 - DNA, 3087 bp, Arabidopsis thaliana landsberg
gcccgctaaaccggtccaatttagcattgtaacagaaaatgtcatttttgcagtcccaaaattatgaacacaattcatacaaaaaaaaaaaatcttcaaaacaagaaacaaaaaaaaatgaatatgagggatagtctatcaaaagcaaaaaagaataaataaacaagaatgacgtcagaatagttgcaaatattattggtatttatgagatcacatcgaatagtgaaacgcccacaaaatacagttcatcaaaagttgtaacacaataatagcttttacctgcaaggctacagcaatcagccacataacttttaagaaatttgttcgacaaaagattttggatcttaggaataataatttatataatttgtattttacagaaggtgaaaataagaaaagaccaaatataaaatccaagggccaagattctacagctggaatcctaaaggacatggagaatctagtagcatgtgaagaggtccaggagaagacgaaaaacccaacagaccataactcgcttcctgaaacagagggttctccaagtaatctcgtacgtcaatttcgttaccgttcgaagactgctctgttttcacgccgaggttaaagtcgaagtcgtcttcgtcggtgctgttggtccctgaaggaaagatgataccgttgagctgagagacgacagggttgattaaggctttgagctcgtcgatgttgtggcctgatgatccatgaaggaagttgttattattgtagttttggtgtggatcatcgtagagtagtgatgggaagttggttagggttttgttggaaggctctatatgcaaaggtaaggcttcatgatgatgatgatgtgttgttgagagtgaatggctatgaaggtagctgatttggttatggattaatccaacattaattcagtcccctgacttattgaacactctacaaatcacccattcctcctgtgaatttccaccaaaaggaaatgaacaccccaaacatgttattacacatctatataatgcctacaccttaagatcttgtttgaaatgtgagcctgacaaattgatttctgataatgataaatgtaattagaaaggtgggatacaaaagaaagcaatagtgatggaaaacgacacaacagtgtatcggtgaacagaaaacggcaaggtgtgtttggtgttgacatccacaccacacgtacaggtttatatcaaatctatcacatctaaactgctctctcccctgtcctccccatactaagccaaacaacatagtgacaatactattgaaacaaaacacatgaaatgggaaaaaaaaagttaaatatttcgttaaacctttcttttcaacttgtggatttaaaaagttaacacattaatggagaacaaaaacatcaaatttctattacattcgcaaagttaaaaagaatttaatgttataagaaatggacgtgtgggaataaaagtaacagggtttaaattactagtttcacacactagtagtataaaatttttggtttcaaaaagtcaactcataaattgacaagagaaaaaatacaaatttttttaaagaaagagatgcacgagtgagagtgagacgcacgagtgagagtaaaagagtgttaatttaccttacacgtgtggcggtgtgaatggtcgttttcgaggcgatactcatgcatgacccacttagtcttgaggccacgtggagccctacctttgtagaacaccaacgtcttcttcatcccaacaagctgtcctcctccgccggagaagacttccttatctttgccggtagctttccagtatccagcagtagttgctctgttagtcctcaaacctgtcggatatttcctgtcccttagactataaaagtaccactctctctctcccatcttcgccatttcttcatataacaacaatttcaaaacgttacacttttttcttgttaaaagatttatcaaaatattcaactaaaaacaagattccaaaataaaacttatgaggtaaagaagagacaaaatgtataatatattacctggtagctcccaaggttcaaaacggttgagatcaacttcggaaatgtgaatgccggagagaccaccatggaagattttggaagctaagtagaaggtaatgagctcttcgtccgtcgggtgaaaccggaagccaggtggcaatcctctctcgttcctttcttctccggcgagttcgcttaacacatcttccaccgcaagcatcatcttttacttaatataactgaaaaagagactttttgttacactgaagagacaccagaaggaagaacaaagatagcaatgatacaaaaggtgatgggaagtataaccttattgtgtgcaagattatatatttatataccaaaatggcacataaatcgaagatataatagagatagagagagaaaatggagtgtgtatgtagaggtatgtgtatagatgtgtggattttgagtgtttgaggttagaggagcattgatgataaaggctgtgaaattcagggagcagggacacaaattgccctcacctggggagtgagtctctttctatttttccctatgcaaataataattaaagtatatgacattctaaattgtaaaacaacttttcccgttttgtgtgtttatcactatactgctgctttagcaaaattcttatggtcttggagttttgattagactgggtgatgttaagttgtgatctttcgttaatgactactcgattggtcaatggatcatttacagtgttgtttttgtactttagctaactacaaatgtaatttatgataaatggtgttgacgttttggttttgggttttatgtcataatttttatctatttttcaacaaaagctgacatttttctcttgttagtttgaacaaaacgagagagagagctgtttaataaggatactgttttgggtgtatattagttgaaaaataccataatgcaaacatccatataatgttgagttttgcataaatacactattttacaaagaaaaccaaaactctagtgccctttatcatctcaataagatcattcttcccacgcaccaaataatgtgttttcaaggat

SEQ ID NO: 37531 - DNA, 5223 bp, Arabidopsis thaliana landsberg
ggcttcgtataaaaagatggatcttcactaatatcgaagacgtgtaaagtggaagacaaattaaaaagagagagcttccaaaggagttactttttctcaccacttcactatgcaattgcaaacacacgcaaacgcttatctacctttctcttcttattggattcttgcgttgttacgcgtcttcttagattcttcatcacttcactttcttcttccttctctcccattgtctctttttgttgtgatctacaacatttgctctcgaacccctaattcatctccttacccaaagccaccgacttgggtttaagatctgaaagctttcgacttttcactgtaattcgccgaattgagaatacccagtagccaaagctcaggtctttggccttgtgggttaaaaatttaggggtttagggttaagttttgttctgtagaagcaatggtgtattctagtggaagttggagagatgcgtataaaggaatgtcgtctgataatgtaaagggtttagtgttggctctatcttcaagtatattcattggagctagcttcattgttaagaagaaaggacttaagaaagctggtgcttctggtctcagggcaggtttatctctgctttttagttgctgtatcatcttttctcttaggaatttgggtttatgaatgtttatggatcaatctgtgtgagcttctcctgaaatgtgtgttgaaatggagacttatgagatttaagtagcaaaaattgaagctttttttgctgtttaatctggcaaaatcttctttgcaatggtctctaaatttggtggtgacatttgtgtagggtctggaggctattcttacttgcttgagcctctctggtggataggaatgataacaagtgagtttctttgattcttacatgtttcgtttaagacttttcttacctgaggtttagctgtgcaatgtggtgttggcattattgtttcttggaagattgtggtggcatttatggtagacacaatgtttgtcttttgttttgtagtgattgtgggggaaattgcaaactttgctgcgtatgcgtttgcacctgccattctagttactcctcttggtgcgcttagcattattatcaggtgtgaacaaactcgtaagtttcgcataacaaatgtgttttctaggctaggtactcttttacattaggtagtcctaatgatccaagttgtatattgagtcatagaggtttttattgtgtttttgcagcgcttctctagcacatatcatcttacaagaaaagttgcacactttcgggatccttggttgtgctttatgtatcgttggttcggttacaatcgtgttacatgctccacaagaacaagatattgtttccgttttagaagtttggaatcttgcaacagaacctggtacaaacctctctctctctctctctctctctctctctctctttcaaagctcaaagctcaatctggtaactaagacttatatgatagttttcgtgacacattgtgttttcttttaacagcttttctcttctacgctgcggctgtggtaggagcagctattgtacttatagttcaatttataccgctttacgggcaatcccatgtcatggtatatatcggtgtttgctctcttataggatcattatcggtacgtgatcactctataatcttacacgttgatacatacatctaccgtgttagagtgacaatatgcgtgactgattgcaaacaggttatgagcgtgaaggcgcttggaatagcgttgaaactcacattttctggaacgaatcagttagggtacccgcaaacatgggtcttcaccgtgatagttcttttctgcgtgataacacaaatgaactatttaaacaaggtaagtgaaagtgccaattctacacattttttgtctcctgtaatgttatgggatgaaatgcaggtttaggaaaattcatttcgggttctcgctttttgtaactggcaggcgcttgatacgttcaacacagcagtggtttcacccatatattatgttatgttcacgtcgttgacgatcttggctagtgtcatcatgtttaaggtattacttgtttctttttcttctatactccttatattctaaaagaaacaccgtgcaaacaaaacaattgaggccataaacaaggataagatctgtttgtttgtctgattattgcaatgcctaaacaggattgggatcggcagagcggaacacagatcatgacagagttgtgtgggttcgtcacaatcctatctggaacttttcttcttcacacaacaacagacatggttgatggagagtctaaaggaagtaagcatacattccgtttcttggttgtttgcaggatatgatcatttcaagctttgttcataattcgataattaacagcaaccaaaatgcagatttatcatcagaggaggatagtcatctgcttctgcgaattccaaaacattcagaagacagtaacgggtttgtgcaggatggcatcattctcagtctaagacgccaagagtctgcaaagtcaccacggcctgctcggcaaaacaagcaactggaagatgatcttgaagctgtaccactccgaagacaagagagttcattacgttcataacattgtttggccacatacgaacgtgtatatatataaaatctagcgcctaagagcattgcgtttggtatcattggctgaagagaggcggcattcttataggtggccgagccatttttccacaatatcttttgttgggttcttcagaaatttcatgtgtcacttgtttggagaaactgtttttatacacgtatatgtgattgaaccctgattatacccaatatcatatcgtaactaagtcagaaccaaactagcggtggcaacgctgaccaagggagaagaggaacccaaagctgaaattactttcgagataatcaatcagaactttatgagcaatcatactgatacaaactacaagcctacagaagcaatgaattgaataaaacattgagacgactgttaatgaattgaatcggactttctttctttttttcaattgaaacacctgtccctctctctcgtttcgtaaaatcaccatcacattcgtatacccttaaaccgggttctcacctgaaatgtgtgtcgatcttctcacaacaatgttggtctcagagaaaaataactgtggtgttttactcttactcacagtaagtacagccgtgatactatacagcattcaaaaagtggtctgttattgtgttgttgctgcttgtataaggtttcgcttctcctctgatctgtgacgaaacaatttggtgatttttctcctctcgcaatcctgaaagtttcacagaaggaaaaaagacatgaatttttcttcttgataggcgtttcattcaggattatgttatgaaccttatgaagataaatcgaatgatatctataagcatcaggcaggccaatgtggaatcgtaacagtttcatggagggttattggaacatgaatcttaccttgaacatgtgaagattaaatggagtgtcaggattcatccttgttaatttctggtaagtgtatgcaaagcttagctgatctcggggagtgaagcgctcaacttcgttgaaccaaagacaggagaataggtttgacatgggggtatgttcccgtacaatgaaagacccttctggaacatctgcaaaccgcagacacaggaggattatagtcacaaagtgagaaaagaaaaacatgaatgtattgaaaacatctattcgtcgaccattgcatagcttggaggcataataagcatttaacccacagactggaataacagatgacagcaatcagatacgtgtgaccaattttcacatgagtttcagacaaatgcacaccatcggcaaattttcaatgttaaattccacatgcactcatcagcctagtttcagatgcaaatcgttagcaaaaaaaattcaacctctttatcatgcttgatacgattttgttacttttcaactcacactggtatttgtttattgtttaccagtttctttctaatctcattcaccgtccatgttatgagcaaacacaggcagctatgccacatactacagaacacgctccctaagcagggttgtaatcatgtcttatagcagttatcgaaaagaacttactgctgggaagaagcttgtggggatctgaagcattgaatctcgtcagcccgtcagactggtaaaactcaaactgctgatcaatgacagtgtgattgtacttgttcagcttcttgttttgtgcaacttcttcccataggcaatggcggtcatagtgattggagatagcatactcgtgcccttcacgccacagaaagtattccaaaatgactagggggtccaactggagacgtaacttgctgtccaaccagattgagtacctaaagaacacacacatcggatgagtttctgttttaaattgtagagctttaggaaaacaacttccaacatcgaaactttaacgtattcagattttgactcttgcattttgtagcttagtatggaaactatacatatgctagacaactaatatcctctccagtagattctcattaatacaagacaactagtcgatctaactttggctaattgtatctgcgggagaatgttgtgctagttagacctattgaaacctattcctacgacatgagtctcaccttgccgaagtgaaaagtctgtgtggtaacagttttggtattttccctaccctccgcatatctgtgtaaggaagattcctcaccacaaccaacttccacagaccaacgaatccagctccgtcgggtacttggccttcggcagaaagtgtttgcatggtaatctcgtccacaaacacaacgaagcaaacatcttttcttgacaaactacttacctaaacgaagagagaaatcctaggttagcaaaagtaatgaatatagttttggtgatataagcgtgtaaacaaagaaaaccacatacaaaagggatatacatctattgcggatccttaaaatatgtgaaggctgttattgcactataatgatcccgccaaaatgaacgcattttaagctactaacaagtcactggaaccagaaggtagtgtcctgatgggcatagagcttcagagatggttgaattcatgattacagaaacacccatcaaacaaatttttcaaatgcctggcattcaactattcatgactcagtatttg

SEQ ID NO: 37532 - DNA, 2453 bp, Arabidopsis thaliana landsberg
gggtccactaaagaagtaaaaggcctcacgaaaggcccaagggccaataattcgtaaggtcattctttcgtgggcctagggaaagacagccaacaaagaagacgtgagactgattagtgcaaacacaggcggcccacaacgtcgaacgaatggatcacaacagagacccgactttcccgcgctgaagccctcatgcaaccgagccatgcgaggataagtcggcgaaggttacgtagggataaactcaagaggttcactatcttttagctacttgttgttatcgtatcacatgtactgctccacggccgagtatataaggcctagggggcaccccttcagatcgatcgaccctgttccacttagccacccacaaaaactctctgcgccatctatccagagaattctcttgtaaccacgctcatacactcaccaggacgtagggtgttacgcacttctaagcggcccgaacctgcaaacattttccaccgtccctcgtgcatctggcatgaaccaatttgctacagtcgtcgacaccgtcctactcctaaaaacaccttgaggggcatccccgggtgtgcggtcggacccaaaacaccgacagcagcagcaccctcggcgttaactacaccttcagcgaggtccgacctagcctcggacggcaacacggtcggaggatctccactctaaaggacgacatcagcaccacgcctgggccatagccgccagggtcttctcccggaatctggctcgagtaaatggctcggccggccaccccgaggcctcggccagctgtccctcgaagacatcagcccggcccgaggctcggcaactcaactccggcgtcggtcctgccagtggacgacccggccaggctccggccgaccaagtcttcttttcaagccaactctgcctctgtccgtgctgacaccgctacccctggcttcggctcatcgaagagcggccgaggggttcctttaactaagcaagagaagcctcggactgcaaggccgaccgagccgagggactcctacgcctccgggatacggatacctcactcgtcaccttctgcgataagtaactcgcgttcggataagtgattccgcggaccgaacaagtctttacgctcgaaagctcctctgccgaagcgattcttcgggccttctcgactgcgtcggtgacagaaccctatggacgggcaagagtgtgcgtaagcggcaaggctgaccgagccgagggattcctacgcctccgggatacggatacctcactcatcaccttccgtgaaaagcaactctcgctcgcacagacaattctgttaccgacgaaaaagtccagatactcgaaacaagaggaaaagaagcgcacctttacaacacggcgatggtgtgtttgggcctcggcggccgcagaaaacacacgctacaagataatccgatcctgcaggctcggatctcgatagttgaagggagcagcagcaccctcggcgtcgactacacctttggcgaggtccgacctagcctcggacggcgacgcggtccgaggatccccactctgaaggacgacatcatcatcatgcccggacccaccgcgggattcaaagacccaaagcaaaacggttgttcctcgaatggctcgcgcacgcgcaacggccacctcgcgaactgcccgctccgtcgcattaataactccgcggcgcgacaggaggcgcctctggcaggagaagcgagcgacgcttcgccttcgccataatgaccgcgtcaaaaaaggtacgccacgtcattcgatttcgtatccttttccttctcctctttctctctcttacaacagggaccgggaaagggggatacccgaaaaggatgcttctccgtgaaggaaacaggctccaagcctcccttactgatcagaggttcgaagggtggcacctcggaggggttcaacagccgcctcagagcactcggctccgcgcccactactgatcagaggttcaaaggctggcccctcggaaggttcaacgctgcctcaggccactcgggtccgcgcccactactgatcaggggttcgtaggctggcccccgaagggttcgacagccgcctcagacgcagagtgagggatgaccctgggtacgttcgatacataaccaaggctcgggctacactcccaaggtaccctaggacatttccgagaccaacgggaacgatcttgtaacggaatcccaccagagggaggcatcgagccctcggaccccgtcaaaaggggaccgggtccggcaaatcacccgcaggtacttttggagcgcgctccgggccactagccgacccctaacgaatggggcacgggcgtccactcggattacccgttagcaactcactggagacaccatgttcggcccctccgagggcaacatggcgctttcccccctccatcttgcggaaaggcgacgcaggggcatata

SEQ ID NO: 37533 - DNA, 2014 bp, Arabidopsis thaliana landsberg
tttttatcttctacttagtcataaacatgtaaattagtgcacctgaatatgttttgattttaacaattacgttacaatacgaacaactagtttgcaaactccagtttatgatacacatatctcagttatatatttttaaaaagactgttaaaatgtatatgttactccttagctagaatttaatagctaacgtttttggaagctagctttttagttcctgtcaagattttgacattccaactcccagataatgtaattaataataattccctgatttaaatatgttgacgatagctaattaagatccccttttcactttagttctaggcttctagctaatggatgtgttagtataataataatgttatccgagtgttagtgactctgtgttgtaaaattattgatatactaaaccatatgacagttcatcaaatggattcgatttaatttattttaatccaacaaaacgagcgataaacaacaaaacaagtagagtccaaagtccagggcacttgacaaatcaaatcacataatttgaactgttttaaaatctgacagcgacaaatacatatacgcaagtaaacatacagccacatatatagacatatacaccagacataaaaactaataatgttcaacaaaatttgatatagttattcttacatctataaagcctataaattgatactaatctgtgtgttactgtatacgtataatgtatacatatgaagtctatataattttcttaatcgactacaaattattaattaaatttataacgttaatctatagagtaacatgaatttatctgtctacatctgaataccaaatctacagtaatgattatacatggcatgtttttttataatgcttttgttttaacaatataaaaccttgattaaaagacatactgtataaaaaagtggcaactaacaaattttcctttaattaaatgaataaatgtatccagagttccagacaactattgagctgtatatatattgatatgatatattgtttgtttcatggtaccgacttatgttatgtaatctttgtttttggcttttggaatttctaaaaacagatgaactataaatttattattatgatgtcaaagtataaaaatgaaaaacaaaaacaaaacggagggagaagccatgtctaatgatgagttaggtagcgtcgtgactcgagctctgccctatcgcccagctcttcacaatcagacccatccttcgtccatgtgcgttttcttctctctactctactctactctatcgtattaatcacattctacactttaatcgcactatgtctcaatcaagtttagaaaagaaaaaaaacacaattttcacttatgtgttatgacaatagttaagtcatagttttgtataaagtttatttatgggacggccaaaaactgtaagaaagtcaaatatatttttctgcttataatcttaccgccttgattcatgctttttcactgaattaagaatatttagtttctaaatgacctttgtcacaacaaaaagtcacacttagatacacgcattttctatttgtaattttctttgtttggtagagcgaaacataaaacaaactaaataagctgttctcataagggatgaatctgattaattatcgagtttgacttgattatatgaaaattaattatgtagcggccatatatatgtgcattaatgaattagtgttgttgaaacgaaaaccttactttttgtagtttaataagttaaattatatctatcagataaagtcccaataaagttaagaaacgacaactatattacgaagagaaagaagatacacacagttgtacacaaccagctaacaaaattaattaatacttaatcatcacttaatccctaaactaatacaactatatatataagcataattataaagccagcccattcttctaaacgtctttctctctttctatttctctttctctttctcttgttcgtctactctgatcacaataatgggaaacaca

SEQ ID NO: 37534 - DNA, 3232 bp, Arabidopsis thaliana landsberg
gctgggttgcttgtagtcgatacgttaagtcgtatcatctcaaatgatccctagtagtacacaacatagtcaactggtttgtcatgtgttggcctacgaagaaatgtataccggccggatttcaatttataaattagtccttttttttttgtcaagttatcattgcatagccaagtttcactcggtcaaaatctaattaacaaagtctgtaaaacgttgaagtaattgtattttattaaaagaaaactccaaattagactttgattccaacgaatatttaacgacataaaaggcattgccgtttgttgaacgagttgtcttcttaccaaatttgacgctttccaactaaatacactcctaattttgcctattacctttttcctcctctaattaagtaaatgctaaatttcccccaaatactaaaaatcgaatccgataagtcaaaatcaaaatcgtacctacgcgatttatgcaaaataccggaaaaagaaccaaagtgcttattacaatcaaaagaccaaaccggttaaacaattagttaggctggcattaacgaacctctttgtctttaattagcctttatccgtcaccgccctgttaccataaccgttcaacgtcgacccgctctttgtttcagaaaaaaaaaacagagaaagacttttttagtgtttctttgtcattttcgttcctcaaaaaaaccttttcgaatttgacccttattgttatcctgattcttctgctcggttctcgccggagagaagacacggagaagagggttttcgaaaaggaggatgagaggttccaataacaccgatctatttgaccctaagacggagatggattccaatttctctcgccatggttcttcctccgaaggtgattttggtttcgctttcaatgacagtaacttctccgatcgtttgctccggatcgagatcttgggtgggccttcggattctaggtctgatgctgaaggatgtacgagtattgccgattgggctcgtcatcgcaagaggagaagagaggacaacaagaaagacaatggtggtacgtttgattccctatcggttggaatctcagattttgtcgctgctcctatgaactgctcttatgggcggcccaaggctttcgggtttaaatgtttaagaaacttataccgtttgcatttccagttgcgatttcagacattgtggcatgtgctgaagaacagattttaactgatgaacaacctgacatggatggatggtcctggtggtgagaatcctgatgatgaaggaggagaggcaatggttgaagaagctttatcaggtactactatagagcaacatccttcgccgacgctttagctgtacacaaaggagcttgtttagttctgagaagtgttttatttatttaatgtttaggtgatgaagaggaaacgtctagtgagccaaactggggaatggattgttctacagttgttagggttaaagaacttcatattagttctcctattttagctgccaaaagccctttcttttacaaggtatctaattaggttattgatggattttgcttttgctctcatgtgtaccttactcttttatccatttgtgttcttgtttctcggaaatgttgatagttgttctccaatggaatgagggaatctgagcaaaggcatgtcacccttaggattaatgcatcaggtacgccattgcaacattagctatgtgaacgtgttattgatttatcagactaggtacagttgtaccgttctctattagttccacagaatcaaaatatggttttgattttgagtttgttaaggtaacttgaagattcttagattgatttacatattataccctgctttgtgtgtattacagaggaagctgctttgatggagcttttaaactttatgtatagcaatgcggtatctgtcaccacagcacctgccttattagatgtgttgatggctgctgataagtttgaagttgcctcttgtatgaggtactgcagtagacttctccgtaatatgcctatgactccagagtctgccctgctctatctcgagcttccctctagtgttctaatggccaaagctgttcagcctttaactgatgctgcaaaacagttccttgcagcccgctacaaggatattaccaagtaaagcccctgaaactacatatccatgatattactgtaatcaagagcacatgagatggtggggagattcttataaggcatgtctaaactttcttttccaggtttcatgaggaggtaatgtctctacctttggctggaattgaggcaattctatcaagcgatgaactccaaattgcatcagaggatgcagtttatgattttatcttgaagtgggcaagggcgcaatacccttgtttggaagagcgaagagagattctcgggtcacgccttgcactctccatccgcttcccattcatgacatgccgaaagctgaagaaagtgctgacttgcagtgactttgagcatgaaatagcatcaaagcttgttctagaagctcttttcttcaaagcagaagccccacacagacaacgtagcctagcctccgaagaatctgcatccctgaaccgccgtctgatagagagggcttacaaatacagacccgtcaaagtggtcgagtttgagcttcctagaccgcagtgtgtagtctacctagacttgaaaagagaagaatgtgggggactgttcccgtcgggtagagtgtattcgcaggcctttcacttgggaggtcaagggtttttcctgtcagctcactgcaacatggaccaacagagctcgttccactgtttcgggctgttcctagggatgcaggagaaagggtcggtgagtttcggagtggactatgaattctcggcaaggtcaaagcccgcagaggatttcataagcaaatacaaagggaactacacattcacaggagggaaagcagtaggttacagaaacctgtttggggttccatggacgtcttttatagcggaagatagtcaatacttcatcaatggcattctccatctcagagcagagcttaccatcaaaaggtctacagatccttagtgaccgtttacttctcaattgtcactgtctctctttcctttacctgctgctaaatctctcgctctctctaacttgccttttttttcttttcttttataaggcttgaagaagactaataaagcttataaaagtaaggttaaaaacgttacgacgacaacgt

SEQ ID NO: 37535 - DNA, 2730 bp, Arabidopsis thaliana landsberg
cgaatatattagtagacacaagttgccttttcttaactagtggacttttgaagaaggaattgacttggcttgcttgaacgcttctacgactaggagataaatggttagcttgagagtagtactagtaatattaaaagaaacccttaaagaatgtatgtaacaaacttaataaaataaaataaaaaaaaataaaaaaaaaaaaaaaaaaagtcactaaagacctaaatctttcctcaatcttccctgaatcttgaaatcatcataccagagtcttggaatactaactacttaatcttaaccaagtggtcgtggtctagtggtttccagttattttaatagattttcagagaattaaaatagatttttagtactacaagcagctcaggttcgtatgtcgtattgtgtcacttttggtttttgtgatttttctgttctgaagctaacaatgtgtaaacttaaaaatatgtatttgcagatagattgctttgatgctgcaacactggaaatggattacaggattgtaactaactccattgtgtgtggctccttgggtgttggatttggacctcttgctgttggtccacgatggattgcgtatagtggaagtcgtattgctacctcaagttctgcaatttttacttcagaaattgtctcactgtcaacatcatcacccagtgttgcacaatttgcaagagactcgagtaagcagcttgcttctgggatagcaaatcttggagacaaagggtacagatcattgactaaatactgctcagaggttttgcccaatccgtatattcctggtttgaaaggcattggagttggtaatgaaaaagtagcagatgcagagagcataggaatggtatacacaaaatccttctcaatgtttttgctttcaagttgattttctccattggtatgcgccttaaccatattcatggtttgggcaggttattgtcaaagatatcacaaacaaaagcgtcataacgcagtttaaggcacacaagagtccgatttcagctttgtgctttgaccaaagcggcctgcttttggtgactgcttcgattcaggggcataatattaacgtctttagaataatgccaacaatctctacaagcagagctgtgaagacaacgacttttgcccatctgttcaggcttcagcgcggttttactaatgcggtaagcagagcccttcacttacacatgttgaaaaatgtgatacttatttagttaccttaatgtggattttcaggtgatacaagacatatgtttcagcaaggatagcaatttgattgtggttggttcttcaagagggacaagtcatctttttgagattaatcctgagaaagagggggatgctccggttcctatgtctgcaatcagtaggataagaagcggaaacagcagcggatggattgggactgtgagcggtgcagcatctgcagcagctggaatggttgcaggctcggttccgggtacagtcacatccactttctgttactgcgatgaaaagagtaacaatagctactatggttctgttgctgatatgtgctccaagacaaatcttctggtgtttgctccttctggatgtatgacacagtatgcgttacgggaacatcaggttggtgttggtcatgagactgttgcaatgacggggtttgattctgagtcaggtctagagacagaaggaaaattagcggtagatccaataagaaggtggtccatgatccaaaaccaatctagaagagagacgcatgacccccacagtgacatatatggaggtggaacatcagtggattctaaaagtaaagtgtttccagaggttgttagaaaacaaagtgttgaggaagcttggaaagtatctaagaaaggaactacccgtgtggtggataagcgtcatttgtacatatatgaagcagaacaacagcaaacgcatctgccgactcagctacccttatgggcaaggcgaaaggtaaagtttccttttttggggaatatggttatgtgttgtttggatgatctctcatacttcgtatattttgcacaaaacagtttaggtttcaagaattggtattgaatcggggtgaagagattagtggtggaggtggaagggagatggagattgaaggaatccaaactcgaactattgaagcaagaacaagagatttggttccagtctggggttatctccaatctccaaggtctcagcaagtgataaacgagtgagttttctgatactaattatcctcgacacttgaaagtttttgtctctgtctctgtcacagtttcttgacaatgatactatgacacagatcaatacagagtccaagtaccactacacaagatgacaaagtggctactctggagggtcatggaacagagactgatctcggtgctgtacatagcgaagaacagacacaaagcgagcctgtagataaagaaggtattgcagaggagaagaatcacagtgaagatgaggatgaagagcaagtggattagaagattggtttattttttctcacacatactcgacttcaacaacagaatagcaaaaaaataactctggaaaattgtatagaaaagaaaaaggaaaattgacatatcttttagatgtaaatagctttagtactttttcttctttttttttacacaatattattagcccattgattcatgaacatagataaaaaaaaaaatacattattttactaccaccttttgtattcgagtt

SEQ ID NO: 37536 - DNA, 3526 bp, Arabidopsis thaliana landsberg
gatagaaaccatgagttgtttctttttgttgactatgaaatgctagggtattcaagcttcttcactctttgagaagtaaaaaagaaaatctgatactgacgttaaatttgttatagtttcagatggttccgccgctttggagaatcatatgtcaaagttcctttcctgggtgctgtctcatacttgactctggctatttgtcccttttgcatagcatttgctgtattttgggcggttaaacgtcaatactcttatgcttggatagggcaagatatacttgtaagcgcgggtttccatctctctctcttaactgacctttcttgaatccatgtctttctacaagtatacctactgttaaatttccatacaaggctaccatgtacataccttcatgcatatgtataagtaattggtgttaggttgacctatctgtagtcttaacaaataacacaagttaacagcttacttttggtttttcttgctgacagggaatctcactgataatcacggttcttcaaattgtccgcgtaccaaatcttaaggtattaccaattccttatcaaatgtcacatgggattgccgttacaatcatgagggcactaaatatcacatgttgacaaacacctttagccatctcgtaccagctttgttttgaaccatcacttttcctgtgtatatattctgaatttgtgctctaacatgttgaaaattcaactgtctaaaccaatcagttgaagactgaaaatttgattgctgctggtagacggatacaatcatttctgccaatgtatagaagaccaatctctataataacaatattagttatgatgactcattgaactcttacgtaaacaggtcgggtttgttcttctcagctgtgccttcatgtatgacatcttctgggtttttgtttcaaaatggtggttccgtgaaagcgtgatgattgtggtaagtttttcttttttgctccagaccatcatgcaagaagactttgttagatattccaactacacatacttatctgtctgctccacactgatattatcggagaattgtacgtcttttcccattttcccacatataggtagcccgtggtgacagaagcggagaggacggaattccaatgctactaaagatcccacgaatgtttgatccttggggtggctacagcataattggatttggtgacattatcttaccaggactgcttgtaactttcgcactgaggtttgcactgttacaatctcctcttgcgctctctcacattattactatatcaagatctcaactaaactgagttattagaagcatacaaaagtatgaaatgatgcgcaaatgcggatatcaatgtaaatcaggacaacaaaccaatagaggtgctcagcgaaaacaacaaaatgtgaagatagttttatcaaaacattaaattcaaacactgggtgacgatgatatacctttatatccgcatttgcgtatcatctctgacagattcgccagacatgtcgcatcgctgtctaatagcaaaacacaaatatcatttgagaatctctctgtttcttcagtattttccatacgaaaattctcttcgtgattgacaataaaattaatgctcatagtcagaagcctcgtagaagtaccgaagacgagagacttaatcgcataaatacacgcaaagcgacttttacaagccaaaagaacaagaatgaggggaaaggcaatctaattggaaaaaggaattcgcaaatgtataaagaagtaaatctggacctggatacacttcatgcaacaacgagcctccacgtttcaccacacgctgcgttgcaacagattctagtcaaaatcattaaatcatttaaacaactaccatacatagagatagccactgaaatgacaagtacttataaatgtgttcatcacatcgatgcagagcagtcgccagttcttttattggtcaaagatgcaatataccaaagtatatgatattcagttcatgcaggattggacagactgaaaatctatcagtcaaacaaatatatcttgcttatgtatgcttagtaagaactttaatcaaacgagacacttcacactcacagttcgtttaaccaaaaaatagcagaaatttattagtaaacaaagctatgaagacaactccgagtataaattgtgcaaagaactcttaagaaaccagaaattgaatgcaaagatgaagagatcgtgcaacacaatttcaagcttgcgacattttttctttttagttctcgcatttgctgacagtagcaatacgcagagagcataactatggcgatgagtcaagcattattagctttcagaatgggctcatgtcatcagtgtcgtgagttcattctgaaagctagctattttgacacatcaaagattttgcagcgcagtgtgtgttcccagtgaatagttatgctgaagatatgtctttgcggaaatgggctggatatgagtgtatacatgttgatgctgtttaaggatttatgttcacacttatagcacatctatagcaaaaacaataaacaaagaggcaaaagtagagttacagacagggccaaaaggcaaaaagaaggactaaaaatcattacctttgcacagtgattgctcagcttcacctcaaaaggcagactaagtcctatgcattcatctcattcacaagctgtcaacatagtcatcatgatcatgaacctaagattcattctcttcaatcagcccatcttgttctacacatgattctgctggctgaccatgattaccacaaaatcctatgcccatgtcctgtagtctgcacgaagcatctcagcacatttatggatgtctttcacgatataaagttgttacggagaaacaattgcagtcaaatagaaaatcgcataaacacaagcatctggatgaaccttttgggtttcggtgatgggaacttgcagacaaacagcaacgtagccttgatcacacaattagccccatagaggaggtatactgtcagaagtgataggaacattcacatggctttcaccgtttagctgagaacacaaccaaaaatcagaattactcaacagtcaacatgcagtgtaaataagaaggtaagacaaaaggctacacagacaactttcggtcatctgctcaatacgtaacacaaaagctttttaggtttatcaacaaaaacaaagaaaacgagacctcattttttaccaattgagataatttttgaaaaaagtaaaaaccatttattagcagtaccgactttaatagcatcgccaggtctctggatcttgtgactagacacaagaactgagtatagcatagctccaacaaacctttttgagtttcaattataaaattataaactaacaagcacataagcagaagctccaaatcttgctacacgtagagcgaaacatcctaggtcccacatattttgtcttattctctaccaactaacttaattatatattaagcaaaaaactaagttcctttctttctctaagcctgtcatcatcttgagatc

SEQ ID NO: 37537 - DNA, 3719 bp, Arabidopsis thaliana landsberg
  unsure (1)..(3719): unsure at all n locations
aagtatattatacccttcataaggaaggattccaagtagcagagaatgtcaatataacacaatctcgcatacatagatatatagtttaattattaaccacaactattcattcacttatttatgcatttgtaatggacaacccaagtagttaaatagaaatgtttgaacacatttatgggaaacttgtgacttcatattcatgctctattttcagaggagattccttggaaacaggccgctctttagaccatagctctaagttaacagttccacagtcccagtggataatacatttgaagacctgactaacatcgaacctgtttaccatccgaagattgaggctcttgtccaccaacatccatttccctgaaaaaaaaaaaaaaaaaaaaaaatattgttgcccaaatgctacatgatccatatgtttagtatcatgattaaagtttatcagcatggaaaggttatccgcaggtttaaagatgctaagcctcctctgctggttttttttttagttcttctctactgttaggcttgagtatcacaaccttctacctatttgggctattgattaaaacattgagggaaatgtgaaaaagcctaaaggtacttaccatgtggaaggttggtcccttcatatatttggtctccagaatctggccaaacttcatgctttgaaccatcaatcgacgtgaaagagacaaacgattcactcggatgcaaaagagtgaaagttggatggactcttaagcataccagcctgcaacattaaataaccagcaccaaaaaaaacatcattttgcagacaaaagataaaaaaaggacgggatttccaacaacagaagaggatatatgcatccatatatcaagtacgaggaataaaccaacatgcaacttgcaagctcccaacctcctaacaattttatgcaaaaatctacttaaattacacaacaagattgctatagattggtttcccgatgttctactacagtgatgtaaaattgcaaattgtcttgggtacttcaatgcgtaaattctctctgttccttaaactcttgcaaaagcatagacatagtggaagaaaaaggaaagcttgaagcaagtagacaaaccttgaaaatccaccagaaccagcaccaacactacgggcttcaatgctagaggcaatccggaaaactcgttgattggctttagctatacttattttacgccgaagaaccagtccaccacctacatcaccttctaggatcagagattcttcttctcctgcatgctccaaatccctcctacaagagatagaacaatcaattcagtaacagaaataaagacaatgcagaaagctgtgtgttcatgtcaacattcattgcatgcatgaaatgtgcttgtacgagagagattgttaaagtaaactcactcaatgacattgtattcctcagtacatccagctgaccggtactcagtaccactatactcctcataaccattgatatctatcctgctatgaagccattgaattcctgcaaattgtaatcaaccaaaactgtagtctctgcacattctaaatccaatatggacataacaccgtcaacaatcaagcatgagcggattcttggcaacacacaatataaataacatagagatgtcgtctctctcagtatagaggctgagattgtttacttcaaagaaacagaacatgtgtatgtctctgagcatcctccacaaaaatgttgaaattatctcattcataagagattttcaacttttcaagcttaatagtacacggaaaaacagtttttcggtatattacctgagggaacatgtgtcatagacaatatccttccaccaacccagggaactatattaagctttcaatcaccactgcttaactcaactggctcctttgaaagttccattcccttttgtccaggtaccacttccttctcaggtatcagttttgtattttctacatttcaataatacacatactcagaaagaagatactctgcattagtgttctgcagtatgcacaggttcatggaactaaagatcttatccacaggcaggagctgcgacttggttaacacagtaattaatttatgcaaattaaagttgaatgtaactagatattacagaggacttgacgaatgcagtgaatgaacagaagcaatacatctcaataactacaaacctgattatacaagtagctaaatacatatatagaagatgagatatatacccatatgaagtttaaagcgctcattgcttgtggatattaactctgaaattccactttctgaaggcaccttaatgtggataaactctccatccattccccaagcatcaagctgttcaacactatctagaatcaaattttttgaacttatagttccactatgttactttaacaagagaaagagcagtaccattgcaccgcctcctagtaataattggacatgaacacggcggtttggcctctgccagtctccttcagtttttgaaaccttgacggtgacagtggaagaatcccgctcagcaatgtagtgtgtaactagaaatcttcctttagtgtagccatatccatctccatcatcttcgaacaagagtcctttagctttccctgacagagacaaacggaagtattatcctgattactacgagatttagaatatgaacataaaatctgacaatgcaatcagtaatcaccaaaagagttatagagcttaatacacaatcatgcgcgtgaacactacaacataaattccaaaaattaattgttacattatgatttattcactttctcgaaatgtcagaaggaatgccaaatttctgttgcattatgatttattctctttccacaagtttcagtaacataatacctgtgacctatctaactatataaataccttgttatctgatagacaagttgcaaaataaacgaacagaagcagagtagaacgaaataaaaatttcagatcactgatcgcctctgtctggatccaaagctaagcttaccattttcatctaatgacacaagtagggtcaagtcatctgacagactaaactccccaacatgcagatgtggaggagccaatgatatgatggatcccccttgtaaatataaagttggtaaatcctgacaccatgaaacaaacaaccaacatgtgaaaagtataaaaaaaaaagtgtaaggtctttcgcaaagaatgaagagacgacaatcacaactcttagcaaccataccggatgtgaatctgcaaaatcaaacctatgccaaattcctctcggtaatatgtgctgcagctcatgtgatccctgactagacaaagtgctagacaatgatagaaaaaaaccaaagacaacttgatgagtataaatgtttggcagagtaaactatagagagtataaggtgaataattattcagttgttattattaacgaaaagtttaaattgcatgagcaaacctcataagatatcaatcatcatgcacaaacaatagttctagttacttcaacattcaaaaacttctacatcagttgttccgaaaattcatcaagtggccaaaatcagaacacaaatcacatgacagagtgaagtcatgaaatttgcaagctatgagtaagggaaagcaatgattctgcaaacttcatgaaaatcgcaaaatccatntagttgtttgagtgggaaactaaaaaccctgcataaatcctcagcgcgcccccta

SEQ ID NO: 37538 - DNA, 1689 bp, Arabidopsis thaliana landsberg
taaagatataaaagaattggcttttattgacaactttttacattgtatatgtgtaacaatctttaattaaaatcactatttttgttttcaaggttataaacaatcacaatggtcacctgatggattgctcaatccatcatttcgcacacctttgtgtaaacggtgtgcttgaaaatttgattcgattgcttactcttgagaaaaacacgaaagttctctcactttttaacaaacatggtaaaggtaagagatccaatgtgcttcggcttcccgcaaacactttctcgcatccaaagctcgcaacacttttcctacatcgatacgattttgtaaccgcacatgccttcaaggagtgtcaaaatctgaagattctcaaacttgagggaatcttagtcgaagttgatgtgttgaacatagttattgcatcgtgtccttctctcaaggtgcttgcgctaaatgccatgtggtacaacgaaaagacctccttgaagattcataacaataacattgaggtcttgcatttggattgtcctcatgttgattgcattgacgtgtctgcagctcttctggatattttctccattttctactttacatttgctagggaacaaaactttgtcatcaatgcaccaagacttttgtttaataattggactaaatacttggagagagtgccaaacatgaactataatattacatctcatgttcaggtacaagtacaagcacatatatatgtatagaaaatggtattttatataaagttatgttggaaaataatacgtttttaaaacataatatgaaaagtagtacatatactattcacaattagtaatatagtcggttttgattgggtgagagagagagacatgtggggcatatttagtcggtcaagtttttaaaaattttttttctttattacacattccctcaatgtttaataactaaaatgcttattagtaaattttatttttctaaaattgatcatataaataaaaatctatattttttctctatcatttgatatgcattttgtttaatgatttttaaattttatattataaagcattgtacagatatagatcattgtacagatatagaccgctgtacaaatgtagactaatgtacagatatgcaccactgtacagatatgcaccactgtacagatatgcaccactgtacagatatagactattgtacaaatatagatcaatgtacaaatatagactattgtaaagaatgatgtatctgttaaacgaagtcataatttactgttaaacgaacaaatatttttctcaaagttttgatggtgtaaccgaagtctgtatgagtctttggttttgtatcttctaacaaggaaacactacttagacttttaagatccgtttgcggttctagttcttatactcaatcatacacatgacataaagtcatatttgtctccaaaacagtaaccgagcttctttatgcttcacaaatgttaaacgaacaaatatcttctgtacatatgcatcattttgtatagtggtttatatttgtacaatagtctatatctgtatattagtctatatctgtacataggtttatatctgtacagtgatctatatctgtacactgccttatatctgtacagtgatctttctttacagtactctataatataaaatgttaaaattattaaacaaactgcag

SEQ ID NO: 37539 - DNA, 2256 bp, Arabidopsis thaliana landsberg
  unsure (1)..(2256): unsure at all n locations
agataaagtaaagtttgcatttttttttaaaaaagtttaatttgtttccgaaaccgaagaaaactgcgacagcgaaactaatttatatgatttcttgaaaaagtagaataatttgaaatgttaagatgaaaggaaaataagaaagcaaaaatgaaatacaaaaatgttcataatcgcttgagcacaatcaaaagtgatggaggctagaattatgtaggtggcaattcaatataagaagatagaattttaattttaaaaaatccaaaaaagtttgcattgatatgtataatttaaaatatatatcctttancattaaattttttaaaaaattgaaatgtttatttagagttcatcatattttaacctcgtcaatacattttggaatttgagcatggttaaaattagcatcagagacataatagaatgaatcaaaaaaataagtacatttgacaaaatagtgcgtttaattntatataacagtcaaaagaatagtcttacattatttgattgtgtttgattacaatatatcacattaataacattcacctaataaaaaaaaacaggaaaactatgaaataaattgtaggaataattatttgatagtaacaaatcagaacaatattgccacttagttaagttcaatctcattcatttccatctaacaaatttgcagtctataatttaacaccactttcccgaagaagtaaactcatcgaaccactttcctattagcttgtctttactttattggaaaagtcatcccacgcctctgttttttcattttatacctttataaattcttacgtttgtagtgcgttttaatgtcacctttgttttattatgaatagcttaacaacagttaacacttaaaacatgatgcgattaacctatattgtaaatccttttttaatctttattgttcaatacaaaaattcaagtacgtcaaatctagaccgactaacattttaaaaatatgacatataagaaaatgtcggaaagttgaaaagacgtgtaatttgacaaggtaattaactaatgatatacgtaattaggacaaataatatagtgattatcaacaagatgttaaataatggttctcaaggcagacgattcgtcggcgttagcttgaaggcctggttaagctattagctgattgacgtgaatctccacgaccacacaaggaccagtcatcttatgcctctttgtacgtgtgggactcacttgtctcccccatcgagttctctctcataaattccatttttgtttaatttaactttcatctttttaccaatctcgtaagtcgtaagtaaaacaaattaaacgataacaataattccaccaaaaaaaacatcatcttcccacaaatctcttaaatcgtaaggaaaaaaacaaatcaatatcaaaaatgacgttaacatccaaataggaaccatactatatacgtaatatgtgtatctaccaatctctctatgtaatttgcataggatttgtcatttgtgggtcagtttctgttttttctcggtccgcgatcaacgcaaaaatatacagttggagggtgaaaaagttaaacgagttcgaggataatatcgatgagagaatggttggttataatacatacatttgtgattgtagaacggtctaattatatttgaagccgacgtgatttgacattagtttgtgcacaaacaagatacgtctctaataatattaaattttatttacgtatcagttgaccttgaggcttcattgtaacaagatctatcgttttatgaatcttcctcacatatctaatactttagttgttagttacttctctttagagaaacaagaaattcatattttactactattttctatttgatttcacctttaattactgtaagcttttatcatggtcgtagataacaaatgaacatgaaaggaaaaaaaaactataaacaaacctaacaataagaagagtgttctggatatatgtgagccaatgtcatgttttggctatatattatatagtagaataatactagagtacttcacattttactaatcatttatccttcatacttgtatactacctgtgttataaatatccgaatgtacaataagtcaataatgaggccatgattatcctacaaatagatatcacatacatcatatttgaaaaagaagcaattttacagtatccttttccattattttgtgttctaaagatgatttttgttgagtgtttctttattttttctctgtttattttttttt

SEQ ID NO: 37540 - DNA, 6077 bp, Arabidopsis thaliana landsberg
tacctgctgcattgatacgtcagcagtcacaaacgaatgggcaatggctgaagcgatcaagctaccgttagtgatgcgtgaaattcaagaagaactcgataatgtcgtaggatcaaatcgaatggtcgacgaatcggatctagtccatttaaactatctacgttgtgtggtacgagagacgttccgaatgcattcagccggaccattctagatccctcacgaatccgtccgagcaacaacgatcaacggctactacatcccggcaaagacacgtgtcttcatcaatacacatggattgggccgaaacactaagatatgggacgacgtggaagacttcaggccagaacgacactggcccgttgaaggtagcggacgcgttgagataagtcatggaccggattttaagatattgccgtttagtgccggcaagaggaaatgtcccggagctccgttaggtgtgacgatggtgctaatggctttggctcggctcttccattgctttgaatggtcttcaccgggaaatattgatacggtggaagtttatggcatgactatgcctaaggctaaaccattacgggcaatcgctcaaccacgattggcagctcatttgtacacataacttgggtttaaatcgaataatattagtatttacattggacatattaatggggtgtctgctaccatattaaaatattaagaaaattaaaatatgacaatgtctttaaactagagacattcaatgaaaatatctatgagaagacattatagtgaagtagatattctatttaaagacaacctcatatggtaataattatattgtagctttttataataatttcttacgtgggaagacatacaatataatagcgcaacgtggatggcctaagaattcttaaagttcggttcgaccggctaagacaaatttcggttattgatttgttagttttcttttaccggtttagcagaaccctacatacttgggttctgttcttgatctcttgtggtgaaataaaatgatttcgacgctccgtcgcgccgtgtttctccgtcgatttccggcggtggtttctccgatcaaaagggctttcagcagtagaattgacgatgaattcgatccccaaatcatgaatataaatgagctgaatcaggtttttctcactctctgtctgttgttttggttttttctttttctcgtcatgttgttttggttttgtgtagctcttagtagattcaatctaattaatggttaaaaagagttcgttgagaaagtagagaaattgatgttaaatcagtgatcttgattctaccaaaaacatttgaattggtgtttcaggagatgcagtcaatctttggacaagaaccctctcccgatggtcctgggacaatggatttctctgagttgaaatcatccaaaatcgaacctttgagatcgaagaatattgattttagaccacaaattgagtatcataaatctacacactcgagcaagaatgattcgcaagctatagaacaatatgcaaaagtggctagtgatatgtctaagctaacacatgttggtatcgcaggggaagctcaaatggtggatgtttcttctaaggacaattccaagagaactgcattggcctgttgcaaagttattcttgggaaacgagtatttgatttggtcttagcgaatcaaatggggaaaggagatgttcttggagtggcgaaaatagctgggatcaacggagcaaaacaaaccagcagcttaataccattgtgtcataacattgctcttacgcatgttcgtgtagacttacgactaaaccctgaggattttagtgttgacattgaaggagaagcttcttgcactggaaaaaccggagttgagatggaagctatgactgctgtatcagttgctggtttgactgtttacgatatgtgtaaggctgcttccaaagatatcagtattacagacgtgaggctcgagcgtaaaactggtggaaagagcgggtcttggtctagactctagaggggactgaacacattcaacatgtgcctctgttgctataaaggttagctttctttatcttatttggatgcttgggtgatatctcttatatggaaagatggaaacttttgaatctcgattagtcaattaggcactgtgaaagacactatagttttgctcacaatttgttgcttctgctgttttagtttgggtactctctaagaacaaaggtgaaatattacctattgatgcttaagagcggattgaaactaccaagtttgttctttttagtatttattcttgcaatgggttatgtggaagaacacacataacatctctcttgaatcttgttataattagatcatcacaacactattaaaagggtcagataacatagtgtttatatgtataggtatataggttatcatgtcgatttgtgaatctttttgtatgcatatggttcatgttacgaccttggaatgatgagtgagcactaaacatatactaaagcagagaaagctagaaagtgtgctaggctgtctctactggccaaagtctctttttttcattctttcttgtagcttttgctttcttgtctcctctaatcaaatactccatttcgagatctctccgtctgatttcttaccaatgtactaatcattaatcaaattggaactacgtgtagcactatggcttgtccgaaccagtaaaaccggctgagaaaagatcctgtcaacgaaccaaccggtcaagtacggatttctttaattgtaaagttgggtacgtgtttatgaagcgaacgtgtttgatagaaaaaaaatgaatgcttgcaactgtgaagactgaaaagtcatgatttagtgttgagacttattcaaattattatgtccacattctttaaacagtgtgaagagagagattggtgacagcattaaattggtggtcacacataccaatatcacaaaatttagtacttgtaccccataaagaagagggtcactatattcaattattcatgttttatgatgtaatatactatagtagatgttaacatatcgaagcattgaatatgaaagttccaaatcttgatggtcattatttcgaattcttgtgggcgaataaatgaaaagagcgtttgatgatatcgacattctaacaagatcgtgagatctaaaggtcgtcgtgatgatttagtaataagataaaaaagtcgtagcaacgtttttttggtttaaaatgtaaaaagaagaccgtgatgcattgtttgtaatgtatacatgaataaaataagtacttatttaacaacgtagtgtattagattatctttcgtcatgtatttgcatgtatattttcccccatgtggaatgtttcagtttgtgttatctcaagagcgaaaatgtgccaccaattgtggggaaattattgggcatcattaattaactactagtagtatataaaacgagcttttcacttttcacaaaataattaaacggagttaaaataagcaaattatttcatgacgtaaaaaaagaaagaaaaagaagctaccacaccacttgcatatttcttaagtgtctgttatccaccgaatctaaaatgtcgcttttgcattcccacaatcttattagatatttgtattcccagagtaaaagtataattcaaacatttattatttattattattataggaattgaaagaaaattaaattttcaaaaagaccgcttacttgtttattatatacacagagaagagaacaggctcactcgccactttcctcgagaaaacgaaaaaaaaagatggtaggaagaagaaaagctttactcttttctctctgtttcttcttcctctctcttccttccttctcttcccttccatccttccaaaccctattccccaattctcattcccttccttgtgcttctcccgtctcattccaacccgactccgactccgactctctcctaggatccgagtttgattccgggtccgactccgagtcttcttccattactcttaacctcgaccacatcgatgctctctcctccaacaaaacacccgacgagctattcagctcccgtctccaacgtgactcccggcgcgtgaaatctatcgccacactcgccgctcaaatccccggaagaaacgtgactcacgcgccacgacccggtggattcagcagctcagtcgtctctggtctctctcaaggaagcggtgaatacttcacgcgcctcggtgtcggtactccggcgagatatgtttacatggtgctcgacaccggcagcgacatcgtctggctacaatgcgctccttgtcggagatgttactctcaatccgacccgatattcgacccgagaaaatccaagacctatgccacaatcccctgttcttcacctcactgccgccgattagactccgccggatgcaacacccgtcgtaagacttgtctctaccaagtctcttacggagatggttctttcaccgtcggcgatttctccaccgaaacgctaactttccggcgaaatcgcgttaaaggcgttgctctcggatgtggccacgacaacgaaggtctcttcgtcggagccgccggtttattaggactcggtaaaggtaaattatcgttccccggtcaaaccggtcaccggtttaatcagaaattctcttactgtttagtcgacagatccgcttcttcgaaaccttcctcggtcgtcttcggaaacgccgccgtatcacgaatcgcgagattcacgccacttttgtcaaacccaaaactcgacactttctactacgtcgggcttctgggaattagcgtcggagggacacgtgtccccggcgtaacggcttctctttttaaacttgaccagatcggtaacggtggagttattatcgattcgggtacgtctgtgacccggttgatccgaccagcttatattgctatgagagacgcgttccgggtcggagctaagacattgaaaagagctccggatttctcactcttcgacacgtgtttcgatctctccaatatgaacgaggttaaagtaccgacggtggttttacatttccgtggagctgacgtatcacttccggcgacgaattacctgatccctgtggataccaacggcaagttctgttttgcgtttgccggtacgatgggcggactatccataattgggaatatccagcaacagggtttccgggttgtatacgacttagcgagttcccgggtcgggtttgctccaggaggatgcgcttaataattagatctgaccggagccggtacggataatgtacttttgttttctcaatttaatgcttagacttgtttttttttttttttataaatcggacaagtgaatctttaagcggtggagttgaatacgtgttgataaaatcttcacgtgttgtcggctgtattattagtatcgtctttattttacatctcggaccaaagagagcgtgtatgattttctaaaaaattggcaattttacttttagttatccaacaaatgacaactgcggaaattagttagatcaaagattattcaatataatttccaagtcagacaaatctgattatctgaggatggtagagtacgtctataatagtataaattaagatagattttggtaaattactgtttacgtaatacatagggcagatgaaaaattgtgttggagttgttaatcagacaaaaacgaagattcagcgcgaagatagagacagtgctcctattacatactcctgcatgcactgattacttcatttttttccttgtttattttcaagcactttattggtttaataatctactttagcacctaattacattgaatacgtgttaacttgagcttagagtcttcatatgttacttagttcattcgttatgagtttaaaaccctctcactcaacctgtactatgttttgcatagttggctaaacatgagatatcttagcagaaactgagaacacttgtcaagttcaacatttgcggatatacaagtaacgaaaaacaacacttgaaatttaatgaaaagatgctagccagtataaaacattaatgaatataacatctaaacgtaacacaccta

SEQ ID NO: 37541 - DNA, 4341 bp, Arabidopsis thaliana landsberg
tatttgtagaatttagtatgagactagaaattccgatgaatttaatcacagtgtttttttttcgtaagatacgttacttgacatagatttttgaaaaattatagccaccagattcaaaataaatagattataaccaagcaaaaaaattttttgaatgaatttgggaagggagacaaattaattgtattgtattaggtagttgcataggatgagaatcttaactgaccaaatttaatcataagcttcgtcctcttttattacgtggatttagctgttccaacgttcatccacatttggatctcgtgaacctcaagttaccaacttcttttcacattgctttttaaaaatatttgtttttaattgtgttttctttcctacgaaaatgagagacattcgttttatgcatatacgatatatttgtgtatacttagactgaaagatatgaaaagattattcactaatgatatgagtattgtgccacttctattaaaaagtacaaaagctacataaatatgatatcagcaatcgcctttggcatgatcttaaattctcaattgtatatgaatctacgatccagtttccactagatctaatgacgacgaccgacgaactaaaagcaactttaatctttttcaaataatacaacaaactaaaaaagagctaaatgatcactatattatagagatgagagataaatcacaaaactatagaaatatttatagacgactcgaggtttaccacctaacaagtaatataacatgttgatcagtcctaaatttgattcacaaaacgactgaattcatctatatgaaagttataatcatgtagtcaccttaaacaatcaatgaggaaaaataataaaaaaccaaagataaaacatagattctttgagttttagaaactctcaaagcaaagaggaggatggcccaaaaaatatctcccgccacatgcaaaaggaatgattctttctcgttcactcggttttgaaatgctatagcacgtgcgacgccaactgttttatcacatatcatgtgtggagtacaccgttacgcacgagtgcggcacatgcgacatagacattttgttcttagcaaatacataccactatagttgaaccgtcaatggtcaaagccttggaaacatgaatcttcggaagagtctctttgttttcatttagttccttaataattagctactcttttcatgtttggcgtttttatgcttcaaatcagttatgaaaagtttagtcatagtcgactaaattatgtctcactaattttgtcacaaaacgattcaaaaatgccataaatcatttactctgcctccctttagtttggctgaaaagttaagtactcgatacgtcctttagatccacagttttgttaaattaaaacgatataataatcttcagtggaagaagagcaaataagtcgttgtagtatagtggtaagtattcccgcctgtcacgcgggtgacccgggttcgatccccggcaacggcgtttttttaatgttgtcatatttgtttttatgttagtccctttgttttcagtttctttagttttagtcccacatatttcaggtttgtttgttttagtccttctcttctttatattcaacttcccaatccgaggcaaagtgaaatcacttaaatagtttactttccggttccgttcttaaaccttccgacgaagctccggtagagaaaacctctcttcacctctcccattctcggcagccatgtacggtggaggtaggttttgcgtcctctctaaaatctctctctgattgtacaaattcagcattacttctttagttcttttccttttcgcttgagctcgtctcgtaaaggtgtaaacttttccttggtggggttacttatatattgaacagaagaagtgtcagctatcgtagtagacttaggttctcacacttgcaaagctggttacgccggagaagatgcccctaaagctgttttcccttccgtaagtctcattctttacttcctctcttttcaattggttaaagttaggtccttttagtgtagagcaagcaattcgagaaatttaggttttttgttgttgctgttgttgatgtgttatataacttataaggtggttggagctatagatggaaatggaatggatattgatgatgctgcaaacaccacggaggatgcaaaggagtctgataaagaaaaaggcaaaaggaagctttacacaggatctcaagctttgaactttcgccgcgatcaaatggaggtcagttttctttgttaaacttcaaaatggttagggatgaagataaattttcaggtctctctattagttgacatttgtctgttccagatattgtcacctacaaaggatggcattgtaactgattgggatatggtggacaatgtatgggatcatgcttttaggtaatttgcagaatctgttagtttttgtctttaactgtttaatctttatcttttccatttatagttgattgatgatttcatctgtgtaaatgtttattattcaaggaattgtctaatgattgatcccacggagcacccaatgctacttgcagagcctcctctgaactcacagcagcagagagaaaattctggtttctctaccttttatcgatgctgagttcatcttggattaggaacagattattctggtggaacatcatcaatgcagtaattgaaagaacgcctcgagaaagacttggtagaagtaaggtagtatactggcatcgttaggctcattccagcaaatgtggttctccaagtctgagtaagtaacacattggattgctctctagatctcgactcacgtataaacagtgtcttctcatcgctagggtttgagtctttttgtgtacatgacaggtatgcagagcatggagcttcttacatccagaggaaatgcccttaaaagctgcttgagatcaagataacgagaacctttggagacagtcagagggtttagggattaagtaattagtatcttttcatttatttaggcaaatattaaacacttttttattattattatgaagctttagaaatagcttcgtataatataatgtttcaacgttaacatacaacaaatgtactatttttctaagtgaaaacaaccacaaatgtacttgtgtgtttgcctgtttggtaaatccaccttctccgttatccaaaagtcgaatttacgtgtcgtagtttttgtcacattcgtcattatccaataacacatgtccacgtgtcaccattttctggtctctggacggcaagaatcgccgacgtgcccctatttaatcggattctcccatttttattttattttcgtcagattctctccaattttgttttttctttttagatttttgattctcgaatcgcggctcctgtgggtctctgtgttttccttattttgagttcggattaaatctcgatcgcgatttggtccaatatctcctagcatcgagagatttctattctggctaaattttgtgttttctcaggtggataagaaattttctctttgtcgttttcctcgataattttcggattacggcgacgaatcagattgttttttggtttcaaattttctgatatttccaaaaaaacaaaaaaatctgatttttgagaaaaaagcaatgcaacggatcgtggacaacgctctcgctgtaaccaaagagtgagtcttttttcttatcgatcatcagtggattcatctgtgtatgcgcctatagttgttctaatgtttcataaatgacaagtagagatttttaagtttttgatcgtttggtgattatagtaagtctctttgttaattagtattggtagattgtgtttttgagttttgttagaccattttattctagtatcttcattcaaagcttcgtcttttagagttgatgttggctatgaactttgagtcggtgaaatgactatttctttttttttggttcgtctttttgttagattttcttcttttcccttatgttgtctaacaagcttaaactaaataagctttttgattatgttttggcttttagtgcagatcagtaaaaactgttacatatgagtctttgaataacattgcgaggtgcataaatggagtatcagctcttctgttgacccttctcccagggaaggctaatattcttgaaggcttacatggctgggaactcaggcctacgtttcgtggaccacgtttaccacggtggatgcataagtaataatttctcatgattcttctgttgttagtttatttgcaagccttcaaaatatgctaattttactctgtttttgatggcagtggggtctcttctttcaatgagttcattcatg

SEQ ID NO: 37542 - DNA, 2551 bp, Arabidopsis thaliana landsberg
  unsure (1)..(2551): unsure at all n locations
cgtatatacataaaaagaattttaagaaatatgtttagttacattgaatatgtttacctttgaaaaataatgatttgagctaggtgttggtggagatgtcaaagtcttgtgtcttggaatctaacacaagaaagttgacaatatatatacgctatgatattctatttggaaacgaggaacgttactttgtctcgaagttgaaataagatgtacaacttttttatacaaatatttagaagactttaattcaaagaaaggaaactgaattaagatatatcgttttcttataaaactattcagtctcaaatgatccatacattatcttatattaaaatattatggattaattttcaattgtacatcacaaatacattttctacagcatttatcattagtcaacatatatgttaatagtttttttactgtgtttcacaaaaagtaacatcttagaattgactaatttttattattatttgtatataagtataggtgaacgttatttaacctcgggttatatgactataatgatgacaatcatatgattatatgtagaagattaaccatttttggtaaatacataattagctaacaacatgcatatgatacaatatattggtgaaatttggcatatagtacttaacattcctaccgaaaattgttttttggaatatagccttgttgtttgtgataatatcctcgtgctgtcgatatttggatttatatccgtaattcatgttgttgttaaaaaaaagattactaacaaattcggcttagttaatgcatgtttaataatgtgtagtaaaaatatataacaaaagntcaaatacatataaacgaaatacaaggttaaaacaagctcaaacctgtcgccgtttattttcatgaagatcaatgactagttggatttcttcttcagtaaaaagacctctcttgagatctggccggagataattagtccaccggagacggcaacttttgccacacctccttagccccgccagttttggcacgtctctccagcaccatcctcctccaccaccaccgcagttgccacgtgcccttaagaaatcaactagtttcccatcttcttccactgtccatggaccctttcttaatccaacctcatcacaacatggtttacgaccacccattatttatattatatggtttaaaaaaagcttcatcaaattaaaactttattggatttgaaaatcgtgaaagtaattagctacacccaaggggtcgataaatggaaaatggagaaaaagaaaaagaaagacaacacaaaagtggtaaccaagtttatctcaactaactaactatatatacacacgtatggagtttcttggccattttttgtgatgcttaattaagattaataattattttcattttcattcaatataattaagaaaactcgatgatccaaaagtttcttgaatcttttctgatgtttttgtggaatttgctaaaaccattgaatacggtgttaaataagtaattgtgtgtatattatagttcgatatataaacctttttcttctttcatttttatttttaaacactttcatattaaagtataattaaattcttttgacgtactgtttagcggataaatttcgtataattatgtatttaccttcatattactttacaattcatgttggattattcgtgatttgatgatatgtcgtttacattttacacgtacaacaaagttgtcatctactcttagcaaacggctaaaacaaaacaaaaattataactataaataggcatatacgtgaaataaacaatgtatttatcttcttgtttatctaatttcaaatcttttataaacttggctctttagaattttgtatgtacattcacatgttttaaggaaaaaagatcatgctgcttgcgttttgatcatgacaagaaaatgagacttcatttataaataaaatcttgaaatagagaaaaagaacatgagacttgcctttgaagtttaacaaactgaaatgatattaatttcgaattgagaatttattaaatatctttgacacgtagtatatatataggacttcacaaaaaatgttgttttctatttctaacacatatttttcgaaacaatctcagttttatccacattatttcaacttataaatataataatgatataccaaaatttaaacacatttataaaaacaaaacagaaagttaagcatttcgctatgaatgtgtagtatgatcatgcattataaacttgttacaagaaaaataattttgacaacaacttgattctgtcggtaaagataaaacaatttaggaaaagaaaaaaaaaatctattgataaatattggtcgtactaacggaattgatagaatgctcctcttcgatgaagacgaaagttagtcccactttcttgtatagacaattatggtgggaaaaattcgttttcccgatttggatgaatcagttgatatctggttattctcatttttctaatctttcaacganactacagatatatttgcactaagtcactacatgtcatatatattttgatg

SEQ ID NO: 37543 - DNA, 2568 bp, Arabidopsis thaliana landsberg
  unsure (1)..(2568): unsure at all n locations
aaaaaaagaatttggtccaggtacccataaatgtgtcagcagatggtgttgtccaaccatctttgcagttgtggtatggcttaattcatggagcagagccctctaatttcactgttttaatccaatcaggctcagtttcctcaccaacagagctagccatatttcatcccaactcatatgtgaatgatcaagtccctgagtaaaactgagtgtggaaaacaatctcatggactctacttagtgtatatagcaaacaagaatctgccatcaagaagacccaaacatgtgatcagaaaacagacccatgtatgtatgaggctctatctattcctcatctaatttggcgtaggattcatactatgcctcaaggactttttaaaagaatagatgtgaatcaaaaattgagcaaagaagcaataagtaggagctgagtaagctccggttcaagtcatagctacaccggaaactagaatcaagttagtaaattgactcaaattctgagtaatgacatcaaaattcagcatacacgattctgagattttctacaaacctaagccctagagtatctgaaataacatgcattccattcaatagacaaagcacagagacagagcccagataattgaattttacattcaggtacaacacataagaagaaacggaaaaaaaaacgtttttttttatcaacagagcaatcaaaacccagaaactgatttacaatgtttcagaggttcaagaggaatcanctacaataataaaaaggagaaaatcaaagttgagagatacaaataacaaaagactaattcaatcgcaggacaaggagcaaacaataaaccttttgcagccgaagaagagaagaattgtccaaaaaccctaattcaaaggggaggacttgtcaagggaaaagaaacaaagaagataatccgattttgctaatcttcttttgttgtttggatttagcgttgaaacggatgctgcgaacagatcctaaattcttccgtggcgtaacgctttagttcatatcttattaattaaagttccaactggaaataaggtccaactccaactagtaattattattaatagaattcaaaataaaaataatattattagtttggatttaacaaaaatttatgattattatgacaaaaaaaaaatatgattatttactatgaatattataaaataaaactatataccatatgattttttctctaatcaagtatgagattatataattcaaactataagatttttttcccttaattcttacacctaatcaagtaaaaaggaaaaaaattagaaaaagaaaaagaaaagtaatgtcagtttttactttttcctattttttttgtcaaaaatcgtcaaaataaccaaaaaacattaaaaaaaaatccaaattaaaataaataaaagaacttttgttttgggctttccacatcgtaaactataatcggcgtctctccggactcacacctcatcgaaatttggccatctcatctggcttcttcccctccggcgttggataaccatcattacttctcgcgccggcttcgagtggaacaatatggatcctcgtcaattcgaacacaccgtaagtttttctctccttgaaatgttttatgacttctctctcgagatttcagaattggaataacgatcctgctcaaagatgatcgcacctatttcatttgattggattatggatcattctaggttttcatgagtggatatgcattagttatcgtcttgtgtattggtggtggttcttagtatgaaatagatcttgaggctttttatccagaattgcaagctgtactaatcttccttagtactgcagtgttatattaagttattggaatctggaaactgtgtataatgtgttattctctaaagcacttttcttttgttaaccaggatgttgctgataatgatattcacagcattgatatgtcatatcttatgcacgactgcttcatcgaaactgcggactcacttgcttcttccactggagttaagcagcctgcaattgatcgtgataacatggagagaagaaaacgtgagttgtacaagtcatcttttgttctgctgttaaatgagtgcttatgcaattatgtgattatatgttttgattgattgttcacttattcagaaataatacattttatactggagaggaaggcgttgaaggcttttgaactaactgaacaactagcacaagacttgcttgagaaaaacaaggatttgcaattcgatcttctatgccttcattttgtggagctaatctgtgctgggaactggtgagattttatgattggtcttccattagaaactctggttttatctgtgcctgtaatcttaaaatgattctctgcgtgtgcagcaccgaagctctcaaatttggtaagacaagattggctccttttgggaaggtcaaaaaatatgtagaaaagcttgaagtaagtctgaatcttgtttgatcctccattatattcgtcttgatgtattggtagattacttgttatgttcttccaaatgatggtagatttgttttttctgagacaggac

SEQ ID NO: 37544 - DNA, 4471 bp, Arabidopsis thaliana landsberg
aatgatactggttttgccgacggattgatctcccagaaacaccagcttatacttagcgagtgccgagaccggagccatgatttctcaaggatctaactcgccggacggatctgagaaacgtcgagatctcgctttgctgagaataaaagtttccgatatttaccggagagagatcccgtcgctctggaattgcaaatactgtattagtgagagtttgttattcgtaaattgcagtttattcctcgagtgacccaattgggtcatttatgttaaattagaaactatttgagataagttacaaaatatataaaaacttagaagctgattaaggaatttactacattatgggcagcatttataagcccacgtaaggatttgggctagccttatagtagggggcacgtgtcatctcgtatgacctgaactatttttgccccttttggctacttgactcttctgtgtctctctcatcaaatcaaatccctaattctcgagctcgaagaaagagacgaaaatggcactgagaaatgcaattcttcgtcacctgagggttccggtgcagaccctaggattgaatcagtctaaaattgggttccttggtacgatccggtcattttcttcgcacgatgatcatcttagcagagaagctgtcgtcgatagagtactcgatgttgtcaagagcttccccaaagtcgatccctctaaggtcagctcgatcttcataaaatttggccaaatcgtgattcttatcttttgttttcctcattattgggaacaaaatgattattttgccttgaatatttgtcaatgtaggagcttttggttgatttcgtattgatctagtggaaatagagaccaaatgtatctgaaacgatgttgcattagtgttgttagtaaattgaaggttattgatctcaatgtggtttagtaagtgtagcttatcgtgttgttgttcctatggatttgatttgatatggtcattcttatggattttgcatttatgaatccttcatcaactctctctaataagggttgtttggttagggttatttttgttgatggctttgtgataaatatcgacaggtgactcctgaggttcatttccaaaacgatttgggattagatagtttggacacagtggagatagtgatggctattgaagaggaattcaagctggaaattccagacaaagaagctgacaagatcgattcttgctctctcgccattgaatacgtttacaatcatccaatgtctagctaatcgctgtgtgctctctcatggtttctccttcctttttcttgtatgaggttcttctctctttgataatgccataatgggatttgcaaataaattcacttccatttggagagcattgttattgactcttttaacggttccagtttcttaaaaagaaaacctttttgcttgaatcttgtgaaagttgacactttttcttgagttaatactttaatacgatttgtatataatacacttgattcttagcatggtcttgatcatacattgaagacgaatctttgaaaaacatacttgttttaaaaaactgatcgtctctcttggatacatatgcaagaccaaaaaattggatcttatatactacattacatcataacgtgctattaactagaattgtttgtcagccatcttttggatcgaatacagacagtagttttcatttggacaagttttctgcttcatctcaactacagcatttgtaccaaaatacaccaatatctctatccacaagttagatgttttaattaggagatacatttcaggtttcgtttgaatcgattttttagtaaatgggacaaaatgggtgaacttacaatattaaaaacttgctaagctaattatgcaaaatggatagggtggaaggaacaaagggtggaaggaacaaagcaagatgctgaaaccgcaacagcaatgaatcttgtaaacacattgtagtgatattgatcataatgactaaagaaagactaaataaacatctaacgtcaacaatatatctcttgattaagtttaacccgaaagagacagacaatggcgcaaactatagttgttaggaacgattctgagaagttgagacggttcttcagttccatgaattcctacttcactcctaagcaagccaatcattctacaccaaatctctttgctttcactaacattacttggttttccccatataaacgccaactttccgtagtattccccgatcccaatgcatcgagctttgtcaagatctaaaccataaaccactctccacaacatcagctcagagtcataccacattaacccaaatctaaggaagtaaacgaagagcacattgtcaatcacgcattttcctgtcttccaccagttatctttaggtatcgtatatctttgataagaaccatctctagtatcgtaagaattcatgtattccctcgaatttaaagcataaaccttcctatcaagtgaaacacttgcatgcgtgaaccattcgtttctatcctttgccttaggaatcggcgctgcttcccaagtttgtgtctttaagtcaaatacttccgctaggatctcttcgcctctgttgcctccgatcacatagatcttaccaccgactagtcctacggtagctgataatcgctccacttgcatactaggtccttgacgccactgtccagattgggtgtcaaagatccatacgattgatgatgagggaaaattatatccgggaatgcagtaaatctctgtatcaattgcgatattggaaagagggtaagaagcatgcccgggacgataaggaacatcgatggagacgaagacattctcagtcgtattcatcttgttatcattcctccggagagtgaaccagtgaaaagtcgtccggttccggttcgggtatgtagttctggtcgagaagcatagataaagagagtcctttccgtgtaaagatcgcgtcttgtgaatctccggcgagcgaattagactccgcaaggacttggagacgcaacagaggattgggtaatatcgttttggtaccaaggctaagatgttcaatacgatgtccaccgggagtgagaacaatgacggcggcgtcaatgaagacgacggtggttggttggttttctgcggtggttcgtcggcgttagacatcgagagctattaggaggaggagactagagaacaactgagtgaatcaatcaaattgagggctttagccaaaaaccaaaagccggttaaattcttctctgattctgctttaatcggttaaaaccggtttatatttcttgtcttgatcagggaaacacacagagttttagaataaggcccaggaataagcccggtgagtgaatctttctaaggaatcgattttaaaacaaggcccattaaagggtgaagaaaaggcccatgaaaatgcttaaaccccctttgtctcccagcttcgtacacaggagagactgagataaggaaagaagaagaggaagaagaaaatggcgaatcttaactcagctattgattcagtgttttgggatcagaacgtttcttcacctcaaacccttgaaggcactgctcgctctgttcccggtgagccatttcccttagacggagcacgagcaagccgctctcaccggattcaacagctctctctgcttcgcgaaggctttcatcaggaatcattccttctttggctcctgcttctgacaagagactgggctctgtctctctcaattctctcttgctcagtccttcctctaacaactggtaaatgctcttaacctcttcaataatttacaaaattgtgagtgagtaatgctttaaaggttgagactttgaatcaaactggtgaaatagtgttgacattgttggatttgatgagacatgtgattagttttgtttggaattttcactcaggtggttaggtttagttgggcagttcaaaccaaagaagctctttgctgatatcaaagcagatattagcaatgcagaagagtgggatttgcaagttgtaaaggatacagcaaaacacattgttgacaaatccctttactctattggtttatggactcagattgcgttgggtacttcttcttctctcttgcttagcactgaacgtcttggagataaaaacggactccgaaacaagttgatgcttgttcatccggtatgtctctgtactgtaactatgatggattcttcttttgtgttttaaagcacttctaatttgtttttttgtttgaactaatgagcagcttgagaaacatgatctcactgtggaagcagcttggccagatttgtttttggacaataaaggacgtttctgggatgttcctgaatctttgaatgttgatgtctcatcccttgttccagagtcaggggttagataccggtttggtcttcataaaagcaggggtaatcctcagcctgtgaatgcttgtggtgttgagagtggagtgatgctcctact

SEQ ID NO: 37545 - DNA, 1339 bp, Arabidopsis thaliana landsberg
gcattaatttaaacatcagcagtaatagccaattcttgtttaatcctgtgaagctcttctgtggtagagagaagagctgagatgtccaaagcatgctggcttctaatagactcaacttctttcttccaagaaacttcctttttgtgaactgcttcaattcccgcctgttctagttcaaccgctctgaatttctcaatctcagaactcttctctgcgtgatgctgagctgccaatgcctctctcagtttctcattggcttctttagtcagtttctcagattctttaagatcatcaagagctttagctttatctttcttgagcctttctatttgctcattagctttccttaaatcctcttgagtttgttgaaccagtagcccagttcccttccctaaccgtgattgcgatttctgaaatgccatacaaatgatgatcaagaaatagtctttcaaagttgaaaatcaaaacacgtgaagcatcaagttattggatggagatggttttacttgcctcaggaggagtaggaactcttgcagtccgacgatcagaaacaggcttggagttaacagtttgcggtgaacggtctattgaaagacgagtgctctgcaccggagatggcgaattgccatcggatataagtcactgttggtttactcactcttggtgttggtggtgacggtttgctggaggagtctccattaaaccagttctacatcatcagaaagataagccacaatgtcgcaatctcaccatttgccaataaagaaaacaaagcagcccatccatcatctccattcttcttagaatctttggattcatgattaagtaagctaggaacaggatcccatctcagtctagagatctatcaaattatcaataattaagatgaataaacatttaggtacacttcaactgtatccaaaaaatcattgttacatagtacatggactattggagaattccgttaaaagtgttgggagtctcacaaaacggaagatagagactttaaagacaaataagtctacaagtgactacagaagaagcttctgcaagatctaaaccaatttgtggaaccagaagcagggaaaatcagattaaaagtaacaaaattaatgcaaccaaaacaaaaaacagatgactgaataattccagaagaaaaaacaagggaaggagaaagtgacccacataaaaatccaacaaaacataactacatttccgacaaagaaaacagaagacagagatttcaaattgtcttctgagttaaaaactaaagtttggttaattatcctcacttggttctggacgccattgttgccgaagaagagcgtcctcaaaagaa

SEQ ID NO: 37546 - DNA, 2571 bp, Arabidopsis thaliana landsberg
ttacaagcctctcgaatcatcggaagctctcttcgaagcatttcacaatctttcactggatcaagactttgtatgtagtcaagttcttcttcagagaaaggtattgaagcctgaggccaatgaatccattcgaagtaaggatcttcgagtgtttctggtaagcaaagaccatgatctattggaataagctccacttgaccaaacctcccaacaccaccatcatcaagcttcttcaccaaaagatttccaccatgccggtctgtgttgagaatccttatgtccaaaatcccaatgcggtgcacagaagcgacagggaagcttgaagtcccgtgatcactggcatcaaaatcatgaggtacaaacttctggaacgaagcaatcttgctgctgaccagcttcttcttctcacgagatttgttcccatccattccatcattgacattgaaaacagagtgtgttatcttcacaagagccgtaggaggaacattagcaaagtgatcataatcaagaaggtatgcagcaacttctctaaacccggtttccccaacccgcacagaaggctttaaaccaggctgcccaagcgctttccctacgaagcctttaggattgttaggggcaaacggctcttcatccgtaggcttgacaatagcaacactttgacccttttcatccctaaggtagtatgcccctccaagcccaccattaacagggattggttcaacacccatcttcatcgccttaacaatgtcattcgctgtttgcttcaaagacagaaaacagggcgagtgactaagtatctcaataggaccacttcgatctttcctctgcagatcattcccagtaggtgaaagacacggagtagaagagcttctgtgcattaagttacgctttaagagaagcggagaatcattcctcacagcactcaagtcattcttcaacaccatatccccaaaggtcaaagagctttcctcagtaggaaagttaaacgcaatctgaagccttttcttcacagtatgaacattgtcattacgatccaactcaactcccaacacacagccagtatcggtttgcacgaacacacgtcttctccctgtagactgttgctgaagcagatggtgcttatattgcttcccttccatctttctagccccatgaaattccccttttagaggagccttaaacaccgccattgccatcttgtcagaccaacaacgcctttggcttaaagccttaaaccaacacaaactcaacaagacagaagtgaaaagaggagtctttagcctaacactacatgtctacatcaggtaagccatgctttatacgtgttaccagagagaagaagattaaaacctgaatcaaaagatgaaacattgatcaaaaatcttgaagatttgattattttatacagttgtaatatataaagcaaccttctttatctcggcctttaacacaaatcgttaaaaaattatactttctccacacttatcacaagatacatcttgatccaataatcgtttgaagaaatgatttacagaaatttattcactttacacaaatcgaggaaccaaatgagaaaatcaaaaccaaagaaacgaaatttaaaggatatttcgaaatagaaggtatcgatgaagaagaacaactcaccgtcaccggaaagcaagatctgaagaaacggaggaggaggagacgcacatggagaagagacagtgaagcgtattatctgagaaaagaggcttcaatggaggcaatgaatcggtaaaatctgactcagtgagtcactgatccattagcctcgctatctctctatcctctgcctccttccttcgtctctaacctctcaacgacgcttttttaactctcagcataaagtatggagccattcctgctatatcatgtttaaccagtgccacgtcacctttgtatttttaatttattttttctttgtcaatttcattaatcattgtattaaccgtatataatatagatatgttgcattttaagaaatttacatgagaaatacaataaagttcgtatttcgtagcaatatcgacatcaataaattagagtttattggctgacaaattcaaaaattacaaaaaaaaactacagtaaaatttgaaagaagtagaaagaaaaaaaaacatttaccattatcctcaactctaagaatggtctagaacaagcaaagagagccgtccgatcaacacagtccacatgagagcaatgccgttggattgtacatgatacgtggcgattaatagagaagtacacgtaattataaaaagggtttggtgatgatgtggcaacttagaccgtcatacttgacgattgacgcatgtgacaagttggcaaacaaatgggccttggaactttagaaagcccatatctaaaacgagttgatgatcgtttgctgcacaaggtgtatataggttttccttgtgattgaagcaacatatgaaaactaaaacaaacctaactctcaaaaaattgaatataaagtatttgaggtctacgaaataatacattacagaaaaaccactattttctgttcttattcgaacggtcttt

SEQ ID NO: 37547 - DNA, 3579 bp, Arabidopsis thaliana landsberg
ccttaactaattctctgacttttgattaaatttaattatttctctaaggattcatcttaagaaatctttaaggacctcccattgagcatggtctaaaatagtttgtttttttctcacttaaaatccatatttccctagtacacgtatcttttcgtttattattcgtcagcaaaaatatatcttcttgaaatgatgaattcaaataaaataagcaaaacttggcaaagaaaataaatatatagtgtcagaaagactcaaaatagcccaactagacaaaaataccagctaacagaaagtaataaaaaaacctcaaataaatggaaagacattaataaggcagatatatgttttttaattataactatatgttttttccaattaaagaaataaaaatatcggcattcttataggatcgatctctcatgcaaaagaacaaattcagacaagaaacctcaacggctcagacccaccaataccaattttttttaatttctgtcacaagtaagaaaagaagcactaattacaaaataaaaaagaatcaatcttttgttcgtcgattcgatttctaatcaattagattgtttttgttttgttttacatcagttgcgaatcgagctggattcttgggttccctttttctttcaatcaaaagtttcgatattagtgaaggagataaaattcgctaaaaaaagagaatttttttttgttaaaaaatttataaaagctggctttctcaaaatttctccatgtggtcgacgaagaagacgaagaagaaagagaaagtctcttaacaaacatgaccgcccccgaagctaagaatcgcaaaatcaatgtcggagatggagatgacgttgttgatatcgaaatccctgacactgctcatcaaattagcagcggtttgtttttcaatttggtttcgataagaatgtgtttgctttagatgtgtggaaaaagttttgttttttttaaatgtacggtttcttatctgggagattgtttccccaatttcaatttctttaatgctttttttgattaaaatatgaaaatggtatcaccaggaagaagaagtagaatctgactacttcaaatgttgactttgatgattttaacgatgacccttttgaaaaaatgttttctttaatgatcctggaaccataagattgggagttttgttgctttgccaaactctgctttctataaactgagatcacgttttgggaagcttatagtttgttttgtggaatgtgcagattcatggtttcaggtggcgttcgttttgaccaccggtataaacagcgcgtatgtgttgggatattcaggaacaattatggttcctttaggttggattggtggtgtggttggtcttcttattgctactgcaatctctctttatgcaaacactctcatagctaagcttcatgagtttggtggcagaagacatattcgctatagagaccttgctggattcatttacggtaaaaaagaccaaaccagctctcttaatctgctttatgtttctcttctctgttgttaccttcattggaatgatctctcttttaatcaggtaggaaggcttatcatcttacatggggattgcaatatgttaatcttttcatgattaattgtggattcattatcctagctggttccgccttaaaggtagtaaaacattttcttctcttgattcttgatttcgttagacgagttagttaatttgcggtgtgtcttctgtttctgcaggctgtttatgtgcttttcagggatgatcataccatgaaactacctcattttatagccattgctggtttgatttgtgcgattttcgctattgggattcctcatttatcggctcttggggtctggcttggagtttcgaccttcctcagtctcatctatattgttgtggcaatcgtgctatcggttagagatggtataactaatcaaatgatcatcaagattcaacattactaatgagtttaactactgcaaaaatctgattcttgctttgttttgtttgtttctaggagtaaaaacaccttcaagagattacgagatacaaggatcatcattgagcaaactttttaccatcacaggagcagccgcaaatctggttttcgcattcaacaccgggatgcttccagaaattcaggtgacttttccctagacttcaaagttcaattgtttgtttgtgtttgcttttatgtattagtgtaccttttgttcaagtaaaacctgcatctcaaacaaagtttgtttgttaatcatattgacactataatttccacaatgttaggcaacagtgaggcaaccagttgttaaaaacatgatgaaggctctatactttcaattcacagcgggtgttttaccgatgtacgcagttacattcatcggatattgggcttacggatcctcaacctcgacctatctactaaacagtgttaatggcccactctgggtcaaagcccttgctaacgtctctgctatccttcaatctgttatctctttgcacgtaagtttcgtagcgccaagtctactcttttttaacaaagactgtcgtctctaactatatgtctgactcaattctttgttgtagatatttgcgagtccaacatatgagtacatggacacaaagtatgggatcaaaggaaacccatttgcgataaagaacttgctgtttaggatcatggcgagaggcgggtacatagcggtaagcacgcttatctcagcgctgctgccgttcctcggtgacttcatgagcctaactggtgcagtgagcacattccctctcacattcattctagccaaccatatgtactataaggcaaagaacaataagctgaatgctatgcaaaagctatggcattggcttaacgttgtcttctttagtttgatgtctgttgctgcagccattgcagctgtcagactcatcgccgttgattccaaaaatttccatgtttttgcagatttgtaattcattatattatatagtcaattgtgtatccttcattcttaggcaggtttatttctcctgtaagcttgtattctctctctctttgtcttaccattagagcctaaataaataaatcaagttctaaaatctaaaaagcatataaaagaccactttcatcataatcattctgaaaatttaccaacaaagaatactaagttgcatgattaaagtctctattagaaatgtaaatcatagtattagagaagaacataaaaacacctaacttaaaaaaaccttaatttagtgagatagagaagagaagacccagaattgttgttggtttaacaaaaacctaatctttcaatgattagctgtttaatttgaaattataacaataatttagacaggccaaagtgaaaccccgctgtctccaccaaagctctagatataaaaaaaaaatcgaaagcgttagatattttttatcaatcgtgctccgtaatcattacctttcttcttcatcttcatcttcacgcaccaacttctttgattctctctttttaaaatcagctccaattaaaacatgcatttctctcttctcaattttgggtttctttttttgatatctcatt

SEQ ID NO: 37548 - DNA, 1848 bp, Arabidopsis thaliana landsberg
actaaaatcatgcaggcgaagcgtacgtcattaacaggttttttgctcttttcgtcgacaatctttctaatcggttctgcaatttcccagaggcaccaattcattgtgaaaatgtaacttgcgacttatgatccttcccactttacttactctttaaaaactttatcgatgtaatttgatgcatagagacataaatagaacgtccagggagactaaagaagggacgttacttaatctctccccttttcctaaaaatccatataaaaaggaaaccaaatacaaaaacaaacgacgtttcatcctcaaaactcgtctctatggtttaacaaattaacaataacaaaagacatctagagctcatcgtgagactcatcttcctcctcagtcgatgattctcctcctgcaccaccgggtgctccgcctgatctctggtaaactgctgtgatgattgggttacaaactgcctctacctccttgagcttctcgtcgtactcttctttctctgagttttggttctcgtcgagccactccaaggcctctttcgtcgctgcttctatcttctccttttcatctccttctaatttgtctgctagcttgtccttgtcgctcacttggttcttcatgttgtacacgtatgtctccagggcattcctggcgtcgatcttctccttcaccttcttgtcttcctctgcaaactcctctgcctccttcaccatccggtcaatctcttcttggctcagacgacccttctcgtttgtgattgtaatcttctctgatttaccactcgccttgtcctctgctttcacattaagaataccgttggcgtccacttcaaatgtgacctcgatttgaggggttcctctgtcaaaacgagatcaggataattattttgatgttcaaaacgagactgatttaccattactaaggggtataagaagaggaagaaaaccttggggccggtgggactccagtgaggtcgaatttcccgagtagcctgcagtccttggtgagacttcgttcaccttcaaagacctgaatggagacggtggtctgctggtcttggtacgttgtgaaaacctgagatttcttggttggaataaccgtgtttctcgggatcaactttgtcatcactcctcctacagtctcgatacccaaagtgagtggcgcaacatcaagaagaaggatatctttggtctcatcaccaccttctccgctcaaaataccaccctgaacagcagcaccataggcaacagcctcgtcggggttcacacccttgtttggctctttaccttcaaagaagtccttcaacagttgctgaacctttgggatcctggtgcttccaccaacaaggacaatctcatcgatctggctcttctgtagaccggcatcatccatggccttcttcacaggtcccatggtcttcctgaacaaatcattgttaagctcctcgaaacgagctctggtgagtggctcagataaatcgacaccatcaaagagtgactcaatctctacacgaacttggtgctgactacttagagctctctttgccctctcacattcccttcggagcttaccaagagccttgttgtccttgctgatgtccttctggtgcttcttcttaatcaacttgatgaagtactccatgatcctgtggtcaaagtcctcacctgcgcagatcataacaacaaaaggttagcaccaccatcacactaaaacaatccctccattctgacacatgttattgactatgattagcttggaatatcgacgattgcattggcacagcatcatttgttattgaacacaatgcaattcagaacaattcattcgtaatgcaattcagaacaa

SEQ ID NO: 37549 - DNA, 1361 bp, Arabidopsis thaliana landsberg
cccctcacacattccaaatccttctttgcccacaaaaaaatttaaattggctggagaacaaacgatacacatgacagatcatatcaaaaataaggatcacatcaacatatagacgcattattattatgttctatcaaacaccatttcaaagaaaaaagttatttgtatggcgaaagaattacaagtactacacatcgtgtaatttgtatgatgaagaaaagtaaaataaagtgcactaggaacaaaatttcacttggtgaatcattttgctggccattagagagatcatatcactcgaatgttttttccacattattaatcccatgccttaaaatccaccccccacactactaccctaggcctagggttgctaaaatgcgcacctagccagcgcacgatagctctgataatattaccaccgttgctaaaatgagccctgaattttcttcaacgcccccctttaaaaaggagatgtctttttagcaactctgcgtttctttctctctctctagtcacttgttgttcttactcaaagtgttcatctctctttcaccggtggatttctcgacaaagattctcactttgagagagattttttctttctagatgcagattcagagcgtatcatctctcgagaaaggatcaatgtctcatgaaataagctagactctgtttctgttttcttcttcttcgatctcaatttcttcttcttcgagctaggggttgtttatgtttgggaaaggaatgggcactaggcagtattcactgggagaagtagggccaccaataaatccgagagctggattgcgaagggaacaagctggtagaggttcatacagaggtagttagtagattcgtagctcatctgtaggcaaaaagggtttccttttaggtggcaagactgtttattttcagacacagagactgattaagaattcaagggagagttcttgtcgggggactattttaagttttaaaaaggggtgttttttagtggtgaaggggaaggtttagatgggttataccttgcaacagatactgaggagcatctgctccaacacggattggaactacgccgtgttctggaaacttaatcaccactcgccaatgtaagttatccaaaagtttataatcttatgccaatatgttggttctgtttggtggaatttagtaaggactctgataagatcgattttgttgctttgagagttatagtcaatacgtagtcaattttgttgaatgtcaagtgtggtttttaagtattaagcctagaagtcaagtagaagtttttcacatatgggctattaaaaacacttgcagggttcttactttggaggatgtgtactgtgttaatcatgagc

SEQ ID NO: 37550 - DNA, 1938 bp, Arabidopsis thaliana landsberg
cgttttctcttacatgcaaattgaaaccaaaggctgattatttatgtatatgttggttacagatgtggatctccaaggccgagtatgatgaggcaggtccaggaatcgttcacagaaaatgtttctaagctctcaagatcaaaggcttaaaaagctggggttttatgaatgggatcaaagtttctttttttcttttatatttgcttctccatttgtttgtttcatttccctttttgttttcgtttctatgatgcacttgtgtgtgacaaactctctgggtttttacttacgtctgcgtttcaaaaaaaaaaaccgctttcgttttgcgttttagtcccattgttttgtagctctgagtgatcgaattgatgcctctttattccttttggtccctataatttctttcaaaactcaaagaaaaaccctgaaactctttgcaatgttaatataagtattgtataagatttttattgatttggttattagtcttacttttgctacctccatcttcacttggaactgatattctgaatagttaaagcgttacatgtcttccattcacaaatgaacttaaactagcacaaagtcagatattttaagatcgcaccattttatataaccccaatcgtcaattctactgtttcaactttcaagttttacaccaaaacaattacgaggtgtatctattcgttactcttttcgcttattaatccttttacatgatgcaaaatataacaaattaatttcaaattgtcctgcacatttggtttatacatcttgattccaaaaagtcaactcgttgaagaattaatcaatactcgaaacgagtcttccttgggccctaaaatattgtcctatctagttgatgcttatatagcatatatgggctaataaattgggccttagttttggaaaaggacgtagaacttgaaacaatttttatttttctttttccggcgaaacaattatctaattaccaatttaaccccaatcctttctcagtttctctcttccgcgtctctccttctcgttatcctgcaaattagggtttaagtaagaaaaaaaagctagagaagtatctcgatctcttcttctgttagattctgctttcctttgagatttgctagtgtaatcgtaacctccgaagacccaagatggctcgtaatgaagagaaagcacagtcgatgctcaacagattcatcacccagagagaatctgagaagaagaagcccaaagagcgtcgtccttacctcgcatcagaatgtagagatctagctgaagcagacaaatggagacagcaaattttaagagagatcggtagcaaagtagctgagattcagaacgaaggattaggagagcacagacttcgagatctaaacgatgagattaacaagcttctcagggagagatatcattgggagcggcgaatcgttgagctaggtggtcacaattactcgaaacattcggcgaagatgacggatctagaaggtaacataatcgatgtacctaaccctagtggtcgtggtcctggttatcgttacttcggagctgctaagaaacttcctggtgttagagagctttttgagaagcctcctgagctgaggaagcgtaaaactaggtatgatatatataaaaggattgatgctagctattatgggtatagagatgatgaagatggtattttggagaagttggagaggaaatctgaaggagggatgaggaaaagatcggtggaggagtggcggagattagatgaggttaggaaggaagctaggaaaggtgctagtgaggttgtgagtgttggagctgcagctgctgcggcgagggaagtgttgtttaagtagcaggaggatgttgttgaggaggggaggatggacgggaaaaagaggaggagaaagagagggaatttgtggttcatgttcggttgcctgatgaaaa

SEQ ID NO: 37551 - DNA, 1585 bp, Arabidopsis thaliana landsberg
ctctgaacatgatccctccggagacacataaagcagtgatgggagtgattgaatcctgcaaatcaccgtagaaagggatcaaaaagggcaattaattcttcattctccaatttctctgtacagcttctgcaatagaaaagaaaaaagaacttggaatgctttggggtgatcactaactctggtgatcgcattgatgtatgatataagattataaggctgctattagtacgttagttctctcttttagagttatactgtttgtctcggcttaggttttgtttagttgtcctttacagttttactcatacactccattctttttgtagttttcttgactaatcccatatatacaagtttgctctaccactttttctttataaatctgttccatcgttatagtttatatataattgtcattacgttatgatatttcgcagcatattacagttttgaaatgtgcatctatgatcattgaagctgtaaggaaaagtcggcaaaaatttattaaatagttttagctctctgagataaaactcgtcttttctcttgttcttggtttgttctgtttcctttcctcttggcttcttctctcactgtcgccattcctcgagctctgcatctgtctctggctagagcttgccatattgtcacacggaagttcccagttttcctacctcggttcaatactgagatctgtcgtcctcaagtgtttaattccctggattcgatagctaggatatgttttggtaaccttgatatgctattttcttttttataggtgcagtcatacagtgagaagacttatcagagtacaacagctttttggtaactaactacattacaacatgttaacctaaatcacttattctctttaataactgtcttctataaagactccaatacctttgtgacattttcagccgagacataagtcacaagtcattggtttccaagaatctgctcgatctcctcacccaactctcttgtaagcttatcagcacgatcgtcgtgcccaccagcaaatgtgtaaactctgtatgcaaaatgaaatgccctccacaacgttttagcccatcctggagtcttattcttcgtgcttggctttgcctcgagtgattctgcagtagtttgcgatgcaatctttgcttctctcttttcctgtgaggttgaaccaagagactctggttaaaagggtttcaaaatagtgatcacatgtatgcaaaatgttagtcctactaccttcaatgccagatccatacagcctgaagagatatcaaccattacttccttgatctgaacaaggatgttgaagtcgaaatggatgttattgctcttgaactatcttttgctcttctgctttgatctggtctagagtttcaatctcttttctgatctgttatttatatcattgccctcagatcaattcagctacctgaaagaggaaataaccagaaaaaaaagaaaggcgaagaaacaagcgaaaatcagtatttctatgacttgcctttgcaaagtaacgctcagtcttatcgtaaagttggttcgccggagactctatcttccagttctttagctctttgatcat

SEQ ID NO: 37552 - DNA, 4986 bp, Arabidopsis thaliana landsberg
  unsure (1)..(4986): unsure at all n locations
tatgcagtgacacctttgatatttgttgcggaagacaatgtttaagatttttttttcttttctttgtgtcaaccccttttatcggtctactttctaagtggaatatgttgactttcaggtttgcatggtgacggacaatgatggtttgactgcacaggcaatagcaattgaatgtgggatactaacggatgcatctggccgtaatataaggacaggagcccaatttcgtgaactttccgatctagaaagagagcagattgccggagacatcttagtatgaatccattcttccatacttatggttttaacatatatattcatctgtgcacatcatgatacattgatgagtggaatcatggaattcagtatcagttgtcacactgtgacactttgctgagtgaacttgttgcacacctatatattgatgggaaactaactatgttgttcagattgctattataaattttgtataggtctgtattagccgactggttgaagaactggatggagcctaaaactaacaaactacttaatgtgaaggtttttgctcaatcttctcccaacgacaaccttctgcttgtccaagcactgaagaaaagaggccatatagttgcagccactggaatgggaatacatgatccaaaaacactacgcgaggtccgtagttatcttattaaaactctaaaaactcatcgcactatttcaaagagaatatgaattgtaaatatagaaagacatatttatcatcactacaacctatgattcgtgttttccttgcacaggctgatgttagccttgcaatgggagttggagggaccgcagcagcaaaagagaattccgatttcattatactagatgataattttgctacgattgtcaaggttggtttattatatgcatggttgaaatggcgaacttgggcagtagcagtttatagaatgcatacaaaaatgatgagcaaacgttgaccttttggcagtttaaatcattttgataagatactagaggcttgtttggataatgcagtgtatcatatggtctcgatctctgtacaacaatgtccagaaatctatcctattccgcctcactgtcagtgtatcagcattggctgtctgtgtggttgaggttgtagtttatgatgcatttccccttaacgccgtgcaggttcaaaatgttatccctttgttcatcttgttatccagcttttccaagattggaaaccttttccctaacccagtttttgctttttcctgatgcagtttctgttggttaatctaattatcgacatcttaggagcattagctttggtatacggaccaagatctgatcaccacctaatgggaaagccaccggttggtataaggtacaaattctgaataggatcaaggataagatttgattattaagtcaatatagagttggcttagaaagagacattaatgtattgatgctgaaggttttgaagaaactgttggttttgcaattcttgttaaaacacactatctgttctaggtgaatatacacaaactgatagtacatatgcatgtgtacattgtctggtcaacaaagatcctctgatcaccaagacgatgtggtccaagatgataattcaggtatgtagggtaaaatcctcgattgatcatgtgtggacgttaatgtcagattaagtatttcacaccttcatagtttccaaggagcaaatacaattccttggtgatattaaactaattaattatttagattagagacaaacacaccggtttggagacctctaataatgcttgtgtcatgaaataccttcctccaggtattttacctagtgctctcgctggtactcataaattctgagaagctactgaagctgaagcatggtcagacgggcaatgccgaaaaaatgatgaacacattgatattcaattcctttgtcttctacctggtaatatctgattttttcccactcttctaattagagttcatatgttgatcatctctctatctttctaaaataacgcaggtttttaatgagtttgaaatccaaagtgtagaccaaaccttcaaagaagtccttagagagaatatgtttctcgttacaataacctcaactatcatatctcaggtaagtcctctttacaagtgaacacaacatttgtcttttcttatatatccctaaaccatatatactctctttctgttctttctatatcagataatcgtgatcaagttcgcaggcattttcattgacttgaaaaaatgggtgacgacaagtcttttggggttactcaggttctgctcataaacatcctcaactactttctttaattttttactcttcacattttttctcaatacgtaaatttaaccttttttcagccaagtcgccactcgctacccttacccagccatccaatatcatcgtaactgagatttctcttgccgtatggctcaattctcgtaagaagtaagaaccattcactcccaaagtctcctaatgaatcgcatatgactatcttattttagatctggcaagtagtttctctcaacttgcagttctcatctcaggtcaacttttgaagcatccctctagctttggtcgcttaggaggctgttgttctctgcgcgggtgtgcgtgagagattaaataatgcggattattgtgctgtgtatatagcatactacagtttattcagtcaattcattttcctcttcaagatatgtcgagtgaaatgcgtgaaagtcaaacatttaagttctgtatccatttccctttcaagctatgtagactgtaatgggtgacagtcatatatagtatatatagtaagctctgttcaatcaatgcacctcttcgttttcgattcatgaattgtttgttggatgttcctaaatctttggatccagctgattcaccgcgattgaggtggctttagttatcggtatccaccattccttactgctataggtcgatcgaatcaataacactacgacaattcgggctggttagacagcgggtgcgatactagtttattcatactcctactcgtacaaaaatcaagaaaatttcatctccattcaaattaagaaaaaaaacagtaaacattcatataccatagccacaatcacattcgtggcggttttacactacacccgccgcacctgatctttgacttgatatttttatacaactgagtcggtttttgacttttgaggttgtggacagatctaacggctaatagaattcgagttatctacttcacctgacgcggcaaaatctcaaccgtcccttataaagctcttcgcggttaacattttctctcctctgtctgtgtgtactcgtggtaaattagtcagatttcgatttggaaccctaaaaaaattcaaaagacgatcctcttctcgaagaaactcgattcttgtggattcgatttcattaaggaattttgaattgttgcctgtgatgggtggtttggctatggaggaaatgcctttatcggtgctattcgagcaagctaggaaaattcatcttgctgcttcagagtctggtgttgatcaggtggaagcttctacctcttttttatatacagattcgattagggtgtttatctgaaatgggtatttcgaatccgaatcgcgagtttttactgaattggacatttccggggatgcttagttcattcttttcctttggtttgttaggatgttgtgaagaaaggatgtgagatgtttcagaagtgcgaagatatgatcgggaagctggcgctgttttcgtctaacgagactaaagaagatattagcaccaacaatctcaaatatcttttggtatgcaattgagtctctgttgtttggattttttagtaatttgtttgtattctagttttgttattagttttggtgtggaaagatctgaaagtgaaaaactttagcttgtcctgatgcttctagttttaggtactgactgaaattcaaaatggagtctgagattttggattgtaacgttttccattgaactaactctgtgtggagaccataagattgtgttgagatcataagattgtgttgcgagttgacatttctataaagtgacgagggattatattgtcttgtgattataggtgccttattatcatgcggagttgacagagaaaatcatacaggaggaccggattcagattgtcaaagcctcgtatgctaagctcaaggttagttttctgctgagtgtttacatgtttttgcatccctttcatgctattgcaagtgggaatgagaatttggaaggattttttttgagattgattaatagttttgatattgtgtctaggagttctattcgttctgtgaggcaatggagcttgttccggataaggagttggaggcttcttcacgaggaggttctggtgcacctgctgatcgaagggctctcaaggtagattcagccctgtttcttttgtttatgttctgacgagaatgaagtttaaagttttcgaattttgaaatgcgtgttgagtcttcatgattatggaactttgtagatagctcggttcaaacgtcaaaaggctgcagaggcaaagcttcttgaaattaaagagaggaaggagcgacgtggacgttccactaaagcatcagctttgtcgactccagttnnnnnnnnnnnnnnnnnnnnnnnnnnnnnnnnnnnnnnnnnngagagagaggtttgtcccactttttattttgctgctttctctagttcgatttttttcttctaaaccttgacttattgctttcctctgcaggcctggctctcctcaattaacttggctatttgtaaggttttgtctagatatcatttcattcgaatcctattatttgtcacaagttgaggaggctttatcttatgattgaacttcgttacagggtattgatctgttggaaatgctaaagagagaagaagaaatgctctctgcactaaaggaaagacagttgaaggtagcttaccgtggtgttatttttttt

SEQ ID NO: 37553 - DNA, 4375 bp, Arabidopsis thaliana landsberg
agtaaaattagacattccatattattattatatagtaaaggtaattaccggcctagcgttatgtagatttcggtgtttctaatacatgatctgagtctttttagtccaaagcaatcgtcatgataaagttgttcggacatgaaggaactagaaaattctactaactttggacaaaattcagttttaaatagttgataatataacccatagttataatcagttaattttctatttcctggtctatgtcgcctagaatgatctacgaattataaatcatatttgatcgaaaagaaaatgttataagagacaaggcacgcaagaatgattgaagatggtagataatttaggaatccagaatacatgatgaattattaccttacggcattcgaaaaagtgttcaaattatcaattcttattcttttttttcttataacttgtgattttgtgtgttttagtggattttctaatcattaggtaaaaagtgtggtcatttagtttaacaaaattgtaaatatcgaatttgatacaaaatgaaattaatgagtttaaaaataaaggtttgacaaaaaaaaaagagtttaaaaataaataaataaacttagagaatcaaaatgagagttttaattcttgtcatgttttgttttgatgcaagaaaaagtatccgaggatgctaaatagcttagaatgtcatgaatacgtgatgaaatcattacccaagcttgtatcatatgaaagtatttagggaaaattgtcaattcagaatttcttagggaatttaatgaaaaaaaccctcaactttggccagatccatttttaaaccctgaactatgtttttagtaaaacaaaccctgaactaaaacctgttaataaacttaaccccacagtaattaaatattaatgggatattaatttccaaaaaaaacaacaacgagacatttgtatttagcgcaaaaaccacatgatgttctttaaaactgttttgaatttattacaaaaaaacgttctaaatgattttgaattgcttaattagtttggattttagaagctaaaagaaagacacaacaacttaaaataatccaaagagtcatgcttaaataaatccaaccaacataactatcgaagcttttgcaacacaacaatatttgtcacaaaaaaaacaatcgtttcagagggacaagatattctaaagtaaagacttgtcaagcattaactttgaagagaagattgtattggctgagtgatagggttctcttcatccattgttttatgttttttccttggtcgtccttgaggtttcttgggtggttttggcactgctttacgcttgcatgaacgtttgttgtgtccgacttgttgacagttgctgcaagtctaaatatgcaaagattaaattaaataatttgaaaaggaagatcttgtgaaacataattcattgttctctattttaccatttgaactttttcacgtgtagaaggaactttttgaggtggacgatcttcagttggatcacggattctgtcattgttctttggtcttcccggcatgattctgtctggaggaggcataacaacaacatcactgtgggttttccacaattccatcccattaacaggaaaaagcaaagagctgtaacatagcttccacttctcaattgaataccaatctgacacaacagtttccggtagcttcgtttctttatattcctcccacatagcagacataatatggcagcacggaatgccactcacatcatatgctctgcaagtacaagaaacaacatctcgaacataaactcgatacttatttatcccatggtctacctcataccatccttttcctgcacgtagtggctgacaccacttaagatttttttttcgcttttcaatcacagcttttgccttcggtgtgattgttcctgtagcactctccatctctttaatcttcaccaagttacttgacataacatgtctccttatatcttctagcaatgcgacaactggtttatatcgagcatcttttaatgcagcattatatgactcgcttatgttgttctctaccgcagcggactttgtaatattattaaaaaatgctctacaataaggaaaattatatcaatgttaaaatagtggacatatatattatgatgatgatggatagattcaaaagaattttagacaagtagacaaatcattaaaaatgttaaagagatttatataaatacctggaccaattagaacccatacttcttttcacttcttcataagcttcaggtcgtacactcttcatcttctcgagtcttctttcaaaaacttgcatattgtatgcttttgcgcacttccaaaacaagccatgtaaatttcccgactcaccgtgtcttttcttcaagttggcccaaatatgtctagcacacattctatgctctgcataaggaaggacagttttgatagcatatatgagccccttttgctggtctgatgataatgcaaggccatttccaagctccaaattcaagtcttcttgcaacaatgtcataaaccactcccagttgactttattctccaccggaacaatagcccatgcaataataaacatctggttattcggatctcttcctacagcagttaagagttgtcccttcatgcgtcctttaagaaatgttccatccaaatgaattacacgtctgcatgcacttttccaaccagttttttgagcttcgaagcatgtgtagaacttctcaaaaactttatcttttgtccctaatatcacggttgaaccaggattcgactcacgaagctcctccacataatcatacattcttgtaaactgctcagcgtattcatcactaattatgtgtaacataatctgtcttgcactctgacattttgtttttggaacacgtagaccttggatcgacaatctttgcttaatttgatcagcgcttagtgttcgattagtcctaaactcactcagaaaactagctgctatcttaggggctgtgtagagtttcaccacacctgttgaaaaacatgtgtgagttcctttgtaagatctgacaaccatatttgtataccgactgtttattgaggcatatatcctccaatcgcaacactcttgtacacaagttgcttctacttttttactttcagaatgtttaaaacggagattgaccttctctttgatagcatacttttctattgctatcttgcatgtttctttggagagaaaagcttggtcaacaaaaaaatcaagattttgaccatcatcatctgaatcactatcagcataatcatcacgataaaagtctataggttcatcttcattcttgggttcctcttcttcttcctcttctccaacaagaacatcatcaagataaggatcatcaaccctaacaacatatagattcatactttccaactcataagtattgtttatcatctatgcaacatcataatcaccacacaattcttttcgattatggtcttcagatcctgaaggaaaatatgaaaacttactcatattttctgcaaaaccctcattccgaacaatacttattagcattgatatacttggattttcaaagtccactctacactgccttatatcaccaccattgtatgaaccatcagatgcccaatacccaccaacgtgtaatcgaaaaaaagtcgtcctgcatacaaaggaaaaatatcgtattgttagtgaagtggagaataacttccaaaagtattttaaattcctcgttagtggtaatatgcaaaagaaagtggcacatgtatggaactcgaacaaggggaaaaaatattgtaaatcctttgtttgacttcgttttttggtttgttatcttttgttttttttttttttggtctctttcagtaagctttccacatcatacaaaaaaataagagttactccaagcttttgaaaattctatatgtgtcgaagtcaatgtggaaatacaaacaaaaaaatttttttttttgacttacctcaacatcttagaaaaatcaaacgagatgaagtagacctctgctctccgaattcctcactccattacggtgacttgatgagttcgtcttcaaatttaacactaaaactgtttctctatcgccttataagcctactttcacttctcgttcaacatcgttagatttatgacagattagggttttacgatttggagttttttctgaacacgagtttagtgtggtctatggcaagcaaacttcgtgtggttttggcgttaaatacaaacgtctcgttgtttaattactgtggggttacgtttattaacaggttaaagttcagggtttgttttactaaaaacatagttcagggtttaaaaatggatctggccaaagatcagggttttggtcct

SEQ ID NO: 37554 - DNA, 3523 bp, Arabidopsis thaliana landsberg
ctctcagatacatatttaaacatcatcgaccagccgtaagtcatctaacatcacacatccctaacaaattgcaaaaacaaactctaattgaccattgttaaatatctaagacctaaggatatttagggagacgtacactgcatactagtcgaccatcgaatgacaaaaccgatctatttgtcccatagatctcgtcatcaacattatacaacttggcacttacattctcacaaacggctgacatgtactgttctccccataaagcagaagttcctggataaaaccctactctcccagaaaacaccatatcaagacccaccacacctcctgtcaccgccacttcatcctccatttcccaagccgcctcttcatcgataacttttgtttcgtttctcttgacaataacctcgttcttctctccgcctttctgccagaacgaatcagctcttgcggtcgacacgagctttccccggtgaaccagccacactgaaggattctcgtacgtgacatggagtttctcgttagggtttttgatagagaacgttgcggaccagaccgggagattgtggttggcgaacgatatatgcattgattgtacgtgtactgtggggggagttggcgtaatcaatatgacaaacgtcacacctgctacacaagcacccatgatcgtgatggctagaaagagtttgaaaagtagtgaccagtgtgagatattagctggttcggattcttggtggctccgtgatgatattggtcggagttccgggactttttcggtaccaatgacggttatcagaagctgttgattcatttcttcaaccaggttttgttcatcatccatattgggatttatacaagtgctgataatgtttacttgtttatatgatgatatctcaaaacaattagagaaaaagatttatctagtagagattataaaaattaaagatattaataattaaaatctttatcattttttctgattgtatatataatagataaaatgattaataaaatcattgatttctataatctcaactagatgaatcttttagtttctatataatcattttatccactatacaagattttattccttctaatatatataccctgaaatactaataataatatactaaaacaaaatatactatttttgcaacataaaattcattttgtttattatgtcaaacttcagcattcatgcaagattttgagaataatctagtgatgatataattttaaattaaaatatataaaatagttcaacaaagttaatatattttatacacaatataaaatatattcccgattagcaaacaatgtacttaataaatcaggcaaaaaaaaaacagaaaatcgctgccaactattccgcctcaatgtccggtgggaaactcgcatttcccatatcctgcaatcaacgaaaaaataattttgttagaattatataaaaatattaaaggtcaccatatatatcttacagaaacgtgaacatcttaaaatgccaaaatgacccaatatagctcaactttcacaaccgccaactactaaaccatttgccactatctttttctttttttcaataaacataccaaatgaatttttaagcataaataacagctaaatatacacttctgaattgaactaaagcaaaatagatgtaatgttatgataaaaacaggagagggattagattaacgtacgaggaggttgcgtgacgacgtgagcagctccaccaaagaagcacgtaccaacacgacgtgagttcttctggtagtaactattgaaagcgtacgaagcgtgagcttctaacgactcaggatgataacacgtggcacctggctgaatcgggcggcaatcagctcctccttctccgcaagcgtaatcaagagcctcctgaagtttctccttcgctacctctccgttcgaaacgcaccacgtatgtccctcgtgcgtcaccggaaccttacctctgttaccgttgaccggcgtcgttgactttttagtgaacggaacgttgtacactttcccttcgtttgggtaaaacaaaccgtagtttctctcagacgttggccccggtttctggttttcgttgaataaagcgaataaatagacgttaagtggctccgtcggtcttaacggtgttcctttacccgttaacactctcttcacaagtccgacgttatacgccgccgcgttagattcgcttgcaccaatttcattctcgtctccaacggaaggccaccctgtttccgtcaccatcaccttaacgcctttaaatccgacggcggacaatgccgcgtaaacggcgtcgatttgagcgtcgaagagactgttatacttcaatccggtaccggaatctatattcccggcgttttctttaaacagagcgtagtctaaagagattttatcggcgtttgctgcgtaagcgaaaaacggataagcatttaccataagatacgacgacgtttgttgaagcagagcaagcattggtttaacaaccggttcgattaattccggtttaaaagaaccagaggaaggcgggtacgaattagcaagcgcgctaagagcaataggagacgagatcttgatggctttgtcgaggttatacttaaccagagaggtgtgaatgttcttcatcgcgttgacaagatacggcgtgatcgtcggatcgacaaatacttcgttaccgacggcgatagcttcgatcttcgtcgctgggaagtatggcattatgtgggtattaatccagttgtcggcgaatgattggtgggaggcggcggaggagagaagctcgttagggagagcgacgattactttgattctggaatttgcaagtgcggttagtacattcttatcggtgtcgaagattttgatacggttgattccttgagatttcaggaggttcactactttctccggcgacgggaggttgttagctatccgaccataattgactccgaccattccagaatctgtggaaacaaaaacaaaaaaaacgcaaaataagaacaacgtagtagacacggcaaatacagagacagacataggtatatgaagagatgaaaaactaacgtgcgtcaatggctgagaggaaggaaagaatgagaaaataaggtaagaaagaaacggccatggttattctcgagtgtatcttcagaaacagagcattaaacgcatagatgagtgtcgtttgatagttatggagacgaaggaaagtttttgttgcgtttgggacggagctggtctacagtatttatacgatttaggtgtaaacaagtgccaagtgggggttgtgggataactaataacacggaagaatagctgaaataatagatttaactaaaactgtataattttaaagctctatttatagcataaagttttactttaccataatcttcagttaaaggaactctctataattttgatgtttatctaacatatgaatgttttcatagttgattttggttataacagaaacctaacaaaaaccttgagttttattgtttcttaaacaaga

SEQ ID NO: 37555 - DNA, 2470 bp, Arabidopsis thaliana landsberg
tgttacatatacggcaatgatatgctgatacatgagcctaggaaaagtggaagaggcttggaatgcattccgcaatatggaagagagaggaacttcaccagattttaaaacatatagtaagttcataaactgcttgtgccaagcaggcaaatcagaagatgccctgaagcttctgtctgagatgctggataagggtattgctccaagcactatcaatttccgaacagttttctacgggttaaacagagaaggcaagcatgatcttgcccggattgctctacagaagaaatcggctttagtagcacagcgaacggtatcttagataccgtatccgcatgactatcactgacatatcactgtaattctgtatccatgggaagaaactcatgcaaattgattcaaagcaaatcttttctaagcaacgaaatctgtaaatgctctattacaaagtcctctttctgtctgttaacaattcaaaaagtaagagctatattttaagaaacgaggagaacaagtaacaattgattctaatcagtggttttagcaagtctttacacttacagtagaagctcaactaaaaagtagtaagttgagaatctcaaattataataactctttacacgagtagaaagatttagtgggaattcagtcattcacctacactaggagctatgcctgacttctctttggggatttttgagaatacatgggaatattctaggaatcgagcccataaacagtctattaacagcccataaatgaaacccataaatcgagcccatgaacagatacgaaatctgtaaatcctcttattacaaatacagagtcctctgttctatataactaaactaaaacatgtagctaagatactttcagttatgagccatgatctgttcctttcaaatgtgacccgtaaagctataaggcaaacataaaaaaaaacgtgttcgtttttaagggaggactaattgcctcatagcttcttcaaaatttcttcgcaggctcgctcgtaataagtcattctctgtatacattttacagcatcatcaaacttctggctttcaaacgcttcgacgaaagagtcagaccattgctttagtttctcttgtaccttgagaaaaacaacaaaatcgcattggttagatcagtttggcatattcaaccgatgcccagagctacagattttaaggtgtttggaaagctaacggaaagaaagaccatttgaaggaagctagctcaatcaggaattttcaaggtacctgggatcggatctggtttaacgatgttgaatcatctgcttctgatatggcctctctgagttccataatctgacaccattttcaatgaataaaagtaagtgaatgtgtttatttatggcagacatgtatttgcacctctacagtagcagaacaagtcgcacaaactaatatatggcatcaagactaatctttggcaagtagatccacttacctccattaacaatgttgggtctgttattgtttcttcttcattgacatttacgccattcagcttcatctacataatcaaatagtttcaggaaaacttgcagcttttgagaatcctcaaaaacgtaatgacaaaagtgaagaagagcttacgatatacattgctctcgacagccgctttgtcaatgtccggcatgcttcagtcacctttgcagactgctcggctgcgtaatctctttctttctgtcaataatgtcaaaacgtaagagctaatttttaagaaaagaagagtaataacataaattagaatgtagaaacaaagagaccttggatttgttatgaactaaatcaggatgtagcttcttttgccagtctttgtacttgccttcaaggcttccaggatctatctcatacttcttctccctatatagacacaacaagttattgaaaattcaaaactcaattcaaaggtctcatcttttgaatgatatccaacttaaagtttcaatctttctatcgtttctcctcagcccaacaaaacaggaatccacattactatcatagttctcctcaaaccctagattctaatcaagtcgttacacacttacaggccaaaaatctgaaaatagtcgacggagtcatcaacaggttgaatgctacggcatgagttacagaacaaaaaggcagctttctcgccacagttccagcatccggcgccagattccgagcagaaaactctcccggagaatcggagtcgtccctcagctgaagaatgatgttgcagagattcgcgaggcaattgggtttgtgattgaatcgtcgcgagtgaattacaccggaaagttgaaggataggtccgtctaataagggtggagatggaagccaccatcgtcttcgttttcttcattacgggatcaggagaggttttggctctggagagatcgacgtgtacgattctctactgtccctaatcgaaccagaccgagtaaattggttctagtgtt

SEQ ID NO: 37556 - DNA, 3591 bp, Arabidopsis thaliana landsberg
aaattctttgtttatatcttgtgcgttttataactttgtaatattgacatacaatttttttacgtaatggtcattcaagacattagaaataccaaaaataataaaacacgagactttctcctatatagctatatgcaaggaagaattctaaagtgatgatttaaattactagcatatcaggatgtggttggtgtactagatgacgagagaatatatggaataaagaattgtttgttacaactaagttagacaagtttcagatcacataagtataacataactacatacattatatcaatatatcatatgttgttttttgtgttcatgatagtgaaagatgagaaattgttaggaatgcccttccaagactacccatttttttattcaaccactccctttagacaattttcatatataccctcttttaatttttaatgactattttatccatatttgaaaatgttttaggttaacaaaatgaaataatgattttttccgccaaaaatattcagaagataatgttttcgcaagaaaatccgacaaaaaatttccgtaaaaggtatttacaatgataaaggtttttaaatccttgtaattcctttttaaaatctttaaaaactctttggaaactcttgtaaatcattttaaaatccttgtaattctttttaaactcttttttaaaatccttgtaattctttttaaactcttttttaaaatccttgtaattctttttaaactcttgtatgtcattttaaaactttttaaaatgattttaaaagatttaaaaggaatttaaaatatttacaaaggtttttaaagtatttacatgtgtatttaaagacactataaaaattttaagagattttaaaatgatttcaagtatttttaacaactttacaaagcttttaaaaggctttaaaattttttacaaagatttattaagagttctaaaaacatttataaggatttttaaatgcaaattttggcgggaaagcttttgacggatgaccgtcgcaaaagttttttggcaccaaactttttggcgggaaaaagaatgttttggtgctgaatatttttttacggaaaaattttagtttctaattacatgttatcattagatgaagggtaaattattttatttatgagaaatgagtatttttaaaaatggacaatggaaggagatattttttgtaaaaaggcattgaaaaggtatttttaggtttatacaaatccgataatatgttgatattttgagttataaatgaatctaatcataaaaaattatagctatataaaatagatatgaatttattaattacataataacacacacattaaaagaacatacaaataaacaaaattcataatcataattctttccaacaattttaaaaacccatgcgtagcatgagtgttcacctggcaataatttaagagatagacaacacaaataaacatagtaatatagtatagaaagatgattgggaaataacattttttttttgaaagaatgtaaaattatattcacccaaaaaacgattgttacaataaatgctacttcatgctgaaatttagaagagaagtagaaacagagtttgacatagaaaaacagaacactcgggctaagaggacgagcgtgtggagaaccaaagctgcaggccatccttgtaacgatggttgctagtggctgtgattgtgctgagacggttccgtacggttccatcgattagcttgagattttaaaaacaatgagtcgagatattttttatttttcatcaaatatgctaaatcttaagaattaaattcaatagcattcattcttccataaataaatagtgtagtaaaccctttattgatttcccaaaagtcatcaaaaaaaaaatatatatatatataaaattcaaatattataatatttgaaatttaataaaagtcttaatactataaacatttaaaacgtttataaataagagctttggtaagccaaaaccttcttctcttctaagccaagaactggtcttctagatcttgtgtcagtgtgtcacaagtttgtttataccagtgggtccaacaaagcttagagaggctataatagaaattgccaaatattctataaagagagctgctcatcgataagtcccttgaaaactccaacgaagatggtgcaaagtttattgtcggattcttagctcaaaacgtttttccgatgtgagaatgccaggatgcatgtagtcttatttaaagcttttgttacacatatacaagagttaagacaaatagatacaatttccaaaactaaaccttcctatcaaaatctgaagaaacaaaagctatacactatactatagttacgatacgttcatatatatactcagaatggtcggggtctaaattggttttagtgcagatgatgagctggaggacagcttacacattcagacatcagtgttctacagtctattgatgacttgttgtctacgtaataaggtgatacgttaatgaccctgcaagaaaacgaagccaatatacagcaaacctgtgttttgatattgtgaataagtgaataatcttgtagctcagtacctttctttgcgtttctctaagaaccgagccaaggatgctttccgagcttgagggactggaaaaaagcaattttcgagtttagacatatgatttgaggaagcaaaaatcttgattatattttgttttgatgttgatattagacacacatacctgaaggaatcatgttacgaggagctgcattgaatgattcgatcatgctcattgcattagtcgcagcaacggggtgtgtccctacaccttgagaaattatcagtgtgagtggcagagcttgatgaggtagcagcagtgttatggatttgttttccatacattctttcagcttctcgaaccggtttgctatctccagtttcacctttcaaaccgttcccggcgcataacatgatggcttgagcctactcacatatcatgaatagtccgttttagaacatgtaaatgttatgtaaatgttatttgtatgaatcttgattatatataccttatcgggagatatgtcattaaagacgcttatagttccgccataaaagattgtgagctgaggagatgatccggaggaagccactctgtttccacaaacccacataaccaaatcaaaatatgaaaagagcaaaaaaattgttgaatgtttttgcatcataatatggaaattaccgtggaacaagagaaggatgagttggtaaaggaactgaaccgcctagtaaaagcggcgtcgcgttttgaaacgcaccaccaaattggcatctgcggaaaacattggccgcagaaactgatccccactggtatgcacccggaaacgccttagcctcctaatttgttaaattcaaattttaatcgtcaacgtctttaaattttttgtacattctaaatttagaaaaatgccaagaaataaacgtgatccaaacgccaaacaccaaacgccacaaaatattaaataaatttttaccctaactttgcggctggcagacgaccgaccctaccagctcttaactagcacttatccaacaatttttt

SEQ ID NO: 37557 - DNA, 6988 bp, Arabidopsis thaliana landsberg
agaacaacacgctactaatgctgaaactgcaacagatgattcagaccctgctgagttctctgtgaagattgtagagtgttcttgggatcaggatgagaaagtctgggtaagcatgcgggtcagggtcgataaatcaacgccaaatgatatcaacactttcagaaaggtcagtaccataatccctctttatatacttgagttgttgcattattggttgacgatcatactttactaacttactttcctcatgtaaataactgacatttctttctgtcttttgagttccggtgtgattgggttaagtctaaaccattgtgtatgtcaaaataggtgatgagaagcataaaggacaacatcacagaggaagtgctactgcaggagataagggagatcatccgtttgcctatgtatgcggatcgtattcaaatggatagcaaagctgcgcgccgcagatgaaacgtctgtttgtttctctcaatatacccaagaagctgagtcaagaaaaagacatgtctgggttggcagtaatgcttttgcttctcttctttgcaaatcccggggtgcttctatactaacattgtacgtaagaaggaaaaaaaaagaacgctgcatttctcgaatgtgtaagaatcccggtttcaaggaggttttagggtgggtttattatgaatcaaaattccgtttgggggtatgtgatgatggttttagcttgataagatgtgtttactcttctaagtgattcatatgtttagatgaaggtgtttgtaatattactagcaatagtacttaggaatgttgtaatcttttagtattagtatcatattattattgttggttccattatacttcagaagcaaaagaatgttagacacttttatcattgagaaagtatcaccactccgattctcatatcatatgtcaatcattttgatttgaaatcttttcatcgcattttacatagaaaaatcaagaacggaaaaggttaaaaatcttccttcgatcattcgaagtgatagggaataattgacgtttctcatatttgtaactaaacagcgagctgtgtcgtgcgttttacttagatcaaaacggcaagcagtttactcttcacagcgtcattcgatttcgccggctgcgatctcccacacacacagagtctcagcttcgtctcattctccttctcgatctctcctttttactcaccattccaaattccctaaaccccgattttggggaggttttacaaaatctatcgacgtagttggatacagttcttcgattctgattcgattttaattttatgtcaagggaatttgtctagtattcgcagagtgtgatcatatgaaatctcgagcgaggcagtgtctgctggtttgtttgctctgtctttccttaacgaatctctcctatggagaaaataagttcagagagcgtaaagccaccgatgacgagctgggctaccccgatatgtaagttttcgatctgtattgagatgcaacgcctcaatttgatcgaatttttgtttcataactcataccattgattgctggagatatgtttctttcctcgtaaggctttctgtttggtttctccgatttaagtttctttctgggttgtttcgtttgtgcagtgatgaagatgctttattgaatactcagtgcccgaaaaaattggagctgcgatggcaaactgaagtcacttctagcgtttatgctacacccttgattgctgatattaacaggtttggtttattatctttcccaccaatgtttttatgttgattctgtgttaaaatcttttactcacaatcagatgttttctctctcgaatttgggttaaggcatcatgattaatgagtgctggttccatactttgtgcttaaagccggattttgtttttgttacagtgatggaaagcttgacattgttgttccatcttttgttcattacctcgaagttcttgaaggagctgatggagacaagatgccaggtacaagatatcttatcttctttacctttagctttctgaaattttattttgtgctttgttcatttgatgctgtagaatattaaggattttgaaaaggttactgatgctctcataaatttctaggttggcctgcttttcaccagtcaaatgtgcactcgagtcctcttctatttgatatcgacaaagatggtgttagagaaattgttctggctacctacaatgccgaagtgctctttttcaggtaattctttctctcagatgatggatattcttttgtctgttatcatcgatccttagagttttgtgggttttgcatatgatactttcttgtttccagggtatcaggctttttgatgtcagataagctagaagtgccacgtaaaaaagtgcacaagaactggcatgtgggacttaatcctgatcctgttgaccgttcgcatcttgatgttcatcatcatgtgcttgagaaggtagatatggcaatcaagtcatagaccactcgtaaccttctttttcatattggattttctacgtcagtttattctttgcttcttaagtcattcccatctcccatggtttcttggtaatttgcgttcttcctagttctagaggacactgaacaggtaggtaattgaaagtataaagataagtttatgcttcgagtagctgcctcagcttatctgaagaatgtttttgtattttgtgtcttgcttttttcttatggattttacgtctgatgggaagctccagtatttagagggtagaaaaagtacatgaattagcagagtcaatttagttcgtgatgaaagtttactttgtgactctcacttctccactctgtagaaacgaatgcaactaccacaacaccaaatgttacagtctcgatgaccaaagaagttcatggcgctaattcatatgtgtcaactcaagaggatcaaaagagaccagagaataatcaaacagaagctattgtaaagcctactccagagctacataattcctccatggatgctggagcaaataatttggcagcaaatgctactacagctggctcaagagaaaacctcaatagaaatgtaaccaccaatgaggtggatcaaagcaaaattagtggagataagaatgaaactgttattaaattaaatactagtacgggtaattcctcagaaactctggggacatctggaaacagtagtacggcagagacagtaaccaaaagtgggaggcgacttctggaagaggatggttcgaaagaatctgtggacagccattcggacagtaaagccaacagtgagggtgtccgcatggcgacagtagaaaatgatggaggcttagaagctgacgcagattcatcgtttgagttgttgcgtgagaatgatgagttagctgatgaatacagttatgattatgacgattatgttgatgagaaaatgtggggtgatgaggaatgggttgaggggcagcacgagaactcagaagattatgtgaatattgacgcccatatactatgcactcctgtgagtttcatctatgtcaaaaaccttgtttaggattattccggattacttacttccatgggagatcttactgtatctctttttatcaggtaattgctgacatagacaaagatggagtacaggagatgattgttgctgtttcctatttcttcgaccccgagtaagtttagctttcatgctgtaaatgttctctgaatctgttaatgcaaaagcatcattagtatgtattgcatgcatgaggtcttgaatattatcattggcgttttcaatgtatttgcattgcataatatagggcagctaacacaatacgcaattttcaggtactatgataatccagaacatctgaaagagcttggtggtatcgacattaaaaattatattgctagttcaattgtggttttcaatcttgatactaaacaagtcaagtggatcaaagagctagatttgagtacggataaagcaaacttccgtgcttatatttattcttcaccaacggttgttgatttggatggcgatggttatttggatatccttgtcggaacttcctttggcttattctacgccatggatcatcgtggtaagtcttcttgttacttcctgctgtttattttcttgcattgatgacaattctgcatttcctgttactgtttttaccaagcaatgcttctagcaggagctgtttcttttggatcggttttatgtgattatgcaactatagctttcatagtcaaggtcacacacttcaaaaaaaaatctatgttaagtttgaatattccgtttccctgcaagaccaaaatttcactcttattttattcttgttcatggacaatacatacacaagttttactacacatttttgcctgcaaatctcgatgttggtttggattctaagattgttgtctttttgcaggaaacatcagagaaaaattcccactggaaatggctgaaattcaaggagcagtggttgcggccgacataaatgatgatggaaagattgaacttgtaactactgattcacacggaaatatagcagcatggaccacccaaggagtggaaatttgggaagcacatcttaagagccttgttccccaggtcaacaattacctctgtttattcttatcagaaatagaaaactcttatgaatgaaccagttgtacgagcatcatcagaattctatcaaataattgtagtgtatacaagctttcatgagatcttaagtccctgcgtaagaccaaaattatttaccatgtaacattgtaacctgtctctgaattgatcacttcacgattattgattgctgccaatcttctcttacagggtccttctataggcgatgttgatggtgacggacacacggaggttgtggttcctacatcatcaggaaacatatacgttcttagtggcaaggatggttctattgtccgtccttacccatacaggactcatggaagagtgatgaaccaacttcttcttgttgatctgaacaagcgaggtgagaaaaagaagggtctcaccatcgttactacatcctttgacggttacctgtatctcatagatggacccacctcgtgcactgacgttgttgacattggcgaaacttcgtaagtcacttttgcttcctctcggcacgtaatatctttagtattttgaccaccaatgtctttcgagttacagatacagcatggtcttggctgataatgttgacggtggagatgatctcgatcttattgtctcaactatgaatggaaacgtcttttgcttctcaacgccttctcctcaccatccccttaaggcaagatcaaccccgaactctatttgcgagcgggttctgctcaacatctctttgattgttttttaaaatgggggaaattactgatttcacacttggttcccgaattcatcaggcttggagatctagtgatcaaggcaggaacaataaggccaatcgttatgatcgtgaaggcgtttttgtcacgcattcgaccagaggtttccgtgatgaggaaggcaaaaacttctgggctgagatcgagatcgttgataaatatagatatccatctggttcacaagcaccctacaacgttactgtaagttcctgaaacctcaatagatgagcaatggcttcttgctgaactaaaccagctgttttcaaatacagacgacgctgttggttccaggcaattaccagggagagaggaggataacgcagagccagatctatgaccgccctggaaaataccggataaaactaccaactgtgggagtgagaacaacaggaactgtaatggtggagatggcagataagaatggactccatttctcagacgaattctcactaactttccatatgtattactacaagcttctgaaatggcttcttgttctcccgatgctcgggatgttcggtctgctcgtgatactacggcctcaagaagccgtgcctctcccgtctttttcccgcaacacagatttatgatactaggtaccatctgtaaacaggaggtacacatcctcatagagctcatcaaaaggatccagggacaatttcgtgctagagttttcgatttctgtacctttttaaaatgtaattcgactttagtattagatcaactcttttctgagtttataaagtttttgcacaacttaatttcttgagaatttatgttttgttcatacgaaatttgaatttgaagaaatgatcattcgcaaacaacgattccatgaagtaattacaaactggagtctaaaatccaatcgcagaacgcaataagaagaatcaagaacaattctatagagatatctgctgctgcttcaagagagctgcaacaatggcctcttaccaagtctcttcatctctctctccatgcttcctgtgagcatcagactaaacatcttgagatcgcagagaaacgaccaaagcggatgcccaaagctcgccggaacattcccttccacgaagaagtggctataccacgcgaatccgtaccctagcagaggcaccagagctaagaaccaccagttgatcaaaatcgaacatatcaaagcaacgatgctcgcgatgatacctatgaagtgcaaccttcgcgtcgatggattcgagtgttgcatcatgtagaaaggccagaactcctcaaagcttctgaaattcatcttctttatcaaattaaaaccctaattttgtgatccttattcgatattgatctcgagctttcttctgggtttggttggtgaaagcgagagatttagaagaggaaacgaacaagatttatagttcaagaaaatggaataaaaaaaggaaacaaatccaaacaatatatgggcctgaaaagcccacattttagaaggctttatttggtaacttatgggcccattttcaaaaacaaaaaattaaagagaaactaatttttaggttaaattaatttataacggatgaatttattttttaaaattcgatacttgtgacaattgtttacctcaaacacagt

SEQ ID NO: 37558 - DNA, 7358 bp, Arabidopsis thaliana landsberg
gctgtcgagatatatattcattgcttggcttgcagttaataaccgcttatcaattggagttagagtaaaagtttagggtggagatcaaacgtgtttattttgcagggaacccgataattctagaaacctgaaaaattccttaaaatagcactaaaacaagttttatggacaataatagcattacttaatttactatgaagtttttgttctaaaagtattatcactaatttattttttcaataataccataattttatataaaatctattcaaccaaaataaattagaaataattttaaaatattatatttgggttctctatttccaatttagggtatatatttaaaccattttaaaatttttgattcattttaatattagtttatgatattatatttgggttctttatttccaatttaggatatatattttcaccatttaaagagagatttttcattttaaaattagtgtttagtattatatttggattctctatttccaatttatgatatatatttccactatttaaaaaaaattgatttaatttaatattagattagtgtttgctttcatttttattttgggaattgacacaaatagtaccaaaaaactttattatttagttaatttctagaggattaaaaactttgtctgctatatttggaagtttcaaaagaagtgcaatttttaaaataataaagttttttagtgtcatttctgtcaatccccctaaaatttagagtgttatccacttaaaatcgtctctattatttattttgttgaataattcactctaatgcccttttctcaatgcccttttgcaactctaccccttttttttccattttcatttctaccctttctaatacttttctccccaaattacccttaatgagctacccacagacctaattcatttcttcactctctctcttcttcctccatcggaaattgtgaatgtcgttgaatcccatgccgtcggaaatagtgagtttactcgccgtgaaaacccatcttcgccgtcgtaagtagagctgtgtgtcgtcgtcgaatctcttgcgtttcccaggtttgattttataatgttagcttaaatcttcgttttcgaattggtttattcgatttttgttgttgattatgtgaattcgttatttgaatcatgattcaatcgacagtttgacatttgcttcagcttcgaatttgaattttgtttgagatttgatgattgaatttgtttctaaaatccttgtacattcgttatactgttctaaaatccttttgaatttgttatactgtttcgtgatagatttgcttatgtgaattcgttatactatttcgtaatagattttggttctgatttagtgtttacctcttttgcatatgctttcgtgatagatctatgccacttacgctttaaaacgatttgtaaaccatgttaaccacttttcaaagcttttaaaatcccttgtaaattattctatgctacttacttacgctttaaaacgatttgtaaaccatgttaaccacttttcaaagcttttaaaatcccttgtaaattattctatgctacttacttacgctttaaaacgatttgtaaaccttgcttctctctgtggtgacagtgtttttgtgggtgttgattttgctgttatttatcttatcaggttataatgctagaattgtattttgtttgtggcttgtggaagttgacaaacaatatgacttgagaatttaaattagacattgaattgggagcttctttagtgctcattgatgagcacaatacctatcacgcgttggttgatattcttgtagaggattttcaaatagatagttcaaccaattctttgaagcttagttacaagttagtctccacgtctacaaccatacaatctcatcctctttatattaggaatgatagacagcttgcaacttttatgcacaaattctcacagagtggaggattgcttcagttatgtttgactgtagagcaaatttctgtgacagttgagcaggtttttcaataaccttcttgtgttataatttaaaaaatcccttgtaaaatcattattaagtcagtaattgtgcttattacaggctgagactacttcaaatccttttgtttctcattctgtccctaatgctcaggtacttatcgttttaaaaatccttgtaaaatcattattaacgtttttaaaccccttttaaaaatccttgtaaaatcattattaacgtttttaaaccccttttaaaaatccttgtaaaatcattattaagtcagtgattgagtttattgcaggctgagacgacttcaaatccttttgcttctcattctgcatctactactcaggtaataatccttttaaaaaatattgtaaaatcattattaacgtttttaaaccccttttaaaaatccttgttaaatcattatttaagatagattgatgtttgaggtaagctttttattttggcagccgaggttaacctctaggattattgaggcgtgtgtatctgaaacatctagtattcttgatcaacagtattctagttctgcgttttcaactggtctaagtgatgctgattctttgtttattggaaaatttttcaaagccaaagatgaaatggtattcacgttgcagatgtttgcagtgaagcacagctttgagtttcatacagtgaaatcagatcttacgaggtatgttcttcattgtattgatgaaaactgtagttggagactacgtgcaactagggctggtggatccgacagttatgttattcggaagtatgttagtcatcacagttgtgactcttcattaaggaatgtttgtcatcatcaagcatctgcaaggatattagaagattgataagtaaccattttgaaggaggaaagcttcccctcagatttaaacagctgatggaaatatttagaaaagatcatggagttgggatcaattattcgaaggcttggagagttcaagaacatgcaacagaacttgcgaggggtttacctgatgatagttttgaggttttaccgaggtggttccacatggtactagtgacgaatccaagttctatcactttttttcaaaaaaaagtctgctaataagttttagtatgcatttatggcttttggtccatcaataagaggttataagttgatgaaaaagtcatatctattgatggtgcccatctgacatcaaagtttaaagggactttgcttgctgcctcagctcaggattgaaattttaatttatatcctattgcttttgcaatagttgattctgaaaatgatgcgtcataggactggtttatgaagtgtttgctgaatataatccctgatgagaaggatttagtatttgtgtctgaccgagctgcttctattgcaagcggactttcagagaattatccacttgctcatcatggactttgcacttttcatttgcaaaaaaacttggaaacccatttcagaggttcttcacttattccagtttactatgcggcttctagagtttacacgaagacagaatttgattctttgttctgggaaatgactaatagtgataaaaagttagcacaatatctttgggaggtagatgttaggaaatggtctcgagcttattctccttcaaatcggtacaatatcatgacatctaatctagctgaatctgttaatgccttgttgaaacagaaccgcgagtatccgattgtttgcctatttgagtcaatcagatctattatgacaagatggtttaatgagcgacgtgaagagagtagtcaacatccgtctgctgttactataaatgtagggaagaaaatgaaagcgtcatatgatacttcaacacgatggcttgaggtttgtcaagttaatcaagaagagtttgaggtaaaaggagataccaaaacgcatttggttaatctggacaaaaggacttgcacatgctgtatgtttgatattgataaatttccttgcgcacatggaattgcttctgctaaacatatcaatctgaacgaaaacatgtttgttgatgagtttcattctacttacaggttttatctctattcttcacaactttacaggcgtttttaaatgttttaatatctctttttatggttttatctgtgtttatgtggttttaatctcagtttacatcgctgtaatttacaggtggcgtcaagcatattgagagagcattcacccaaatggtgatatggaatattgggagattccagaaactattagtgaagttatttgtctcccaccttctactcgtgtacctagtggcagacggaagaaaaagaggataccttctgtttgggagcatggacggtctcagccaaaaccaaaattacataaatgtagtaggtgtggtcagtcgggtcacaacaaatcaacttgtgttgctgcaatttatatatatctttatctctaaagaattgaatttgttggttttttttacttttttcttcattgtatcgtgttattactctcgtttattaaaattactatcaaaatttataagtaattttaagggttattccaataatttacgttttaaaatctcttgtaaaatactgtttaaaatgcctttcaagatccttttaaaataccttgtaaatctttcgttatgccacttacatatacttttaacgattgtaaatcaagttaaacacttttacaagcttttaaaatcccttgtaaatcattctctgccactaacttatgcttcttaaacgattgttaatcaagtaaaccccttttaaaagctttttaaaatctcttgtaaatcattatttaccacttttttatcctttaaaaccgattgcaaaccatgtaaaccctttttaaatcgtttacaaggctttacaaatcctttaaaaattcttgtaaatcgtttattaaaattactatcaaactttacaagtatttttaatagttattccaataatttaccttttaaaatctcttgtaaaatcctgtttaaaacgtcttttaaaatctttttaaaataccttgtaaatatttcgttatgccacttacatatacttttaacaattgtgaatcaagttaaacacttttacaagcatgtaacttgaatcttttaaaatgtcttgtaagtcgtttattaaaattactatcaaactttacaagtaattttaagggttattccaataatttaccttttaaaatctcttataaaatcctgtttaaaacgtcttttaaaatctttttaaaatatcttgtaaatcattttatgccacttacatatgctttttaacaattgtaaatcaagttaaacacttttacaagcttttaaaatcccttgtaaatcattctctgccactaacttatgcttcttaaacgattgttaatcaagtaaaccacttttaaaagcttttaaaatcccttgtaaatcattctttaccactttctaatcctttagaaccgattgcaaaccatgttaaccctttttaaatcgtttgcaaggctttaaaaatcctttaaaatgtcttgtaaatctttcgttatgcctataaactatttatgcatttaaaatcacttgtaaatcatgacaattcttataaatccataaacagttgacaatagtaatagttttaaaagcatttgattgattttgacactcataattaaatatacataacataaatataagtacaatcatagaccccaaataacaaatttaaaataaacatgttggaaataaatcagtctaatgatataaatccatttttgacttattaactctgtccttctctacctacaaataaaattcaagctgtaagttattttttgcataacaataatattcaagtttttaaagagatatcgttatacaaaagtagagtttaacattaaccattaatatattgcagatttgttcagccaggtatttcacttctggaagaggtcgaggcagtttgtcaggatgaatgagtaacgttgctttctttaatgctaatttgaatttcacctcgttccacatgtcccaaatttcgactttttgtcatttactgtcatgtcaaagaatctgaaatgtaaaaattccaaaatgattagaattaaaatctttgacagccaaactatgacgttatttaacttacttcttcaagtgacgatagcaaatctctaattcctttgtttttcgcccattttttaacttttaggtcaatttcttccattagctcctgactcaaaatgacctgcgtcaaaggagtttcaactgatacaaaacaaaaaaaaatagttagaagttgtttctcaaggcaaatcatctgtgaatgtaaaaacaacttaccactgttttgttcctgagtgcttttttcttctttattagagagtggtgtttgtctaacatcttcattatctttcttggtctctttggaacctgtaaaccaaaacatcaaaacaaaatttttattttttgacaattttatcatgtctttttaaaaagttaaggaatgcagacctctgttgtttcttcattttgttgttgtgattctttctctgtgggtgcagtcccattatcttcaccatctgacaaaattacatacgcttcttgatcttcagtttcattatgttcatcatgttcttctacgttttcttcttttggaacctgttttccaaaatatcaaaacaaaatttttattttttggcaattttatcatgtctttttaaaaagttaaggaaagcaaacctttgtttttttttttttttttgagattctttctctgtgggtgcaagatcattatcttcatcgactgacaaatttatatacgcttcttgatctgcggcatcattatattcatcatgttcttctactttttcttcttttccttcttctctttccatctcttcatcgccttgtttgggattctcttgtttttctgtttcttcaacattgcaagtagaatgatgatctctgtattcaacctgtataaataattacaagttcccaaatacaagcttggacacagttattattcatgtaaatcacttttaaaaagtttttaaaattccttgtaaatatgtattgaacactgcctatcttttaaaaacggctaagaatcttttaaaccccatttataagctgttaaaatctcttgtaaaaatacataccttttcttttttctcttcttttccttcttcctcttcttttccttcttcctcatgtttttcttcttgtccttgtttgggaatttcttgtttttctatttcttcatcattgttaatagaatgatgacctctgtattcaacatgtataaataattacaagttttataagtacaagccaggacacacatgtttgttctttaaaatagaataattacttatgtcaatca

SEQ ID NO: 37559 - DNA, 4432 bp, Arabidopsis thaliana landsberg
  unsure (1)..(4432): unsure at all n locations
ctaatttatgatcacatgtcgactcttgtaaaaagtaatattgtcaactaaataaaactattagattgatagtagggtgtcaatctaattaggtaagtttcctataataacgatgcaatcagcatgtactaagtcaagccaagtctagatgatttgaattatctaacaacctaagtgatcatgcaagaaactaacaaaactatactaagcagaaattaaagaacatgagtgatgaaagtaagaagtaaactacagaccatgaactatcaatgcataaacttgaataataaactaagtagagaaaagaaaagatgctcggccgagcattgaacatgcaggtcgagcaaacacgttgagcaaattaagtcgagtagatgaattaaacaaaacgagcaaatgaacaaaagaaaatgagcagatgagtaacaacacgaaattcaatcaatctaagcgaagccgagctcttaagagtggggtagttggttctagtagactcctaaatccatttagctaactaacaaactcaatcaagctattcctagataatagattcagaaccaaatcaatccactgtcgtgacaatgattctcataactctaccacttcctaatctcaactttcattgatgaaacatagcaaagcaggctttaaacaccaatctactaaagtcaataagcagtctaatcatccaattccttgggctagaatctacaaatctcagaaattagttggttcagacatttcatcaaacatcttttggatggagaaagtctgaaatcaattttcaattgatcagaaagaaaatagcattaagaactcctaaaacagaagggaatcatgcatataaacacttagctagctaaataagagaggaatccacctaaacctaacccatcctcaagaactctgaagaacactactcaagaacactcaagaacatcatagaacaaaacccagaaaattcataaaactcagaaatcattataaacttagcaaaagatagatctcaatgagataaacaagtttgcagaagaaatcaaatccaaattctcaacagaacaaccagaaaatgcaaaagaaaatcaaagaaccctaaaaaccagcggacaaaaacgaagatctcttgggcaaaaacataagaggtctatttataggcaatcctagattgccctaattgggaataagacaaaaaagataagtcggcgcaggagagctcggccctaggccgagtagaaaagccgagtggcttggtcttggtcacacagctcggccttaggccgagtggcttggtcgagtagcttctcttcatcctttagtgcacaactcggcctccagccgagtgccttggtcgagtaggctccttgttcttcacgtgtgctccactcggcctccagccgagtacataggccgagtatacttcaaatccttccttaggtaccccgaactcgagtctgtctatcccttgtgctagaaacctccaagttgagtccaaaagtacctgattcatctgcaaaacactccaaatgcaagtatgctatgcaatgcaatgcaaaatgtgcaaaagaaggaaaagagactaagaatgcagaaaaaggggaatgaaactaagctaaatgcatgaaaaacaagggcttaaaaaggttaaaatctagtgttatcaacacccccaaacttagctctttgcttgtcctcaagcaacaatagaactaggctaggagtgaggtttgaaggtggggattcagaaccaaaatatgcatgtaaaataaatagtctcaatgtccatgttgctagttctagagtgctaggttgaatgatctctacttaaaaactttagccatcttcttcacaacacaacctaatctttcacttagtctattcaagcattcaaatcagcatattccctttaacattcattaagcaagagccatggatcatactacacaatgcatattaaactcatttggctaagggcaaaggatcaagagacaaaaatggtctcttacagaataggctttagtaacgagggatctctcaagaatgattaagctttagtagaatggtaaaggtaagtcccgagtgattcatacaaagataagatcccatctacccaaagtatagtcaatgaagacctaatggcaatccaatctcccatcccaattaagaacttaactctacccttttgcattcataatcttttgaactctttcttaacccattcttttctttttctcttaattctaggagaagctttctctttttatttgatacttctagcgggtttggctttctttagtactaaggttctgttttgaatctctattaagcttanggctttttacccttcttcattagctaacaagaactctttcttttctttacaaattccaaaacctttactagactttttctaacttctttagcttacttcccttagaattctttcccttttcttatcaacaatgaattcgcccttttctttcttttaaacatatcccaacccatgatataagcgcccacctagttctatccaatcctgaaaacgcgaactagaactacatgagacactatctctatcgttacgaacctaacactttttaccatgctcaatcgggataagacctgacaaacactcacaagtgataaatggcttgaaagaaggtttaggtttagggtcggggttaactgctccaatgaggggagtcagctacttggactaacaagagtggttaaaatgagtaaggaagtccaaataatgtagggtctacatgagttcgaattcgatgctaagacatgataattctaaatcagattcaggttcaaattgattgggaatggtatcaaatcatgacagtgtggcgagtagagcaatctaggcatggtgcagttttatttcaatttgattgactacgcatcagacaactaacaacgaggacactaagtttatctagtgaaccaaaatgcttacaaggctatctcatcattaccccccatgcatatgcaataatcctaaatgaaacactctagactcgatcctaaatgtaatgcaactacatgaacactctgttttttttttaaatcattttctgaaatttttcaatttttttgttttttttttctatgccttagatgaatgcagactcaaaactatatacaatgcaacacacacttcctgagtcctcccccaaacttaaatcacacagtcctctatgtgaccaaatttagaaaagagtactcaggacaaaacacatcacagaaacaaaataaaaacaggagatggtataatacaagggtgaagtgaggtgcttacctcagtcgaagaaggagcagagttggtcgtcaataactacctatgattgcttcaggccattgaagaatctccctattgtgtctcagctccgccttgtgggtactcgacctcatctccttcgtggcggccatcaccatattttttcaggtgattactgatgaccccatggatgtctttcatactccacttgaatcacatgattcttataaggatgatgcaaaagaaggcaatccaatttttgacactggtgtcaaagatccaaatggtaatgatgcagatgatgagggaaaaatccaggtacttttataaatacaaacacaacacatcaaacattttatttaacattttatagattcttacacatttgactattgtactttacaatcagtttgattcaagtgcaaacctaagcaacaaaaaacaatctcctcagtccattcttaaaccaaattatggaggtaagctaatatataaaccaaattattgtcagtccaaatctcctcagtccattcttaaaccaaattattgtcacagtcctgaagatatattcgtttgtaattcattattcaggacaccttggagacggttgaagcttctctttcagtgttggagaaacaacccgaagaaaacattgacgatgatcctatgcggggggtaagctaataaataatttgttggaacacatcggagagggtttctgcatcccactccttaaaccaaattaatttcacagtccttacttcttcttcctctgtaattcataattcaggaaaccttggagacggttgaagcttttcattcagtgttggagacgcaacccgaagaaaacattgacgatgatcatatgacggaggtaggctaatacataatttgatttaacacattggattttgtccttaatataaataatggcacttgtgcatagttattgtggacatgattttgtggatacttactagtgtacttcaacattcaggtcactttggagtcagctgcaatatctcactcagtggaactaccgcaacccgatgaccctatggaggtatacattttaaactagttccaaaactttatttgacactggagagggatgcttcttctatcagatcttttccaaaacaacat

SEQ ID NO: 37560 - DNA, 2853 bp, Arabidopsis thaliana landsberg
  unsure (1)..(2853): unsure at all n locations
gcagaacgtgctgcaagaaccaatttgtgagcaggaaatgtttctccatcaacttcgaaagtaacgtaagctcctttcccactttccaaaagctttccaaactgctgacccaagccagaaaccggcaccgggatattgtaacacctcggtccttctgtgcgtgacttcaccactccaacacaacaccggaccaagagaccattgtccttcagatagtccgatgactccaaaagagacctcttgaaaaatcgtttgtatcccctaaaaattaagcaatcatcaacaaattaaacattatagaaaccaaaaacatgtcacattatctatactcatcagtacaaggcagagactaggcaatagcatttcttaaattcactcaaagctgtaatttttttccaagagaaggataataatttactcaccacatactccctcgatatttaagagtatagggtccgctttcgagagttctaccaaaatggctatgaactttgtgcctttcgttaccgctctgatccacgagggtaagctcaaacaaagccctaacatcggctccttcactcgcaagggctatgaagagagacacgtagacagaattatcctctggactctttccatctgggtagaagtagatggcccaggagtatccaccgaccatgaaagtatccgaggcaacgtatttgccaatccccatgcctttgaccaaagagtagccgctgatcttgaattcgtgggagccattgatggtttccgtgcgagaggtcgactccgtgagcgactgtgcggtcgatttcgaagatccaggaacctccttggaaaccctaattgtgtccatcaaacaaagacgagatccaagaatcacgactttggtaagaaattgatggtttcttcgatcttattacccggatagagtatctttgcgctgctaaagtcttcgaattgagagattttccagattgataggcgaaattagggtttcgaatcacaggggcaaatatcggaatttgagagcacgggcgagaagagaaatgaggggttcaacggaaccagaagtgagagaccgataatcgccggaactcaagaactgaatcgtcgtnnnnnnnnnnnnnnnnnnnnnnngccaaaaacgagaggtagagagagagaggaaccacttgcttgatagatcggtttaagttttaaacacaacagtttggtaggttgcgaatatataacgtcgcaaacttaagaaaatactaaaattattacatctcctttctaattgtgtttagcagcaaatatttgtttgtttatttttaggaaggagattaaactgacaatattttctttactctctttgcaaatcataatctgaaatttctcacaattaagatttgtgtttacctacaaaataataataatacataaattagcgcataaaataagttcaagtgttattcgattttattatgaccaaccagtaaaatagaacaatacataaaataaagagatacaattttttttacctttttaagttttttcattctttttttatttatctttttaacagttttgtaatcgaatctcaagtcgaattgtatttaccaatacaaaattacatgtgttttatttttaaaacatgagtcaattttaacttatgtcaaaaaaatcattaggctaatcgagtatttaataaatagatggtttatcgaaaaatattatgctgctaaatatagattattctgtgcaaatttcatcataaatcgaatattttgtgtatatattaggctaatatctacgaaaaggaattttgaacaagtaaaccctagttgatatcgtgctaagctcttaagcgaagatacaggtcaaaatcgcggcaaagcatcggtggctcgagtgacccaatcccctccaccaaacttctttgggaatcccaaaggttgctactttactcctcaaatgattcgcaagctctgttcttcattctctcgctccatcatcttccccaacaaacccatcttcatctcccgctcttttcctcaaccactccgtcactcttctgctctctcctactcctccttgaaaatgaccgatacccatatcccaaggaaccctaattcgtcccaaatccaatctcccaccaaacccttgcttcgttccctcgaatttcaattgggttcttctttcaccgtcgatccaatcatcccgccgccgaatcagatcgtcatcgttattagcggtccaagcggagttggtaaagacgcagtgatcaacaagcttcgtgaggttcgtgaaggtcttcattttgttgttaccgccactagtcgtccgattcgacctggtgaagttgatggtaaagactatttctttgtctcgagagatcagttcttgtcaatggtggagaacgaagagcttcttgaatacgcacttgtttatggagaatacaaagggattccaaagaagcagattcaggaatttatggccaaaggggaagacattgttcttagagttgatattcaaggagctcagacgttaaggaggatacttggtaactctgctgtgtttatattccttgtggcggagagtgagcttgctatggtggagaggttgattgatcggaagacggagagtcaagaggagttgcttgttagagttgctacggcgagagaagaggttaggcatctaaagaactttgattacgttgtggtgaatgccaaagggaggcttgatgatgcggttaaccgcgtggaatcgattatcgatgctgagaaatctaaagttcatcaaaggattgtcaggatttgatgtgcagaggtactctacttgcttgcttgctttaaagcactccactttccagtgtctgattgatagaaa

SEQ ID NO: 37561 - DNA, 6579 bp, Arabidopsis thaliana landsberg
caaactcgtccaaaaactgcccggaatttgttattcattatgcttcataaaagtatgcaggggcattcgtcaatccaaacgacatgacaacaaactcataatgcccataacgtgtcctgaaagctgttttactcacatctgccacaaagatagcaatctgatggtaacctgatgccaaatctatcttcgaaaaccaagatgctccctgaagttggtccaacaattcatcaattctcggtaaaggatatttgttcttgatagtcaccttattcaagccacggtaatcaatacaaagcctgaaagttccatctttcttcttcacaaaaagaacaggcgctccccacaacgaactacttggcctcacaaatcctttgtctgtaagctcctctaactgcttcttcagttcagccatttctgttggagctaatcggtaaggtgtcttggatactggagcagtccctagctctaactcaatgatgaaagcatctcctctacttggtggcggtccttggagcggtttaaaaacatctgagtactctgctgctacaagaatatcctctaattttgttcatgtatctccttcgtcatgagattgttgccaagtaagcttcagggccagtccactgtaaattatctgcttgaatcatcgaaaggatcggcccgctacgagtttcgactccctgaaacatcaagttaccctcttctcgagtaaaattaacccgcaaccttgggcagtccaaattagcattatgtctcttcaaccaacccatcccgaggattatctcataacggttcaactccatctctaggaaatttccaaacaactccacaccttcaatctctacagggacatcccgataggtccgtgatgacttcaccaatcctggccctgcggtttcaacttttctgcgcttttccgaatactcaattctggaatcccaacacttggccaactcaggactcacaaaacagtgtgtagctccactatcaaacatagtgtaggctttgactcctccaacaagaaccgatcctacacaggttcttaaactaagcaagacaagagcagcaaaacaagcacaagcagtactcatccagaaatggaaagaaaataacttaatacatttttaagaagacttaccaacaatcgggtctgcgccatcctcatcaacatcctcctcgcctgctatggcatacactcgaggtcccactgcttgcctcttttgcggtggtggcataacccctctgttctgatttcctggttgtcccccagtcaaattcactctacattcccttgcaaaatgacctggctttccacacctcctacaattattgtcttttcctggacaattcgaccatacatgaccagcttgtccacaactgaagcaattcccactcttactccaacaagctccgctgtgcctcttaccacatgtggcttaatgctgacaattttggactggtactgctccacgattatcccaagtgcgcttctgagattcagctccttttgttacatttgcttgagccctcttgagagccatagcttcctccacaagttctatctccaacctagcagcctcctcaactaactcaaccaggctagtgcaccctcgaatggaggtacgagtacgaatatcagcccttagtcccctcatgaatctttgaatcatatcctgctctccaaaattcttcatagtgaacatccttaaacagctgaactcctcatcatactcacgaacggtcctcgtgccctgacgaagctccatgaactcatgatctaactgttccatagcttcccgcggaaagtacttattattgaactcccttaagaaatccttccaggtaggcacatatccagcaggcaagcccttctcaaaatttttccaccaatgatctgcttctcccctcaggtaatgcactgaaaaatccttcttaaattcctccgggcacctcgctgtcctgaaattcttctccaacatctgcctccaatcatcagcgcgaacctaaccaaacccaccactgaaatactctgtgcccatggtactcataagcttcatcgtcccaaaatactcggtccgtgcaagcggcgctggtggctgatggtactaaggtacttcaaccctaggtgctggtggcggcggcggtggctgatggtactgaggtgcagcaactccaggtgctggtggcggtggcggtgcatacacaggtcgttccaaaatctcacgcatcatgtttcggagatcctgcatctcggtacgattcgctgcaatctctgctgcatgagctgcattagctgcctgagctgcctcatctgcttgagctgcctgagctggttgagctaccacaggtggctggtcttgcccaacaactggtgcattcgctactcggtttacccgagcgttcgcggggcgtcctgctcttcttggcggcattttctgttttacacaaaactaaacattaggacccttacaataaccgaaactttacacaactactttaaaatcaagtctagctcatttgtttttgttttgtttttttgtttttttttttaaatccccttccccatttcaatactgaaaactttttttttttttttttttaaaccgctttctaaaaatatatattatcagaaaaaccttttttcttaataaaaataaatacatatatagttagtcttccgggtcagcaccggcttgactttaacctctgctcctataccatttataatacccgtctctctcaaccttgagacggcgtactttcatcttttccattcatttattcaacttcttcaaatcaaatcttgaaataaaatatcataatttcgggaaactttcttttattaagaatcagaaataaattgtctcaaaataatagcataaataaattaaaatcgttggataaaaatgtataaagaaaccgtgtttagaaatataagaaatatcgataaatcaaataaaacccaaagtccccgaaataacaccaagcgagcagctactcaacattctcttcctcacctgagggaaaagaaaagggggtgagtaattaattactcagtgaaggcagtcaaaactgtccaccgaatcacaataacacgattatactttcacacaatttccatttcataagcatagactcaaacaacaagcaaatagcttaaactttcgtagtaagctataacagacaagcttccgtcttgctcaccgcaagatcttttactttcttttcttagtttttaacgtacgttaatttatggctcctcaagcctatttatggaagaccacggcccgtagctcgatccttcctctcattgctcgtcagcgattaatgacctgtaatgaacccgtcggttccattacagtccaacatcctcaatcttatcctttctttaatatcattattctcttttatttatctttatatatttatttaaaaatacgtcttaaagacgtcaagcaaatcaacatgtatatcacgctaacacctaacacataacatcacacaacacattttataatgttttaacaattaattcctaataattaacaatcaacacccaatgtctaatcctatacaaatgaacttcaaaagtacaaaagtagaaaggtgatactatgtttccacagatcccgccctcaccttagcaactcggttggataacacggtttcgaaataacagcaacaagaaaaggtctaataacgatttcaatctgcgacggtttaaataatcgatcaaagattattttccattaataatctataattaatttcataatcaacccaaactatatatccttcaataaattaactagacttaatttaataaaataatccaaccaaatctagtaattaaatattgattcattcactacacgtaacactacgtccacaattggatccatgcattcacgtgaatgatagcttccggtttggcaattaaccggtactctaacaactaaactaatgaatgaagtcaacttcttcttcctcaccacacaatttcacgtaacttctaactaaacaaacgattcattggttttaactggtttaatttagatcatggtttaataaccaaataacacaatcacataacaacacgagaagattcccgattacctttctcggtggcttttctcgacgagtctcccttacagtttgcttggcggttggaacggcggagtggcacagatctacgatggttccattcacttagttagattggttcaacaatcctaaagaaaaacaatcctaaagaaactaagagatcaaaaccagaatcgattctcgtgcgttacctctccagtgaggatgatttacgcggtggctccggctcaacacaacaacgatctctagtggtctgagtggtgcgtgtttgacggcgtagggtttttatggtgtgactcgcaacttgtgtttcatttttataatctcgtgggatcattaggttttcactttggctcaaatcgttggcgggctggatttgggcttcatggtctaattgtaaaataggggtgttacaattctcccccacttcaaaatgattcgtcctcgaattcaacgttccaagttgaaaaccattttcttctttaaagagctctggataatcttctctcatttctttttcggattcccaagatatttcttgaatcccttctctttcccaacatacttggactaacttggctttcttacctcgagtaccaacttctctacgacttataattgataccggttttccttttaccgataagtctaactcgaggatcctctggtggttgcgaaataattagctctggctcagtgacaacttttctaagaacagatatgtgaaatacatcgtaaaatgctaatagttcttctggcaattctaggcggtaagccacaactccaattcttttcactataggataaggtcccatgtatctaggcttaagttttgctctcttagcccaacggttcagtcctttgaacattctcatttttagatacaccaagtctcctacttcaaactccaaatcttttcgtcttttgtctgcataactcttctaacgatcatgagcttcttttaatctatttctgagtagttccacttgctcagttgtctcttgaattatttctggctcaatgtcacggcgctctcccacttctgtccaacaaagcggtgtacggcacggtcgtccataaagagcttcaaacggtggcatgcctatgctcgaatgataactgttattgtaagcgaactccaccaaaggaaagtatttttcccaacgaccgccccaatctagcatacaagctctaagcatatcttctaatgtctgaatcgtccgctcagattgaccatccgtctgacggtgataagctgtactcaactgcactttggtccccaagcatttctgaaatgctttccaaaacaatgaagtgaattttgggtccctatccgaaacaatgctcacagaaactccatgtcgtctcacaacctcatccatatacttctaagctaagcgttcagtggtgccctttttattcactgctaggaagtgagcagactttgtaagtcgatccacaattacccaaattgcatcccgcttagttactgtcattggaagtccagtaacaaagtccatagtaaccatatcccatttccattctggcaacggtagaccctgtaaaagtccactcggagctctatgttcagtttttgaccaactgacaagttgtgcacttggctacccagctagcaacttcccgcttcatttcagtccagtgataatacctcttcaagtccctgtacatcttggtggaacctggatgaattgcaaaacgcgactggtgcgcttgcttcaagatctcctcttttagatccttatcatctggaacgcaaactcgacctcgaaaaatgaatgttccattctctatggtgtgataacccccaacttcactttccactgattttcttaggtcagcatctcctttttgtgcctcacgaattctccatagtaagtcagcttggtttactgctttcaatcccattacttcatcgtcaacagaggcttcacagatattgagactcgataaggctgaaacaagctctcctacttcttttgttccattcacatcatttctcgtcctgcttagtgcatctgctaccttattagcttttcctggattataggcaatctccaaatcatagtctgtaagcaactctgcccatgtcctctgcctcaaatttaactctgctagagtgaatacatacttcagactcttatgattagtaaaggcctgcactttctctccatataagtaggctcaccaaaaaccactgcacctaattccaagtcatgagtagcatgattcacttcatgctttcgcaactgcctcgatgcataagctatgacacggccttcttacatcagtacacatcctagaccagtccctgatgcgtttgtatatagaacataaggtatcccaacctttggtaacaccaacactggtgtttgagcttaaatgctccttcaactctgcaaaactcttttcacatgcttctgaccattctaactttggttccttacaagttgctgc

SEQ ID NO: 37562 - DNA, 3123 bp, Arabidopsis thaliana landsberg
tgcagtactcgaatatgactacagtattgacaagagaatacctcgatgtacgccctgatgggtggtttgactacgcagctatgagaattgcacagttgtatgattctaaacgtttttgtctaatggtttgcttgtgttgtttgatctttcttgttgaactctttgatcttttgggtttcaggggagctgataagtgttataatcgtacattgtgtgaagagcatcttaatgtgattcttccagcgaagcctccttttcacccacggcagtttcataaatgcgctgttgttggaaattctggagatctgttaaaaacagagttcggagaagagattgacagtcatgatgctgtatttcgagacaatgaagctcctgtcaatgaggtaataatatgtctaacactctgatttctttgagtttaccgacacttcgacatggtcttgattcttgaattttgatttttgttgctggccttgcttatattcatgttgaactatgttgcagaagtatgcccagtacgtaggagtgaaaagggatttccgactagttgttcgtggtgcagctcgtaacatgattcagattctccatgggtctggttagtactcacattaaaaagagaaactgtctggctgcatcttgtgattcattttcttcaagcgctcattgcaaattgcagctttggccttgtgatgtaaccttctgtaactatcatttactgcagacaatgaagtgcttataataaaaagtgtgacccaccgagacttcaatgaaatgataaaggtatgattaccgttttctttctttcttttttctacatcattacttgttttgtttttacaacttccactgtggtcgtttatccataacataattgaagagactgaaatctgaatccttgcggtcgcttttacatggattttatcccaattcttacacgactttgaatttatcttgtaacagcgtataccaaaccctgtttatcttttccaaggaattgtcctacgcagaggtgccaaaggaaccgggatgaaatccattgaactagcattgtccatgtgcgatattgttgacatatatggtttcactgttgatcctggatacacagagtggcaagtatcttaaataacttttatccatattgctatctctcatatttccaaagctctttgggaggttggatacttacgattctgatcatatttttcctttgtatctttattatcaatgtaggacgcgttacttttccacgccaaggaaagggcacaacccacttcaaggaagggcatactaccaacttctagagtgtcttggtgtacagataacttgttaaaaccataattctactttgctctaatcgttaaactttttgtggtctctctgaataaatcaagcttggcaggtaatacggatccattctcccatgagatccgagagaaaggaggactggtcaagtgtgccaagtcgtgaaatgataagcagagctcacacagctgccttacgcctacaaaggagccaacagccaactagttcgaagagggatgggtcaggacaattcggtaattgcaaggtgtggggcgatgcagaccctacaaaaggacctgtctcgggatctccggacatgagtgagaccaggaagaagtcaaattacaagaaatgggaagtgatgccgtttaggagcttaagaaaggaagctagggatcactatatccaaatgaaaggcgtgtcacagtataagatggatggaaataagctggacgatctggtttgcgtgaggcatccactgaaattagatacgtaaatttttttatcatcttgtaaaggttcaatttcaataacatcttgagcttacaaagtaaaggttcctacatttcacgaaaattttgttgaagcaatatgtttaatcaattagttctctatgtaagatctatattcatatactgatctaaacatagctgagaaagagatcggtagagcgagtttatggatgttctttttgtgggtaaggaaaaggaatctttagaatttactggtgccattcttcgacaaacaaaacaggattgtccgtaataaggatctaaggtcaaaagttgggcccttatggttttgtttttttcgggtatacctacaaattaggtcatagctgaagattgttgttggggataataaaagaaaccaccattcagaaagtggaattttcagccaacacggacgaaaatatccctcggcaaaagaaaaaagttcacgaaaatgacgaagtagaatttaaaacggtgtgtcatgtatgatgtataaaagtgtaattgtgttactttgccacattccaacagcatgttatttgtggttttcatagctaaacatgcatgccaattatttttgtgccatgctctttctacttgttatttcctaaaccaaatatcttctctttatgatctttaaactaacctcttttcagctatgcttccaacaataatatttttaattttcttggttaaatatatacagttgtcaaggcatgaaccttgctcaactttaaaacaaatgtctttataaaataaacgtcgttaagacgttaacccgtcgctaatccgttgttaaattcaattgccaaattcccacatgaaaattacatatatattgaaggagttcataaaaccaattgaagaataataatcggatcgaccgatccgtcttgatgtcgaccatagtcaccgcttgcaaaaccaaaaactaatatccggagttttttttttgttaaatctaatatcccgagttaaaaagaaaaatcggaaattctttaaaacgtttctcgaccacaattaaaatcataataaaaccttaaatcctagtttaaatgtatgttatgaataaatttcaaccacatgagttagtttattatcggtaatttccctcgttttaatcaaaggtgcattggatagtacgtgattgtttttttcaccacgtgattgcttttttctgtgcttgacttccgaggctaccgtacgaaccatctttagacaaatatcgtcggaggaaaaagaaaacaagaaaatggagaaaaaaacaatttataatacggcatcgctactatccaaaggcaaattgctaaaagaaagatagcttatc

SEQ ID NO: 37563 - DNA, 5698 bp, Arabidopsis thaliana landsberg
ttgttttttagtgaattcctaaaatatacttttgtaaatgcaaatgcaattgtgttttaaaagaaaaagtaattttgattctggtttaactaccggtttagattcgttggcccatttttcttaaagactttcaacggtaaataacaatactaccaggtaaacatacgatgtcttaccacaataaatttacagggaagtaagttttcttaagactcaccactgactttggcgacaataactgaagcatagtgagcaatgttagcctcaggggattgtttaagccttgcaatgaccgggaacaactctgatgacttcacaaactgtctgcaaatctggtggttcgaacacattttagccaatgagaagagtgcaatcttgagcggtgactcactcgctgtctctttcttgcttgggttcaaggcaagagtcgagcaatccgcaactagcctcagtaacgtctgcacacaaaatcccaacatcatacgtgaaattagatacgagaaaaatccatgtatcttgacctaacaaaataatctgcagttgtactaacttgtaaagctcccttggagactatatcttcacagagtttgttggagtttcggacaaggttgctcaatgcaccagccgcgtttgcttttgtcttgtcttcttcagccgtggtcaaaacgtttgctagctgcgttatagatcttcttagctcttcatacagcgtgtcgttatggtaagccgcatttccaatctgcaaaaagaaagaaaaatgcaaaaggcctcttttaaaatttgatcagaagtatcatggaagtggagaataaaaaactgttttttgatgattttacagcaaaacaagcgaatttctgtgttcgtttgtccggatcagcgcatcgatcaatgaggagaccgatgatttgatgttccgcctgcacatagtaaccacgcagaccatgtaagaaagaacagtctgttatgaaaagtttgacctctcacagtaaaagaagcttagtgctgtaacttacaagagcgctgtagaaatatccattgtgtctgcacatattgccaagagcactacaagcttttgcacgtatatttggatccacatgggtaagatattctttcaaaggctgtaaaacagaagcctcgccgatgtatttataaaaagcctgtacggttaacaattgttccaaattagataacatcatttacttcactgtactgtgtctaagcatcggtaacaaaaagaatgcatcatacgtaattataaatttcttaccttatccatcctcgatagatcagatgtgatcattagagatatcaagtatgacttctcttggacttgattggttgagtaattttttcattctattaggatctaacagacctttgctcacgagatctacagcaagacgtggacgacccaccattttggcaagaaaagcaacgggccttactaaatcttttaattccaaatgatccaagcaacgtaggattaaactcggcactcccacctgaaaaaaaaatttaaaaaatacagcttgttacaataacgagatttcagctcatgaatcatgagaggaaaacaaatagataccaatcaacattcaaacaaaagtatgtaaaaatcaaggaaacagaatcgacgaactaacctccaggaggactattatgtatttgtccatatcctcttctatagcttttagcaaatctctatcttccatgcatactctcacaccaggagagccaatgttgagaatgaatccactatttacagaagctgtggcagataacgaacctggttgactttgcagagcaacaaaaggaaatgctaggagatcaattatcacatttattgtctctctgactccatcttttcctccccccggacctccccagctctttactagcttgatatgagcatcagatagtaaacaagtaattagcttcatggtttcgattttcacaagaacctgacggaaagttgtgccacccgaaagacagtggcatatggacgaaatagtccatacaacgccaataggggacaagccaatccggttggatgtcttcttgatgtcctctggggaagcatttgaaagtttgccagctaacagatttatgagaagcaatggcgtaccactagcaataagctgctgcacagctagaggtccaccccacttcaatctggattctaataaaccgatacatccatccagaagtccgtgccatttggcataattggcagaatgagagatgacttcaccttcattacttggcataggcctaagatgataacaaagcttagtagctcgaggaatcagagacaccactagctcagagacagaagatccagcagaagatcctttttcaagagcgagaatagatgcgagagcaagcatagctgaagcagagtgattctgaagagaagcttcgattttatcatctgaggcaatgtgattggctatagcagaaagacgatgttgatgcttctttggagaagttgtaagcattaacagaacagaatttctcccagttaacttcaaacattgagcaactgttgccaacataaggcatgaatggaacaccagattgtttagtctgccctcgaagttatctttttctcctgtttgctggtctttgcttgataatgttgcgtatgatagtatagaaaatatttctgaaataactgtaccatcctctccaccactgactacggtcgtaataggcagtgaactgggaagaccacaaagcatgctaggcataattccattatgaaggcagcatcttgacaagagctggagcattacataagtagtttccagttaagtttaaagagcggaaaaaaaaaaacacaaattcaattatagctgtgaatccagagacaacccgcaaattttttgttaagatagccacaaaagaagagaagcatcacataatcacctgaattgcagaaaccaatggagcctccactcgtggtgaaggcaatgaccaacagcaacttgcacatgctttgatcggagatatgctcttgtcactgatcgacaagtttctcagataacggaccccactcactgtttcctatgtcatgctgagagagacggttctgcaaggcatctagaggtaatatgtttacatcatcgttcttgaagaatgtttcggaagtatctatgagaatccatattgctcgacaagcttcacaggcagctgctaacatttgcgaagagccggaagttaaactcgacccagaagaagccagacaaagacacaaatgatcaactatgcgagacatgttagcatgctccaaaatctgtttagaaacagaatcaggagttgaagatttaagatcttgggcaactcgagataacattgttgtgatgcaagaacaggcctcatatataattctaccagttccctcttcttcccatctaacgacctacatccacataaagtaaaaaattagtacatgtggtttaatctcacaagagacttatgcgccaaaaaagtcacctgtatgaagatttccactactttggtccagtgcctgatgtaagaactatgtatgttattgccttcaacatgccctaccaagtttttagtgactgaaagactctgataaagaaataagtcggtgttacaaatcattgaactttctttacttgttaattgtggaaagcaggctgactatcaaataaagtaggtatctaatccaacacatgacagacattttggtcaagaggattcacctttggtattatgttgttgaactcgggtgatttcatcccaacaagagcgtcagtaaagtctagcagtgcacatgttattttctcaatcagtccaactgaaactatggcacgagttgcaaccaaattggagatgatcctgagggactgaacagagcaagcaacatctttgtccctgcacacccatgaacgaaaatatgaatatgcatgtatgcggaaatatacaacaatttactggaagagagtgatagatcatcagaccataatgtggcgaccgagttttagagtatatcttatgctagaaacctatgtctggtcccgccatgatgagcaagcaggagcacatcattatctactaaaagaacttctagttttacccattagaatctggcaactttgaaaatctttccagtgacagcaaaacaaggtccaatgctttatcattttcacctataacttgtgcacctttaacagtgcgggatgtattttccaatttgtccagtgttgggttacctgaaacggggaaaacaacccaagcatgaatgagaatgatatataggtccattatgaaagaaagcaaaagaaactccgaaggcagctaaggttcaatcacggatagcaaaatgtatgtgaatattccgacactaatcttttaagacatgaaaatttacaaaaggagaactgggtttatatatgaaatatacacaacctgaagttcaaaaaaaaaaaaatccttatgtcataggagttgtgttaatctaaacaaacatcaagcatagcatgacagcgtagtaaaactcaagctctaagagttgtaaacctagaacaatagagcatactaactacacgctttgatgaaggagaaaaatgcatttggccataaccaacaatgaaaggatgatatccgaatatatgtctgttagattgatatggaaatcatcatcagaaatatatctaaacatgcatttctcaaattactgtatctatctgttggataactcttttgattctcaaagtcccactacctgaactttttatctcctcttgggttgggaatcccacaaaatcctcagtgggtggagaatttactttgacagcactcttcatatctgactgaacgtcagctagaccttttgtagcagacatgtcctcaaccagggtcactgagtcgcacttttctgtgacatttaacactataaatttaataaaggagaaaattaattaagaaatagattctaaccacacactgaagagattcaaaccatttctctgttgccctccatttcctttgagcatccaagctgccttattgtcaactactgcagtatggatttcctgaataggcgttcaaaatgttcttagtgatctattattccaacaacatgttttaatttgagatccgttacattgcatgaaaaagacagttttaacaaaatgctctgtacattggactcaagctgcaaagtataagtcatcaatatcagaccattaccctggcttcaacttcttcttgtgtttctttaacgaaagggtgctcacgaagagcaggccaggttaatcgactgtggggttcctgtttcgcatagtaatagaaaaacagtttaacccagtccagcaatggtctcaaacatatcaataaatggtaaaaaggacaacttaaagaaaaaataaatatatcaccttgttgagcaatcctttcaaaaagcttttgaaataagtactcatttcatcaggatatttgacaggatccttgaagattcactaaaatgttagctcatactttaagcatagactatggaaaaataaaaaaatattgatataccttaacaatgtgacgaatgagagcatacacagaattggtgtagaagggaggctgacctacatataactcgtacctgatgtattacaagagattaattagaaccatatcaagtgcattgaaatgtgcataacataaagaatacagaaaa

SEQ ID NO: 37564 - DNA, 5083 bp, Arabidopsis thaliana landsberg
gccaatttatgaggtattgttcccaatcttattttcagcctggccaaggcctgtttctctcaatctattcgcttttaaatatgaatcgacatcgttagcgtggtattactcccaactgatatgattctagttgaagaaatcatctcagattatatccgaaaaacatatactcttaaagaatttcatgttctctatattgggctctttttgtcgatggagagattgactttttaataagtaggtttttaggcctacttatgtgctgaagtgtgaggttcagtttaattccccttaaacactaacatatcgatgcagctatagggggtgtcaatcaagtccattgttattgctagcaatcaagatgtgtacagaagcaactaagtcaagccagattataatgatggtgggtttctagtaacaatcctaggtcaggattcaaacaggtaaaaataagaacttaagagccctactagatcattgggtcgagtagaaccaacaggtgacaatattaagaactaaaatgcaatccactcgggatacaaataacaagtaaataaaagtgcaatcaggggttgaatacaaataaatctaaaaagaatagaagtcctaaggatggattcattaataagggcaactctccggctaatcaggtggctaacaggcgaaaggcaaataccctagccaatagattcaaaaccagatcaatccactctcgtgacaatgatcctcattgttttaccacttccacatctcaactctcgttgatgaaacatagcaaagcaggctttgaggaacaatctatcaaagtcaataagcagtctaaacatccaatctcttaggctagaatttacaaatctttggaattcgtagatcagacatccatttgaacgtcttttggacgctggaataccttgggtcgaattccaaactgaactgagtgacataagcattagggccaatgaatcgagaagggatctaacctaatcttaaccaccagactatcatagagattaccctaatctaatccatcctcaagaaccctaattgctactcaaacaacatagctaagaacacaaacccagattttactgaaatcatattaaaatatagagctaaacaagcttaacaactttactaaaagaactaagtgcaaaaacgaaatagattaagagtaattaagtcttgaagattcaagaccacaaagaaaaactaaaggataacagctagatcccttggacaaatcccaaagtgatctatttatattaaaatgttagaaaccctagattcactagaagacaagagacttgaggcggtttgggcgagtgctcgatcttggggatcgagtaaagagggtgctacaaagtctgcgcctttgtgtctatgctccgagtgatcaattggtcgagtagatgcttcttcctctcttatttgtatgctaaggtgtctagttgagtgaggaatgaggaggatccgaagacgctttgatagatcaacaagtctggtagagtgggtcgcccttggtcgagtaaatgggtcgagtagaggagcgagtaggagggcgagtagatcgatcttctgcttcttctgttgctgccttgatcgagtaagtgggtcgagtgaattgctggctcttctgtggctgcctggatcgagtgaaatggtcgagtagaatgctctactacttccctcctggttggatagagtagagggttgagtagaatccttgtaagctccttctacacttgaaaacacaccaaaacatgcaatatgtatgcaagacgatcctaaatgtctaagtgtgcaaaataagctaaatgtgatgcaaaatgatatgaaacaatgagtgatcactaagctaaatgatgataaatacatgtctaaaatgaataaaatacagtgttatcaactcccccaaacttatctcttgcttgccctcaagcaaacaaaaaatcttaagttgaaggagaggtttgaagatggggattcaaataccgaagcatgcatatagaatgggtaagcccaatgtggaggttgctaattctaggttgcaagatgataaacccttactttaaaactttagccatactcgtcacaatgcaacctaacaacttgccttaatctattcaagcattcacatcaaccaattccctttaacattaattaagcacgaacagtggatcaagcaatgcaatggttatgaactcacttggttttgggcttaggttaagagacaaaaatggtccctctaatggtttggtcgagtaacatgggactcttagagaaaagattgagcttcattagaatgctaaaggtaaaagccaacggacatatacaagaagagactctcatctacccaatgatatagtatgatagctcagaagatgatcccattcccatagatgtcctaacggtaccctttttctcattctttctctctttttggttcaagttttaaggggttctctttgaaacgatttaagagtctagcaggtttggttctatactttgacaaacttaaggcttttcttctattcttagcacaatagggcgatttacccttttctttgaatcacaatgcctaacttctttgaattccaaaccctttactagacttaatacttttgtatcccccttagaactctaaactctcactctctctcttttttttttcttttttttttcattctcactctcattcccattcattccatacacaatcccaatcccaaaaatacaagtctccacctagtcttagctaacccaaaaagcgtgggctacgtctacatgaaagagtgctcttgtcggctcatacctaacacgttataccaagctcaattgaaaaagacctcacaatcacacacaaatgatctttggcttgaaataaggctacgctaagggtatggaaaactgctctaaagatgagagacaactacttggattaacagagggtgatgaagtgaataatatgatccaagtatgtatatggtagccatgagttcataaacaatgcatagacatgataatttcaaattcagttcaggttctcatagatagggaatggcatcagctaagcgagttttgatcaaagtagtatagtcaagttacaaattcaaagcagggtgcagtcttacttcagagatacaatcggttatgcaacagagaactaactacctgggaattgaccttacttcattgaatcaaaacatgcttaatggtttgaaatcatcattatcccctatgcaaatgagcaatcctaaatgcaaacacccaatatacaatcctaaaatgatatgcaatctacatgacactctgtttttgtgaaatcattttctcaaaaaatttcaaatttttatggttttttctatgccttagatgatgcaaaatttgaaataagaaaagagaacacaatgttaaacatgtcttgaaccctcccccaaacttaaattacacagtcccttgtgtaataaaaatctgaaagagaattcaagaccaaaacacaaaacacacaaagaaaaataaaaatgctatggtatgtataatggttgaggtggtgttacctcagcggtcaagtgaagtagatggaaatgtaatcgtccatactctcttgagtataaacaagggctgatgttgaggcggggctgattctgtccggtcgagtagttggtcgagcgtgtggatgctcatctctgcttactcctttgctctctcaacttggagatcacttcccgaggctcaaatgataaagcttggggttgatcgatcctttcagccctctttgcagctgagctcgtggaaccgcttcttcttacttcgggggtgggagacggtggccttggcttgccctggaattccttgatttgagcagccatactcttcggcgacttctccattgttcttaacttcttcttgctctctacgtaactggaattcgacttgctgctcatagtcagcttgagtataatactcatgttgctcatagtcaacttgagtatagtcttgttcatcttctctggctcctcctatgtcgatgttcagggcagagggagatggcattaaattgatgttgcgccttgtcttcactgaggtccggttccgcatggtaggagtaacaaagagggtccaagctccggatggttgaacttgaagagatagcgatccgctggagttatcttgtcaagaaaatccttccccttgagatattcgaggttaaagaacttggagaacacgtcaggggttccaaattgcatccccacagctcccagtattggcgttaagagaccaccaacacaaagacttccacgaattcccgagcgatgtatagttgctgataagtgtgcatattatctattttgagcattcatttgtcatcactttagcatcatatcatcactgttttatatcatttgtcatcactttgcatgtttaggataattttgcatgcatgttgcatatttgtgttgttttcaggtgattcggagctattggcgagctaattgaaagaagcggagttgatcatgcaaaacactcgacccctggttgagtagataattccacgacttcagcagaccactcgaccccctggtcaagtagaggacatcaccacttcacctcaccactcgaccccgaggtcgagtgtcttcatctccaacacctaaccatcactcgatcacctcactcgaccccgaggtcgagtgtcttcacctccattaccagacaaccactcgatctcaccactctaccttgaagtcgagtatcaccatcaccaccactcgactacatactcgattgcgagcttcagagtcttcttcattccgcactcaaccagacactcgaacacaaggaagaaaagaagactccagctattcactcgacctcccactcgaccacctgggtcgagtacagttcttaatccgtcccaatactgcgtcgttttatgtattagggtttcggaatattttgctataagtagcatgtacttaacattttcgcaaacaagtttttatctagttttattccgtagacactgtgttctagaccttttgtaatcttgatttctttttatctattcagtattcagtattca

SEQ ID NO: 37565 - DNA, 1678 bp, Arabidopsis thaliana landsberg
agcagtccttttttgctattttataaaccagtcaagaattggccaacaattttagctgaatcaaatcaactttaaaccaataaaacacacaattttccccatttcatttctctgttcttgcatattggaagcttggctctgttcttgatcatttcgatggcggttttatcaggtgatgccgcagctactgttcttcttcggtgggaagaacgagagggaatctctcgattgggcaacaatcgtggtgtacacttgtgagaactcgtgtgactcgagcttaagttacaaggaagagtttgtctgggttcaactatacagtcagacaacttaggatcctctatttccttcctggctgttgcctccaaagttttgttcttaaccggatcgtaccggacttaaatatatttgtaaacttgggtatgttacttggtttgtttaaagattttgttgtgtccatagtaaactttatatacaacatcttatatcttgtgatttactagaacaaacatactatattcctattatgatttcgactcatactatattattgactttgatggataaagctgtttgatttctcttgtaattcgcttatgatcgaatcttaaccataattatgtgctaaaaattatacaatagtgtattactaagatggtcgagagagaaaaggacttgaagatagaattaagtctgctgaaacagtacgaactactgacaaaggttctcatatttgtgacaaataaagagctttcacagagctatatcacataaaccatccaaaatcactgcttataagatatttcactaccgagcaagcttctcacttcttagactttttcgcaggtaccctgcaaatttaacagcaagtttagaatgttgccacacaacacattaacaattttgtttcacatacgatagagatgaaaacttactcagcggtttgtgcaggtggtgcagcggcaggtatgtctcctccaggacccttggcaagacgctcctctcgtcgagcatgtttcctctctcggctagccttgttcttagccctcttagcctcaaactggtcagacaatgtcttctctctagccttctcagccttggatttgtgaatactttccatcaacacacgcttgttcttgaagacgtttcccttgactttcatgtacatgtcatggtacatatgtctgtcaatcttcttggtctccctatacttcttcaacagacgcctcagcactctcatcctcctcatccacaaaacttttgttggcaaccttgcctctcggggacccttcctcttaccttaaccattatacaacagccacataaatcatctgtggagatgtttcaagaatgtggatcaaatgttacatgtcacataccataaccagagtgacgtccctttctcttggctatattcaattgacgtgccctggatcgtgagtggatcttcgttggcttcctgatgatgaatccatccttcacaagcttcctgatgttttgacctgaagttccataacaatccaaaatacttaatcagaattacactcaaatctcaaatgcacatagatgcatcaccatttcgtatagaaaacaaacaagaatcatgatccaacagagtgctatgatggcatgttgatttggtaacaatcagaaaccatagaccatgaatccgagaagaaca

SEQ ID NO: 37566 - DNA, 3219 bp, Arabidopsis thaliana landsberg
ggtggagccataaatgacttttcaactacatgacaaacactgattgttacagtgatctattttcaatgagacaaaacgtccacgaagctctcttgctaggatcaacgttctcagtcaatatatagagtcaacgttttgtgtcatccgagaatgtatccttattaccgtaagcgtgcattgacacatcccccctacaacctagatccatgagctctgagttgatcttctctttaactaaacaaggatccagaccattagggatgggtaactccccatgtcccaaaagatgcatgcgtcagcatctgccaggtttcattataattacgagacggaattgaaaaaaaagcagatccattataattaagggatttactaaggcagatcgacggttagatatacgctggttaactaatgacggatcgatcagatgaaagctaatcgagatcatagacaaacaatttcgacaaagagagaaagatcttacttgaatattcttcgaccggatcataggacatggtttcgtccgcagcggatgagatactttgtgaatttagggttcagtatctataaattttatgtaaatcgaacagttaaccttatgtgtatatgagcattttcttattttcaatagatttttttttttataactttccataagtactagggttttgtatggcgtaaagtatggttcaaaaagttataaatagactaggaaaatatgatcacacatgagtaggttggtcttttgcccacttagatcatataaacatggagccaaaattccaaccgaccaaaaaacttcatgcagttagcgagttttggttgaaacatgacgaaatctctttagttttccccaaagagggacaccttgggaatgtgagaatcgacggttacgttgttaataaattgccgaaagaattttttttgggaggcttatggggatcacggtatcacaattcatttggatccagaaggtgaattctttttcttaaaacccacttttctctttatacatacatttatatatgtatataatctacatctctgatatattttccaagtgatgaaagtatgagatataacatgatgttactactatactacaacttctttattgggcacacatgtataactccgaaagtaatttgctggtactctaaagtaaccaaaactttggacaagacatatcagataagagaaagaaattaaaggccacttgtttttattggacaacacaactagtatctagtttaagtcagcaactcttttgcacggctgtaaaaaatgttggatatctaattaatttttaagttcctctatcaaggcttctcgatttatctatcagtcattggactggaagaattttcccttgttgtggcagtgtgataccacttctcatcatcgcacaaaattcttcatagtttattcttccatcctgcaaaagagacccattaatctcaatcttggcttaagacttgttcataacctttttgatgctgtgtagagggaaaacaaaacttacgttatctgtatcgacttccgctatgacttctttgatgctagcttcatctcccataccatactctttcatggctgactccaactcatccattgtgataaacctgtgttaagaaaaatccaaatttgtttcttaaagtagcgtcaagtctatatttaccttgttcctcaaaagactaaacttacccgctgttgtctttgtcgaagtattggaaggctttgaatacgtgttcatctcgatcaaatctgtatctatgcatcgttgctgagataaattcgatgtagtcaattgttccattaccatctacatcagcctgaaacatatataaaataaaagtcttttgttagaataataagtaacataagaagcagagcaaataggatggcaatacttacggcttccatgagttgcttcacttcagcttcagtgagtttagagccaagtttagctagcccgtttttcagttcttcataagtgattgtgccgcttttgtcagtatccatattcgcaaacatggttttaagacctttaatttcctcttccgagagactctctgcaataacctgcaaaacagatcagaaacagaaccaatgatcagggaatatagaagaaaatgctacttctagatagaaatttgtttttacctttagagctagctttttaagcttattcattgctcggaattgcttcatccgagataaaacagcactatcaataggcttgtccggtgcttctcctcctctgatccaaggatgtcctatatacagcaaggagcattacagtcaaaacaagaacaagatttcaatattcacatagtctaaacaatggaatttcttttgaggaaacaagccctccacaaacatagtgagcacaattctggatccttgaagcttcttttggatccagatatatatatttgtgttggctctagaacaatcttgaaaagagaaagaaacgaacttaccaagaacctctgcagcagagattcgttccttggggtttctgttaagcatcctattgacaagatgttttgccttcacatctataaacttccatgattcgctgtcaacgtcgattttggcactctttatctcagagaacatctgtgcctcaggttctacaatatacatacaatagatacgtatatataacaaagcaaaccccaagaagaagaacatttatgttagctttttaagtttgaacctgtcacaaagggaggtttgccgcagagtaggatgtacaatataatccctgcactccaaatgtccgcttctttaccgtattttccctgtaacacttcaggagcaatgtagtaagcactcccagcgaatttccagtgtacttctcctgtttttgttggtttagacaaaaaatacatcaaaacctgattcttgtatgagtcaccaaatccaactctatacgcatttgaaccaaagtaaccaaattttctcaaactaaagagacttgcgcaagaccaatcttatacatacaaaacatttcttatatactcctaagatggatactattaaagatcaacctctaaacttatttttgagtcgcaatctctaggaacaggaaccaaaagtcaccaaatttaaaacacaagacacataccaacatacttcagtaccaaaaccaattaaaggcagataaagaaaggaatcttgaagctaaactaattaaagaacacacaacacccg

SEQ ID NO: 37567 - DNA, 2468 bp, Arabidopsis thaliana landsberg
ccacaaaaagaaaaaggggatcactgattagatttggtttaagcccataaagtacatatatttgttgctaaaggaaggtgacatggactattggaaaaggcgttttgtttctagcgttagcgattagaagacgcaaacgccattgatgacaatgggagaataatctgaagaagaaagagacagaaacatggaaaaacaacccttttggctccaagctaacaaacacggcacaatcgagcttcctttgagaattcaaacacatgaccattgattggactttcaactaaatggagccttaattcaattcatcaagctatgaccattatagttttgaatgctagaaaagacagaactcgaattgaactaaaagcaagtgtctttgttccaacacacaattccagaaacaccaacacacaacctcaagcgtatgtaaaaatgaagactttggctccgcaagaaaatccaaaacagagcactttgatggggaaaattcaatctttgaatcgaaaagagtttgatagaaactctatatcagaaacagaagacacattaaacagtaccagtccactattctttagaagcagatccagccggcgttttgaaaccgatagaaagagcgtgcaatccagtatccaactcttcccggagcaaatgatagaccaacgtgtgtctcttcaccaaattcattccctcgaatcctttagaaacgatcttcacattgaaatgcgtctcatcgtcggttctacctttcattccggcgtgaccagcgtgctgatacgaaacatcttcgatcactaactccactggttcgagctctttttgaagcttctctctcatcctgctcgctcgattctctattgctccagaatccgacccggttttctcaacgctgctcattgctacggatcttgaaccagttcccgtcgattttgactcagagttgaagaatttaggtacggagatgaagacgctcggagaatttaccggcgattttaggggttgagtccggtggaacccagatacgattaacctaatcgaagatgaaaacattgccactgtcgaagaaactcgaaactatattaaacgctgtcgttttgtcagcttatcatcttcacgaatctactattagaggcgttatttgcattaaggtccacaaattttcaaatataataacatcaccccacatttgtgagaaaaaaattacaaaaaaaaatacaaactctaaaagtgtatcgaaacaccctcatacttcttcacatttgtgtgagaaatcaaataacaaatacattcgaaaaatgtttgtgtatatgatttaatattttcttggtgtggttaaaaaacttaagacataattaagtaataacaatttacaattgtaacgtggatattttttgaaatgttgatttatgaccaaaatattattagatgaattctccaagaagatcatggtatgataagaataagatggtatagtgctaaaacatacccaaaactgtaatcattttttgaagtaaaggcaatatctttgatttgggtaatagtttgtttcgataattttggatgtacaaaattaatttttaaagtggttctaagctgctcatgcaaatgtattaaggatccctaatctctggtctaaattttattaataaatcataaaaaaatctacggaactaaaagaagaaattgattatatccttcaaattttatagacaaacaatcgtgcagattaaattgtaaatatgctaattttgttcctgtgtataatattttatattgtagcatcctttggtagtgtagatgttgagaaaactaatattaattggtaaattatatatttcgaaaaacaaaatttaggtaaataaatttggaggaaacatatgaagttaaaatgttatggataaaaacagaataaacaaattattgtagacgtaacccaaaatagttccttttttggtaacaaaactataaatagtataaaataaataattttgcagtaacgtaagattgcattcgaccacacgcatctatatcactgcgtttttagctgcagctttcgatagtaggtcctacatcctattcggatctgacgtggatccttgatcacactctctactttagggactcaaacactctcacatttacgagaattgccactaccacgtccctcagtgggaagggtactttcgtaaaaccaaaaaaaccactttccggtttccgcaaaaacccgtcaccgccgctgcatcctcccttcattcttttctctctttcaccgcatatacatacacttatatacgttatcaatatattttatttttaataagtccagtttttgtctgtgcatcgagtttaacaggcaatgctcgtctctctctctctttatatgtttagattctttatctggaacttggaagctcttttgttagctatatctaatcggtgatctcgaagcttattcaatccctctttct

SEQ ID NO: 37568 - DNA, 6100 bp, Arabidopsis thaliana landsberg
cgctgattgtcgttgcgtggtgcatcgcctgcacctatgttgtttggttgcacttgctcatctacaactgcagccgttgtgtctgtttctgtttgtgttctgagttggcgtgcaatacggtcgatgttatcgttgaacaggagagtctgatttccttgtgatcgtgtttgcatacaacgagtaccaactggtgaagctggtgattcgcagtacctgaatcaaaacagacaaacagacaaacagaaaaaaacaaagttagtaactttttaaaaaagtgaaaaagaacttgatcttaaatattctgaaatctcaaatatagcaaacaaacacccaattggcaacggcgacaaattgataataggtttttagtttaattaatcctaaagcactatcatgtcgttgtagtacttagggtgtcaatccaaatgggtgtgatgcaaacagatgagatgtgatcagaagtcattaagtcaagccaagcaataacagttttggggtttttaacagtcctaagcgaacatgtagaaaacagaaataataacagaattactaaagtcactcgaccacaacaggctgatgccagaagtaggatgtggtcgagtaacaggtcgagtaacagacaggatatgaaaaagatatactcgactgcacagtctgttgccagacactgggtgtggtcgagtgagttggtcgagtgattgtaaaaactaagaaacaggcaatgagaacgattaagcgataacgataaaacagagaaataagatagacgaaaaattcctaaggatggggtaatcgagtagagtggtatcctagcctattcgaatggttaacaagcgcaatcaagctatccctagacaacaggttcaacaacagatcaattcactcccgtgatagaaatcctcaagcaaagctagcccagactaattcccattaacggaatctaactatgcaggcaataagaacagactgataaagtcaataaacgctctaaacggccaatcccttgggatagagacgcatatctcaggaactagtggatcaagcattccatcgaacaccttctgggtgcgggaatgcttgggatcgaattccagttgatcagaaagaaataagcagtaaacgcaactagtcctaaagggattcaatcaattctaaagcttaaccattctacagactacggattccacaactactctatcccatccctaagaattctaagtcactactcagacaacatgctcaaagacataaacgcagataaacgataatattgcataagtaaagagataaagagtagagaaacaagatgatagatgaaatcaaatgcggaatctgaataacttggaaaaatctcgaattacaggttatagaagcaaaagcggcgcaacagagtaaaacagaaaataaaactgaagcaaaaactcaatgtcgactagatgtctccggacaaaaccctaagacatctatttatacaaaacgaaataaaatgatagtagacgggccaataacctaatcgcccggcccatagagtgataatgggccgagatgggcttcgtgatccgatggaggtccaggccgcttccaaacactttgtcttctcctcttctcttccttgtgctcagcttgtctggttgagtgcggatttgagtagactgtgaagacgtgatcgagtgtccggtcgagtgatggtgatggtggtgagctcgaccagggggtcgagtaaagtggtagagtgaatggtcgagtgtggtcaggtggtgtggcgaagtaatactcgaccaggtggtcgagtaatgtcatcgagtggcctgagctgaggttactcgacctggtggtcgagtggatgggaagaatggctccaaagtcactcgacctgggggtcgagtatgtgggaagaatggctccaaagtcactcgacctgggggtcgagtatgtcttctggttctggctcgtttcttccaatttgctcgcaaacagctccaaatcacctgaaaacaactcagaaatgcaatatgtatgcaaagctatcctaatcatgcaaagtatgcaagaatgatgagaaatgatataaaacagtgatgaatggacactgaaaacatgcaaattatagacatatcacctagactttctttcaagccctatatcacttgagagtgtttgtgaggtcttattccgattaagcttggtagaaagtgttaggttcgtaacgacagagatagtgtctcatgtagttctagttcgcatttttcggactagataggactaagtgggcgtttatactttgggttgggatgtgtttaaaagaaaataaagggggttgattcaatgataagaaaaggtagaagactctaggtgaagtaagctaaagaagcagaaaaagtctagtaaaggttttgggatttgtaaagaaaagaaagagttcttgttagctattggagatgggcaaaagcccttggctttaaaatgttaaaaacaggaaccttagttgttaaagaaatccaaatccgctagatgtaacaaagtgttgagaaagcttctcttagagttaagagaaaagaaaagaatgattagaaaaagtgcttaaaagattcatgaatgaaaagggtagagtttagttcttgtattgggattggaggtgggattaccattagagcttcatttgatgtactctgggtagatgggatcttatctctgtatgcataggttggcacttacctttagcattctactaaagcttaatcattttttgagagatcccctattactgaagcctattctgtaagggaccatctttgtctcttgaccttttaccttagccaaatgagttctttgatgatgcattgcttgattcacgttccagaactaatgaatgttaaagggattggtagatttgaaaacttgtgtaggtcgagcatatgagtcggattgattgattgatgaggcatggctaacgtttttaagtagaattcgatcttgcagcttagaactttcaacttggacattattttcatctggtttatctggtgctttggctctgagtccccgctttcaaacctcacctccagcttgttcttgattgtttgcttgagggcaagcaaagactaagtttgggggagttgataagtgtgtattttgcatgttttgagcatccatttgtcatcactttatcatcatatcatcactgttttataccatttcacatcatttgtcatcactttgcatgtttaggatagttttgcatgcatgttgcatatttgcgttgatttcaggtgatttggagctgttgacgagctatctggaagaagcggacctgatcatgacaaaccactcgacccagaggtcgagtaggagcttcaagatctcaagagaccactcgaccacgaggtcgagtagaggacatcactacttcacttcaccactcgaccccgaggtcgagtgccctcgtctccatcactcgatcgcttcactcgaccatgaggtcgagtgtcttcacctccatcaccagatcaccactcgatcacaccactctacctggaagtcgagtatcgccatcaccaccactcgactatatactcgattgcgagcttcagagcctttttcattccgcactcaaccagacactcgagcgcaaggaagaaaagaagactccagctattcactcgacctctcagtcgaccacctgggtcgagtacagttcttaacccgtccaaatacttcgtcgttttgagtattagggtttcgggatatttgggtataagtagcatgtacttctcattttcgcaaaaaagaagtttttacctagtttttatttccgcagaccttgtgctctagactttttgtaatccggatttctctttatctattcagtattcagctttggttcttgattttcgtttactgttgttcattctgttatcacactactgttacactgttgttatcatgtcttcaacctgttcaacgtttatgctttctattatgatgtctgagtagtgaataggtttctgaggatgggttagagtagtgtagaattctcagtatgctaggtgattgagtattgattgatagatcccttctggattagttgttcttaatgcctattgctttctgatcaactggaatttgagcccagacatttctgcgcccaaaaggtgttcgatgaaatgtctgaaccactaattccagagattcgtgaccctgtaccaaggtattggttgcagggagcgttttggctttaacttgttgattcgtaatgcctgttaggttagctctcgtcaatagtgattgagtctgggactaggttaacttgagggtctctattgcggtggcacttagatttggttaatgaacttgttgtctagggttaatttattgagcatgtcaatcacctgtaaactgagaaaacgaagctactcgattaccccatcctcgggaattctttatctgattgaattctttgtttactctactgttgtttactgcatcttgtcatctgttgtttagtttctgcatttctttactgttactcgacctgatactcgaccacccagttgtctggcaacagactgtgcagtcgagtatccctgtttcattttctgtctattactcgacctatcactcgaccttacccaatgctctgcaaagagctgtgttggtcgagtgttttactatttctgtttgattttctgttttctgcatgttcacttagaactgctagaacacaccaaaacctgttattgcttggcttaacttagtgacttctgatcacatcttgattgttagcatcacacccatttggattgacaacctaaaatactacaacgacatgattggtgttttaggataatcactacaagaaaacaaccgttttgcaatggaagaatatgtaggtaatccctcgcaaaaagtcattcgcaagggaattgcaacaatatactattcatcgcaatacgcttctcgcaaatcgggattcgttggtaatccgtcgctacgcttgcgacgaaaagtattcgtcgcaaattgtgcaaggaagaatcttcgtcgcaaacgcctcgtattttgcgacgaacatattacttgcaatagcattgctaattattgtgtcgtacatccgtcgcaaatattgtgaggcatttgcgacattgcttttgttgcaaattcatgaacagtagaccggtgtttcgtcgcaaacgccttgtattttgcgacggacatattacttgcaatgtcattgctaatttttgtgtcgtacgtccgtcgcaaatattgcgaggcatttgctaggttttgttttctattgtaatctcgtagcatgtgtttgcgacgaatatgcaaggccaagctgaactgttacagtctgtttctcttatttggtaatttgattttgctgagaaaacaattcaaaagctgagaagaaattgaactggaattgaaattgaaattgaaaattcaaatgttggatacaaaaactgaaattcaaaagtcttagaaagttggttacaaggaaacaagttaagaaagagtgacattttttaaaaggacttagataaagaggcggttgcggttgcggtaccggggttgtctcccatgttttctcccgtcaaaggtgtcaccggtgaagtctgaggagtgctaactcggtttgcttctgtgttggtggccgttgactcgttttcagactctaacattgcagcaaacacaggatctttcttggcaaggtactcaaagacttggtgcatcttctcggcactcttttgtagttgtgtcgcctgagcttgaagagctgcttcagcgtgtgcaagcttctccgcaagaagaacaggatcttcagctggaggagaggaccgctatgggcagaggctgcttcttgctgcaaagaaccaacaccataaattctatttttctttcttggagcaacctgccaacaaaacaatccatgtgtaagctttgattcaaaactaacaatctttaaatcgatggagcattacaacaagtaaactgctaagcatacatcctaactatttgcatcatcatcatcaaaatcagacaattaaataataagggcaataaaaatctgtgaactaactagcaataacaatct

SEQ ID NO: 37569 - DNA, 1189 bp, Arabidopsis thaliana landsberg
gtatagatatctacatatacattttttcagccattttgtgaaataaatcttatagttgagacttatttacaatggttaccactgaattttaatatttgtttttgataattagaaatataatcttctaattaaatatttgatatttaacaatcttctcaaaatctctcgactttaactacacgattaattactaaaataaaatttctaaaatatttaatatcatttaattactacaaaattatcatttttgatattgcttttctgcatgattatactaatttgattataatcatcaaaccgtgccgagaaatttgatagcatttaattactacaaatttacaaaatatttagacaataattcataaacatatcataaataagatcaaccttaataaaataaatgagtttttttaccggacgggttggcgggacgggtttggcaagacattacttaataacaattgtaaactataaaataaaaacattttataaatatgtacaatttgcaaacttttatatatattaatttaaaaaataaattgtttccccggtgtaccgcgggttaaaatctagtacatgtggtattatatcaactgttctagacaaaattttaattgcaacagcatttgctttcaagcaacagtttgattatatttatttaatttatatcccttttgtatattaatttctactgtttaatggcattcatatggaattatataggaaatctaaaaccaaccaataagaacttttaatgaagcttatcccacattatataagattatttctagttatcaaaccttcgtaggtgtaatttttaaatctatcaattggggaaaatccgtccatgatcccaaaattctataaaacattcataaaaaaaactccatttgtaatatatttgcgagtaatctacatataataatgtgtgtatatatattagtaggtgattttcatcaaactatatgagatgagagggacaaccaaacagatatgaattagagacagaagtaaaccacaagtaagtaacgcttgttaagttttattggtaacttatatttcaagtttcgttttttattttgaacccattcaacttcctatatatgtccacgcatctaattatactaattcaacagtcactttaataaaaactgcatcattcttcttgtgtacgtggcataagtcccat

SEQ ID NO: 37570 - DNA, 2275 bp, Arabidopsis thaliana landsberg
ctcaaagcattgtcatcagtagctcgtacatgttacatgacccctcatcttgctcaatcgactccaatagtgctaatgtaactttctacataagaatcttcctgcagcagaccatcaaacatggactaatgtagaaagctgcagtgtttgatctctgagaaagaaaaaggcaaaaaaaaacacttacagagaatctcaaaagaagacaagacttgcctacgccagaatccccgataagcaggagcttgaaaagatagtcgctgcaaatcccaaaacgctaattaaaccctaggaaccacccggagaatcaaatatataacagaggtaatttcgacccaagtatgtgtcgatggagaaaggaacttactactcaggattcatggttttcgatctgtgggaggaagagcagcgagcgatacagagccagagatctctctctctcttttctgattttctctcgcgatttacaagatgaggagattcagtgtttgggccttgaataatagtatgagcgaaggcccaataatgcaaaagattaaaattcattcttctttcacaagtttagggttcctacgatccactcagcaacgaaaatggatcaagcccgacagagtccagaggagcggaggcccaataacgccaagattaaaattcattcttctttcacaagtttagggttgtaaattggcccttcctacgatccactcagcaattggagattgttttgtggttcccagatgttggatctatactagtcttcttgattcatttttccaattgttgcttgctttttgattgacatctatattttaagttgggagatatactctaactctttctggaggaggaggttaaaacaaggtaaggcttggactcgggtcccatcttccagtagaagctctctctccagttgatgccttgtcgatttcagcaccgtctgccaaacaaacacaaatttacttacactcagtctctgaagactgagttgatctcttaaagtcaaagctatatggaggagaaaggctacgttaaaatccatgtaaaaaaaaaaaaaaaaaaatccatgtaggaatcccgcattgtgagccacttatcatccatcaccttgaacgcaatgcaatatcaaatatcaaatgcggactcgttttctaacaataaattatacaccatccaattgacaatatatatggcttcgcgtttatctctcttaacccaaagctgctgtaactaactaactaaccagctactaatgtttccccgaccatcttaaaagttttactttctaactagctgatgctagttggtgcctgagcaggggtgagatcaaaggaataacgagagtggtgatcccttttctgtgcacaaacacaagccagtccccgccctaaccatgcacctgatcctgccacaagatgaaatatgcatgtgactctctgcaacacactacaacaaggtaaaggagactagtgcgtgcttaacctgaggatgaatggcaggtgcgtcctctgtctaggctgtgagtaatccgcctgacactgacaaatgaatcctccattgttcttcccgattcataaaaagctactcttgatatcttcaatgcaaaaccagatttacgggttttggaggagcagtttgaatggtccgagggcgtttttttagaatggaaacaatcctaattatcgactaatccagctagtttttgatactttgtattttagatagatcacattccttagtttaaattggcttgagggaaaagaaacatgcatcatatgtagatgtacattagggagagtgaatgatttgtgataagaaaacagcaagtatatggtttttagaagataggttgtggttcatgaaaggttcttcacatgggatgttgacacaaaaaaggaccaaaagttgaggtagaacatcttacatacccactttcacccaaatccaacaaaaaaaaaaaacagagaaccagagacataaaaacaaccaaacttcagtcacaaagtcctcatgttcccaacaaattcatcgcgtcttgacatgtcacaaactgattttcttctctagataggcttgattttgaagtgcagagagatgagcgaaaaaacaagacatttcaagtcctgcaaccatgaaagtttcaaaaggaatatgttagagcacaaataaatacagaacctaaaaaaaaaaaaactacagaaccatgtaaggaatgagtgttaacagccaaaccctaaatgttaaagtttgagacagtgagtacgttgcaaggcaaagt

SEQ ID NO: 37571 - DNA, 2396 bp, Arabidopsis thaliana landsberg
tgaataaaattctacttagtatatactttccttcttgaatttttgtcctgcaagagcatgcagaacatactcacaattgatactttcaagcattgctctctcaattgataatatggctaacccattcaatctatcttgcgacatggtggaccgcaaataattcttgatcaacttcagcttagaaaaacttcttgcggctgaagcaactgacactggaatggtcaataatatcccataagaaatccatgtgtttggataacaaccctccactcttttcaaaaaatccaacacttcaataggtttcgtaacttcatttggtagcacttctcgtagaacttttagttccataaacaagtcagccccatctatatcagaatgctcaccatgcttaagggatgattcaagattcacacatgatgccatcaagttttcatcatttgcagatgtcaatttttgtaaatcaaacaaaaatccaaaagtttgttcatacctttggaattgctcaaaccttgactcaagagaaattatagcttgatctatgagtgtaaggaagtaattaattctgaaatcctcctctgttgacaattccatattcccatgatcatcccctttttctgaaacttcatcaaaatgcttctttcttctaatgatcttcttctttttcacaggaaattcagcttctatatccatagcctctgcaattcgtacagcctcagactttgctttctcaaatcatgtctctctatatttttgtaagtatgaaactaatcctttcagctcaagaatagcaacatcaatatcaatgtcatcagcttgtaaagtcttgctcactctgttgacaacagctagaagttcatactaaataatcataccaaaaagaaactcaaaccctccaataccatgtgtttctattcagcatcacttcgtgtttttggatcgtcggtcttttctgccaagtaaagtaaagcatctctgatttcaggagtctgaaaccgtattgctttgacactttcgagatgactctcccaacgagtttgagataaggatttaagtgttaaaccttttaccatctctttaaatatatcccacctgtttgttgaagatgaaaacaaacagtataaccgctgtataatcccaaaaaaagacactgcctttgtagaagaagatgatatatcacaaagcacaaggttggggctatgacaaccacatggtgtgtaaaatgctcttggattaatttccagcaatcttctttgcactcctttgttttttcctttcatattagacccgttgtcatacccatgtcctctcacatcatcaatctctaactccatatcaattagtacttcttgaatcgtagagaacaacccttcacctgttttatcattgacttccaaaaatttcaaaaagaattctttcaaccttaattggtgttgaagaaatatccacacatcgaatgagaatagtcatctgttctttatgactaatatctggagtacaatcaagaattatggagaagtactttgaagcacgaatcgtcttcatgatcataagtctaatatcttgggccagcatacttatcaactcattttgaatcttgggacttagataatgagaatatatctcacctgcaccaattcttctgatatgctctctcatcactgcatcaaattctgcaatcatctcaataaaactcaaaaaattcccatttctgttttggccaaccttttcattttttccacgaaatgctaaattatttttagcgagagttttcaccaatgcaatgatccttaggggtacttccctccaatgaatattatctttgcttattgcttcttgggcatgcttatcaatcgttctatttttctgtagtctagactctaactcagctcgacgagttatacaagtaatgtgatcatggctgcctttgtgttctttgagtccctttgaaagaattctccaatcattgtccccgctagttgcccagtaaccaccttttttggcatgtctcaacaacttacaacaaaaacaaaagactttatttaatgcttttgagtaaagcaaccatgttctatgatgtttctccccattcctcatttctctaatgtagaatgtttgagaaaaatgccatccaatactatctttacgaaaccggtaattagttgataaccttgtcgctggtcccttttcaactaataaatctgtgaatctcatattcatgtcatcccaattaactggatcggaaatattggaagaaagttcttcattctgctcacttttattctgttcatgaaaaacgtgatcttgatctttgatatcacccacattacaatccacttcattcgtcatccaaaaagtccaagatattgttgttataagcatgtgttctctcttcttgt

SEQ ID NO: 37572 - DNA, 2844 bp, Arabidopsis thaliana landsberg
atcttgaagtggttattctggatagcaggaggtgcaatatctttcctctgacggtgatctcgtggtgcatcttcagcaccaatgttggcagggccattctgttgattttgttcgtcaaccatttcgagtggttgttagggtaaaaggttgactgtgtttctcctttctctgagttcgcgagttactcggtcgaagttgtcgttgaagaggaggttctggttgtctgttgatcgagtttgcatgcagcagagttgtacctggatcaagaagacaacaagaaaaacacacagttagtaactgaattgaaaattgaaaaagaacttgatataagcaagtgtgaaatctcaaatgtaacaaacaaacacccaattggcaacggcgccaaattgataataggtttttaagatcaattaaccctaaagcactatcatgtcgttgtagtactgaaggttgtcaatccaaatgggtgtgatgctaacaatcaagatgtgatcagaagtcactaagtcaagccaagcataacaggttttggtgtgttctagcaatcctaagtgaacatgcagaaaacagaaaatcaaacagaaacagtaaaacactcgaccaacacagctctttgcagagcactgggtgaggtcgagtgacaggtcgagtaacagacagaaaatgaaacagggatactcgactgcacagtctgttgccagacaactgggtggtcgagtatcaggtcgagtaacagtaaagaattgcagaaactaagcaacagatgacaggatgcagtacacagcagtagagtaatcaataaaatcaattagacaaagaatacataaggatggggtaattgagtagtttcgtttcctcagtttacaggtgattgacatgctcaataaattatccctagaaaacaagttcgataaccaaatctaaatgccaccgcaacagagaccctcaagttaaaccagtcccagactcaatcaccattgacgagagctaacctaacaggcattacgaatcaacaagtaaagccaaaacgctccttgtaaccaatacctttgtacagagccatgaatgtctgggctcaaattccagttgatcaaaaaacaataggcattaagaataactaatccataagggatctataaatcaaactcaaccacctagcatactgagaattctaaactattctaacccatcctcagaaacctagtcactactcagacatcattgtagaaagaataaacgatgataagaatgaaaacatgatagcaacagagtaatatcaagatgataacatgatgaacaacttagtaaacgaaatgaaaagcaaatactgaatagattaagagaaattcggattacaaaatgtcaagaacacacagtgtctgccgaattaaaacttttttggaaaatgtaaagtacatgctacttatagcaaaatattctgaaaccctaatacttaaaacgacacagtattgggatggatttaagaacggcactcgacccaggtggtcgagtgattggtcgagtggtaagctggagtcttcttctcttccttatgctcgagtgtctgattgagtgcagaatggagaagactttgaagctggcagtcgagtatgatgtcgagtggtggatgatggtggtactcgactatgtaatcgagtggaggtgatcgagtgaacgtggagtggtagagatggtgatactcgaccagggtgtcgagtggtggagagaagtggtgatgccttctactcgaccagggggtcgagtggtgaaccagagtgttgcggtcgagtgactggctgcggaggtgtgatcgggtgcttcagaaattccaggatggcagtactctacctcagggtcgagtatattgatatgatcaggtccatttcatccaattagcttgccaacagctccaaatcacctgaaaacaacataaatatgcaaaattatcctaaacatgcaaagtgatgacaaatgatgagaaatggtataaaacagtggtaatatgatgctaatgtgatgacaaatggatgctcaaaatatgtaaaatgcacacttatcaactccacagacttagtctttgcttgccctcaagcaaacaatcaagaacaagctggaggtgaggtttgaaagcggggactcagagccaaagcactagataattcagatgaaatcaatgtccaagttgaaagttctaagctgcaagatcgaattctacttaaaaacgttagccatgcctcatcaatcaatcaatccgactcatatgctcgacctacacaagttttcaaatctaccaatccctttaacattcattagttctggaacgtgaatcaagcaatgcatcatcaaagaactcatttggctaaggtaaaaggtcaagagacaaagatggtcccttacagaataggcttcagtaacaagggatctctcaaaaaatgattaagcttttttttaatgttaaaggtaagtcccaagctatggatacagagataagatcccatctacccagagtataaccaaggaaactctaatggtaatcccatcttcaatcccaatataagaacttaactctaccctttgcattcatgattcttttaaaccatttttctaatcattcttttcttttcttttaactctaggagaagttttctcaacactttgatacatctagcagatttggatttctgtaacaactaaggatgttgctgttaaacattaaaaaccgagggcttttgcccttcttcattagctaacaagaactattttcttctctttacaaatcccaaaacctttactagactcttctgcttctttagcttacttcacctagagtctttaacctatttt

SEQ ID NO: 37573 - DNA, 2713 bp, Arabidopsis thaliana landsberg
ttaccgttttatcagttgatcacaataaaaaaaatatatctctttttttttgtgagaaaaactatctcttaacatagcgataaaaagttacgctagtttatgccaactatcaattttattagctataacttataaaaaacaaagattttgtgagttttatccataacttaccaaagctttcatccataacttaccactctacataaaattacatatttttttgaaaaaagtcatgtggagtctcaaaagaaagaatctatttgctcatttttttgtgataaattctacatacctagctactcatattcatgaacatggtttcaaatctagaagtctttctacttcagaaataaaataaagaaactagctgctaagtgctaacttcatattttgttctcaaagataacaactttaaaacggataatctagcaagaaatacttgaaaactagaaaatattaattttttttttttatttattttatttattatcatttatttacggaaccaactatttttcttaatggataaataaaatgcatatttgtcaaacaaacaaaatcgagtagagaaattatctaacacgtgagagataatttacaaaacaatccaacatatattatggtccccatcttgaaacttcccaattaattcgtatttgacggtggcgtgacaacttcgaaagactaaccataagacctagtgcattcactagtcactaccattcaataaatctcacaaattctctaaaaaattcgatacttttcaatcacctttctacaaaaacaatacaaaacaaaatctaaatacgtgagcaaataatacccataaatgtatgtgtattattaccaatttgataatataaaaaacaaaacagcaaaaaaaagtgttgaagtctttaagagactgaatcgtagtggttataacgtcaatgcagcttctaaggaaggtttcttcttcttcttcatcttcctcttaatcacaaactggtcaaactctgcctctctcttttctaaacccaacccccccccccggtccccccccatttttctcttcttcttcttctttattcacaaacccaccaaacacacacattccttaaaccagatcttcattctccgattctcttgtcccttatttgtctgcttttacaaaaaccctcttcattttcccagaaacccacttatcttcttcttaaatcacaatcatcctcactcaaaagtctcacactttctcaaaatgtcttgtttcttaagctgtgtccgtttcgaaacaaccaccgacaacatcaaacccacgagtacagaatctggttctgtctccggtgttacctgttatacttgggatgatgttgagtctctcacttccaatttctctagacttattggtactggtggctatagtagtatctacttagctcgtgtgtctggttctatcaacgcagctctcaaggttcatgtcagtagtcatcgtctttatcaagtgtttaggtctgagcttgagattttgcttcgtcttcaacatcctcacattgttaagcttcttggttactttgacgattcaggttcctatccttcctctcttaatccgtttttaaattcttgaaattccctaatcaagaactggtcctaggaattattaacatccatgaaaagtcaaatactttaaagaacagagctttattcttgtcttgtcctaattacaattcttttgtagattcgtttcacttttacactagttggttagcttttccttgttgcaaattgtttatcttttgagtggattcttagtgtgaatctaatgttgttgttgtttttgttgtgtatttttcagaagaaagtggagcactattactagagtaccttcctcaaggtaaccttcaagagaagcttaaccggaacagcaaacaagtgttaccatggagaaacagaaccgctattgcgtttcaggttgcgcaagcaattgaacatattcatgagaaatgtagtcctcagattgtgcacggtgacatcaaatcttccaacatacttcttgacaaacatttcaactccaagctttgtgatttcggatcagctaaagttggtttctcgtctatggttcagccttctaagacgacgtcaactatgtcaccacgatccaagcaagtgatgatgattggttctccagggtacacagatcctcattacttgagaactggtattgcttcgaagaagatggatatgtatgggtttggagtggtggttcttgagttggtttcgggtaaagaagcggttagttctgagagaggtgagatgttggtgcattcaacagcttcgttgatacatgagattcttgattcgaatggagatattggagaagagaaagtgagacagttcttggatccaaggttgtccagggatggtagtattgatttggaagaggttaagacaatgctacgtgtggctgctttctgtcttcgtagccctccatcgctgagaccctctgcttctcaagtagttcaaactcttaacaagaagataccgtctctatctttcctcggttgtggtaaaaaagagtgatacataaaactaacctgtgtgttttaggtgatgaggtttaggtagtgattgtgttgcaggtcttagtagaaagatctccaacgtttgctgagaagattgagtttcgttgtataggagattctgcaaaaaccaaaaagaaagaaggaagattcaaatt

SEQ ID NO: 37574 - DNA, 3838 bp, Arabidopsis thaliana landsberg
aagtagtacagtagctaattgcatacagttaaaagaatgtctaacagagatttaaggttcgttgacctgcctgaagtctagtcttaatagtatcaattgggtataaagctgtttcaactacaactccagctgtacctcctgctataaacccctctgcatcatcaaaaccaaaacataagaataacaagacttagacacctgaagctgccgattcaaagcaaaaatgccaaactattagcaataaaaaaagaaattacttttcagatacaaggactgtatatgagtcagaacatgagattcataaaataatagttgcaaatgaaccaaaagacaaaatatacacaaaccaaagagagtgcggaagaaatcaaagggtttatcttcttgtgtattaacagatgcaaaaaagcctttgtttattttgagctgtgaactctgcattaccctcttcgaaacatctgcgaaaacaatagcatttatcaaatacatctcttttcataaccaatacgcgaaaaaaattcacagtcaataatgaagacagacagagagaatttaccatgagaggtcgctgaagagctcttcacatcaacggagagagtaagaggagccatgagaaacgcctctgacctaatttcaccaaatcaatttcactcatttttaagcgaaacgcaaaattcaccaagaaaaaacagagaagaaatcccaaaccaaacaagtaaagcaagagaagcaacaatatacaaaacatcatacacaaagcgtatagatacagaaaaaagtacataaatgtagtgagtgtggaattagagattacaggaagagaagcgcgaagtgtacgaaagagagagatagagagacctcgacttctcttcggctcttcccaaagtttctccgcaagaggattgattaaaagcttcttctgtttactaatgggcctataccgacacactagcctattaaaagcccgtatcagtttcttgtaatgtactatacgttagttaacctaaaagacaaaggttttgtataaaaatgggaaatttgttcttgttaatgaagtcacaaattttatttaaattttttacttgtggagtctcgtgtatacatacagttgtcaatgttagttggtagtttgcataaaaaacgtggtaagaatttagatattttaatttggaagataattatctattaaatacttttagtaataagacaatatactttacattacacgtgatcagaataattaaatagcatcagaaattcagaatcattgaaataagtcaatatctaacttgaagagatcgtcaaattacctgcttcttttcaagaatgattatgataggttttttttctgacaaaaaaaattgctactgttggtggaagagatgtatcaacaatcgtatgaccgatagacagcagaaaaaacagttgtataatatctctacgaatgacaaggaagtcgtaatctttcacgtctgattattatgcacctgagagaaatcactagcatgactgcaaaaacaaaacaaaacaacaaaaaagcaccatcttcttctcggttctacatgcagccacaaactctgcctgctcgaaagcgttttttttctttaaccccgacacatgttaacatttcatacctgatattctttataaacatatgtcatgtaactgtaacatgaccaaaatgtgattacatgagtgggcactgcaaacctcaagaagaaaactttgaactgctgatgaagctttcaattatctcccctgagtaaatttagctttgaatgtgttttgaagccgttctcgggattttgcttgagcagccaaggcaacatcgtcgagaaatcccttttgtgggaattctccaggtacaagactccaatagatctcaaactgttgtgctgcttcctcttttttatccattaagctatacactatgccctgaaacaaatactagcaatttctttcaagcggaatagccaaagacaaagctaaactccttttacttgataactgagacatatgactatagggaatcaaagatcattcttttcataattaaactctacctggcaaaggtaaggtcgaaaatctcgaggattatcattcaccatctgttgaaatatctttagaccttcttcaaattgaccctgaggttttaaaccaatggccataagtatatactacaatccattattcctatgcatatacttaaagatagctcagaaggaccaaaacacacaagaaggaaactaaggatgagttttacctccacaatatgcatttgaccaatcaagacttgtatgtttctctcctcggttactcggtttccttgtcgagcaacttccatagcttcaatgagcatatcaaagacagaggtgtcatgagtcttatgcattaccatagcaagaccctgcaagaaacaagacaagacctaaaattgaatactgcaatattgaaatcaagataccattctattacctacaccatttctcctaaacatccacttattcacagtttcataaaaagactctaatcctaaagaagcaccaaaaggtgagaaacacatacgtgcaaagctctgatcaaaagaggttgttctttgagaatatccttatacaatctcttggctttgctcaattcccccattgtttcatagcaaagcgcttctaaaagcttccactcaacttcatgaggctctaatttcatcagcttctcaacatatttcacagcatcttcatttttccctctcctcatcttcttatacacaacagccttcatagcctccatgttctctggctcattttccagaagcttctcgaacattttctcgtcctctaactctgcctgggagactacagttgcagtgggtagcgctaaagcaggtttcgaagagcagaaccctagaaagacaaacgacccaacaagtaaaatggcggcttttctcgccagcatctgaacgaaatccttggaagaaagaagagacgtcgaagagcgtatgagagggagcggcggagcgaaattgtcgggttgggcgagtctgggagcgaaaggtcgggactttctccaccgaaattggaacccatttggattacgcaaatgggtcggagtaaaaatcagtgattgttcccggcgatgatgaaatttagccggagaacagagagcagttactccgattgaacacatcttgcgtcttaaacccctttagcgagggccttataatattcccggaaaatgacatttttgtaattgggccaaaaagggcctgtataatagcccattagcctcaaaagtaggtagagaggcctcatgcttggatagctcactcacactcacagtgaataaaatcgaaagagcttttgagttttgactagtcgatcgatattagggtttgtttgtttgttcttctctgggagaccaaccaaatcagataattaaccctaacaacaaatgcctttgatgtgcaataaattatattgttttcctaattttcttgtcaaactatttaactaatcatatatacgtatacgttagacatgagagtaatgaagtacgtaagatacgacgatcgacacatcgaactatgcaaatattacatttttctgtaatgttaatgacttaattctaagggaaaaaacgcatggaggcctggatcctggagcatcatctaagactatggaagaacgtgccaaagtagataagaaaacccattatccagaggaccatggaacctaaatgtgccaaagtaggcaagaacccaaaggtaggtgcccaagtcatcactgacgtctgaaacattatccgccggccacacaatccccagtgttcaattattattgctttc

SEQ ID NO: 37575 - DNA, 2451 bp, Arabidopsis thaliana landsberg
  unsure (1)..(2451): unsure at all n locations
ttggaacggattcttggagaagatgtcgaggcaaagagtgtatgatgagttttggctagaattggcgatcatcaacacaccaacctggtatgatagccctgagaagtacagacgtgttatcaaggcttatgttgattcaaattctgatgaagcttatgtggaatcaaattctgatgagggatcttactnnnnnnnnnnnnnnnnnnnnnnnnnnnnnnnnntcgagtttttttttcttagtggttgaaattaagaatcagcttctttgaattggatttatgttcgtacatttgtatggaattggattatttatacacgatgaacattctcgagggaaaagcaaatgccaaccaaaatctctattataacacaagttaaaatcttttagatctttcaatagctttcaaaattcaactcttaagcagcaattgcaaatcaatgagaaacacaaaaggagaaatcaaagtttcttagatttagtggttgaagtgctttctttcttctctgcctctgtcgatttcttccggtctttcctttccctcttcttcaaagcagtcatgtgggccttaagaatggtggcatatgatgcttgaaatctctggtgatccttagcaccaaccttacaaacaagaaagcattgtaacaagttagcttcttacagatcgtagaccagtatcactttacaagaacttgggtaggttttcaatcgttttatttgtttaccgagctacttcctcaactgctagaaggcaactacaatagtgcaaggaaggataaatagagacttaagagagaatgttatcttttattctagttcattatccaaagagagtagtaactcttaaacaatatctcgagtaatcgatgtgctgtttagtttactaatgaatagttcctacgtttggaaacatacatggttcgagatcataatcttgagataatgtgtagaacataccgaagtagaaacagttttctttccatcggttgctcgaataaggcatctgtattcaatggattctccaactgagctcagtttcctcttctgcaccttagacttgagagatgctgacacaagtaacaaaaatcatataagatatcttcaaaaagatatttcaagtataaacatataacaaaagtggaggatgagattttcaaagttacatcttttcaaagtaacccacacagaacccttctctttgcttttctcaaacatgctcgtgagttcattgaggaatggatccaactgtaatagaacctgcaaaaccaaaaaggatggcatcaaaaaaacgcatgatcagtcaaaacaatggcaaaaattagttttctttactccatcaatcattaaaccttacaatgtagcatcaatgctgaatcaaatcccaccaaacgcaaatgagaggaaaaaaaaaaatctcacaaaaatcttcacatcacataatcctgaattagcactgagaatttaccattgttaaaccgcagatggatatcttttgcagatcctcaagcactgaaaatacttcttatcactcagataactgagagagaaaaccataaacacaatgcaagtgcagggaagagttagatcttaaagtttagaactttgtcgatataaatggaatacgcaacataaaatctaagcacaattgaaacaatttcttcaaatcattcggatttctactcaattctacgctaagacaccattgatatacaaccctagatcgtcaaagcttctgacaaatcacaacacggaaacaatataattcaattcgcaacaattaggaggcgtcaaatccgatcaagtcaacaaacccagctcaaaagccacgagctttaagaatcagaattcaaacttagaaaaaaactatgaaactgaccagagagagacaagaatctgatgatgatctgcgtccgaaaactcaccggccgaaggagtctcttcggtaaaaggaagtcgccacaaatcaaaagacgggtatactcttagtactaaaggaccatttaaatatgggcttatttagataataatgggccttattaggcccagtaatttataaaaccttactagggttttaacgatacgttctcgttctctttctctgaaactcagcttcttcttcagacaccattgatatcctctaaattgttccccgtcgtagaaactttaggtaatcgttgccgtcgagctgatatttgtgaaggggaaaccctaattcgataagggattgtaaagttgcacaagtttgcttatccccagaacctgctctgcaacacaacaatgggaaaaaaaggagggactttgaagagaagtagcaaaagcacaaaaactcgcaaagatatcgtcgaagaccaatacgatgacgagattgacgcctgtaaacttctaaacacttagaaaaatatgtcctttcttttgtttcctaaagcttaattggttattgggatgtatatgtc

SEQ ID NO: 37576 - DNA, 2255 bp, Arabidopsis thaliana landsberg
cagtgccaaatctcagatgtgtaagaaagaaaatgtcaatggcgtttcaacgacgacaacaaatacttctgtgggactttccctaacgactgaaactattctctgtttctctctgaccatttgaacttttgatgtttgaagtctataaaaacctacgcgagaccttcgaatcttcccaaagtggcgaccttgaattaacacctgcataaagtttccatttttcattcttcgtttcgtgatcatggaggaagaagatagcgtgattcctaagaatacagaaggagatgggcgtgttggaagtgatcttgaaggaatccgtaagccaaagaagatgaagaagatgagaagcaggaagagtgatgataaagagacgaagaagaagaagaaaaagtattggatgggttgtctcagagctgaatcagacgaaagtggaaacgtcgatttgactgttgatttccctggcgaacgcactgagccgactcacctagtcgtcatggtcaacggtctcatcggcaggttcttagtgtttcctatgttatgtgcttgattttgttctattttaagctgattttaaattttgtgtgcgggtacagtgctcagaattggagattcgccgctaagcagatgcttaagaagtatcctcaggatctcctcgttcactgtgagttcttctttctctatattttttcaattaaaacagagtttcctcctaatggtctatagtaaatttgtgattggaagtctcaagtgaaacacattgattattggaaggaagaaagaatcacactttagatattttgatctcactttactggatttttataatagtttttaaataatggcttgtgatactttataatcattttgcaggcaggaaacgcatccattccacacagacatttgatggtgttgatgttatgggagaaagattagctgaagaggtttgtgtttcttatctttaggctgcttatatttcagcgttgtttctatctaatgttatattgtcttccgcttggctagatgttttcgcaatgctagaaccttttatgtagaagtttctatctttgtctctgcttgagttttccagctcaagtgatattcttaatctcttttgtttaggttaggtcggtgatcaaacgtcacccaagtcttcagaagatttcctttgtaggacattctttaggtggcctgattgctaggtatgctattgggcgtctttatgagcaagaatcccgagaagagcttccacataatagtgacgacattggtgataaatgctcgatagaggaaccgaaagcaagaatcgctggattagagcctgtgtattttataacttctgcaacaccacaccttggttcaagaggacataaacaggtgatttgaaaacggttttcttacattgaagctgtcaatatgtttacagcaaagttgagatccttttatgcctcattctcctgtaagcttgatagttgatacagttttgtggaattttgcaacatgaaaagttccaatttggttaatggtgtggcattttgactgcattaggtcccattgttttctggatcttacactttggagagattagctacgcgtatgtcgggttgtcttggtaaaacgggaaaacatctttttctggctgatagtgatggtggaaagcctccattactcctccggatggttaaagattctagagatcttaaattcatgtgagttccttcaatgatttttctatatatagctgattgaggcttttgcgtagttcaaatgatttctaatgtctcctctgcttttgtgaacagttctgctttgcaatgcttcaaacggcgtattgcttacgcgaatacaagtttcgaccgtatcctttctttgttggacgtctttaaactaattctctacttcttcactgatcggacaatgtgaattgagcttaaaaaaaaagactcagaactgttgtggctattacaattcatttgaaaccttgacctcctttgttcttagaccttgttgggtggagtacatcgtctatccggcgtcacaatgagcttcctaaggttaaacctttcactttcagtgtttaataagataatgctgtgtatgttatgctgaatcagtctcacatataatgatataaccttcgcagcttcaacgtggtccagtcaatgagaagtatcctcacattgtgaatgttgaagcaccggatactgcatgtaactatgaggaagatcattcaggaccaagcagacaggtcaagaact

SEQ ID NO: 37577 - DNA, 1918 bp, Arabidopsis thaliana landsberg
  unsure (1)..(1918): unsure at all n locations
gtatgtccatagataaaagggagataatatatacagacatccaaaataggaagcataagaaaaaaagtaactatcaccatcttacttagtttaaatgtatggtcctatcaactgcttcttaggttttggtacaatggacattctaaaagagcaccataccagaaggtgcaaaatcaatactccttgttgacaaaaacacttctaagaacttagctactgttctcttagaggaaaagaaacgagatccatgtaatatccaagtctaagttcccaaattacctctgaaagtttgtgcagatggcttcaaaccagtaaataaggagatccatattgatgcgagcacaataattccgaactaaacaaccaaaagcnnnnnnnnnnnnnnnnnnnnatgtacttcagtccacatattcatatataaataaaaattctacggaaaacagggaacagcaatattagaattagtgcgaagacagcatctagactgacagaaataatacagattttcttagaaagggatgtgctattctcgccaaacttattctccagcattatgtgtcattaacaaaaacaaacagtgtacactcgtcaaatgcattcttatgatatggatacacatatatctacaaaacaactctcgcaaagaagacatcagcagattggatattcacttgtaatattctgattaggaattcataccatagccattttccttcagttagtgcatccaccatacgcatcgcaatatgttgcctacgagctcgtttctctgacagtgatggtctagatgtattgacacatgcctgtcaaagttctaaatgtcagcaaaatttctctaacacattccctatatacacacaagcggacaaaacacatatttaaggacacagaaggctgtgagcaaacatgcatgtctatgatgaggttcaattgactgtgttgaaaaaatattctcaaagtatacagatcaaacttctgcagagcaaaaatgcttcagaaatcataactcgaatcaattaaaatgggggtgaaggtagattaaacaaaatctagacactgctgaaaatagataaaaaatggtcgcttgagttggaactatgttgtgagccatgtaaagctactcaaagagcaaagtaatttgcatataaaataggtacccggtagaacacatgtgcagccagctcaaccaagctattctgatagctgctcagtgcccctaacttttcatcctttgttgtatcacccctaaataattttttcaattagaaatctataactgcacgagatgtgtagaatttaaagaagttatccctcgaaagaggagactcaaaaaagatgtaccatgatgcagaacttgatgaactaccaagatccaattcacgagtaaccacgtccaaaagttgttccactagagaactagattcactagaatcccttgtcaaatttaactgtagccttccataagaaacaagtatctcctacaaggcagaacaagaagaagaagaagaaaaaacttaagaccatgaaaaagaattatatttaaaaaattacatgtttaacaaagggctaccataaaaagaaaaagaaaaaaataaaccttgaggtttttatcatgggttgttaaccagcaacggaacacaaattgttcaaccgcattatgaatttccgatgacaaagagcctaaattaggaccatccttcagcaagaacgtatttacacattcaataagcttgcgtgaaagcttcccctcatctctggaagtattattagtacaccaaattttagtattatttgcaaaggagggtacaggatctgagtgagactgactaacaaataaaatcagaccttacagaagagaagatgtgaatgagggccgttcacaatttcttcttgaaggtcatcaggaaaatcacagggg

SEQ ID NO: 37578 - DNA, 2761 bp, Arabidopsis thaliana landsberg
aaaaagagttcatcaaaacaaaacacctgttgcttaatggattccataattttgttttcatccactaatttaaaataatattcagtttatatttatgtatatatccgataagacactggatgatcaccaactttttactcttatgtgaacttgaatattcggtcatcagaaaaatcattaataactattggtttatttttgtaaaacaagcaatcatgtcgatgattaaagggccatatatttaatcttgaatcaggaatgacaattcatatattaaactaaatgtcacgggccgtatatacgaatacgtacgaacctccgtgataacctatcgcttgcgtaaggtactaaggtaaaataataggtggtgcaattttagtctcaaaagacacatatcacgtaaccatgatttgcgacgagatatatgcattttgattatcaaaactatataataatttgaaaaactacatttctctctgccaagaaatgcaccccactattcgaagtcaacacagacaaaaaaataaatacgaacacaaaaatgaattaaagtcaaaagctcgctagttctctttttattatattgttatacatctcatctagtatataatcaccaaccatcttcttcttccattttcttcatcttcataatctcatttcctctacgagtttctagcgtaaaaaaactaaatacttgtctttaaagaagaaaaatgctaggaaaaagaatagcttccttcaagaacttagcaaagaaaatgaagagcatcaacacgacgacgagaagcggaggagaaggcggctcggagtcaacttataacgagtctcttctgatgaatgaggcggacgaggcggcgatgatggcgtcaaagacgccgacggggacgtttgcggtgtacgtaggggaagagcgcgtgaagcgcgtggtaccaacaagctacttgaatcatcctctcttcaggatgctcctcgacaagtctcacgacgagtttctctgtttcgagcagaaggttatgttggtggtcccttgcagcctctccgttttccaagacgttgttaacgccgtcgagtcttgtaatggcaacttcgatttcggcgagaaagaagaggaggttgtatcaaactaatgcccaactttttgtcaagacttgagatgtgctcgagacattggattttgtgtttttgtaagaaactatatattcgtaggattgatcgattgattgtgaaatttgtgatacattgtaacacccctctgttgcgtggtgtggaatatgtaattttttccataattatgatatatattattttactttaaaacatatattagttcaaaaaatcaaatacataaagttttatctatttgtgtttcccattatcaagaaaaaataaaatctatttgtgtttcctagccttcttttgaccttaacgtttggtcccttttatggttcaaacatgtttggatgtttgtgtatagacatgttggtgagttgagtcagaagcttgtctcgaatcgtaaccctactccgagtctgtgacactgaaaagtctgaaaggctaatgagagttgagtcagaagcttgtgtatgtttaagtttgcgtttacaaatttataaaataatgtttcaaagttttttaaacataaataaaacagagacacatacatcaaaccttgctttttgaaacaatctaatcttaaaatttcatgatcttggaactttatttatgtttggaataaaaaattattagtacaacaaatatgaaaagtgttaatagattacaagatgcataattgcataccacgcagttcacgctaagctacttgccgatgacgactccaaaaaagttatcagcagattttttttttttggtagcatcagatttggtttgacaaaaacataaatggagtacttgttccaacttgacaacttccaaggataataaaaaatctgctgacatttgggcggacattttataggcggagatttgggccttaatgggccaatacgtagaatatggacataggacacgtcatcgtcggcatgtagaaggaaagggcaaaatggtaaaagagtaatgaagaagcgttaaaattcaaaagagaaaaagaggagcggctcttcaaataatttcaaatctcatatccaccccgctctctctctctctacacctcagattccgtcgccggtgagacagaataagagagaatttcaaatatcgaagaaatttgggatcttgctgagcagtacaagtaattggattttgaaaatcagtctcactggattcgccgtccgttcgccgtttaaaaatgtctagccgccatgacaaagagaaaggcgtcaatgttcaagtcctcctccgatgcaggtaataccttcgaacaattcctaaattcaatttaggttttggtttagattttgggtctaaccccacatttcgatttgatttcaagttttatgttcaaattgaatttaggttttggtttcgctactgtgtttgttttgtattgacaggccatttagcgatgatgaattgagaagcaatgcgcctcaggttctcacttgtaatgatttgcaaagagaagttgctgtttcccaaaacatcgctgggaagcatattgatagggttttcacttttgataaggtataattagttgcgtctactcaaaaaatggagtatacttagtatctacatgttgaatgtttgtgtttatatgttgaacacaggtgtgtggaccatcagcacaacagaaggatttgtatga

SEQ ID NO: 37579 - DNA, 2631 bp, Arabidopsis thaliana landsberg
ttttaaaaatagtgatacattttgctgatgacttgggtttgtaagaaacacttaattgtttatgagatcttccactatgtaaccgacacatatgtcaaagacttaaaaaaagaactaagctttgttttctggaactggaaactctaaacgggacacaagtttaaacataacgtgctaatcacatttattacttagtttagggacaaactgttttaagcaagtcttggatctcctcgcttacttcgatctgctgttgagacaatctctctcgcatatcaggactagtcttctctgctgctgcataagtctttatgagaaatgtcatagtttcagaatcaagaggtttccaattcgacaaaatcttgcagaaatcttccgctccatcaacatctttagctttctcaaagtgaaggaaaaacaagctgaccagctctgagctacagccacattcgtctttgttctctgcagaatcagaaaccgctgcttccaaatgcttcatagccaaatccgctttatcgttctccaacagatggatcatcagaagctgtctcgctttggagaaaggacctttagactttttcatggcaccatcaagaatcttctctgcttcttcatacatattccctttcaaatacgtgttaatcgcgatattagccagcctcatatcgtaagcccagcatttcgattcccactctgtgaaaatcttcttaatcccatctaagtcgcctagtttactcatcgcttgtaacatgactagatagctcaagttgttgacctcaggacgagccttcttcagcgattcccaaaccctataaacctcaggacctttcgagattccagcgtacaaactcatgagaaaatggtgggaatcacggttgttaggattcattttctcctccatagatttcagtgcagaatccgccttctcgtaaagaccagctttagtgtagattgcagccagattagagaaagtattccaagtggttttagcttcactgtctttccccatctcatctataatcttctctaatccatctaagtcattcaaacttccacagctctgcatccatatagagtaagtgacaccacaaggagatatacccctctgtttcatcgcatcaaccaacacaggtaccttctccggttgactcaaccgcatgtacatagacatcatgttattaaacggtaacgaattgttaacaaagttaagctcatccattatctcaaaatgagcctttgctttctcttcctcaagttcaacacagtaacagttcatgagcgccccataagtcgactgatgattctttgcagaaggatctaagttgttaaagtagttctcagctgcttctaaacctttagtctttccaattagatccaaacaaattgcatgatcagacacagaaaatgtcattttcctcttctccatccaatcaaagatctgaaatttcatcaacaatggactcaatcaaactctaacaaacttaaaaatgccatttttaatctctatccattcgaaaaaagtgaaatttcattcaacaacgagcatgaccctaattacaccctaaaactagtgaaatcactaaaccctaaatctaaagccagcccctttaagagtaattttccatagataatgaaatatctccaatttcaatgttaaaatcagatacttgcttaagagatatgaagagggacctcataagcgtgttgaggtcgacggaatttgcgaagggttttagcacagcgaaagagatcgtcttttctgacagtaataccctccatgatgaactgatttaacgtctctgccactgttcctcccgtcacactaagcatagaaagtttcttgtacaactctcgctgccttgaagccaccgtcggagcagcaacagaggttctgacgccattctccgccgccggagaagaaacagaggcttcgacgacattcgccgccgctggagaagaaacagaggcttcgacgatgccagtcgccgacgccggagcaaataccgttgcacagaacctcttgccgaggcgagaaccggaagcaatcagattacggaaattcatttttgttgtaaggatcgatcaaaatctatttcttctctaaacctatcgaggacagagtgagtgacgatggtagggtttaaggcaaaactttatgtcgtttaagatagctgaaaacggcgtgcagtttacagtacataagacttggtgtcgtttttttactttagtgtacttttgtgtagtctctcttaactatattatttttagtcacgtatttcataattatgtaaacactagtcactaatcgacagaatatgaataaatccacagtaataagaaattacaatgaatgtcagttttttagaaggattacaaatatttctgtttgaatgtcttttgtaacattatcttcttcgaaagatgagatttgtttcatagagattgtgattttttttttttttggtaaaaggttaaattttatactaattatctgattttttctgtacattgttgatacaacttattaaaaagaagaatttaaaaagttttatagagattgtgattttttaaaaaagtttaatcatgtatttggaatggacctaaaacacataaaaacggaagacttagttg

SEQ ID NO: 37580 - DNA, 2628 bp, Arabidopsis thaliana landsberg
  unsure (1)..(2628): unsure at all n locations
cgacaacaacgtaagagcatctctctctctccacacacactcatgcatgcatgcattcttacacgtgattgccatgcaaatctcctttctcacctataaatacaaaccaacccttcactacactcttcactcaaaccaaaacaagaaaacatacacaaatagcaaaacatggctaacaagctcttcctcgtctgcgcaactctcgccctctgcttcctcctcaccaacgcttccatctaccgcaccgttgtcgaattcgaagaagatgacgccagcaaccccgtaggtccaagacagagatgccagaaggagtttcagcaatcacaacacctaagagcttgccagagatggatgagcaagcaaatgaggcaaggacgtggtggtggtccttccctcgacgatgagttcgatttcgagggcccccagcagggataccagctactccagcagtgctgcaacgagcttcgccaggaagagccagtttgcgtttgccccaccttgaaacaagctgccagggcagttagcctccagggacagcacggaccattccaatccaggaaaatttaccagtcagctaagtacttgcctaacatttgcaagatccagcaagttggtgaatgtcccttccagaccaccatccctttcttccctccttactactagagtccaagcccggcctagcacgatgatcatgagtgttgctattgatgtatgttaatactatacacagtcatcgtgtgtgttttataaaactgtaagcttaggatgtttgaggctaatgtaattagcactacaccgtaataaatgagaggtttactttatgttttaataatgttcttacccttgctgctctctaaacagtaatggcgtacggttagctaaactaaagtaaaaatcgattcgcttgagtaaaattagtgaccgggaaagatcatcgactactactgctcagagatgtaatcggtaattaagacttcaagctcaataataaattaggagtaaatctggcttcgaatttttaaattgtcaacttccaaagaaggattggcaagactcaatctcaattgcccaacaaacatatggctctttacaaatttggaatctctttttgatggcaagaacgtcgtaattcctctgtcgatctcatgtaattaccagactcatctacttattactttctttatatgcacttactgatgctgccttcctatgaaaccactaactggtgtctcctatttacgaaaacgcctctatgattagtagaatattcaaaccgaaccaaaaaagtcaggctgatccggacacatatgatcaaaataacttttggttatatagaattttattttcttttactatatcagattaaaaccaaaaccaaattaaaccagacaatacttcaggagaagtcataagaaatatatatttttgtcaaagggttttgaagtaaaaaaaaaaaaaaaaaattatgaagaaacaatattgaatattgattgacatgtggcgggagtgatttggaaaagtttttcttgttcatccaaaataaagattgtagtatcaccttgaagtaattataatgatgactatgtatatcacatttagactatgtatactaatttatgctaataaaagattaccacaaattagagtatttgggaaattttgttcttttttggctttaatttcatgtattatatgataggcaagattaatataatttcatgttgttcacgacttgtcactcctccaatttgagtttcgaacacctaatcgcgacaacaaccttatagcttctctctctcgcacaacacacaatcacatgcatgcaatgtcttaaaaaaaaaaaattgtgcatgcattctaacacgtgatctccatgcaaaactcctttcttgtccataaatacccataaccccttcactacactcttcactcaaacaaaaaacatacacaagtaattaactaacaacaaatggcgaacaagctcttcctcgtctgcgcagctctcgccctgtgtttcatcctcaccaacgcttccgtctatcgcaccgttgtcgagttcgacgaagatgacgccagtaaccccataggcccaatacagaaatgtcagaaggagtttcagcaagaacagcacctaagagcttgccagagatggatgcgcaagcaaatgtggcaaggacgtggtggnnnnnnnnnnnnnnnnnnnnnnnnnnnnnnngaagacgacatcgagaacccgcagagacgacagctactccagaagtgctgcagcgagcttcgccaagaagagccagtttgcgtttgccccaccttgagacaagctgccaaggccgttagattccagggacagcaacaccaaccagagcaagtcaggaaaatttaccaggcagctaagtacttgcctaacatttgcaaaatccagcaagttggtgtttgccccttccagatcccttcaatcccttcttactactaaattccaaacaagtgtgagcgtgtggttgttgatatatgttaacaccacatctcgccttgtgtttttataaaaaaataagctttgggatgttggaggctaatgtaataattagcactacaacgtaataaataagagaggtttggttatgtttggattca

SEQ ID NO: 37581 - DNA, 2967 bp, Arabidopsis thaliana landsberg
ctcattcaaagcaagtgtcgcacattctcacaagtcttcttataaagcatgaatctggcccccattacaccagaaccatatattagaatggcttcgaaattcacatgtcaaaacaatatgttttgtaaacttacatgtgcatctaccaagactaactcgatggtttcaccagtcatgctagtgtattgacgccacgagtgaagcaccttgacttggacgcgccataaagtcttgtaaggccggatatctcttagaaatgcgaaagaggcagccatttcagttggtaagcaagtttcttcttttctagattttgtgatatttggtagaatggaatgtgtagaaatagatgagatacatgctatatttatagtggtgtgagattggtaagggttttaaaagattgagtaggcgaaatctggaggatcaaactgataatagtctttgctagtatatgaaattggaaatccggcttgaaaaagatcttcgtgttaaagatgattgaagatgatgtgtagatattgacatttatgttgtactaaatagatacgttttagattgtcttggtaacaacattgatttcagtaatttaatttagcgagtttcaatgatagtgaatacattgcgcatactggtgtatctgtttttgggaggttataatattaacaacttgatttactatatattcttactgtgattaagactgatttactatatattctttgacgaaattacgtaattgatgatataaatgattcacattgattagaagaatgattaagctgagattcttgcattgtttgtttgcaagagcgggaaaaattgaaagtagcggaaggcagtatttgggccaaaaagagagtaaattcattagatgggccgaaaaaaccgggtaaaaaaccgggtaaaacccaaaaaaaaccgacccaaaaaaatccttattttgtacttcaaaaatgctaagtagattttaaaaacagtaaaactcaaacatagtaattgtatactaaataatatacagatataagagttgtacattcataaaatacaaaatattaaatcatatatatttttaatcgactaaacaaatcaaatttttatctttgaaagaacaaaatagtcatgcggtgtaccgtgggttaaaatctagtattagattaaaaccatatacaaattgtaaataacacgtaagaagaagaggtattcctttgtaggatatttcttcaattaaaaatatatattatttaatgagatagttattgtgattaaatggctattgtaattaaagatgaaatattaataaatttagagagattaataataaattatttattttcgtttataaatttaataaaatagaaatttacatgttgatacattttatattatttggtaacaaaatgtttagaaaactttccatattttcaaatacttttttttatttcatatattggtttttcctattttacaaaaatctaaaaaaataaaaaaataagaataatttcataaatgttaattagcgagatggttaatctcgattggttgttttaaatcttatgtagacgctttgagaagcaaatagtttcactttttatataatatagattagttgtttgtgatttatttaatttcccctaaacttttaacctattaaaagagatgcccttacatcttagtcaaatagtaacaacatgtatttcaaatctaaggaagaaaaattatcttatgggttatcatattgctgttaaatcaaaatcaaatatttttcttacctaaataaagagtcaaattatcaaaaaaaagaaaatattgaattgtttgacaaattgctaataaattaaatcattgtattatggtacataatctataagcatttaattttgaaaaacttttcagcctatataaatctcacgtaaattccaaaacacacagaacaagaaaaatggtagcatacgtcgataaaaatttttcattggcttgttttttggttttacttctttttgttgactcatcgtatgcaaggtttaatatgttggttacaaaagatcagatccacaccatatgcaccaaacaagagatcaattcttcattttgttttcaagttctaaatacaaatcctgaaattgctaaattagattttcctagtctcttcaaatttgtgcttaattatcaggctcaaaatatttcggatacgctgaagcaatttaagttatcaggaggctacatgccgggtgttgaatctcaatatagcttatgcatagaattatatggatatgctttcgaaaatcgtgatattaccctcagatatttagctgccaaagactataacagcgtaaacactagggtcagtggaacgttggaagatatatttacgtgtactgatgatttgtcaacaatgaagccaataccacaaatttttatgacggaaagtaatttgattaaagaattgtctaagattctcttagtgattctcgaatgtttcataagtaagagaaaagaattctgtaattgagatctataataataataataatattagtatgattgttgtcattataataataataatattagtatgtttacatgtggctaactttgacgctttctcttgcttatggctctttgatgatgcttgtctcttgggtcactcgagttgcagaagctcttaaaatcgatctcgatttctgggaatctttgttcccggtaaaggatctaactttcattactgttgtttcttcataaattgtcttgctttaggtgtgtttgattttgaatgggacacatctttagattaagtgtgtaagtagtattgatggaactgtatgatgatgattttgattgttcaggtggctttggcccatacaattggacatgttgaagcgatagtgagtatgtctaaagtagtagagtccttcacacacacatcatcaaaagcagtgaggcagccttggcgtccttgtctcaagcctc

SEQ ID NO: 37582 - DNA, 3956 bp, Arabidopsis thaliana landsberg
  unsure (1)..(3956): unsure at all n locations
ttttttggtttgttgaaggactttttattgcgggaacggaaacgaactctcccacagtggaatgggcattggctgagctacttcgtaacccagaggctatggctaacgctaaagtcgagatcaactttattgttggcccaaaccggtacgttcgtgactccaatctattagagtttccttatctgcaagctgttgtaacagagactctccgtttgcacccaccgactccatttctaatcccacgcagagctgagtcagacttggagattttaggataccccattcctgaaaatgctcagattctggtgaatgcttgggctataggacgagacccgaccgttggggaaaatgcggaacagtttgagccagagaggttcttgggacgagacattgagatgataggtaaagattttgagatgataccgtttggagctggactaagaatatgccctggaatatcactggctttgaggattgtacctctcatgcttgcttcacttatttattcgtttgaatggtatcctaaaaacgtaaaaaacgaggtcgttcctgaggatttgaacatggacgagacgttgggatttaccttgcacaaggccgaaccaatttattctgacaccctcgagaaagcgtacaattatttttattagtcttccataattttatctccatgttatttatatactacaaatgatatggtgcagtattatcgaacctaggattaatatatagacaacaaaccctagcctatgtgtcgatccgtgcttatgaagaaacttactttttaatataccttgatgcttccaaacggtgttgttggatcactagttggaatgtatcgttatcgttacaagatcatttgactgatggtcccaagggcaagataaggattttttttttttaatttagttattgtaaatgatgtagtttatcaagctgtgttggactttaactttgtccgtaaaatctatgggctcttcctatagcacatgtaatattggcttgtataataaaattacacttgagaaatttagtaaaataattctttaatgttatacttctagagttttatctaaaatatgcgtttggatattataggagaaaaagaagcaatgacctacttattaaatcaaaaatcttttcttggacgaagtctagacctgaagttgcaaacgtatgaaagcaaaacattaatgcatatgaaagtaaaagattaatgcatatttaaaaataaacaaacaatactaaaattatattttactaatttatatatatatatatatataaattgataagtttatgcaattattagtatatgatattgatgtgatcatatagttacatatgattttcaaacaaattattattttatcgaaatatgttaaatattatattgatataactcattgatatcaaattatcaaattatgttaaatttatatagttacattagaccgaaaaaataattaatttctagtgattactaatttatcgagtgttaattgatagaggttctttctccgtacaaaatatttacaaattaaacttcaatttacacatgtgttcacttttttccaccttatctatttggatgttgtataattgctaaattatgttcataattaacgtataactactatcttagatttaactttagtgaatatgcattagacaataacaaattttcagttgattttcaatatttaaatttgtcatgttatattgagagagatagagaaaggaagaaaggtgagaaagagagatttagaaaaaggtaaacaagagagagagaaaggtgaggaagagatatcagaaaagaggtaaacgagagaaaaagagaaaggtaagagagagatagaagaagaacataagcttagatatcaacaataacgaaaaacaattaagatggactcttttaagctctgaatgacaatgtaaaagcatcttatgatcattgagttaggaaaaaagagtgttatgtgaaaccttaatttgcattcgaccacaatttatataaaatacataatacttttaagttcaaaacgatatttgtacaaacatgatcacacacaaacgcattcacctccccataaccctttttcgttgtctcacttgggtgtgaaagcctgtaaaaaaacacaaaagctagtcatttaaacgagtggatgttatgaatatttaagaagatatgttttgattcggatcacacttacagcgaagatggtggcgtgaccaggatcagcaagatgtgcaaaaaggttatcaataggaccagtgccagtgtagatgtgttggaaccaagcacccatcactgccaacatagccaaccttccgttcttgatctccttggtcctcaactccttgagcttagccgggctaccggatccccaacccaacgggtcgaaccataacccacctgggtaaccaacgtctgtgcccgtcagtttgttgtttgggaagactgggtcagtgttgacgctaccgggcttgatgatatcggcccatctacgtccttctgcccatccgatcaaaatgagctcaacgacaaagagtgtggttttgtccgtgaaatactcttgctctcccgccgtgtaccatgacggagtgttgaggattccgatcttcgttaggaactctgggatgaatatcccggcggctcctagcatagcccatcggcagtggactatctcggcttgtacgttccattttagactgtccgggtccgatgctgacatgtgtctaaattttgtcagaaaattataaatatagtctaattttgtttataaaacttgttaaaaagcatgcaaggaggaacaaaaaaaatatactcacaaagaccaagaggatcaaatccgaagtcaccagggaggctaccgtctagccactctggaggagtgcttcccgggaaccagattggtctatctggatcagctgcgacggcgcgcaccgacgcatctggcctggacacagctggaacagtcaacttcttcttcagcctcagtttcttaccacccaagaaactgcacatatatcatagccctaaaaatttagtcacaacttcaataacaccaaccatacataaattcatattattacatagggcagatcggtgtttggatcacacaaacaatagtcgcacaacgtttaatctaaatggatgatggatcactaattttacaaccgcacacacattctcggatactagatcataaatcccaatcaatggatcactatcatagtcatgttaacgaaactaattaagtacaactgtacaaggatcttagtgatcattcctatatagcaagtgatgataactgataagaagagataaaaagatgagcttaccttggagaagaaatggcagcgatggcagaagaagcacaaagagatgatgccattattctcgacgttgttgacctcaagactcaagagtgtgttagaagaagaaagaaacgaacgtgtgttgtgtaatctataaaagcactctggtgacaaaatcagattctgcttatctgattatccctacggataacgcactgagtttcctcattggtcaactcattggcacgtggcaacttcgtaccaccacatcttagattttctctctatttgaacataactattaactgagttttaaagaaagaaaatataagctagtattccaagtgactgggcttataaagaataccaaagcccatatgtttttgggcttttttaatcttcacctgatagcattaggccttcaagaaaataactgcggctttaacatttgccggagcgggacctcatttatgtaccttctacaaattaattgcaatttttnnnnnnnnnnnnnnnnnnnnnnnnnnnnnnntggtaccaagcaaaaagaaacatgaagtggtaccatgtgacgtgaaggagaaagacaagacgacgagatctaagactgtatactcacgagcaaaatgattaat

SEQ ID NO: 37583 - DNA, 361 bp, Arabidopsis thaliana landsberg
tactgagacaaagatgggctgtcaagaacgtagaggaggtaggatggtcagttggtcagatctagttttgatcgtacatgcacggtagtcccagttgggggctctcgtagggttccctagtatgaaattgatccctgggcaagaggatcaagttggcccttgcgaacagcctgttgctctatctgagtgcaaccctctgggcgatatgcagcgaaaggagggaagttgcaaggaccgaccccatagtctccaccccgtaggaactacgagatcaccccaaggacgccttcggtatccagggatcgcggaccgaccatagcaccctgttcaataagtggaatgcattagctgtccactggca

SEQ ID NO: 37584 - DNA, 2391 bp, Arabidopsis thaliana landsberg
acaagtctattgaatgatgatttgcacaacatattactctttaatctattcaattcatctcgcgctcgacttattattactgggttcgactggtctcctgaggagaaaacctgtgtattgttgttgttcacttcaatccagctcaatcctggatctttagatgaagctaatcctctaatcttccttctcatctctgcagcatcctcccatctcccatttactgcatataaatttgatagtagaatgtgtgttgcagtgtcttctggatcaagtctcagtatttgctcagctgcatagagtcccatctgcaagtttcttgtgttaacacatgcgcttagcagagttctccacagctctgcttggttgttaccgggatgagattgttctatcaattccagtgcttcgtctaataacccagcttttgatggcaaaggcaccattcaagaatagtgcttaaaacctgctttgatgctctgttccttcatttggttccacaggaacttaccttccttcgttgatcccctgtggctgcaggctgctaataaagacaagtatgttacagcatctggcatgaatccgttttctagtatttgctcgaagaagctcagagccttttctaccattccatgctgactgtaagctcctagcattgaattacaacatttcaaatctggatttgaaacaagagagaatattgattctgcagtttcgtatttgccgtttttcccatacatgtctactagcgctccacatactgacataacacaatctaatcccgtccttatggcaagagaatggaaaacttcaccttgtcttagcatcgccatatctgaacatgctcctaagacactactcatggaaaaaccatcacttctattcttttctctgtacatatcaatgaagaattggaccgcgaattcgctgtttcctagtctagaatgccctacgatcatctcagtccagagaacaacatccctttccttcatcacatcaaagaccttctgtgcagattcagcttccccgttcttgaagtacatggacaagagtgttgttccaacaaacacactcttttcatatcctaatttcgttacttgtccgtgaagaagcttcccataaacaaatctttctggttctgctgtcgcagatatagcagcagagaaagtatattcatccggccgaggtgtggacatcctcagcaaccttctatacataagcatcgcttgctctccaaagccgttttctgagcaccctgaaataatcgagttccatgaaaccaaatttgggttatgaatcctcccaaacacataaaatgcttctctcatgtctccacaactgcaatacatgtcaagaagagcattatctagaggtaaatcaactaaactatcagagactattatccgggcatggattagtttccccagtgaatagcttcccaatttactacaaccattcaacacaatcgaatacgtgaactgcgttggatcaacaccagacatcaacatgtttcgaaagaacataagcccatctcctatcttatcatttttaaaacccccaactatcattgtgttacaagcaaccgtatattcattatttacacactcaaatattctcctcgcagattctaagtcgctgcaactagagtacatccccaaaaccgatgtctggacaactacattatctgaatatccaagctttataatctgcgagtgtaatgatgaccccattaaaacatcctcaagcacagcacatacttgcactaagctagtgaaagttgacatattgggcttcacgtactcaaacgccatatgggttattagaggtaacgcataacttgcaaaatctgggttccgggaatacgccgaataaagcgcattataagaaactacgtttctctgaggcattttgtcgaacactttccgtgcttgttccagtgaaccacaccttacatacattgagatgagattgttatttgcgaacggagactcggtagtggcgccagcgccggcggtgaggacgagagcgtggagctgacgcgcccgttttagtaccgtgatcgagacgcatttccgtgtaagttctacaacggaagaagctatttcgttcagtggcataaaaaagctaaagaaagcttcaggttttccagaagaaaatttaaatagttgcccttttaagaagattgtcctcgtagattctaagtcccctcaactggagtacatctacatcatctgaaaagatccaagctttataatctgcgaatgcagtgatgatcccatggaaacatactcaagtacagcactgagctagtgaaagttgaactaatgggcttcacgtactcagacgccacatgggttattagactatacgcataacttgtataatctgggttccggg

SEQ ID NO: 37585 - DNA, 2753 bp, Arabidopsis thaliana landsberg
gattttttgtttgtttttcttttttctttttgcgtttggagccgtcagttttggtgtatagttgtattagaatatgtgatacgaaagttgccaaaatcgaaagactctcattttgttcattcaacgtctacctcctttaaaaaaattgtcatcacaaagataaaatgttgtaactaccacaatcatgcctaaaaaactaaaaaattaattaaaccataatcaccatatccaagttattaataatatacgacacgcgtagaccaatacctagtaagcgtatatatatgtagagccaaacctttttccaaactcaaaacactacaaactagtttttaaaaaatggcacaaaataagaatctcaatctggaattgagtctaagccaatatgtagaagatgatccttgggttttaaagaagaagctaagtgactctgatctttactatagcgctcaactctatttaccgaaacaagagatggaacactttgtacttccggagatggatcatgaccttgtccgaaaattgtgagctggcgttgaggtcaaagtcagagatgttgacagtgttgacgatttttacacagtaagacttaaagtacgcacgggccagtattatctcggaaaaggatggggcctcatcaaaaatgccaaggttttaaacacaggagatcatattggactcttttgggataagttgacaagagaagtcaagttcaagcatttcaaatctcaatcaataacaatgcatcgcgaagcgggtactacttcgacacagaaaaacgtattacagaagaaatgaatacacacaagtaacacaaccatttaaaatgtaaaagaaatgtgtatagatataatcttaaagtagatattggggaaatggtcgtgttatcctcgtaaaacagcacaatgacagaaaaaaattatgcctctctttatgagttaatctatgagtagaaactagaaaccgagcaaatgaacgaacgtaataagtaaaaagaaacatgtacatgtggaaaaagtttttttaaatgtataatcagaatctagagcatgccataagaagttattttaataaatttggaggagaacgatgctatttaccagactaatttaatgctctttacatagttctatggatcataaatcgttcacattccaaaaacattcatagttaacaagatagctaaagaattgcagaaaaactcaattcggaattgagtgtatagccttttttagtgacattttattgtttatacgtttttttttgttgttgtcataatatagttttgagttagtcatatacatttgtatatagttattggttggccatgtagttatatatagttttaggcttttagcatttttagccttcaagacttttgcggatcctagcaacatcctggccgttgatatcataagcactcttcaaaacctctaccagtatcgaaggctttgaaatgaaagacgacaaagatacaatctgagtcccaggattctgactactcagcccagagactgccaaagctgagctcaccgtatcaatgttatatagaaaatggatcaaacctttgggaacacgaatgtctcacccggatgaagctcctgcgtaaagacccgacccgacgtatccacgaacccgacgagaaggacaccgtcgaggcagactgtcacttcggaggcgcgtgggtgcacgtgcggtgggacaacaccagagcctccgaagtctagcctggccattgtaaggcccactgtgtttagacctgggaggttggcggttgtggtcacagtgacgttgatcataaacggtttggtcttagtgtttccgggtctggataatgcggatgttgaaaagtcagagacgctggcttgtgtcggatctttgcaaagtttgccgttgaggaagatttgttggtgagatgaaggaggaggagaaacgcagtagtcttggagcgggtccgggtcggatttaacccgacccataagaagtgtgagcgttagtagtatgtttagaatcatagagagcgagaagcaaagctgagttagagcttgtaaataatgaaattttagagtaaaagatgtcttagtaagatgcacttaatttattggaccttatgtttgttttcaactttctatatatatatttgatattggtttattgtttaaattcaaaatttgggatacttttttgtttgtgttacagaagaagcaacacaatgtttaattttaatcatgtaaaccaaaaaaacaagttttcattgtggtggtgccagaattttagtttaagcaaaagtcattatatatagtaagatatattttgttagccgttaagcaaagcaaaacaaaactatccttcatgcaatgacttttattgtgctatgcttatctctactatatattcaaaaccatgagttatcatatcgacaacaagaaaaagaaaaaagaaaaactaattttacttgatgtttcctctaaatacgaagaagataatggacataagattcaaaattttcaaattactatctaaaaagaaagaagaataaattaaacagcaaactagccgtagacaaaagtaatctacatgttaaggagtaaagcaaaaaacgtggaaacacacatgcaacagcgatcggacactacagtaccccaaagatgacaaaagaaaaagatgtggtagagagatttattcccccacatgaagggacaaaacgcaaaccaaggacaatttttgttaatttattgcaaaattttaaatac

SEQ ID NO: 37586 - DNA, 1730 bp, Arabidopsis thaliana landsberg
  unsure (1)..(1730): unsure at all n locations
gtttagggtctgtgtaccctttcactaataatatgcgtggaaacattgcagattcatggtaattcatttgaaaggaagcttgctggtttgagaaggaaagaagacaagcactaaggtcagtcacagccaaatataagaatgatcattgtgtttttaagtagctaaacatttgtgctttcagagatctagtggaagccagtatagatcacagtcaaaggataatgcatcacgtgatttacaaagtcgatctgtgagctcaaacggatcggagcgaggagtatcaccttgctccagcgaaaagcttttgagtttgagctctgcagaagacatgacaaacagcagtaactcaactccagttgtcaaaaagcttttctcagaatctcttttagtggatcctaatgatggtaaggtttcatatgtcaaccttttcactgagcgtcttggttatatgactcacaagtatcagaaaagtataacacagtttcaaattaactcattgatgaaagcattgtagaaacaacaaactatgtcaattttcttctttactattggatccttcaaatccttatatcaaagcactgttttttatgcaggagtggcgagacaagagtcgagttccaagtcggacatttctaaacagaagccacgcgttggaatcaatagcgatcttagtagtctagagtcacttgcatattcatatgaacagctcagagttgattctcagaagccagtgacggatatagatgcaacaagaagagaggtaaaaccctgcaatttcatatagaaatttagttctcttatatacaccacatgaatacttcaatgcaattttatctcttcaggcgtacttaacagagaaagagtttgaagagagatttggaatggcgaaatctgagttctatgcacttccaaagtggaaacagaataaactcaaaatatctcttcatcttttctaaaaacctagagtaagatctttgcaacaaagctatttttttgggtcttaccaaatgtaaaaactgtaatgtttttgtttattgcaatgacctcctgatatataagtttgaggctagcctgttacaaaatcacaacaccaaacaaaaagacacctaaatatggaccacatgccttcatgggtcatagtttcatactgcaaccaaacgacgtcgtatttggggaatgacttgaataaaactcacaaaattcagttcttaataaaagaaatctgaaaaaggtacgacctttagcttcttctgatccttcatcatcttcatcgaatttgtcaatttgacttgccaaagctgaaatctttgagtacccaatggatcgaaatcaaagacccagaagcattttggattcattaggtgaagaactcatcgcaatcctcacacctgtctcgatttgtatgttcaccgttgttcttctggtctgtatcctaaactccgacccttcttcttcctccgcttctttctcctctatagccaccgcagcttactctgagagcgattcagattcctcatgggacaaattcgtaggtgcccttttgaattctgtcgtcttcgtcgctgcaatcactgttgcaacatttgttctcgtccttctcttttatctccgatgtgttaaattcttgaaattctacatgggtttctcagcttttatcgttttagggaacttacgtggagaaatcttagtnttattgatagatcgatttagattcccgattgattctatca

SEQ ID NO: 37587 - DNA, 4360 bp, Arabidopsis thaliana landsberg
cgtgtggtttgtgtatattttgtttatgaactcaaggtttttgatcttgcaacaggtgagcctcgagcagcgaaagcagtttaaagtatcatcaatcatgtgatactatcaatcattcaccccattttcaagttggtagttaattttcttccaataagtagtagagttcaactgcatcaccagcttccttcaagtccatttgtgctatcatcaggtttttagtctctttgcatttccttgttgagctcgttgaagctagaaataagacttgttaatattcaaatcgagtttgctatttggttttgtactttagtagcttctttttttgttgtgaagttcttgtagaagagattgaatgttgcatttggaaaagtaagttatgggaagccatctcgacaattagtaacttggttgttttcgacttttcgttagtctggtacagtcttgtgcttctgaaatcacttatacgatgcatcaattctcgatttggtatgatattttccttgatgctctatggagtcttggggagtagtactatgctaaaaagaaccaagacacgaacgattcctgaatattgttgcacgatcgtgtctacatagaatatgttgcacgctcagtttgactggatgactactaattactgccaatgatgctatcccaaattccttattcaatgaatcttttgtcaggctttggagttctagagtcgaattttgtgacacaggaatgataggaaaccaacaaaatccaacatggttacattaacaaacagagatgattcatgttaatcctaatacagacgcaaagcttgtctttcagaaactggctaaagcaagataagacactttaagtaatggagagaccaaatcgtttcttaattttcatgattgttgtgtaatatcttctttgatgtcctcggcatcctcttcatcgcgatagatgctttctgccatttgccagacttgaagactgttgtcttcagctacacttgagatgacccaaggctcgtccttgttccaggcaaagtctgatatcttggccttgtggcctccatgagagaagagtaactctggtggaccatcttctgcatccaactctatctcaagctgctcttctccaaccctgtaaaccccaaaaaagaagcattactcaacgttgaacaatcttcagatttaaaagttgaagtttttgaattctgcaaagtagatgatgatgatacatacctgttcaggtcccagaccatcagccttctgtcctcccctgaagatgcgagtactgtttcatggttaggatcccactccacttggaagacctctcccctgaaatcagaatatttctttaaaaatgtggatttttacagcaaacagtccttcacagttactcagtccacaggtgtccacaggtatcaacatttagttctaacacaatttatagatagcgcagaggttatgagaaaatgtaaaggaacgtactcatggctgctcatgacatgcaatggcgcattaagtttccggaggtcaaacaaagcaacagtggagtctgaggaagctgtggccaatacccattcgttgaacggattgaaagatagatagttgacctgagaaacagaaaaaaaaaaaagcatagtcatacagttgcaatatttgattgggagatacaggacatatgaacttgcgacttcagacccaagtcatttaagttaccatttttaaaaaacaagcagagatattaaagatggtggttttctacctctctctcgtgaactttcacttggtgttgcatttggtttgtccgtgtgtcccatatcaccaatcggccatcctcacccgcagaaccaaaaaggttctcattcttcatgtgccatgacacatctgcgatagcactttcatgtccctaaaacaaaatcaaaagagtaaaatcagatgtatcaaaccacattttctgaaaacagaagaaagataccaactacacagttccttttacctcatacacaaacattgcattcaaaaccttatcttgcggtgtagctgaaacatcccaaagacagatcttctgatcctgtgaaccactcaaaagataaccttccttgaaaggactccaagacaatccatacccttccttgtcatgtcccactagcctcagatcaggatcacactcactcgtttgagactttgccgcatgtttggcgtaatcaaacagaaacacctcacacccactcgtctttgcacccacaagcgtcggcttttgaggcatacaccgcgctctgttcacttctccatcaacacgtatcctctggctaaatctcacctgaaacaaatcagaaaattgaagaaacatggtttagtagtatacaaaaactcttctttatcctaaacctataaaagagtccaaatttaatatctcagatcctataactaactaatccttaacactatcagtttcagctagtcatttgatcgaacacttggtgcgcgtaaaaaatgagctataaatattgtccaacaaaacgaagaatctccagggatcaaataccttaggaataacgggatcctgattagcgccgcctatcccaggttctgcgtttggtgtcggggtaacgacgtcggcgaccatgagaaaatcttgagcactaccggaagtatgagtaccgagtataagcttgtggacaccgaagtaagagtctgctacgtaaggatttggcgtcgatggaacccaatggacggtgagagatggccattcgagtgggtgagagatcaaaagatcgtagagaaatggtgtgttcttcttccacacagaaaaatcttcctcgacctgacccattcctgtctcctccttaccttcatctgccattatctctctcgcctctcaatctacttctctctctctcgctgatcttcgagggtttttctggttgattttcccgccaaaaatacacagagctgatcaagggctacagaaacctcggaggagaatgcagatactagttgtgatgctgttttactttttcacaagtgaacgttttctgattttagtgtttcaaaacagcatgcatgtgctgtgaatgctggttttgagtttatgggcctgtaaagcccattcttaaagtacttgtagaaccttcatttttttgttcagaagattatttgcctctagtcgtcttatgcgtattctaggcgactatgttataactcaaagttttgattggtgtgagatataacttgctatatgatgtgacatagtacacataaacgataccatttttattatgagagttcaataaggcttgaatactcaggaagtaagattttgcttatttatatatgtagaatacaaagatgaatagtaacaatactatgtgctgagaatttcacaagtctttacctcaagggttcaaagaatttgctaccatttcaagaattgtattgactataacttcagggcttagaaccacactgattttgaatatcttttcacattcatcagcttgaagcagatcaaactgagactgaagaagagtaagaggcatgaaatgttcttcctcggaagctctcttctgtaaccgagcagcaatcacctctgcattaccttccaataaaacaaacttaaccttgcaactcgtatagcttcccggtttgtaatcaggatcagagcctctcaagatttctctatactgttttctcaaagaagaacatgcgagaacaacggtttctccatcgagtaaacgttttcgcaaactctcttgtattttttcaagccatggcattcggtcttcatctgaaagagcaatgccttgacgcatcttatctagttgaacaattagtgttaacacatgaaattttcccaacagattcgtcaaaagtatatcgattctgttacctctgtttgataaagaatgaaaatcatcagcatcaagaaaatcgcaagatagagctttccccaacattttacctatggtactaacaaagtgaaacaatacaataaacatcaatgatttttcttcaaactagaaaatatagtacaaatgagaagaagaatataaacagcttacgatttccctgcgccacttacgcccataagcacaatgactttacctataactatgacaatgagcaacaaaactgatgagatcattcacattaatggaccataataacaatattggagcttaccgtcatttttagccgacatgcttgatgaaacaggttttggtgattcttgaagaaaacaatctgtgatcaagaaaagtaaacatatctattaactctcaatcttagcttataattcttcaatatttcctaatttcatctgagaggagtatatgactcaaattcaataagtaacggtggaaacgaaagaaaaa

SEQ ID NO: 37588 - DNA, 3692 bp, Arabidopsis thaliana landsberg
actcacccaagtcccttggttagcggctatttcaccttcttcctccattatgttatacatttcaattgcttcactagcaaaaccgttttgagcataacccgagattatggtattccatgaaataacatctgtattcggaagccaattaaacactgctcttgctgaatctacaaggcctagttttgcatacataaccacaacagcattcccgatggtaatatcttccaagaaccagcctttcctcaaagtgaaaccctgcacagatctacaagcacgaatgtcccctaactgtgatagtatagaagccaaactaatcaaagtaaggcaatctggttgaattctactcaaccgcatctcctgaaacaacgaaatcgctctaagcggctgctcattcagctcgtacgccttaattatcgaattccaagaaatcaaatccctcacatacatcctatcaaaaaccttctggcaatccctaagcctaccaaattcagcatacaaatcaatcagcttgttggaaacaaacaattcggactccagaccatgttttatcgagtatgaatgaatagtaactcctctattgaaatcaccggcttcagtgcaagccgaaaggagactcacaacggtaactgaatccatagctctcaacccattagacagagttaacgcctctttagcatttccgctttgacaatacccagaaatcattgcattccaagaacccatatctcttgcaggcatttcatcaaacagtatacgtgcattccccacagctttatatcgacagtacaaatgaatcaacgaggcagcaacatagacatcccacataaacccaaacttcaaagccaagcaatgaatcttattcccatcaatcacagtcctacaagctttcaaaaccgaaggaaaagtcctgtaatcaggtgtaagtccagaactcaacataaagagactaatacacctaatcacttctgaagaatttcccgcacggccataacccagaattaattaaattccaagcgtatacatctctgttctggatatgatcaaacgtgtgcctagccaatgttacattgccaaggtaacaatagagattaacaagtttagcagagatacaaacattttggatttgtttggagacaacgagacgtgcgtggagacatttggctgattgcaaattagtgcaatatctgaaaagtgtgtgaacatcatcaatctctttactttcattcccatttttccaacagtcttgcaaagcatttgcagatgctgaaaattctctaataactgatccgatagattgcaaaactcgtgtaaagcgcccacctttgcaggttggaatttgtctgggaagtgaaaaggttccaaatttcatcaaattttcgagggaagaagagaaatactcagagaaaatctatacatttatatatatacctcaacatacatgcaattcaggtgtcttgaaaactttcgacgattcccaccaaaaggtttcggttagcttagagaagtagagatgagagactaaaagagatggtataatcgggttggtgattttcgacggtgaattgaagagtccgccggagggtttagcgacggccgtcagcttttcttctttgattgcggtttgtaatttaattgaacccggtttggttttgtaaaccgtgcggtctaaagcactaaactttaagacgagtaagattagagcccaataaggcccaaatagtttggtagcttggttaagcccaaatatatagccgttggctagacgcctagacggagttttttgtactgaccaatagagaatggcttgcaagagggaaacacatgatctgaaccaaaagtatgtctgttagtacactgggaggggatttttagcatacgtttgctcaagcagggccaataattgacaataaaaccttcgatccacgtgatttggattgcgtgataagaggtgcaaaacaaatcttcgtgctcacattattcgggctattcacttcacatgcatttgactatgacaaatgacaatagttctttttaaaaaacaaatcaaaggaataatacgtttattagacttcacaatcttgctataatggtccctcttcaaagcttagagaatttgtaagataacaaattaagattattgtatttgggtaataatgactacctctttttggctttttcatttatataaatacttggagttcacctccttacaacaacttgaaacaaatcatggagcttaactcctacaaatatggaatcatggaaaagtgactttagtggaatactccacattattagcaatgaaacagaaatgcgagagacttagtcaagtcatgaccaagtccttaatcgtatcttggattgggcttgcgcagacgcttgggccgaacgttgatgttgggctgaatgtcctcatcattactccccccgtcgagaagaaccttgtcctcaaggttcagagaaggaaaactgcagcgaagttggacgacgtcctcccaggtggcatcgtcccttgccaggccttgccataacaccagcgcctcctcgaagtgtttaccatcacgtaccccgcggcggagttgcaagactcgttccgattgaaggcgaaggaaaccggtggaacggagaggaggtaaagtacccgatgtcggtgtatcagacccaactctcttcttaagtagcgaaacatggaaaacagaatgaactttggtacccgctggaagagtgagccggtaaccgaggggtccaatgctagcttccacctgaaatggtccatagtatctagtggccagcttctgagacgtgcaacgaaagatggtgtgttggcgataaggttgcagcttaagaaaaacccagtcaccgacctcaaaggtgacatcccgtcgtttagcatcagctgcctgtttcatcttgttgttagccctcgtgaggtgatgcttgagctccgtgatgattgcgtcacgctcgaggagctgctcatcaagttcgagtactgttgttgagcccgcttcataacctggtaggggtggtggatcacgaccaaattgtgccttgaacggagacattcctgtagaggaatgataagtagtgttgtaccagtattcagcccaaggcaaaaacgagctccagtgagtggggcgatctgcaacaaaacatctgagaaattgtttgatgattctgttgatgacttcggtttgaccgtcggtctgcggatgatatgctgaggacatgcgaagcttggttccggaaaggcgccagagctcccgccagaaagcactcacgaaaaccgggtccctgtcactaacaattgatcgaggtacaccatggagtttgacgatgtactccgtgaacttggcagcaacagacttggcggtgtatggatgcgagagaggaacaagatgagctgctttggagagacggccgacgacgaccatgatggaggtgtgttggttggaggaaggtaacctgtcgacgaagtccattgatatgtcttcccatatctgatttggaatgggcacgtggttgcaagagaccagctggtgagagactatcatactaggcccgttgacatatatcgcatgctgcaacaaactaccttaccgtcttgtgcatcgatggccaataaaacatttgtgctagtcgtttaacagtacgcagtaccccagaatggcacccatgacagaattatgata

SEQ ID NO: 37589 - DNA, 5098 bp, Arabidopsis thaliana landsberg
aacaaaataagaaagattggaatcagatgaacgaatatagaattttgttttagttttggcagttgtcttataatggatacttaccttaaagaaagatggaaatcaaataaacatcttataagaaactagaggtataatacaatctccataaatctctaaatcttttattggcaatagtaattttttgaaagtctttattaatggataatatatttactttaaaaaaaaaaaattaaatctcacaactaatttgctattgcttgcgttgactcctcaaaattgtgagagcaaacttggatttaaggcttagatacaataaaaaacgaaaggggtgttaaaccaaatgaaaaatataagttacattcgcttaaataacaacatcttacaaccaataatcatagttcttggaacagaaaagagggagaaaatagccataataacaacaacatgaacaaaaacaagagaaatggtatattgtttagtttaggacgtagactcaggaccggccggtttagagtttagaagaggttgaagtgccttgacaacgatgctcatgtttggtctgaaatttgcctcatattgcacacacaaggccgccacggctgccaactgttcgaccatacgcaaagaaacttttcaaaattacaaagctaaaccaaataatcatatgtccctagttttcgaaatatgatatctagatgcatctaatatcaaaatatctttaaccaagcaaagtaaatgaagatatcgtttgatatttgaagaagaaaatgaagagcggaccttggcgactgctttgggaggaaagtcattgttaagcttaggatctatgcattgcttcactttgtctttgcttagtttaggggttgcctgagacaacaatacacaggttattaaaaggggtcttataatgatcatatatatggagtcattccagaatgtttgctttaatttgtgtacgtacccaagtaacaagactttgttggcctttaggcatggtatgatctacgggttttcttcctgtcaagagctccaatagcacaacaccaaaactatacacatcactcttctgcgttatctgtcctgtcattgcatacctaagacaacaaaactcttacgttatcaagaactatcaggttgttttaaacaaatgaattaacgggtttatggtataatactctggagcgtggtagccgaatgttcccaaaacacgagtagaatgaagcctagccgcggtatcggaggaagcattggtcaagttgaaatcagccattttggccacaaagtcatcaaacaacaagacattgctcgacctcacgtccctatggactattggtggctggaccttctcgtgaaggaactcaagccctttggctgctccatatgcaatctttaccctttggttccagttcagcaccggtcctggctcagccccttgcactccctttctccctaaagattcaattggtccatatatatttcatgtaccatatactaaaatatgagtagtgagagttaaaatttacgtaccgtgtaatacatcatgtaaagaacctttagttgcaaactggtaaatgagaatgcgattatttgcctccaagcagtaccccagcaactccacaaaatggtcgtgtttgagccgcgataccaccgataacttagccattttgaatagaaattaattagattagaaaataacagtagtttaatctaaacagcttgaagagaagaagcttgaacaaattatagcttgaagagaagaagcttgaacaaattatagtttgaagagaagataatcgttattgtaatatgtatgtgtgtacctgtgaggtgaaatctgagtcaggttcttcagaagaactagcatcaagtttcttgatagcaacagcttctcctttaaacttgccgcagaagacacgtccataagaaccttcaccgatcagtgccttgtttccgaagttacccgccattctgttcaactcatccaatgcaacagaagggatctctatgggcaaaacctttgcaggagctcctgatctcggtgcattcggattcctcggttcccctctattcccacctattcacacacgcagaaatgcaaaaacgcaaacgctcatggtgaaactcagaacataaacgtacaaggaacggttgaggaagattagggaatttaccgccaaaattgggatttccggctttgttaggaggggctgcatactggtttgcgggcggaccggcgggttcctcatccgcaccaccgcaacaaaacatatcttcagatcttttgccaacacgggttttgtcttattcttatgttccgattctgtttcagccaatctctgtttttacctgttaaaaacatataaaaaaatgtgtattaacattcatattttaccatgcttatggagagaaatttcgatattgaaacaacaatttgcagaaaagctttccgatcatatttcgagaatcgttaagagggtaaaagaagatcgaagaaatgaatgattgttaccttgattctgccattgaatcaacccaagaaaatgatgatgagagtaaatacttcagaaaatcacaaaggaaggatctgtttctgaaaagtttgaataaatgtcggaaaaaaaagatcaaacgagcctgaaaatgtttagaaatctggaaaaagatagtttgagaaaaaaggaaattaattttcttagaattattgaaagtctctctgtttctctgttccgcgataaagtcgggaaacaataaaaacacattcgcttataattttgttactaatttaatataaccaacgtaggaaaaaaaaacatgttaagttgtcttcacgtcttgcacgacctcttcaaccatacttctaatttatctttgtaatcattcattcaactgtctaaattctgtctcatcatttggttgaatttcataatttatcagttttggtacgtagacaatcatctttgacaattgaataatctcttaaatccaaacattcatcaaggttagtttcattatccttgaaaattaacctttgttcaggataatacatgatgaatcattctgtatgattaactcatgcccatgcttatatatatatatatatttatatgcatctgaaccttagaaaaaagtaaccatttggtcgaagaatagaacaaaatagatcgtcttcattttttccaacaaaaccaagattacaagattgagattgtaacattgcaaaccacataatattccaaccgatcatgggatgattttcatctcatagttactgaaaaaaacaaagttgaaaaaaaaatttcgaatttcaactcatcccatatgatcaaaaaacttttttaaggcttgtatgtacatcattcgtttgaatttaatcaactcttatttctctttcttctctccttatatcccattttgcattggcatcatgaatcataatcatcatcatcatcatcatcatcataagctttattcttctttccaaatccgtccagtgactcgcaacttgagctcttctttgtcactgccagagaagtacaaagccaagtttctagggattatgagtccgtcttgactatctcggactttcctgtgactgtctctgatgcttcttgggatcccttgccatgttagtttacgactgtgagctccaacttccaagctgtaactgaacttcttagcctcgttctcgtctcccataaaccttagaaacgccatgtacactggtgccatcccgagctgaaacgcctcaaagtgtaagcagaactgtcttccgaaacagttgaagacctaaacagcatcagatgaaaacaggattcaattcaagtagtgaaattgtcagttccttttcttatacatggaataaaatgccttagagaaaaatacatatgtgaaaggtaacatcaaatacatattaacaatgactatttagctataagggaatgcataactatcaaaattaccgtaagcatccaagttgcgttctctacttcacgcggatttgatttgacgtagcggtggttaaaagtggaaccagcgtgcatgtcaactttgtgatcatccctgagatgggctaccagaaaagggatatcccctacgataccacactccgaaccagcataaggacaactgtaaggtctgaagttacagagagactcgtgcttcagtttgctgtagtaaggaaagatctcaggacatcccagattgtaaaacttgcaaggcagctcaagcgactcggctactttctcaagagctaaacatctaatatctccaagttcttgtctacatgtgggacacctgttatgcacccttactttacaggtcgagcacaatgtatgtccattatgacactgcaacaacaacaataacaaaaaagagacacacttttcagatcaattacttcccctggctcaattataggatacaagcaacatcaaaacctatgaacaaccacattatataatctatatccccattaaacgctatacaacatataggcagagaagaacacaaacacataaagctaaaacgtatcattaggaatcaattgtgaaccaaacaaccaaaagagcatcggagattcacctgatggataggaggatacatagaataggtacagacagggcactccagaagctcatacacgctagtggccggagcagttgctgttgggccaacaatattggtaacgacggcggcagcagcggctccgccgtgagtcttcgtcgaagagaattggtaagattggtggccattaccattctgatggatctcattacccgtagatgagacgcactccatactatctgtctccattaccaaaatcaatttctcaaaaatcaaaaaagccctaaattcaaaaaaaaatctaggtctattcgattatcaagaatctctcttatctcggaaaataaaaaaaaaattcctttctttcaccgtcgattttgattaaaatcaaaagcaaaaaaacagtactttgcttccctaccacttttgggtatctttgagaattgattcgtaagacaaatctggtaaaaacgagaaagagagaaataaggaaagaagatgaagaaacaaatatctgaaattttccagggga

SEQ ID NO: 37590 - DNA, 3139 bp, Arabidopsis thaliana landsberg
  unsure (1)..(3139): unsure at all n locations
atctcgctgcagagatggcagctgctctggcttcagcatctattgtattcaaggataacaaggaatattctaaaaagcttgtccatggtgctaaggtggtgtatcagtttggaaggacgaggagagggagatatagtgcaggcactgcggaatctagcaagttctataattcaagtatgtattgggatgagttcatttggggtggtgcttggatgtattatgctaccggaaatgtaacgtatctcaatctaatcacccaacctactatggccaagcatgctggtgccttctggggtggcccttactatggtgtatttagctgggacaacaagcttgctggtgctcaggtcagtccacacataacaacctgctgtgtttatgtttcttagatattcatgtcttcttgatcatttgccttaaccatactactcttgactcttttgaatcccttttgcgattttagttgctgttgagccggttgaggttgtttccgagtcctggatatccatatgaagaaattctaaagacaatccacaatcagaccagcatagtcatgtgctcatacttgcctattttcaacaattgtaacagaaccaatggttagttaccttccagctttaatgtctgcctctaataaaactccaactgtggggcttgttcttgtttcagatatctaaaatgaaatctttggtatgtgcaggaggtttaatagagttgaatcatggagctccacagccgctgcaatattctgtaaatgcagctttcttagcgactctatacagtgattatctggatgctgctgatactcctggatggtactgtggacctaatttctattcgacaagtgtgctacgtgactttgctagatcccaggtatagcttcttttcctttactctttacagaaatggtaatctcaaatatagtaatggataagatccaaaaatgacacttttaaccaagattgtacgaagatctttttaaactccatcttttattttgacatctaaattggatctaacttcgccttgctgtattatggcagattgattatatacttggtaaaaaccctcggaagatgagttatgttgtgggttatgggcaacggtacccgaaacaagtgcatcacagaggagcttcaattccaaagaacatgaaagaaacctgcacaggaggatttaaatggaaaaagagcaaaaagaataacccaaacgctattaatggagcaatggttgctggaccagacaagcatgacggattccacgacatacgaacaaattacaactatacagagccgactctagcgggaaatgctggtctagtcgccgctctggtggctttatcaggggaaaaagcggttggtggtattgacaaaaacactatgttctctgccgtacctccattggttatggctacaccgccgcctccagcaccttggacaccttgaagaaaaataaaacttttcgaatgtaataagtcatttttttgccttaataaaacgtagcttcaagtcagaaaaagtagttttctttagcttaatacaaaaaatgcggtctgagaaaccaaacatttattgttttctctctgggtttgtgaggtatacagtgtattattctttgttttctattttgtaagtagttgagtgagaccgaagaaaggttttgtgctttagtaatagatagataacccaaatgttgttctttctctctattcttttccctcgtcttcttccgcgtttattctctgccttaaataataataatattaattcagagttgtctccatcttggaggtgcagaaatggcagaagcaaggtctggttctcttgagtatacacccacatgggtcgttgcgtttatctgtttcatcattgttctcttatctcttctcgctgaacgtggtcttcatcatcttggaaaggtccaatatcactatctctgtttgtagtaatcttgaggttttaagttaaaatctttttccaactttccgttctctctgtttcagtgtctgaagcgtaggcaacaagatgccttgttcgaagccttgcagaaactcaaagaaggtattgtacttcttccctaaacatgaaatggttgatttgattacacctgacacctgaccatattgatgtcctgacacagaattgatgcttcttggatttatctccctgatgttaacggtatctcaggccgcaattcggcatatctgtgtcccaccagctcttgtaaacaacatgtttccctgtaagaagccattggaggagcatcatgcgcctaaatcatctcattcgattatcaacaatgcacgacatctcctttcaacaggagaaagtccagaccattgtgcagccaaggcaatcattctttgctgttttgctagtttcctttctcttactggatctctttctattaaccattgatctcttggtatggctgcaagggcaggttccattagtatctgtgaaagcgttgcatcaactccatatcttcatctttgtgctagcggtttttcacgtcatcttctgcgcctcaaccatggttcttggaggagcaagagtaataccacttgcttttatagctttttgctcaagttaccaaacaacattaaacccctttatttcaaaagctggctctgattaattttattgatgtgaaataatatgtagatacaacaatggaaacattgggaggattggttcaagaaacgtccttctcaaaagggtgagcgagattccacaatagtaattaacagttactttgtaccttaacacacgcaaagtacataacataatgtcgcaggcnnnnnnnnnnnnnnnnnncatgctcatgctcacgagttattcagtgcaaatcacgagttcttcgagatgcatgctggaggattttggagaagatctgttgtcatcagctgggtggtgagtaatggatatatatactactgccaaaagtataacacatgaatcaaattatattctaatgagattagccaatgtgtactgtttgttgcagagatcattcttcaagcagttttatggttctgtcaccaaatcagaatacatagctctgcgacaagcattcatcatggtcaaacaaaaactgtcttattccaacatcttatttaggttactaaatgtcttgtgtt

SEQ ID NO: 37591 - DNA, 1235 bp, Arabidopsis thaliana landsberg
  unsure (1)..(1235): unsure at all n locations
taatcaaaactatataatacaaaagttagcctttactattcagcttcggagccgaaaggttcaggggtctggggatcatccttaagatcactgaatcttgacttcttctccgagagagcagaagaagaagacgaagttctaagagattgacctctcgtgttaaggtatgtatataacgaagttcccataatcgccacaaacgcaccgccaacgctaatgaaaccactattcgacccgaaaatgtagttgtttccaaggaggaggacacaagtcttgaactgtcctagcaccacatgcgtaatnnnnnnnnnnnnnnnnnnatatatggagcaaaatttggacttaaggaaccactcagctacgcaacctttaaatccaaaatgtaacgacaacactaatgtataagaaacttttactcaccctagagctaaggctcctgaccattgaagaaagaatccgagaagagcagaaacaagaatggcagatgtgttggttaagctccaattgaacgatagagcaccgggcggatccaagaacggaatcatcgatacaagaaacaacagagtgattggcgtcgttttccacatcaacctgaattaaaaaataaaaatgaagagatggtattgagagatgttgatacagctatatgaatgagtgtgactgaaaacaaacgaatctgaatcacatacgccaaagcagtccagttttctcgttgctgcatattagaccacaagattttgttagttgcgcttggtatgatccatgcgaatgctacacaagcaccaaacagactaaactgtaaatctgttacagtcgcaaccgcaactcccacagatacaactgtaagtgataccacctgaaaaacatcagccacaaggttacttactataccaaagtttttctctttgttaactctataaatccaattgactacaaacaaattgtgtgataaagagagaaaatctcatttaccttcatgaaagaaactctctttctataccacaagaactctgcaaacacgatagaannnnnnnnnnnnnnnnnnnnnnnctggtagaatccaacactgagaaacaaaaacaacgaagtgagaaacagtatgagacagagcaatgtatgaaaacaagggagagcaaaaaaagagagaatgtttccaaaacctgttatacttaaggctaacattagctagtcctgtagagagtgacattacaatgccaagagtatagagcggaagc

SEQ ID NO: 37592 - DNA, 4964 bp, Arabidopsis thaliana landsberg
  unsure (1)..(4964): unsure at all n locations
ttttttctttcttcgatgatattaaaagagccataagcttaacattaacaaacaaaaccttcttataaaatgctcgaattcaaatttaagtaccgattcgtcctagaagaatctgtaaattaaacagctcttggtaagaaccaaacctagctttcaagacatgaagaacaataagaaacctttttcgattgaacggcgaaatatatccattgaagatgttgagagtgagaaccgaagacgaagaggtgcaattactcgcagttttttttttttataagttaattattaatttttgacttcattaaagttaattatttagtatcttaaaatataatattttaaaaaatctagccatcttaatgcatttttatgaaaatcctacccaagttttttaaaggtctatttaaaaagtatcagttttggatttttaattatattcactatttgttaaattttgtttcgtatgttaatattaaaatcagacacaaactatttcctaaacatatatatacaatctttaaaaaaaaatgttagtcaaaaactgttggaaaggctaatcttttttaacaaaaatagtaaaatactcatttacgtaaatttgggcctttcttaaatgggcttatgggcttaagtatacttcaatctgatagtatttggtttattgaaacaaaaacaataaatggaaatagcgatctgagctgaccaaccacagtcgcggacagagctaaaaccaccatttgaagaaggagaagaagaagaagacgattcggtgaaagcgaagatgggtggaggaatggaaacgaacaagaacaagttcatagaggactggggatctgctagagagaatctcgagcacaatttccgctggactcgtcgtaacttcgctctcatcggaatcttcggcatcgctctcccgatcattgtctacaagggaatcgtcaaagatttcgtgagtttaaatctctctatctctatctcattctcgatccaatttgcatttcgaatcctcccgagttagatatctgttttgtgccctaatttttcatgtatcgtatggaattggatcgtttgatacatttgaaattagggtttaattttagctgtagatacatttgaattagattagttcttttgctgcaacgattgggttcggaactggatttcaattttcacctccatactagtattcttcggtgatgatggttcgatttcagattgattataactccaattttttaagaccgaccaatgaaaagcctcagaattggagttagggcagaagaaatttaatttatttttttggttatcctcaagtcttgatgtgaaaaagcttgtaaaaattggttctttggctgaaaaaaaaggttttatctgattctctttctattgttctgagtttgagtctgagctgatctggttatgaaaagttgagtatagtggactttcaacgttcttaatctctcagcagctcattgctacaatcctttccatagtagcttgtactctgtgtccttgaagatagattcgcgttagggccatgtttatgtgattgatgctctatgttattccttgttagtggaattcgtctatgacgatggagatggaaaatcatttatgtgatacttcccacacaattgtgtacttcttgtgattaacagtaaggtcaatctaacgtactctaaactcgaattttgacagcatatgcaagatgaagatgcaggcagaccacacagaaagttcctctgagattgtttgcaagaacactctctgcaataagtctcagcaatgtgaaatttcaagacgaggatgttaaaacccgctttttggttttgcatttcaatcaacatctgaaggatataatttactttttggaaaagtttgttgtaatgactacacttggttatgcaaataaacaaaactcagttttcccttgagtttgacatgcttattgtgtgtgtgtgtgtgtgttgattcagcatatgcaggatttaaacatttgttctacatgcacaaaataaaatgaagcagtgaaccaaatcaaggtccgaaacaaaataaatggttatcctgaaagcaaacccctgaacttggatatgagtcaaatggcgtatgtgggtaggtgtatagtcttaacaagtaatgctcattgtgaacttgaagcaaaaatactccctcactagtcacactatgaaaccatgtctttaacattaacgtttgatttatggatcatgtctttaacattaacgtttgatttatggatcgtcgaatagttttataagtttaaccttttggttacaaatatagttatattcctataggtgaaaaaatggcgggaggaggaaacagaaaggaagggcaacaaagttaacggaatatttaaaaaacacaacaacgaacagattgtctaaaccaaaaatagaaagatttctccaatccatccaatatttgtttccctctcaatctcctctcctctcttttaggactttccctctttcttcaaacatacaacagattaacaaatagaaaacgaagcacaaaagatatcagaagaagagagaagtctcctcccaaaaaaaccaaaaaaaaaaaaaagagaaagaaaagaactcgagtgcaaaaagcttctctcttccttcccatggggtgcatttgaactaatctcctccttgaaatcgcttgattgattgttataaatcgattaatcgnnnnnnnnnnnnnnnnnnnnntccaaaacaacccaaaaagagaatcccatgggaagttgtgtttcgtcgccattgaaaggctctccttttggaaagagaccggtaagaaggcgacacagtagtaatagcagaacatcctctgttcctcgtttcgattcttcaactaatctttcccggagattgattttccagccaccaagccgcgttctccccgagcctatcggtgatggaattcacctcaagtatgatttgggaaaagaactaggccgtggtgaatttggtgtcactcatgaatgtatcgagatcagtacccgagaaaggtctttcctctgttttgatatgtttttattcttttcttctcttgatctcggtttgattttcgtgtaaccgcgcgggcatgcaggtttgcgtgtaagaggatatcgaaggagaagctaaggacggagatagatgtggaggatgtgagaagagaggttgagatcatgagatgtttaccaaaacatcctaatattgttagctttaaggaagcttttgaggacaaagacgctgtctatcttgtcatggagatttgtgaaggaggtgaactttttgaccgcattgtctctagagggcattacactgaacgcgccgctgcatctgttgctaaaaccattcttgaagttgtcaaggtgcaaaacaaaatttgtaatctcctttttttgtgtcggttttttggcttcttgtttggttctttatgtttgttgttttgtgaaggtgtgtcatgaacatggagtgattcatcgtgatcttaaaccagagaacttcctcttttcgaatggaactgagactgcacaactcaaagccattgattttggtctctccattttcttcaaaccgggtactaattaattatcataactctattataacatcataaactttgaatcttgtgtcatcattttcttcaaaaattcggtttctgtaaaatggatattgcagcccagcggttcaatgagattgtgggaagtccttactacatggctccagaggttttgagacgaaattacggtcctgagatcgatgtttggagtgctggtgttatactctatatcttgctttgtggtgttcctcccttttgggcagaaaccgaggaaggaatcgcgcacgctattgtgagagggaacatcgatttcgagagagatccatggccaaaagtctcacatgaagccaaggaactcgttaagaacatgcttgatgcaaatccttatagcagactcacagtccaagaagtgcttggtatatatttaataataacgtttgataaacggtaagtaaataaacgacatcaactgatcaaaaatctatgttttacagaacatccatggatccggaacgcagagagagcaccaaatgtgaatcttggagataacgtcaggaccaagattcaacaattcttgttgatgaacaggttcaagaagaaagtcctcagggtatatataagtttcttgatttcccatattttatgagtttactctctccttgttactgatacggcaatctttcagattgtagcggacaatctaccaaacgaggagatagcagcgatagtacagatgtttcaaacaatggacactgataagaatggtcacttgacttttgaggagctaagagatggactgaagaagattggacaagttgttcccgatggcgatgtgaagatgctaatggatgcagcggacacagatggaaatgggatgttgagctgtgatgagtttgtgacactctcaatacatttgaagagaatgggatgtgatgagcatttgcaggaagcattcaagtattttgacaagaacgggaacggatttatcgagctagatgagctcaaggtagctctttgcgatgataagctaggccacgctaacggtaacgaccagtggatcaaagatatcttctttgacgtcgacctcaacaaggtaaatgaaccaaattagggccaaaaaaggttgagtgcgtggcaaggttcacggtgttccatctcaaaacttaaatcatgttttggatggtaaatttggtacttatactttttcgatgtgaaaattttgtggtgacaggatggacggataagctttgatgagtttaaggcaatgatgaaatcagggacggattggaaaatggcgtcgaggcagtactcgagggcgttgttgaatgctctaagcatcaagatgttcaaagaagattttggggacaatggtcctaagtcacattccatggagttcccta

SEQ ID NO: 37593 - DNA, 3904 bp, Arabidopsis thaliana landsberg
  unsure (1)..(3904): unsure at all n locations
cgatgggttatttgaccaattagccggcgatcgttgataagagtcatgatacaacatcatcggatcaaacacttctttggctggatcataggattcaaccggattgctttgttgaaacggcggcgcagaagctggatgatgtggaggtgtaggcggtggtggagatgagagccaaaacgggtacgctattccagagaaaccattatagcgaaatccatcggtcatcgttttctcaccaaaacgaggaagagactggtgaannnnnnnnnnnnnnnnnnnnnnnagtgtttcagaatgtcaatgtttatcggaattagcttctcaatgggcctttaaggccttataaggaaagccctataatgtcactaaaaaatgaatttataagtcatttaactgtttaattataatcacagataaatacaggagtcaataaaaatttaccaattcagatattttcctaatcatataataagtacattttatgtatttcacattttgattataaaagtctcaagactctcatttgattcatcttaatcaaaccagttaaccaacatcaagtataataagagcaaatcaaatttgttttgaaaataataagagcatatttgacgataatatagtagaatacattacacaaacaatggcaagcagttgagctatacaaatcctgaacagcaagcagtttttgcaaagacaagatgtttcgtcacacaaaaaaatccacagatacatggcagagtggccttacggcattaaacataaccttttagagacgctgagcaagaaacttagccaaagaatcaacaggcttggctgagtcgatacttcccatttcccgtgaccggattttgattcttgcaagataatcagctgcaatccaagcaaaactcagcatcgccgcatgactggactcatctggatcttgcagctctaaagacttcttcacccactcgggatggtaagttacatgataccaagctgaagccttcttctcatacaagatgtttttttcctcctcgctgaaattttcatggtcagggattgtttcctcaaatactttcctgaactcctttttaagggaattataagaatgcttcagtctttctttcagttcgccttgtttcttgcttgtgtatttgggcatggaccagatgtgacccgtcacaatctcttcctctttctgcaccttgtattgcccaagaagaccaatgagttgcccgtcgtacgaacatttgtgaccccatgcctcagggatcaaatcttcaaatcccggtatttcaagaacagcgtcataagggatggcacttgggtctgtgctttcttctgaggaagcttctgcatcttcatcataaacctcttttacccgtctgtaaagccgacccaagattttgttcgacttgtaagtttggtagtcttcttttcccatgaaatctgggtagagttttggttttaggtggaagggcattgacacaattttccctgtctttgggaaatcaactgcagtggcagctagttctgccagtagcaaacattcttcgtccatggctccatactcacttctatcagcatgaacgacgtgtgcattgcaaattgtgcccaactgctcattcgccaagtttcttgcaaagaaatcgattatgtcctgtaacaaaagcaatcaattacccaagacttggcaagcacagcaagaaaaaataacaaagaattcataactacattggcagaagctactagcatcatgatactgcccttgatggtaactaaacagtcacagacacagcaaggcatgcgaaaaatacaaatcagaatcaacaatatatgacaaagttttcttaaatgtcatcatcttagctcctacaggatgaacacagtatgctgttaacaacctatgccacgcaatctatgaactcagaagcaagcaaaagtaatcactacaagcatccaaaaacaaagtttccaccacttccagaaatatcagagagttatactggaatcacttgtccattttatcttaagcgtcatcatctcagctaacagaaaaaaagtggggaagtagatattgacctggtggttgacagcacggcctaaactcttctcttcagctgcatcataatgcatggccggatagcttttcctgttgggagggatgagtttctgatcccaagccacaaagtacaggtccccgtcaaggtcactgccagaagcttcgtttgtatgcggcctatcacctttctgagggaaaataaggcagtcatacatgtgatgcagctggggtacatcaacagcttctaaaatccttacatcccctgggtgaagacaaggattcttagcaatggctacatagcctttaactacttccagatctgtctttgtctccttaaaacgagacccatgtttggagaaacaattttctatagacggtttagagacttgaataaagcattggccatgttcaagtatccctgcttcgtctaggcaacccattagccaccttcctgaagtaacaaaaatacgagatttttctctgagaccccagagttgtgcaattctgactgaagacaacatcccgcgtagatgcggctcggtttttggtttgaaacctgcactaagcatgatagctgcagtgtttccctgttcagcacatgatgccgtgagaacttcaaatgccacatctgtatcatcaaggatgcggttcagtttatagagcatggattcctgcatatcccagaatatttcatccggaacacctagtacggatagaagggtaattatctgccgatttaagaacccaggttgaaacctcgtccaggaacagatctccaagatcgtatgtttggaaaagaacttgttcatactgtctcgaagggctagcctgattccatcactttttgatggtcaacgagcaacaacccctttgaaacctgcgttaacgtatctgataagcacaagggctgtagtgcacatccaacttaagtttgtccattacttcgtcagcgaggtcaggtgtgattgtaccaattccgtcagagaaaacatacccatttctctcaatatctggaacctcagtgtcaacctcgtgaggcatgacatctacagtggcatatgtggaggagaagcacaggcccatcctagcagcacattttgccacattcttgtctttgaacttccccatccatgtttttatatctgacacacgtgttttcccgtcttcagcaaagaaccatgcagagcggtctctcagttgattggctgagaatgctagaaaactgtattttctaccacatagtttaaacccatcggttaatatgctcttcactcttttaaaaacgtaggtcttctgggagaaagaacttgatgtcaaatccttcacaataggagcaacaaagtaagagagaacattcgaatttatggtctgcatactttcatccatgaaagttacccgcaaaaatctttcagcaacagctttgtatctcctgagtaccctgttggagagctcaacttctgggggtaggcaataggctctggttggggtaattactagtcttctgatctcagagatatcctcagattgttcatgactccctaaaagctttggatttttctgaatccattcctgaacaagcttcaacctcttgtacgcatcaaaaactggtcgtttataggtacagagatgcttgagagaagctatattgacgtccttgggttggtttcttagaagatcaaagaatcgctcagtcaactgaaactggttaaagacacccctgtgcaataccgaatttactagaaacatgatctcaaaagagattccttccttgtgatgaatgcagaagaaatgatctgacacaggctccccaaaacaaggctcattacggatacggggaggccacctcacacgttcctt

SEQ ID NO: 37594 - DNA, 2189 bp, Arabidopsis thaliana landsberg
gctctcttgcaggcctcatcgttggagctttttattcttcggcacaaggatcgtctttatctggcggtttcctcttcctttgcgtgaattcaccagaaaatgtatatctaccttagcgagtctgtctagtttagcgaatctaggataatctccggaagacacttttgaatcaacactgattttgatctctgcttctttctctaattgtgtaggtgtattactgttgatgtacaagaagacgacgaagaagaatgtctcacagaaagtttgagcatccaagacatggttctttgggtttccttccaaggaaacgagctaactcgtacagaggacagggtgagtctttttatcacaatgtagattccttgttaatgaaatgattactagggtttttataaagcttctctctttttgctcactcaccaatgttgaattgagaatcagtgaatgaaatggttgattagattcaaaaggttattcatttattgtttgttttgcttacacgttattgttggtttatcagtgaaggctttccctaaggatgaccaaaccaagccttgcaagttcacagctttcatgggttacaaagctggtatgactcacatcgtcagagaagtggagaaacctggatccagtaagttaacatgtgtttattcattctgatttgttttgtggaggtttttgagatttaaagtcttgaactttgtgtttgtattgttgtgtagagcttcacaagaaggagacatgtgaggctgttactatcattgagacacctgctatggtggttgttggagttgttgcctatgtgaagactcctagaggtttgaggtctttgaacactgtctgggcacagcatttgagtgaggaggtcaggagaaggttctacaagaactgggctaagtctaagaagaaggctttcactgggtacgctaagcagtatgacagtgaggatggcaagaagggtattcaggctcagcttgagaagatgaagaagtacgctactgtcatccgtgttttggctcacactcaggtaagtttgcttattgaatggaagtgtatatcataaactcttctgcactacgttcttactgacaattctatgtgacctctaattacagatcaggaagatgaagggattgaagcagaagaaggctcacatgatggagatccagatcaacggtggaaccattgcacagaaggttgactttgcctacagtttctttgagaagcagatcccaattgaagctgtcttccagaaggatgaaatgattgatatcattggtgtgaccaagggtaagggttatgaaggtgttgttacccgttggggtgttacccgtcttcctcgtaagactcacagaggtctgcgtaaggttgcttgtatcggtgcgtggcatcctgctagagtgtcctacactgttgctagggctggtcagaacggttaccatcaccgtactgagcttaacaagaagatttacaggttgggcaaggttggtactgaggcacacactgccatgactgaatatgacaggtcagtagaaatttctctgttttgtttcttttctcctgtctggtcatgattacttctgtggtttatctgagtctgatgataatgttttgggatgatgatataggactgagaaggatgtgactccaatgggaggattcccccactacggtattgtgaaggatgactacttgatgattaaggggtgctgtgttggtcccaagaagagagttgtaactctcagacagtcacgactcactcagacttcccgttcttggttatggaggagatcaaactcaagtttattgacaccgcctccatttttggacatggtcgcttccagacctcccttgagaagatgaggttttacatccgtgtcacgaagtaagagttgttttatcacaattcttcttagaaagtttcatgtttggttatctgttgctacttatctcagagatgttatcctttaaacaatgttatggagttttcttttgcttttagtttgttacttttttggaagttaaaacgatttgcttctcaagttttgagactttgatgtgttctttatcatttatgaaaaaccaacctggagcataaaaaacaccaaagacatctgtctttggtggtgatattaaaaatgccaaaaatgcatttcgaattatcatttgaaaattgatacaaggcc

SEQ ID NO: 37595 - DNA, 2503 bp, Arabidopsis thaliana landsberg
ctgctgatgatatttgacatattgtagtagatttatcctttcatatcgagcgtcccaattttgatgttgttagcttcctgtgggtgtttctttctgtgatatgcaaggcatttgctgatctattagaagagggagatgtgaagattcctgggtggttttcattcaactcaaaggatggcgtaaacgtggttagcggggattccatcaaggagtgtatctccatagctgaaaattgtgagaaagtagtggcggttggaatcaactgtacccctccaagattcatagaggggctagttttggagatagaaaaggtgcggcttggatccacactcattaggtatttgtatttgtagacaccctaaaaggtatatgaataacttgtaggtgacaagcaagcccatactagtgtacccaaacagcggagaaagctatgatgctgatcggaaggagtgggtggtaagtcatcgtatatacagtatttgttttgagaggaaggagcacagttgtctgagttgctcaaaaactgttgcaggaaaacacaggagttggggatgaagactttgtatcatacgtagagaaatggatggatgcaggagtgtctctcctgggaggttgctgccgcacaacaccaaccaccatcagagccatccacaagagactcgtcaaccgcagatctctttagcattcaacttcactctcttctatgaatctctagaaccttggcaatagatttgtaccaaaaacatgaatgtttgttttccctttgccaattacaaatctaattccaaggataggcgtgactgcatttaagcttggatgttaatttgaaagttttcatcttgcatgagaagaaatcttggatgttttacatcaacctcgcctggatacaaggctgttgatttatatgtgcttgagagatctctgctcttaatgcattctatatgcggaaatgtggtaagtgtgatgcaaatcataacttcactacttttgctgggtctgttgttgttgttgttgttgttgttgtctcactgcgtattttgttgtcaattgtagatggatcgtatactgacggcgtataggaagtcctcaaagcaatggtcagccacgtttaacaagctcgcacaaggttctatcacactcctcttccacctcctcttttaaaaccaactcttcttcaaacctttagaaagtcttcttttggtatatgcagtgagacagcgagggagaaagcggactatgattggatgaggcgatgagccaagttctccagtggtactgtccttaaaactttgaccacaaagccacccaaaatctgtcctgtattattattcgatagcgatccaatttgtcgatcagtattaaggtatcaatgctgagatgtgtgatcgattttttcaaccagaaaacgattatagaacatatgtcaagcagggcattctcatataagtagttaagaaagcaacattattgattacggttagaaagttactatatttatcgattatgtcaacgaacatatgacaaataaagaatgttacaacaccattattacaaaacgtttaactaccttttatttgagcatataacggcttcgttctctaaccattaacttttcatatataacaagaaaaaatagataaaacctaaaagtaatttcaaaaagagttaaatggaaaacaagttggttcttggagccttgtgtatataccttgtgttacaaggcacctgcggcgaggagaacaaccctctgattaaccattacgttgattacgaaacgattcatcctagcgaatactacagctccgatttcgaactcaaagacggaaccaatgtgatcttcgaagccatcaatgaattgaaagggatcaagaaaccaaaagcaggctttatgtgcaactatggcaaaaaacaatggacaaggtctcttccgggagacattttctacgccaagttcttcttttacagcattaatccaaacgtaaaggtcgttcaacattgccatttccggtcaaatttgggttatgttgatgcctatatcaagataaccccagcgctcggacgaacatgtcccggttacagatgcgttttagcgattagacgtgaaggtctcttgatgaaagacactaacgaactctttccttggacaccttggcctcgccgccacattcaacctaagttgcctaaggttacgaattgattcctctgaatgatattttatgggattgggtgtatacatatctcttcatcattttttttgtgtgatatatatacagacattgtttagttcagaaaacatcaatcagaattcaaaaattactagtgaaatggatttttttccctaatatacagatcctactttcattatgcaaattgttgaattactagtaaattctgaaaacgtatgtgtgtgctagttctatatctttgtacgactctgagaccgctatgatttgtatgtgcataaaataaaggaaacacaaagatttgttaacggggttcggtt

SEQ ID NO: 37596 - DNA, 3172 bp, Arabidopsis thaliana landsberg
ggaggtggatgaggattaagagggataatgtagatacaataggaacataagtgatgtggattattcgagaatcgaagtcgatttgctttacgccaaagaagatatcaatgaacttctctgtattggtttcacgggattcagccaattgtcttgatcgtgggaaaggattgacaaataggttgtctcagtgtagataaaaaatacccggcgtttgttttgaggatggaatgagtctatcatccattttggtatagagtcgcttaacaatgagaagtttgttcatccataagaaaaaaggtatttaggcatatatagttgtccattcaaatttaaatggatgaagtttagtcattggattcagctgtaaaaaacagctttagtggacgcttaagaaaaaagcccttttttggtgtacataggaccggccgacactgagagtaacaacaccattgaatcatatcataatccattaaccgcacggtccagctcaaaccggaaacaaagccaaatttgattttgccatcggtatgaactcaagaaatacagatagcaataacagtgcaaaggctgaagcgtctttatttgtaacagaagcaaacgaaaacgtttccttaagaattaggcaaaaggcattttcggatcaatattcagcggtagaggctctccgacctcagattctctgcaatctctgtctcccacctatctccattctcaagaagcttctctttgtcatacagaagttcctgcacaccaaaaagaatcagaatgtcatttatcgaataatacacatctaactttaagatcatgggcaatcttatgtctttctgaattgtttatacagacctcatgtgtctcggttgcaaactcaaagtttggtccttccacgattgcatcaacagggcaagcttcttggcagaaaccacaatagatgcatttcgtcatgtcgatatcatacctgtacagctccgaacaatcactacactacgaaatatatagaagaaccatagagacaagacagtattaaataatatatatatggttaataaacgggaacttagagggtgacctagtggttctgcggcttccatcttcccgctcctctgcctctattgtgattgcttgagctggacatacctgatgagcaaaagaccagtatccatgaaaaatcacactttatgtcaatattgtgctgtggtatgaattctcgagtagcatagacttcaaaaactcacagcttcgcagagtttgcaggcaatgcagcgttcttccccagttggataccttcgaagagcgtgttcaccacggaaacgagggctcaatggacccttctcaaaaggataattgatctgcacaaaagataaaacttgagaatcagaatatttttctttcagcctaattactagagtcaagggagacagccactcactgtaacttttggatcaaagaagtacttgagggtcagtgacaaacccctgaccatttcagtgagaaatagggtgttcatgctcggttcaaagactgtaaaagtaagaaacatcaggaatcgctaagactcgcagaagaaagtaatcaggaaggaatgctaagaaaatagaaaggttgaaaagtgtctggatcaaatagcttaccagtactccagtccttggagatctctttagcaagctgctcagcttcttcatcatctacatattaccagaggcaaaggattagtaacctatattcctgaaaagtcatagcctaaattaaccaagagaacccaaatggaagcaacaaaatttatacctttgttgcttccataagatatagcacgggactgtagcccacagagatgagatccctgtaaaccttgccctgaaaaagcctatcaacaaagacaaggtagatgttaaatgcgagaagaattccatagcatagccaccaaaagagctattgaaagtaaaagttaactaccacgacgctctcagttaaagtatttatatttgcagagattgagataacaacatttaggcgatacattctctcttcaaggaagagtatatgatctaaaggaaaaatgaagcttcacgattgatgtaccaacgcaatacaaagagatgcatagaggaacaatacccaggaaaaaaaaagacaaaaacatgtatagcagcaccacttgcacatgcctagagccggccggggcagacaataccaactagtgatttcaaaaaacttagcagcaattccaaatttctaggaatataagcgatataaaatggaagagcctacgagattcttacgagatgtcgagctcggagagcactgaacgacctgcgagctagtagcgaagccatcgatagaactcaaaatatcaaattagggtctctcttcttcgatgtgcctgatgtgagagaagaaaatccgattagctgaaaagcttaatcaagcaaaagaagcattgaacaagagaatgaccaacgaaaagcctaaaattccatccgaaccttaaacgcgatactcaaaaaagcaaagcttctgcacgaacccagagaaagttcgatctcacaagaacattgacacgaatcctttgctggtgattcacggtcgtcggaacaaaattcgatcagatgtctcttaatttacaaattgacccttctggttaactacttactcagctcataaccgggcaatcaaaccggttatatttggtatgacagtcaattccttccaagtttcacacatttcaggatccaggttctcaagacgtggaccaaactagaccattgctgaaaaaagttaatacctgatcaatggtcactaaccggacctaaagttcacaaagtagccgagattgatcaataaaccgggaaaaccaaagactacacaaaatttagaggagatacaaagtgttttggtgacaatcttcaccaccactggggaggaactaacggggataactctttacaatgaagaagaagaaaactagttgagatgttatggtgctatgtagagagtgttgccacagttaatgtgggcttggtttagaggattccatctatcaaatacaatccgaccgcctctacccattcttccttgaaaccgagctcttccacttcttgcatctgatggagggatgattcccgcagcagccagtttatcggggaccaatgctttcgtgaacagcataactggctca

SEQ ID NO: 37597 - DNA, 1077 bp, Arabidopsis thaliana landsberg
ggacaggagcagaagaccctgactgaaccggagcaggaagtggcgggagggattctgaatcctggagagcatgaaaatatccagacttcgtggtatagattccatcaagatttggcagccaagcccaagtatctggggctcctgttttgctaggtttcagtctcaaaatgtctgattcatagatggggaacagttttttaataagcgtcctattccaatcaagggaagtcggattcaggagatcagagaccagccagttatgggaggcttcagttggaggtcccattggagcctggggaacggtcagagataaccaagggcatcgccacaccggtgttgagagaccagctccaatcagacgtcccaagtgaggcttaaggagatctctgccaagacagatactgcgccaactgtgcgacgccgaattagggacagagcagtcagtgaagctagagaacttgcaatacttcccaagtagcacccgtgcaagcagacaagaaggattcttgagaagtctccagctgattttggcaagtaaagcattattaaaggtttgtatatctctaaaccccaaccctccatctttaaaggattttgtcagttttttccacgccacccaacacattttcttcttttcagctttgtatcccaccagaatcttgtaagagcagattgaattcgcttacaaaggttattggggattttgaaacaggacatggtgtatgatggcatagcagctaggacagatttaagcatagtcaactttccagcagaagagagaaacctcgaggaccaactgagggctcgttgctttatgcgatccacaatcaggctgaagagatcctttttcttcctaccaaacagctcaggtaaaccaagatattttccttggcctccctctttaactatattaagctctctttggactcttagtcttgtggctggatctgttttagaagaaaaagtgatagaagacttctctttgttgatctggtgtccagaggctagctcatattgagtaaggatctgcttcagtttggcacaacttttaggatcagagcggcagaagacatggtg

SEQ ID NO: 37598 - DNA, 3720 bp, Arabidopsis thaliana landsberg
  unsure (1)..(3720): unsure at all n locations
cttccccacagcatggggcgtggagagaacactgctatcttttcagctggacgtggaaggatgagtcctggtggaagcatttttactagcgcaccaaaccagtctcatccccctggatctgcctctgacaagggggaaagtggtcctggagaacctccccatctgagatatagcagaatgaaactgttggatgtgtacaggatggctgacacagagtgttatgaaaagtttccggatgggtttattgaggtgccttccctaacgtctgaggagccaacggatcctctggctctttgtgctccaagttccgatgaagtggtttgtagtcataatttagttgatttttttctttttcctctggtatctcagttctgatccttatacccacttttactcacagaatgttctggatgcgattgagaaaggaaaaatagtgagcagtggtgcccctcagacgtccaaggatggccctactggacgaaatccggtcgagttttcacaacctagacggatcaggcctggtaagaattctgtaaaagacatccaggcttctagtcttttgtgtttatgaaataaatggtaaaatttgtgaataccttgctgcagctggaagcagagaagatatgacattcggtcctgagcagtctagaaatgaaagtgaacacacaaggccctatcccgatgatgagtttaggcttacaggtatgtgttcactgattgtggccttcatctagctctgttgactcatgttggtgctgctcggtagagctgatattggtaccnnnnnnnnnnnnnnnnnnnnnnnnnnnnnaattggctcatatcagttaatatctttgagcagtgttgtcaaagctgaaaatgctaagatttgttctgagtgatatgcgagttctttctgtccctatttgcctctcacaatatggtttctgtcattttacagcttctcatgaaggttatgcaccttttaggagaggcaatgaggcacctgtcagagaactgaaagaacccagtatgcagggaaatgctcatgttcaatctgcctctccatggcgtcagtcttctgggggagaaaggtcgaataggaactcacatgattggaatgacccttcagctgatagcaggctgaaatcttctgacagtgtttggtcgcatcctaaagattcaataaatcatttaggtggcaataatatgatgttgccgcagtcgaaaggtgaatcaagatggcaaatcagtgaagatccttcacttagaaggcagccatctctggtgttcgacagggagcaggaagttagaaagcttctcccatcttcgcctgaagaactttcactctattataaagatcctcagggtctaattcaaggccctttttctggatctgatatcattggatggtttgaggctgggtattttggcatagatttgctagttcgtcttgcaagtgcaccaaatgattctcctttttcattacttggtgatgtaatgccacatttacgggctaagtcgggtccaccacctggttttactggtgccaagcaaaacgaatttgttgatgcagctggtacatcagccttccctggtgtggggaaagttcattctgggatgggtgagactgatatgttgcaaaatgatatgaggtataagcatgttgcaggaactgtagcggagaaccggtttattgaatcattgatgtctgggggtctgaccaattcagctcaaggtagtcctagcgttagccatttggtgtgtgtgttgtaagaatatctattgttttcctcactttctctgtttttttgttgtgtctgcaggtgttcaaggatatggagtaaatagttctggtgggttgtctttaccagttactgatggtggggctgatatgtatctcctggccaagaaattggaacttgagcggcagagatcaatacctagtccgtattcatattggcctggtcgggaatctgcaaacctgatgccaggatcagagaatgtgtcagaaaatgctcaacaacctacccgttctccaagttctgatttgttgtccatcctccaaggtgtaacggataggtcttctcctgctgttagtggtcctcttcctgcttggtctcaacccattcaaaaggaaagtgatttgcaccatgctaaaactttccaaacgcaaattccctttggggtccaacagcagagactgccagagcagaatttacctttgtcaggtttacttggtcaacctatggaaaataatccaggtggcatgttatctcctgatatgatgctcgctgctggactctctcaagagcatcaatcgctcaatctgttgcagcagcaacagctcttgttgcagttgaatgctcagacaccactttctgcccaacatcagcgtctattggtggaaaagatgctcttgcttaaacaccaacataaacaagaagagcagcagcaattgttacgacagcaacagcagctgtattctcaggtttttgctgatcaacagcgttctcagcaacggtttggagacccatcttatggtcagttgcaggcgtctcttgatgcgcttaggctgcaaccatcaaaagatatgtcacaagtcaatcagcaggtgcaggttcctgtttcccatgaggagcgaggcatcaacttagctgatttgctcccagtaacccatgccactaatcagactgttgcttctttcgaaaccccctctctgcacctgcaaaaccagctatttggtaatgttgaccctaggatggttctgcctgatcaaattgatgatacccataaaaaagagtcgaaatcagaatatgaaagaacagtttctgcagactatgtgaacagcttgtactcagaaaagcctgtcctttcccctggctatcatgctacacataatgtggaagaacctgtgagctatccaaacaatgaaagctccactgctactatgacagctcccgaaatagttgaaagtaagttgctggaggagcagtctaaggacatgtatgctggaaagggagaggtcagtattgagttatctggggagactcctgcaactgaagttaaaaacaatgacgtttctgtagcacggaagacttctgagaagaagtccaggaagcagcgggctaagcaggctgctgacctggctaagtcaacttctagagctcctctgcaggagacaaagcaacctcaaccaggaagtgctgatgattctgagataaagggtaaaactaaaaagtcggctgacactttgatagacaatgatactcacctcattaaaagctccacagccgcagcttcaaacacttcccaatgagttctgaagtagattcagtcaggggagaagagtcttcactgcaaaacacacgaacacaaccaggacgagcttggaagcctgctcctggctttaagccgaagtcattactggaaattcaaatggaagaacagagggtagcgcaagcagaagctttagctccaaagatttcttctaccgtgaattcagtgggttcggcggctccttgggctgggattgttaccaattcagattctaacatactaagggagactcatggagagtcagctattactcaaaccggtgttgtaaagcctgaaagtgttcctactcttaaggctaagagaagccacttgcatgacttcctggctgatgatgtttttgccaaatccgaagtcaaagagaggaaagtaatggaaatcatctctaacaatactgcgggg

SEQ ID NO: 37599 - DNA, 2240 bp, Arabidopsis thaliana landsberg
gaagcacgagtttggtgtgttttttatttgcttattaatccacgtggcattcttactaaaagtatagtgcatggtccccgtaaagtaactaactacacaactcatcttctttacgtttgttctaagtaacgctcaaagttgttgtccccaaattgtccaaaataccctttatttccgtaattggatatcctctatatatatataattgctatttattcaatacaatatatgcatatatattctgtcactatatcattaaatatataaagccatttctcttattgacgtcaattattttatttataatctgaatctctacaaaggcgaaacatggatttttaattggatttaactttggtagtattgggtaaagcataatgtcacgattaataatacgtaccaacaatcattgtttaaaaaataatactatacccttgattgtatgcgtaataaaattagaaccactgaactcgtttgtaactccagattttctctttgttaaagtctttttttttgtaactccagatagtccaagatagtatgtttttttcttttatgcgagaggcttccacttgtgctatgtgtttttctttttttttagcagattttgctctatttaagtcatgttttgtgcccactttttcttctcctttttctggtaacaaaatgtaatttccaatttcattgattactaatataatataaatgaaaaatttaaattgaactaaccaaaatattacataaaatatgtttctttacttaatatttttgttaaaaaaatcgcatagcgttaatcgggcgattggtataaacctagcgattaatcgaaaaatcggattaaaatcaagaattaatcggaatttgttttagagttattttaatatttttaaaacacattaatctaatattgttttcatagttataataaatacataaacctatatttttaacacaaaaaatatgattttttttttttttttcgtcaaaacaatttcattaattaaatagtgttgttacagcgatgtttttgaagccaactaggtaaaagtccagaatctgaataaaaacaagatgaattacaaccaagtttcgccagatcgtgtgcgatcatgttaccctgtctcttgacgaatttaaattgaatgcttctgaattttccagcccaaaactgaatatctgtgagtagattcgctaaagagcaatgtgaagcagaattggtaacaagttgtatcaaagtttggcaatctccttccatgatgacatgtgtatagcctcggatccaaatttgttgaagtgctgctaataaggcctttgtttctgcctctatcggtgtgcttgtatggtctagtaccatggatccccaatgttcaggtgtcccgttatggtttctaataatccaccctcctgtagcttttaaatcctgcacattaaaactagcatcgaagttgcattttatgtaaggcatctgaggtttaacccatgtagtgttccccgctgctgtcgttcgcttggaagccttctaggaccttgtgtttgggtagcattaagccattcgtttgtttccgcctaagcccttacaactgttattgatggactttctcgaagattgttaaaaactacattgtttcgtgctttccaaattctccaaagtagccagaatgggataagtttctgagaatctgttatagtggtgttctggagaagtaataaaatatttgaaatgttatcttcaatgttatcagacagtatagagcttcgatataaaggtgtgtcagatagccgccaagccattgttgcaaaaggacatgtgaaaagtgcgtgattgatagattcattctctcgtcgacatcgtggacatccaggatcgatgcgcattcccctcgtggtgaggcgttccgttgttggtaaggctttagacagtattctccatagaaaatgttttagcttcggcatgattggcaaattccagattttggttttgagatctactgaaccatggggtttagccattgtagggatgttgtttgacgggtcatgcgttaataaccaataacccgagcggactgtatagtcacctgtgaaattgtagctccaaataagacgatccgttttactccttgttgagagatagatgcgtttaatatagtcatggtcagattgatccacaaaagtttgcaatttggcattatcccaacatcgactatgacctctatgctgacataaattgtcaagtgatagac

SEQ ID NO: 37600 - DNA, 2868 bp, Arabidopsis thaliana landsberg
gaaccaaatgaattcgttttattgtaaacgcctggttggtagtttctattccataatgccttattcgtttcaaagtgtaattttccaacatgacgcttaagagagttcgatataatgatgcaacatgtatgtgttttttttgtttttatcaaaaatgaaatttaacatgtgcaacttgaaacgcatgaatggtttacagtctcaagaattggtaaggcatgtaatcattgtgattgtatacgaaacagaacacaaataagggattatttaatgccaatgaccattgtttacctctcgtctctatacaaaccaaagtgtcttgtgtattcaattctgatgagccgcttatgtataagaggtgagactgttggctttaatcctaccaataacttcagctgcatcatgaagagtagacagaagattctggcggttgagggtttcttcgtagaggttgatcgattcttaaggtcctgtggattttaagttcccaaaactgttgcttaggacatacaagatcgttcaatgtccaagaagaaacctgagccgctacaatcatcggtctaatctctttagcagatgaagttatttgtggtataaaacccacagttttatcatgcattctcacatatccatgatccatctgtacacaattggcaattctgaaacaattatagcgtttgttacaaataaaattcttaatcaaggttggttcattgtatctttaaccattctttagttcctgtcttccagagtctttttttttttttctgtaaactattacatttttaggttttaatatatatacaaatgtagtctcgtttgtgagactcggccaaacaataaagagctttggagttaattatgttgcttggcctaaaagaaacaacaggatccactataacgtggtcaagcaaaagaatcatcagtataagagatggaatggaaattgaatccaaagaccaatgaaataatattattctaaaagcccatgtttcttgggctttaggttagctccgactaagaataggttacaatctacttaggttccgtcttataattaagagtctctgcgatctgtcaacaaatacaacgataatgaataaagggaacactttagattctatccctacagatcttatactcgagatattctcgagattgtctgcaaagtcagttgggaggcttcgttgcctgtccaagctatggaggtccatgcttggccttccatattttaccgagttgttcttgaccaggtcctctgatcatccacgtctcttttttggggtcgaaagaaaaggtgagtggttcttcttctcgtcgcttcagcctcaaaatctttatgagaagccgcttgtcgtagccgcagattttcatatgaagttctctgaagacatgagccatgacatgtatagctatgcttctggtttgatctattttcctaaaatgcggatcaaaaattatttgtgtgatttccgtgtgatatgtaaccctattttgggattttatgcgatcttacaactgataacagtccacgagaagagaagctttttagggtttgatccgattgacaagcaattcaaggtgttgcgcatgaaatataatgatcgtggtattgttgttcaccatattctgacattagaacctggcaaaatgaggtggagaaaaatccgatgtcccttagcccatgaacctttctgggaagagatatgcgccaatggggttttgtattacttagctgaaccaactgatggagggtcttatgtgatatgttgctttgatgttcggtctgagaaattcaaatttattgacgcaaaatgctttggtgatttctctattcaattgatcaattataagggtaaactaggtgggattagttggaagtatgataccgtcgatggaaagcgtaccgttgagttgtatatgtgggttctagaggatgtcgagaaacagaaatggtccaaatatgtctaccctttgccggggaattcctaccattattccgttgcaggagtgacagctaaaggtgatattgtttttgtcaagacttacacatctaaaccgttttatgttttctacgtaaatcccgaaaagaaaactttccaacgcgttgaaatccatggtaaccatgaagtgtttgacactaataatctagtttacgccttcgtagaccatgtagaggatcttcagtttgatgttatgaagaaaacatatgctgcaaaacctataagcccaccaaaacagaagcctaaacccccgagtacagaaacatcgtctagagaagatcatcaagggtggatatcaatatcgtctagaaaatatcatcaagtgaggaccattgctcaccggcaacaaggtcgtcgtaagtttgagagcattaacaaattcaatgctctgtatcttgatgatggtgatgaagataccgttgctcaccagcaacgagatcaccatactttcaagagcattagcaaatttaaagctcagcgtcttttagatgatgatgaatttacaggtgtcaaaaccagtaagtgtgacacttctcatttacaggtttcgtgtgagctttcaccactctgttggcttagcattttgttgtttctggttatggtatatatgtcttttatgctgcaacatctataagcccagtagattgcttcccttgctccccaagtcagctaaaaagctctctatttcagacaaattgtattcttatgtaaacattaagttatcagagaagttctttataagaaatcaagtttttattctattcaaaacctgcaacattgctctcaatccagttcccagtttttattagttcgttttggttctttagttggtgattttgattttttttcggatattattttcatg

SEQ ID NO: 37601 - DNA, 1004 bp, Arabidopsis thaliana landsberg
tattccctgttttgtgatatatgcgctacatgtttgtaacaaatactagctaaatccaactattgtccgtaaactacattattattcatataatatatttaaaaccaaaactagagtacctaagtattatctgtatatattacttcaacgctactttattgttttttttgtttacttaaaatacgtttaactgtttacctgagttgagtccataacccaaaaacagaatatacgtaccaatccgtgcttaattagtcctcttgtctacgaataactactacaaacaaaacgtcaaattcagaagagaaaaatggtagtaacaaaaagcattacatgaatcacattcttcattctttctttttggcatcaacaatcacattcttcttcttccatccacgttgtcaaatttagaaaaaaaacatacatcagttttataatttatttggatggaaagaaaaaagacttatgatgactcttgtcggccattactttttggccaacgatttttcagaagataaatcaaaagtgtattgcacaaacgagtattttaaattgttcttggcacgattaaagggagacaaaaattcgaagaatagagtaaaccatttaaaggctctgcatgatccacctcccacgtatgttttacgcataaaattttattatttcgggattctctttctatttttatttcattggtctccttctaagtttttccactagactttatggaatagtagaataaggcccggtttaaataagcgggtataagatgtaaatgtaatttttatcgataatatttaaattttgaatagtaaaataataatcgatacattgttcttgatatataattttgaatagtaaaatagtagtcttatgcattttattttgttatacccattcaatcttattgatgatatttgaagtctaaatagtaacctacacactttttctttattgtaatttagtatttagaagaaaaaataaaattttatcaaatacattca

SEQ ID NO: 37602 - DNA, 1970 bp, Arabidopsis thaliana landsberg
  unsure (1)..(1970): unsure at all n locations
aacattaacgagccgtctcgtccgttgttcgtttcagaatgtatgacaaaactcgagtttccaaatcctgtgatccgaccaatgctttgcttacggtttctttctcgctcatctttaagaaacatgtcgtcttcaagcaatcttagtactttctcggctatgtttcgaacctttagaccacaatcgaaccctctctcatcaatccactccatctttatagcatcttcaataatagctctctcatgttgaaactcactgaatacacttagtgggccattgagcaacaagtggttcaacattacgacgtagttgcacataccgcgccattcctttctatctaacactaccattctacaaaaaaaaattaccaatcaatacattatatagacactaaacagtaatctgattcttgactattatgatgaattactataaaattttcgggatttttgatgcttaatatggtaattttattgccgtcaaaaaaaatatggtgatttttatttttggtgtagtatnnnnnnnnnnnnnnnnnnnnnnnttctgtgaatctgtgatatttatttgtaagttgttttgcttatataacagtgaggcaaaataacctttgacgtagaatcttcacgattctttggaattgatcaacctcaaaagaaactcttgttatggccgccatggagcgtgagtctatggatgagtgatcgctgcccgtaacttcttctgtcaatcttcacattagacagtttatatttcaactcaattagtacaagagagagagatatgctaaaaataccacaaaaacaagttttgattgcaaaaacacttgataatacttgtaaaggtttctaaaatatgagagatttaggtttagcaggaaataggtttataactttagtaaagtttactcacagttcttctgcagtaacatcggttacagcaagacgagcagtcttgatcttttccttgatgaagaaagaagcttgcttcttcaattcatgtaacaccggattctgcataagcttagacattctgctcgatcaataagcatctatatagatcattctcctgtcttcaatatatattggagtaccttatcagaattgttgtacgtaagaagaacaacaactccactatacctagaacaaaaaaaagatcacccactctttgaacgtcaaaggtgtaaattaataaacaatggaagagatcaagagagcaagaagagacaagaaacggagattgagaaacggatgcttttatcttttagttttctgttgccttcttcgatttatcttctagatgatgtcatctttaagtctataactatttctttctcaaatattttacaacctacgtgaaaaaattcttgattaagctattttaagattataaatttattccgaaaacggttgaggaatttttcatcgcgcggatttggtcttaaacgaattagtattgattcaaatgaaacgattgattgaaaacctagataacgttgttgagatatgatcaacttgtaattctataattatattccatgaaataaggaaacattcttactttagacaaaaaaacaaaaacaaaaaggaaacattcttacttatgcaattgcagcaaatgaaaaatgaaatttgtgaaccaagttaaataaagcatctttagatgcactaagggcatctccaacccacccacatctatagaggtgttaagatattattgtacaagtaatgaagacttctttaagaaattaggctattaacaattagactctatcatcaaccactaaaccatcacattagtttacttttttaccttttccttcggtttagtcaaaagtcaaacgtcatttttttcttggtgcgagtatggttagcctcgtagatgatataaccatcataacttactatatcgttaaaatcgaatatagtttttgttcatatattatatgcaatgtaaatgctaataatagaatt

SEQ ID NO: 37603 - DNA, 1791 bp, Arabidopsis thaliana landsberg
cacctgatgcgtttcctctaacttcttgcatgcataactgttattggtttgattattattttaaatcaattttgaatctttctcgattatatatattacgttttcaagagacggttaacttgattttgtttcgcttttatttttattttagtttttttattctaggatacatacctttagaaaagcataaatatcttaattgacacttattttaacgacttttgaatctgaatagtaaagccagtatttttagatacccttatattaatggaaaatgttactattacctttttctaatttaagcttcttcgtctttacttctttttctattaacttttggttaacttcttcgtcttaatgtgtgttatcacttttcaagagttaaaaaaaaaattcaaactcatgatttaatttcttgattgctttaatatattcataatcgatcttctctcttatacggttgttgatgggtttaataaaggttatggtggatccagatgtgccgagtccaagcaaccctcacctccgagaatatctccattggtttgtatcatatctcttcatttcatttaacttaactttagatcatgcatcacacttcttttcgagtataaatagaaaacaaataggtaaggtatatatgggaattagaaaaagactttaaaatttagggatccaatacatatcttcagtgacacacaaaaaacgatattttagatttttactaataatagaaggggacatacagaatcaactttaagagagcagcaacttgtcaagaaaaaagatgtcttacgtatacatccaacatagagactttaaacagggagagaacatgactttgtggtcagagttagtttttgttttagtgtgtgtgtgtgtcatgttatatcatagcttgcacgcaacaaacgtctattcttcatagtctgaccttttctacatgctttagacgaaactttcaaaaactttgatgcatgctttgttttttagtcgaatttagttaactatctgcaggttgcactgcaccatatctttaacttaaatgggtaatactctcgttacaggttggtgactgatatacctgccaccactggaaatgcctttggtaagtttaagtaactctgtatagatacattaggtaagatagataaaactcatatcaccaagcttaggctttgaatagtgttagcatggagcatatatattcttaagaagatatctatgtttatatagccttcttaatttatatgtatgttgcaacaatcaaatctttaatctatataaaataagcgacacaaaacacttacctagtggataaattaggaagggctaattaatatttgtgtttatgattgtttatcaggcaatgaggtggtgtgctacgagagtccacgtcccccctcgggaattcatcgtattgtgttggtattgttccggcaactaggaagacaaacggtttatgcaccggggtggcgccaacagttcaacactcgtgagtttgctgaaatctataatcttggtctccctgtggctgcctcttacttcaactgccagagggagaatggctgtgggggaagaagaacgtagatgcgtacctacttacgttagctaataatctaatcgtataatattccctaatgaagtatttaagcatctatgtcaatgtaataagaatttaaagatacgagctaaaaaaaatgatgcatatgctgacatcgatgtaaagtagtttacacttttaatgtaataattgaagggaagaaagaaatgtgtgtgagtgtgtcttta

SEQ ID NO: 37604 - DNA, 3449 bp, Arabidopsis thaliana landsberg
aaagatgtatcatcataatgttgtatccttcactttcctaactatcctgactaaggttttgttttttgaaacagggtgttgggcctagtattgccattagcttttctgtgtatgaatcattgagatcttattggaggtcaactaggtaataagtcgatctcgatattacagttttgcagtttaactatgccacttatcatttataattactcctaaaatgatttgttggttttcattttcttaaggccccatgattcccctatcatggtcagtctagcttgtggaagtctttcaggaatagcatcttcaacaggtaagttatcttagctattcgttgaccttttgctttcttgtttgccatgagactcactgtttgactgtaatttgtcattctatgccttgctcataaacactgattgacttagcatgagcatcaatcagtttcgtattgctgacaagcatcacatcaatagtctcaaactcaaaattctctgtactatgctttcaattcacaatagctgaacatggtgcattctaagttccacttttgctacagaatgataaatctgttgctccttctcatatgtatgcttctgtctttagcaaatagatatgattaccatgatcttttctagttgatttttctctgcaagcatttaacacagtctaatgtgaggaatttacttctataaaggtagttactcatatagtgtctcatttacttaatcaaacacaaacaatgtttacctatatcactccatttgtggataatatctcttttggcccttatatgagtttcacgtcgggtcttattgttcacggctggtctcatgctgcattcataggcaagtagaaccacttcatagcattgatgcattggtcaaatttcatataatgtcatatctaatgtgagaaaaacaaaactgcagctacgtttccattggatctggtgagaagaaggaagcagctggaaggaataggcgggcgagcggtagtgtacaagacaggtttgtcaggcacattaaagcgtataggaaatgtagaattatactgtttgtaaatgttggttatatatccagtgaattagcttatacgaaatcaacattgtacagtccttacttaaaatgagactttgttttgttcaagaaaaaaaaaatgagactttgttggtgaagtcttttgtaaatggataaacaagtataaaaagaatggtgatgggctttagtatcccacaaaaccatttaacaaggagtttcatgtatcccacatcggaagtctaagagagtttgatagaggaaacttttgtataaatagacttcactctccctaagattaaaatcacgcagccatgtggtgagcacaaagcgaactattctttcgccttttactaaagaataccgtgtgctctccacgccaagtggcatacgcctttttttggagggcccttgcttaatcgtgaggcccaacatttgccctagtctgaatgtttcatttgctaaaaactttgtattttgcttttgggcccaaaggtttgaaaggccagttcaattgaaatatctcataatcgagttgaatttaatctgcaagaccaattcgttaatcaataagagcatactaggatttcaaaccaaatgattcagttcaacgatgttttaaattatcatctagacattatacaatgtgtaataaagcattttttttttttttaaacttgacaaatcctctaaatgtaaagtctaaatttcaaaatttaaaccttatgcttgtttttgagaaatttttaaaaaattgtgaaaaagaaaagtaatgaaaaaaatagtgagagtgagtgattggaggaaaataacacaacgcaacaatctaacaaagagagaccttatcatcatcatcatcaccttaacccatataacattcctcttcgaaaatgccaacaacaaatttcatagagaagcagaaatggcgaaatcactcctttgttcatcaaccttaaaccctttcttctccgccactctctcctcttcgaagaagaaccaaattgcatactcgggaaacagcaagaatcagacatcgtcgtctctgttatggaaaagaagggaactgtcgcttggatttatgagcagcttagttgcgattggtctcgtgagtaatgacagaagaagacacgacgcgaatgcagcgattcttgaagctgatgacgatgaagagcttctcgagaaagtgaagcaagatcggaagaagaggattgagagacaagctgttcttaactctgctgtcaaggaaaagggtacttcttcaatttccctctaatctttcatttatgttcctcccctgctacatgaagtaaattgaacaaattgatggaaaagtttactcttttatggaaaaatgtgtgttctttgtgttatggtctcaaggctagttacattgaaccttagtctggttttgtttcatttatcttggctacatgaagtaatcagaacaaactgatggagaagttttactcttttgaggataaatgtgtgtcctctttgtgttatggtcccaaggctagttacattgaaccctagtctggttttgtttcatttatcttggctacatgaagtaatcagaacaaactgatggaaaattcttactctttcaaggaaaaatgtgtattcttagtgttatggtctcaaggctcgttacattgaaccctagtctggttttgtttcatttatcttccttcaaggctacatgaagtaatcagaacaaactgatggaaaagttatactcttttaagggaaaaatgtgtttccttgttgtgttatggtcttcaatcttcatagttagatggtttgttccagtgccatctacattgaatcctagtttgattttgtttcatttatcttccttcaaggccacatgaagtaattggagcaaattgatggaaattatgtgaattcttttggagacaaatgtgaatttctctgtgttatggtcttcatagttaattgaattgttctaatgctgctacttgcattgatccctaatctgatttggtttcctttaccttccaccgatgctacatgaagtaatgaacaaattgatgggctgctttggggacatatttacttaggtcttcttggttctctaactaaaagtatatagtgtacagggtatttgcaggatcttgtttacaagttgagcatggtatgacaagccattgagaacaaccatctaccagctgcaggattggtttaggggaaaggcaatgataccgaatgggtcaaaaccgttaatctggcttttcacaaaggtctttcttgctccttttaacgggtgagtaaggtcaaatttattggttcaatgtagaaacaactggttaaaacatcaatattgtctctccctctctttacataaggtatactcttctttaatgtttatgttactgctcgatgaaaagtccttgt

SEQ ID NO: 37605 - DNA, 5192 bp, Arabidopsis thaliana landsberg
  unsure (1)..(5192): unsure at all n locations
taatgcaaagctggaaacttctatttatccctgtttggtaaccaacaagagtctcaaattttaagttacaacatcagttttttactataatcattagtttaatatccaatctaatggtgaaaaagaggctagagcccacaaaataatgtcctaaaatgaagctgaaaacttgtctaatgttcagacttgtgttttaatgccatatgagacacaaaaaactaggaggaaagaggaaccttcttataatatttcttgaatttttttgtatacttaagaaaagctgccctttcacacggataatgaatcatatatggtttctataaacaggttttaagtaacccattttttaatacttaaaaccttattttcattctgcaactactttaaatgagaacatgatgatatattattaatctaatgagttatgtctagagacttgcccttgcctatttaagcatnnnnnnnnnnnnnnnnnnnnntgggccagcactcaacttctctttctttcttcttcttctttgtctctttcctctcttcacgttttcagtttctgtctaaagaacacaaacccaagaagaagtcagagaagaaagaaaaaaagttccatttgtagtttcatatcaaaacaaatcatatatactcttcttaaatttgtcttactggaatgtgggcattgctcattcggttctctatgctcttcataagcatcacacattgggtttatagttggaggaatcctaaatgcacagggaaacttccacctggttccatgggcttccctttactcggcgagagtattcaattcttcaagccaaacaaaacttcagacatccctccttttatcaaagagagagttaagaagtaagtatctcacttctctcattcaaaacaatgtgattaatgcttataatgtgtgttttaaaagtgatgttgatatgtgcaggtatggcccaattttcaagaccaatctggtggggagaccagttattgtatcaacagatgctgatttgagttattttgtgttcaaccaagagggacgttgtttccagagttggtatccagacactcttacacacatcttgggaagaagaatgtgggttcattacatggtttcatgtacaagtaccttaaagacatggttttgactctctttggccatgatggtctcaagaagatgcttcctcaagtagaaatgactgccaataagaggttggagctttggtcaaatcaagattcagtagaactcaaagatgcaaccgcaagcgtgagtttcccattcagaatatagactttttctgtttcagtctataatgttttattacttgtctaacatgttagtatgatcagatgatatttgatctcaccgcgaagaagttgatcagccatgatccagacaagtcatcagagaatctaagggcaaactttgttgctttcatacagggattgatctctttcccttttgatatcccaggcacagcttatcacaaatgtctacaggtgaatatcaacgttcatgcttcaaaagcttttctcacattggtactaatgcttgaaacttgctttgcagggtagggcaaaggcaatgaaaatgttgaggaatatgcttcaagagaggcgtgagaaccctcggaagaatccaagtgatttctttgattatgttattgaagagattcagaaagaagggacaattctgacagaagagattgcactggatttgatgtttgtcttgctatttgccagttttgaaacaacttctttggctctaactttagctatcaagtttctctcagatgaccctgaagtcctaaagcgtttaacggttagtcagaagatacaagtacataagcaaaaatgacaatttttatggttattatcaaaaaagctaaactgatatgtgttcatcttcatcaggaagaacatgagacaattctgagaaaccgggaagatgcagactctggacttacatgggaagaatacaagtcaatgacttacacctttcaggttgcttaaaagttttatcaaagtatgataatttgctaaatttcaaatacaaaatccagttgatcctaaagtcttgaaattcaaataaacagttcataaatgaaacagcgagactagcaaatatagttcctgcaatcttcagaaaggcgttgagagacatcaaattcaaaggtatgtgattgaataaacaataacattctcaatgattaaatgcctcttttaatctttatattatcataaagagtttgtcaatgatacagattatacgattccagccggctgggcggtgatggtctgtccaccagctgtacatttgaatccagaaatgtataaagatcctttactctttaatccatcaagatgggaggtgagtggtcaaacctaaataagtaactttcactccaagtaaagtaaaaataataataacaaaacaaatcaaacaatacatacagggatcaaaagttacaaacgcatcaaagcacttcatggcgtttggtggaggtatgaggttctgcgttggaaccgacttcacaaaattgcagatggctgcgttctttcacagcttggtaacaaaatacaggtttgacaaaatcatctctcttaagtgattattcttttaactttgtaagaacactaatgctgatgtttattccggctcttgaaattatcaggtgggaggagataaaaggagggaatataactcgaacgcctggatttacagtttccaaatggttaccatgtcaagctccataaaaagagagactagagaatgttttttaattagtaaagaattggtaggatacatacgctatacattttccgagactgtaataaacttgaacaccctaataagtgaaaaggggaagatttgttttaggttaaaggctaagaatcagctacaaaggtgaatacacaattttgttagtagcttctgtgtctggtcagaaactgtaatgtatagtattattgatcacagacatgacatgtgctttgaacttagttcggatcaaatcctatatgtgaacttcctaaaatagtgtttctatgcatctatatttaatgaatccatcggtttcaaagttctctaatctacaaaacttgaagaatctcactaagcctaaatctaccaagcagaaaacttcaatatgagtttattgatacacatcaaaacataaggattaagatgaagataaattatcatatccactcaacaaaaatccagttcaatttagttacacaggacaataaatgttagctagaaagagagcaataaatacagtaatgatgattgaaatatcaacaagaccatttagaagtaggataacagtctaggcgatgacaccatttgcaatgcttgttcccattctctccgttgaacagcatcaccagcccaactgttaaaccggcgacaaccaaaacagcggcaacaaagaacaacacgtactggcacgggttatattttgatctagcacgggcaccgtactgagaagagttgcggaactcttcccacccagactgaggctgcatcagtaggataaacccaaggcaaaacccagtcaagagaccgccaatgtgagcaaagttgtctacccaaggaagcaaacctattgccaaattgattgcgatgatgaacaagaacgataacaaagcacaaagctggaaaaattcagaagattgtcaaggcaatgaaaccatgttatattttcggttaatgtttgtatcttgggaaagaacatgacacagtaccttgctcttgtagatagtccagttggtgagcagctcagataacattgctcccatgagtccaaggagagcacccgaggcaccaacagagatgcttttttgaaggaagagagctgagagaatgcttccgccaaatcccgaaatcagatagatgagcccaatccttactgcagaatcgttttacaagacattttgaatacatgaatagaacaggagaatgagaagatcgcgggtaaaatgagcggtgataggaaagacttactgaagccaaactgttgctcaaggcggataccgaagatgatcacatcaaacatattcataacaaggtgaatgataccggcatggagccacatagcagtgatgagcctccatttttcatttccttgcacgactttcctccaatccaaagctcccaatttctccaatctgaaaccatcatcgggttagaatcatcgcaggtcggatagagcatggaatcacagcaattccaagagttacagaccccaatgctaatgaagctcataagtcataatcttaaatccaaatatgtcctcaaagatacaagtttgacctgaatcatgttgtttagacaacaaaggaaaagactccgatgagctgtatctcaagaacagagtttgtttcgaatacaacatggcatgaacaaactaatcaaagcaatcgcaaataacaatgacgtgtgaaaggatcgcaaaattgaaaaataaagatgaaacgaaacgaaagatactagtgaaataccccacaagccttaacctgatttgttaaggcagtaatcaaaaccttgaaacattggagaaataaacagagacttttaagggtttatgaattgaaacagacatcaaaagttcacaaaaatttggctttcgagttcttttagaaacttacgttgaagaagatggacccaagaaagggttctctctgagtggctgaaacgagaacctgcggagaagctttaaacgcaatctccgttggctcccgtggttgtcttagggcagtcgttggtgtacatgacaacgatgaggatggagacattagccacgacaattgttggagtcagccaagccgtccactgggtgtcccctctgtgtttcctacctctctccatatctctactcctcatttttctcttctctcgtcgtatgaagaacagaattggtgtttctataaatagaaaacacagagtttgtatcaacagaagaaagacaaagaatagattaagacaggacacaaggatacatagtatctatttatcagagattcaggcagaagtttttaaccttcaattctcttctcggtggtggcaggctctttcaagatatttcctttaactttctgataaatatctcccccctgagagaaactaaccagacgtgaaattaattattaatacattgactgattctgttacattcgtcatttggggagta

SEQ ID NO: 37606 - DNA, 1909 bp, Arabidopsis thaliana landsberg
gtctctctctctccttctctcttcctctctctgcgcagagaaactttgcaatttgcaacacattcattaacccaatctcttctttagctcaaacatatctacacaagaagataagaagcttaagattctctccacaaaacaaaaatagttatcagattcacaaacaaagccatcaaatttcatcattgatttgttcaataagaaatgggaagcaaatggcgaaaagcaaaggtggctttaggtctcaatttatgtctctacgttcccaaaacacttgaagattcttctcctccaagaagatccgacgacgccgtttcactttctccggttattgttcaaagaccatcaacgccgactccttcctcctctggtctccgattacctcgttccatgagcaaatcctcatcaaaggtttgtcctttacgtttttaagaattgcgggttcgtcacaatcattgaaattgacataaagttttgatttttatctctagggttgaatttttctttcattgtttgatattttgtgtcaaattttgtgtatttttacttacaaaaatggtaaagtttgattttttcgattatgggtcaccgttggattaccggatccttgtgtggtttaaatttgtgatttggttaagcagcaaatccaagggctaatctttcttgggagtctaaaaaattaattttaatttagtttttactagctgttattgtatctaaacttactttattatttgtttaattattcaactaattgcttttcctataaagtgtttggatcttcacacacatcaaatgatcttattagttgcttttatatgtttcataaaaaaattagatgtgttttttcaactactatgaccctcatatgttttgtgtctatcatcaacttagaatctgtcaataggtttgttgttttagagacctacaggctttgaaagtattgacctttttgaaaactatgggtgaaagtaaataatgtcttaagagggctaaatggggattagtagatgaatatgtagaatgattagtgagattagtacacttggtaaaggtctctcttccataaccaactttatcttatgattcgaatcattttatcttcatcaagaatttgacattatagctggcttaaaattggcttctatttgttctgtctctttccccggtttatagtgccttttgtttctttctctcttttttgtttttgttttgtttttgagtataatttttcttggtagtgttgaagaaagatgaacaatttgttgtcatgtaattatcaactctcccaaatggagccactgtggggataaagttttttggcaatagtcaagtgcacttcaaggaccaatctttttttggttgctttttttacattcaactttctaattattattgaaagatacccttcttagtgttctaaatatctactgtgaattagatattctccttaatctagtatacttttttgttcatgttatacatctagttaaactaaaattgcattttctaaatcctaaccaagataactgttagtattaaccatgaaattacataactacatacataagcatttggtttagcttttgaagtttcacactttctttaactttgctttgcattgttgttttctttttcaagtttgatctttctggcgttgaatttacttaaaaagcttttgattactggtctggttaaatcaatcctttaactttataaagttgtgtcctttgcctttccctctcttttattcattgttcttttaattgcttgacctgatagattccaaagtaatttgatcatagatttccaagatccaaattcttaacgtataaaccatttttttttgtcccaagattattgaatgaatcaacgaattagtctttgagacttttttttttttcttttt

SEQ ID NO: 37607 - DNA, 4224 bp, Arabidopsis thaliana landsberg
ggccaggcttcataacctccaatcaggccataaaggcccaaagaaggggcccactttttagatacacacaatcgtcgcactctcagattcttctccggagcgatcagatttcaccgacgacggttgtttttgcctcctctttcaatcggaggaagccaaagcttagagcaacagttgtaaatctatatatagagagggagagagagagagagagctcctctcgtccagtattagggttttaaaggcaagaactactagaacaagagaaggttcaaaaaaaaatgtcgggcctccatcgatcatcaagttcatcgaagaacatcggaaattgccttccctccaaagaactccttgatgatctttgcaggtaatttcatcaatcgagtgtttttcttcttttttctgtggatagtgaagcgattgggctcgaattgattttcggtaactgatgctttgtgatggggttttgtttcagtcgatttgttttgaatgtccctgaagaagatcatcagtcaaaagagagaaataatgtttctggtggagtatgctaattggtactatgaagataatgctgtagagaatgatccaaagcttaagtccctgtctttgaaagagtttacttcgctctgtatccttcattgccttctgattcattattctgtgttcaatttcttgtcttcactgtttagtacaatgctcgttaatgataggactatgatctcatatgctcgaagcataaatgatttgtgtttgccacatagactgggcttctctttgtcttttccattgttttctgtggatatttttccttgacgtggcctatagtattcaacagctgtgatgtgttgagaccttatgttactcacattgatgatatctttaaagacttcacttcttacaagtgtcgagttccagtcactggggcaattatcctggatgagacatatgaaagggtaagaaccctgtggggtgatatttaggtttacttattagttaatgcttaccctttttgtttcattgtcattttcagtgcctgttggtgaagggatggaaaggatcgagctggagctttccccgcggaaaaaagagcaaggatgaagaagaccatgcttgtgccatacgtgaggttagtatcaattctgttgtttcctgtctcttttgtgtttcatttattttacacttttgtagcaaaattgatatctccaacaaccgccactcattgatcatagtgcatattaataaagaacactatgtaattagaagaagaccgcttattgggttagattaacctcacttagtggatgcattggttctactttagtggttgttgacatatgaaaatgtgtcaacataatgtgcgcatgaattttttttagtatagatgacggaggtcaaagaatagcaaatagaacgtctcttatatcttctgctcttgaaacagagtaactcattttcacactaatttaacagtttgatcataacacatacaccttacgtactgaaaatagattctcctacgtgataattgaggaagaaaaaatgttcttaggtcaccagtagacagaatcttttgcaaatgagaatagtgctgctgtcaatggtcaactatataggctctctgtatctttttactatttcattggtatggaaatggtcaaaggtttaattgtagctctctagtgctattctcctggtgaatgtagcatttcaggtgctgtaattcttcttctgattgtttgtatagacttggaatatgggttaatgttgaaaaaaaactgaatattttgtcacacttcttatgtattgttcttccatgctaaattacaggtcttagaggaaactggatttgatgtctcaaagctactcaagagagaagaatatatagagtttgttttcaggcagcaaagagtacgactttacattgttgctggggtgacagaagatacagtttttgcaccacttacaaagaaggaaatcagtgtgcgtatttaacaattaacttgtggatctgatcttgtctgtgtatgtatgatgagtctcttatcttcttttgttgtggaatacttgtaggaaatcacatggcatcggcttgatcatcttcagccagcaagtaatgaggtgataactcatggagtttctggtctcaaattgtacatggtggcacctttcctttcgtgagtagtggctctctaatttatacacatagatttttgggtgattttcgtgttttggttcataacaagagagattacaaacttgtgcaggtcattgaagtcgtggatattaaagcatccttcacctgtagcacggagacctaacaagccccttaaaggtttgacgtctttttctcaagcattcattaaaagagaggtttttggcagagatctgactatatatgctttgtacagcactctgcgtgtggaatgcaaggactagtgttggagggaacgggacagcaacagtggaaagccaaaatagaaagtctgaactcaggacaacaacaatggaaagcaacagtagaaagcctgaactcaagagaacaacaatggaaagccacagtacaaagcctgaactcaggaaaggaacaatggaaagccacaatataacagcaacagtagaaagccacaatacaaagcctgtagtcgaccattctcaggacataaaacctggtggcagtttcataaacttcaagttcaaccagtcagttatcttacaggcgttggaatctggtaattcagcttgactggtcagtttgtcacatatcggttggattggtgttgggagtaatgatgcggttggattggtgggtttgtctatagcaaaaccgttggatatgttcatacacgctggtagctttctatttctttttcatttggtttatatacctctcgtttcttctagaatgaaagggttgttgtaaatgatgttagtagggaagtggtgaatcctttggatcatggctttagatgacaatgttacgaccagctataaaggttaaaagagtttcttatccgagtagtgaatcgatgatcttctttatagcgccctctaactgcttaatcgaagcagaaagtgtttttctttttagaataaaaaatgaactcacctataaaacaaaaagtcgcacctaaataagtgaagtttatgtaatactatgattaccttggaaacaagagatatctcgagattgtttagtttttttcacattgtaatttgttagtataaaaggtgggtgggggaatggtggcctaaattcggcaagggtggcctaaaaaatacatttgattgctatacgaaaacattttaaagaaacagaaactgacaagtggcattttgtgttttacacttttacttgcttgtgtttaggtttggaggttcatctacataagcatcagcattgtgactttgactctccccatcaaaattcatcctaaaaatcaaagcatgttaaacagcccaaccacattgagaattttatctataaatagaaatagaaattaaatccttggttaaacccataactcttctttcctcttttcttctccggctaacggtagttttgacgccgttagtttttcctccgtctattgatttttcccgcttcacaatcgcaacaaacccaaagaagaatgtctcgtgtggtcgcagcggacgacaatatggcgttgccgttcttctcgccggagtttggcaatgtctcaggcgcgtcgtcttctccaacaacgttcgcacagctcttgcaaaacgtcgacgactccacgcgtcgtagtcaccaccagcatcacgttgatgtggatctcgcctcgccggaccaatccgtaccgttcgttctctcgttcactgatctcacttacagcgtcaaagttcgccggaagttcacatggagacgcagtgtttcttcagatcctggagctccgtctgaggggatcttctcttccaagacgaagacgctcctcaacggaatcaccggagaagctagagacggagagatactagctgtgctcggagcaagtggctctggaaaatcgacgctgatcgatgcgttagcgaatcgaatcgctaaaggaagcttgaaaggaaatgtaactctaaacggagaagttctcaattcgaaaatgcagaaagcgatctcagcttatgtgatgcaagacgatcttctttttccgatgcttacagttgaagaaaccttaatgttcgctgccgagtttcgtctcccgcgaagcc

SEQ ID NO: 37608 - DNA, 2881 bp, Arabidopsis thaliana landsberg
accttattgtgtataaaaactacaatgacaaaagaataacaaacatatatgaacagaatttgatcctcaaatttgatgaacaagagcaatagcgccttgtgtgatccatttgtatagaacagttgggacccaaagaatcaacaaaaagatacaaacttaacaaagaaattgcaaaaagatacaattttgataactatggctaaaacttgtaaagttcaaaagccagtcatcaacagataatgatcacttcttcctcaaattgactagtttcgaaagtaaagcgaagaactttatcattcaattccaaaaacccaaaagcgagattacaattgttagagataacaaaacagaggctagaatttgaactcgccttagactcgcagtgaacccgaaatcgccggaatgatggaattcgaacactttcgtgactcaaaatcaatctgaacccaaaatcaggaaactgacgagaaggagaaccgtaagagagtagtgtagaaggtcccaaagaagaagtcgaagccatcgttgaggaagaggcgatgaagaaggaataatcaggtttcagacgaatttgcatttgcagataagatgagaagatgaggactggctttatagaagaaatggaacagagagagaatgagatctcgaagcaaacgtagtaaccatgtcgttgtcttgattttgatcttcactggttccagaagaagctcaccggaggagatttttttatatatacattcaattaaaaaatttgtgtgtttaatttattattattatttttgtctttttgctcataatctcgtacgaaaactttggtgttactcaatggaatcacatgagaatatacgacatttggtgctgatgatacaattatgttctttacattaattcttagctaatttgggtttgtgtttatgtcagaaagctagattttaacccgcggtaaaccgcgaaaataatttatttttttaaatcagtatatataaaagtttgcaaattatatctatttataaaatatttttattttatagtttacagttgttattaagtaacgtccttccaaacccgttccgccaaactcgtcccgtaaaaaaaaccgctgtacaccactaatttaaatatataattaaaataaatattttacgggattgcaattgtattttagtttgtcaaacaaatttttgttttaaataattgtcgaaatctagttcacattttgtaaaaataagtttagtgaattgataataaatgtagttaggctgtgttttgctcattttaagggattgcaattgtcttttgggttgtcaaatattttttgtttaaatagttgccgaaatctagttcaaattttggaaaaatctgcgtgatatatgggattggaatatatttggaatgtttttcgtttgttaatcaatttattgctgaaaaaaaccaataattaaaagccagtggcagccattgtaaataagttgcaactccaggatttatttcacaaaatggctgcaaaaatgtatatatagatatatatatagatgttaatgatgggttaaaattcactggatacccgaaacccacctaaaattttaagcccatagatctcttttttgtatcagaaaaattacgggctcaaaacgagcaggtcttatttacttaaagccttacacgggttttaccctatcagattatgggtacccgtggtttttttttgtgagttaaaactaagtcgtttttatattgttgatgatattccaaacatgtctgagttctaaccatcgtcgccgccggcattctactgcgaccaatccaaacatttgcgatcgtttcactcttctccgactctctttccatatctcttaacctctttttcctcactaacttgaccgaaacaatgatcaccacaactacaataaccgaaactgcaatgccgggtaaaacaatccaccaccaattcttccgaaccaacactggttcgtgtttcggtttgactttctcctggtttaggacaacaagtgcgtaatgcccatgagaattcgtagtggcacactcgtaattcacgctcctgcgtattgctgatgttcaacaacaaaccattatccccaaagacgatgcatttgacttttgaacgatcacgagaagcgtgaggattgaatttgatcaagattggcttgtctctcttgatcgaaagattcaaaagattcaatttttttagatcattcatgttcgtggcatccggtgaatccaataaccggagaaataaatgagtaattatcagctaaccggaagtaaaccgatgaagagtgatcaaagaaactctctaagacaaaagctattcgataaaaaaaaatcaatttatcaaaatcaacattttaagtaatttaaaatcaaaataatatatttcaatttttataaataaaactgaatttagataaatatataccaagatttagataaatatgaaaagagtataaaatacaaatacatataacatataaatacatataaatccaaagaagaaaaactcaactataagaatttgggtacccacaggtaacccgaaacccatcgttttttttttgggtttaccaactaaagctcaaaacccattgggtttttcaaattcggattttaaatgggcgggtttaattcgagtttggactaggttgggttttttacccacagcaacatccctatgtatatatataaaggataaaccatttaaaagactacgtataacgaattactctacaataaatgatgtataaaatcttaaagtttatgtggataatacatatattcataaagactggcaagggaaaagaggatgataaaaaagatagcaaatttggatgacgacattttaattgttctctttaaacctttt

SEQ ID NO: 37609 - DNA, 1424 bp, Arabidopsis thaliana landsberg
ttgtttctctctctttctctgtgttttttctcacagtgaaggaatttaagcacgctcaatatcgaatataaggtagctgactcatttgactgtaccactagcagagagaacaaatagaagagaacattttttcttttccaaaatcgaataaaggcgttcacaaacgcaaacgcaaacgcaaacgtaaaaccccaaattgagttggaacattttagatgttttatgaatgagggatcctaatccttgtatggtcttattttagattcttctacacttatctactatatgcacaagacataaacaagttgtaaaaaataagtgttggtgggtaaaagttacattggtggatttaaaataactaaacttggaacataatcacttggaacataataattgaagagaaaccagggacataataactgaagagaaaccagggacaatgtttcaattggtttgtacaataatcgaattttctgcaaccatgccttccaacaatgtacatcatgttctccgtgaaatcctcgcatctcccacaatacataatcactttcttttcttcatcaataaaatctgtattcgactaaacaatctcttacctagaaaactagaaggtataacaatattcagtgatccaacaagatacttaattgaggagtcttgtacttgatcttcaaactccttgatgtctacattgacaccacattgacgttatcccccgaataaacatagagtataatatatcttttaagttcgagctctctagaagaacaaaatatagtgaatttcctcaggtctttaatcttcgcgatgatggtcttatacttcagttgttgcatcactccatgtttatacatatgtagtaccatcactacttccacctttaaatcattggcctctttgatgttggaaaaaaaaacttccaaaaaaaaaagacgtttcacaaaagctaacgtgcgctggagacgaattttactggaaaagctaacgtgcgcctaatttccaccgtgctcatccaatttcaccaaatctccgaaaaccagaatcaaaattttcacatttggaagggatctgatctgaaacaatggcagtgagagcaacggtgtcgcgtattccgatcgatacagacgctcacgaggcgttaggacttacttggggactgacagcaacaccatggctggcttaggacaagaacgggatcggaccaccgtgcggatctaacggtcatcttcttcctcgatgcgaaaactgctacgcttacttcaatacctattgtgagctcgatcaatgggcttggaattgctcgctttgtggaactctcaatggacttccttctgatgctattgctcgttactctaatcctcactctatacctgaaatgactacctccttcattgatcttgagatgcctcgtatgtcttacgtca

SEQ ID NO: 37610 - DNA, 2810 bp, Arabidopsis thaliana landsberg
aaaaagcatgttgccttagagtgcaagacgagaaaacatactgcaaaccaaatgttctctttggtggcaaaaggttccaacagctcatggctcttcagtttactttcgacattggcttgaagcttcacatatatacagagttatcagattaaaagacaacacattcctctagaaatactcataactataatgcctataaattatacacagtgcctccgattctaacctggtggtgataagttgaggcagattccaggaactctttgtaatagtggacagtcttcgttgtgtaaggcttcatggtagctctcaccttatcaacatgtggttttgtggctgtggccacttgatcaacgtacggcttgctaaactttttagcctcctggagagcataaacaaaacgaattaagcgcatattgtcatcatcgatggagctgaaagattaatatctagatagaaaaaaatatacttcacctggtaatagggatctacatgttcttgaaacttgacaatatgtggtgtaaccgcactcttggaagcatggtaagcctctttcgctttggtagatagtgtttgaacgtgtggctcaacatgcgttttaacagtctcttttatggctggaatatatttctggaaatagaatttcgtaagcataaccataagagcctcctgagtaataacacacattgcctgtaagttacttacagttttaacattagccatgtgcggtttagcccatttttcagcttgattttttgctaacgtcacctaaaagatgatcaaacttagttaggcataagtttgctctcagagtcatgtaatcaacatacaatttggatttaacaataccttttgagtaactttctccataactggtttgccgtgggcgtcccagtgtgtcccagcaacagtctgagtccaggaagtgtccaagttaattgagaaaatctatgatgcaagaaagtcgtaaaagataaaatctattaatctcacctgaaaactactccagtgtacagcaaaccaagggggaagccacgccccatgaaccttcatcagttccttagcctttgtggtggcttcatgctttgtccgcaacatttcttcctataattttattttgataagagtcgagagtgattgcagaaaccgaaagttaagggggaactaaacttaatccaagagcgtcgtcatacctcagaaattttaagagcacgctctttttttcgtattttgttcttctgctcttcatttgtcttgtgaagctgcaggaataaattgtgaaaatttgcataatgaacatactttctactttctatttaaatgatttgaaatgaataataatgtgtgtcaagagaaaatgaaccaagagatgtataatgaacatactttctccactctcgagttcaattcgtttagcttcttctcggtttcactagtccgagcttctatcaattctttctccttgtttttctgctccagaaagttcttaagtacctcaacctgaattcacaagtataatgtagaatttagaaacttacgtgcatataaaagatgggttctcaaataatgaactcacctgcttctctaattcagtagctcgtgcttgagctttactcaacagttccacagaatctgatgaaccttttttctggaaacaaagattgatatataaaggcaatctatatctgaacatggaagcaatttcagtgagacactaaaagatgcatgcatacccttagtgaagaaacctcagtctccaaagaagcaactttctcttgtctctcttgaagaagtttctccttctctgttactaactcttctctgcctttaagttccttggttttatcatcaatctgagattcttcaccaaccaaaaaagaagaaaacaaaaattaatttgagaaattcacacaagccatagcaaattttcacgattgacatagaagtaaaattgaagtaactgtaaagttctgagtgtaacctagggcacggattttagcattaagctgatccaattcgatatcaccgccgtcggatctaagtttcggttcatcgccgccgtcgattccagcgtcggcaaagatacaagtggtgaaattgaaaaccaaggcgagaagaagtaacaacgccacgagtttcgcggccgccatgtctgaaacttccgtggaacaaaataagaaagatgatctcgccggagatttgccaacaagaagatttttcgttctcttctccgaatttatgaatttgttttgtttgatcaaattgggacactgtttttttttttttttatgattggagaagacgacaaggttttttggttgtggtttcgtgattgacacgtgtcgaacaatttaggatatcggaagaaagaaaacttactcctaaaggtaaataaaggcactgcgataccatttttattaaattatctgaatgatactttttgtaagaaaaaatcattaaacaatctgtgagtattagaattctatgaaaaaatgtaatgttaaaaaaagaaagaaacaaatgagagatcgaaaatagactatctctattacaaatattggtcattcgttatagttgtcgaggaaagatatcatatcagagtaatcggaagcgaaaactccaaatatatcactaattacgatcatgcattcaattgcttaaagtaaggagtcaacttccgcatgaaacggtgaaagacatcttctcaaactcttgagacctatatggaagatactatcttgatcgattaggacccatccatgtctgcttagattatcctccaagtgccaggagacatcaatctgacattc

SEQ ID NO: 37611 - DNA, 3608 bp, Arabidopsis thaliana landsberg
  unsure (1)..(3608): unsure at all n locations
aacacaattcccaatttcagttccacaaatatacaatagccattaattcagttcagtttttgttggttaaccggatcttttgtaccgaaaccaagatcatggtatctttttacgccaatagttttccacaaaaaaaaaactggtgcatggccatggaccattgccctcctccgatcattggtaccataatttacaaaatttagttctcgacatctgagagactctatgaatcaacctcgaatcctatcaaacatgggatggtccagtaattctctagcagaaggccgacgcttcggatcacgatccatcattgtctgtttcaagaaacatgtcagaatttctgtcttaaatgctatgttccaatgcgtgggacagccatgacaacacacaagtaagaatgcaaataacataccttaagaagttgttgtaactgcaacgaatggccaggaaggagaggaagttttccttctttgatattgagcgactggtttcttgattctgtaagaggagatcccttaatcagctcataaaccgtcacacctaaagagaagatatcgactttatcaaggtgttcgtagtcttcatttagaatttcttgaggcatgtaacgtgcatctccttcttctactggtaagcttttgtccaatcgtgtggcacaaccaaagtcaccaagcttgcaaacaccgttcttaatgtaaatattgtcaggttttacatctaaatgagctattcctttctcatgcacaaaatgtaatgcctttgctatctgtaagagacatggtacaatggtatgtatataagaattcaaagaatcaataatatctctatacttgattttatatgaaaatgaagccagtgtttacctgatgcataatcaccaagatctctctttctgagactttaagagaagatttcttaggcaaagctgacaagctgtgatcgcagagttccagttgaatgtataattgctcattttcaaaccacgaggagtaatatcctactatattttcatgaaaccctacgaacaaaacaagataaaaacggtttaaggctacactgagcttagcttgcaaacagggaataacagaatagtttgagaacaagaaggccaaagaagggactgtacnnnnnnnnnnnnnnnnnnnnnnnnacttccatcatagctttacgtctgcaaaaaatcagctgtgattacttgaacaaaaacgatccaaacaagatgaactattttcagcagatatgtgtctttctcttactaagaaaactagagaaaattatacctctctgaatctagatacaactttcttgtgctgtgtttcacagcatataggcaaccgtccattctcttcaacaccttaaatacccgactgaaatgtccagcaccaatttgctggagaaaccaaaccaaaatacgtaagaagaagcaacataattccgtcatgatcacaattccaagctaaaagaccctttcgcttacctggatttcatgaaagtccgtgagatatcttgacaagccatccccacttgtacttacagggagaaaacctacataacagtatatttagtacagttttactgaagaaaccaagccttattgatttttaaagccttcaggaaattcttgagcaagaattttagggacaacaaacttacttgcacattttgatctctgatgtccaaaagggtcagtagcagtctcagactgattcaacacatacggattcttgaggcaagggggtggcatagcccgacaccgcagagcaactgcagcttgtgaaacgtatccagtcctctctgtttgattagcttggagtttatcccccatcacctcatctgtgtcaatatcatcattctcttgttcatctactctatgttttgaagaccaggtagaatttgaatgatttcctgtgaaactctctgcatcaaacacaaaaaaaacaaaaaaaactgagtaatgaaaaaattaagcaaagaacacactgtcaccaaaacatgaaatcactagatactactagtgtgaatcttaaagcaataaagaattcaatattggacagttgttaaaacaggagatcaaacataactataatgataacaattgtaccacaaaaactgaaacgtatattttcttctcatccgaaaatcttctttttactcataataaacacaaaatctgaatccaaagaaagcttaccctggcgacatcttttgcttttaactgtatttagtttaacaggagacctaggacatggagaatgatcctacaaaaacaataaagagaagaactttaaatttgagacattggtgaaataaacatccaaatcaacaattttaccttgctgatatctaagccgctcatcaagttctgattgtccggggttatatagtcaggtgtgctggaaaaattaaccagagaagaaattattagtagctgagaccatcattcatcaacatctcacaagcatcttttagctagacataagtttagctttcatttttaaaaagtgaatataagggaaaccatctcaaatctaaagtcagatcttgaaatcgtaatactaactaatcccaaaaatcaactacctagaagataacgatagatctcgaattagatatacacagctaagaaatgccagagttaacgaagatttaccagaagaagtcttggctaagaataaagtccttctctccgcaattggcatctgaatcagcggaacccaactgatttcggagctccgaagaatccgaatccaggagaccctgaaacgccgatgaagcaacattcgacgacggacgattttcggaagaaatcttcgacaattgaccgaattgaagcagagagtgacgctccaatgtcccttccatcttccgaatcttcttcgatgctctggttttgattgtcccttgggttttcctcttcgccaacagtgttcttccgttcttctcgaacatgacgatgaatattattactttgggtggtgattcaactaaggaaaaataattgaaataaattaataaattcaaaatttgcgcgctctcgtcttttagagtttcgagctaaaatttgggaatagtcatctgcatgactgactacggtgcacttcctatataatcaattctggaccgttcaatcttcaggattgaaatattttgctacagataaagtaaaggtgcagcggatcttctgtagagcgtatcatgtacgctttgatgggtctttaataaataatatttttttctataatagcactagcattttttttgttacgattcactaatttaaatattcaactttcttaagaaatataatgttttagatatatttccaaattaaaattttgaattagtattttttgttaattaatttaacaatttgtatttttattgataaaacaactaaaaagtttataatttttttttttaaaaaaatgaattaaatataattaataattataaataaataaaagtaatttgtaatagaatgtgaaattaagaaattgaaagattaatgtttgattaattataaatgtgggatataaaaaatgggaattggtaatattaaagaaaaattactaatactaaaataaagtaaactaatagaatggaaaata

SEQ ID NO: 37612 - DNA, 2015 bp, Arabidopsis thaliana landsberg
gaaactgctgtacggattactcatatccctactggtgttgctgttcgttgcacaggtttgtatttcctccccactaatgttacaacctgaatgtcccgtaagatcgtgttatcaatgcatcagaactgactatggtagttgattaagatcgcgttggatgttgcagaggagagaagtcaactggcgaacaagacgagagctctgatcagactaaaagcgaaactgatggtgattgcggaggagcaacgtgctactgaaatcaaggaaataagaggagatgcagtgaaagctgaatggggacagcagatcaggaactacgtgtttcatccgtacaaactcgttaaggatgtccgaacaggtcatgaaacttctgatatcacatctgtaatggatggtgacttggaccctttcatcaaagcttaccttaagcataagtacaccttagccatggcttctgctgtaaccaattagaatgctgaggataggcttgttcctttatatttctctacttagatagaaatcatctcctactagactgttcaattttatagcataatcttgaattccaacagtcaatgtgggattgtgagtcaagtctgtttgtatctaaataaaaccgcattttgttttaaacaaaacgaaacataaaactaaccataagccctaccaaaccatattaaaaaccattgagggtaataaaacttcgatatcttccgtaacaatgggtacttgattttcatcgaagttgtgcttcatggagacttatactttagtgaacaaataattcaatagctccaaatgaccaaatctattcttcaaaaccatcgagtccgtactattagagctcacactctttatcttttgcttttgttgagctgatcatgtcttggttttgtcttcatttgctggtgaccgttggagctgtgggctaaatggatttgcttctttgttgggccttatacttcagtttggcccattctcattttgtcacatgggatgacatcgttttgagaagctttggatcttcttcttcttgtctgatttggatcttctcttctctcttctctattctcctttgtaatgttccaagagggagctgtcactctaatactattatgaaacgatttatgcgtaaccctaactttttttaaaaaattatatttatgtagaattgtagatagtgttgcatacttgcatgtagtcaaaaataaaataaaaaagagaaaaaaacaaagataccctaaactccaaaatcagtgagtaagacatatcttaaattaaatgacaaaatttggcgttttctctcataccaaaataaatgaaatagtttaccaacgacaaccacaccagtcccattcacaaaccattcataaccaaaatcgtcggtgtcacattttgtcacgtctcttcttaaaaaaaaaaaaatgggagaaaacggagccaagcgatggaacttcggagctaacgaggtcgtcgaacgatctaactcacttaccattcgtgattaccttaacaccttaatcaattgtctcgacggtggtgatgtaagacccgtcatcccactaggtcacggcgatccttctccgttcccgagctttcgtaccgatcaagccgctgttgaagccatctgtgatgctgtccgttcgaccaagtttaacaactactcttcttcttccggtgttcctgtcgctaggaagtaagattacttcttcttcttcgttttttttttgttttcttttggtatctctaagggtctctgttcttgcttcttgattactcaaagacaataatctgaaacgttgaattggttaaaatctttgattagtgtatactttggatcacattggctttttgagaaaggattgatgatttggttggttctgtttctctacctcaatagggctgttgcagagtacctctctagtgatctctcttaccagatatcaccaaatgatgttcatatcacagctggttgtgtgcaagccattgagattttgatatccgctctcgcaatt

SEQ ID NO: 37613 - DNA, 2188 bp, Arabidopsis thaliana landsberg
ctaagctctttctctctttatctctctttctttcttcctttcttttctggtgtgaacctaaactcattattctatagtatatatagaaaaacactaaacaccaagtgacatgttaaatacccaaattttcataaatatttttgttataaatgtaatatgttttcatattattatttttgtttttcttaaaagaataactataaaaaatggtctacttatgtcatgtgcctttacctcttttgtttactatccaaattttcattatgacactatatcaatccttaaagctaatgtgcttttttctaaaggtcttatgtagtcatatattgatagtgaccatcttagctcattttatacagccattttatatagggaaaaaatattctgctataccaagtctaacagattacatgccaacacatgccaaatttagaaatgtacaaccaactacacgaagtagatgtattgcatgcccacatataccaactgtatgacgacatgtggccaacatcacgaacatatttttctggtataccaattgtcgaaatccggtgttgatcatcgttgaccggcattgaccaacaaaaatattcaaaaatatgaatttttatgatattacttaaaacatttattctattgaatagtttatggttttgtagaataaataaacacattctatatttgttttttttaaatttgtatgatttttattattatttaatttttttcaatttcaaaactaacttaaaagggaaatgaaaataaatttattaatttcattagggaaaaattaagtagatgactctttagtctaaagtttccattgcaaaaaaatatatactatctcccctttcttttttttttacgtcaaaacaattatattaatcaattagggtcattacaaaagtatcgatcaagccaaataggttaagaaccagaaccagaataaaaggttgaataagtacaaccatatttcgctaagacatgagctaatttgtttccctttttccggggggggcaaactgaatgcttgcaaatttatttgcccaaaaactgatgtcctccaggtgatttgctaacgaactgtgaaacgtagtcccattaatctagttaattagcgtctgacaatcgccttccatgaatacttgtgtgtatcctcgaatccaggtttgttgtaaagccgccaaaagagctttggtttctgcctcaaacggattactcgtatgagccaacttcattgaaccccatgagattggtgtcccgtaatgatttctgatgatccagcctcctgtagcttccaacttctgtacatcgaaaccagcatcaaaattacactttacatatgtggcaggtggattcctccattctatgttattctctgcaatttgtcgagtcggtgatggtgttttcttatggctttgtgttgcattgagccaatcatgtgtttcagcctttgcacttaaaacagtttttgacgggctttctctgaacttattgaatactacattatttcttgccttccatattcgccatatgagccaaaccgggagaagcttatggaaatctgacattgtggtatcctggacaagagttcaagatattggagatgttttcttcaaagtcgtttgacataagttgattaaatatccaaaaatatctaaaatatccatgaaatcctaatatctgaaagtagctccaatcgtagacaaataggcgaaatgagctggagctaatcctggcggcaaatgaggaacaatcgccggtaaattatagtgagcgcagttagctgccaaatcatccattgacgaagatgatttaataatatcaagtgttgatcaatgagccgttaaagctcatataagtagttagggtgctactcattttttgaatctcttccatcacaaccttccccactttctcaataaagttgagttttttcccttgagttttctcaataagggcatattcttcccttgtgttttctcttgtgatgtcgagccgaagccagcgaatatcaagtaaaatagtggtaccagatttgtcgtgctcgagctgagcatctacagtggtagtactagagaatcaagaaccccaagctgttatggagttcgggtagtagagaatcaagtatatttattttatattatgaccctggtaaaaattatggactaaattataaaatatttta

SEQ ID NO: 37614 - DNA, 4262 bp, Arabidopsis thaliana landsberg
  unsure (1)..(4262): unsure at all n locations
ccctatgaatggcactacacaggacaaatgttcaaacaaattttggcatatacaacacaacagatcaaatacgaacatgtgacagagatttgactcaccatacaccttcaataacctttcccaggagtgattgtgagagctggcgtgccaagccttggcttaaatcatagacattcaatgttaccttatgcgcttcctgccatatcacatatatcaccaatttcaatcaaactaacaacgaggcaacgcaattaactacgaaccagaaatgaaaaaaagagaatcatacctcagccattgtcaaagtccttgaaacacgttaactacctgaagaaaaaaaaaatcaaaatcaaaatttacaatcgcaatgatctaagacctgagcaacaagaatgattccgaacaaactatatcagacctacaaaagaatttccgcaaatcttaagaccaaatccataatcgattccgaacaaaaaagaactagtatccgcaaatagaaaatccaaatctagaaacaatcgggaacacataattgataaaattgatagcgagaaagcgagggagatttgatcacgtacaaacaaaatacgtaaactggccgctcggaaaattgtcgatatgcgcaaatctgaaagatttcttggatagcaatggttcagagaggtttgttataaaggcaagctattgggagattcgaagattcctctacgacgtcgtttaagctactttgacccctataccgacgaccgcttttattctgtaaccttctagaaagtaccatccaataagacattgccacgtctattttccccgtcccggttcaaccgaccagaatctttgaatcagaattacagcagttaaaaattgaaatcctaatttatctatttgtgattgcaggaacagttggtcttacagcgatcaatcaccgtattgtttatgtatgaactttaccgatgtataccaacgatgcgtttcatccaaatctaaggttttcacaacattatttattcataaaaatattttaaaattttaacagtagcatcttcttgttaataaccctaattaggacagattcatgaactgcaactcccaaaataaatctagaacagacgcacatcaacaaaaaatcgaatgaggacaaaaaaaaaaggcaacaaaagatttaaaaaacgactaatcttacggagataaccattctggttaggcaaataaaagcctaatcttgagaaaaaaggtctatatagaaaaacaaatgaagaaaaatcaaaaagtagcacttctttatccaaaacaacacattatggcccaaggaagaagnnnnnnnnnnnnnnnnnnnnnnnnnagatttttgagctcaagagttcttcaatggttacaaagaggtggcatcctagcacccgagttgtctgaaagtaaaaccgcttcataagatgcgtcgaacatgatgtggtactttaagcatgttattggaagtattatgatggttttttccttaccattgtgagctatcttagttttnnnnnnnnnnnnnnnnnngttgtagaatccaatcgacataaccactcgaaccgcccatctggtcctcaatgagatttctgaggagaaggaagccttctcggggggggtctctttgtctcactagggaacacatggggtgatatgaaggatcactctccctcagtttctttaccaacctcattagcttctttgacatcccattctcttgctcttgaaaggtaacctaagagacccaacacgaagaaagacaagggtttcacacatattatcatgtttcaaattcttgaaaaacactaatgatgcatatacatcatcgaatgtaccgcctgttcatatattcatatgtaaggatatatgtggataaaaatacatacccttgagaggtctgctgcaaagtcaaccccaagaagatttttagcaatgtcaggtgaaagcatccggccaaaccacaaaactaatcgaaaaccatcatcatatatgtaaaggcctctagaatccaaactctctgcagccagcggcaatctccttaatacgtctttaaagtcatcgtgggctgctgatggctgcaagcatgtgaattcacaaattatttactatttcttgaacactgatgtttgataatggacattgagataaaaatacacaaacctttaagagccattcgtcaacacggaataaattgggatacaaaagcttcaatagctttttgacaggcagagccatcatggtgaagcctgcagcacagcgctcatcaagagaagtatcagcaggtccacctagaagaggagtggacttagtaattgccaatccgtacaatggcaagaacttcagagactctgggtatactaatctggaccccaagcgatgctgcaccgcgtgaagattacgatattctttgagggctttaacaatcttttgctgtattgcattccgtgcatcatccaattttgcggacaaagatttctcaattgctgcagaatttaaattgtcattaaatagtatcaaaagtagcatatgaaaaaaatttgaatatagcttacctaatctagcatataaagacacaatggaaccagtgtctgcttgtctatacatctccccaagatctgtaaccactggtgcaacagatgtgtgtacccttatacgtctctctccacaagaggcggtatatcttagttctgttaaggattactaaaagctaaatgatgcgttgtatgtttaaactcaagtatgtttaaaatatcaactattcaaggatacagcaaagccacttggaaatacacagtctgggatgttagcaaagtctcctcaagagatagctgcattgcatacgctttgtcacagtcaacagcaggaagagcaagcaggtcagtagaccttagcatgaagttcccatggtaggacgagaaacgaattcctgcatgcaaaaatatataagatcacaagtagcacaccaatgcattagcaaatattgacatagcaggtagcaaaaacgaatatattatcataaactattaaaccttttccacatcttattcgcataaccgcctcccacgcagtttcccttgtaaggtctctagcaagctcgtgtcttaacttatctccatgaacagatgattggaaacctggataatagtacacctgtcctccagtgtattttgccagagtcccttcaagaaaccaaagaattgtaattacaggctgataaacttaactatcacccatgactccaaacagctgaaataaaaaacatcaactgataacctcaacgttcacatacctaatgaggcaatatcagtgtacttatcactgaatgcataaacattaattcctatctggaacttggtacaatcagcagccatttgtttatagaagggatcttcagctacccttaatgcatattctttgtcagttccatagacacgaggatcatctccccgcaactttaacctcccagcaccaagagaaggtaatgagttctggaaaattagtaacttgcccccaagttggttctgaaatagggagagaaacagagtcaacaaactgatccacatttcagatgaggatctaaataggacactcaacatcaaatgaattatatgatattattttgatatgtcaggatggtaactaaccataaccataaacgccgctctgagggctgggccaaaagctgattccacattgaaattatcttgaaacatcaaaggtagactgtccaaaaaggcgtccaccacagttctagattcagatagatttacaagcagatcgtctggcaatgggacaaagatatcatctagatccgatacaaccatcatctgcggctggctcaaagatgactgcattgccaaagtccacaaaaaaaaaattatggaggctaaagaatttcaaaacaaaagttcctgtgagtttacaattctcttaccttcatgttgtaaaaatgtaacgtgctgtcataagtaataaatccaatttgagttcttggataaccaggcaggttatccaaacaagacttaatcgtttgagcaacaacctgcgaaggagcaaaaggtcagtgtaagatctatattatacgaaagcttccatatgaagagagagagccactaagctagacaaagaaacaagaacagtctagatgatccattaatacgtagtatattcagataaaatcacacaagaattagcacttactaattatggaacagtaaagcccatttccagcacaattacaaagtgggatattcggc

SEQ ID NO: 37615 - DNA, 6362 bp, Arabidopsis thaliana landsberg
  unsure (1)..(6362): unsure at all n locations
gtagtacgatccaatgtgttgaatacctgagttgttcatcaatttgtaaactgaagataaagagtcttctgctatagcttgacaaaagctttattagcaaactgaagactttgttaaatctattatgttttttcttcaaccgttgaaagggttcggtatttgtaagtagctgcaagttgtttcggtgtatattaataaaaagtcatggtagtagtagattgacgaccaatggctcatgtatcactgaaaccacaatgcttttacctcactacaagaatggatcagctattacaacagtaatctaggaagatatccattacattaattaattaaattttgaaaaatttgcttcaacgatagaagaagaagaaaagcacatataaaatccattataaatataccaactattaattaaatattagaacttaagtacacaatctttaaagagttaagaaaagaatatatgctacagtttcgaattataaaacattgtgggcggcgaagctcacaatgacatcataatagaattcaataacatcaaaagattccacgagaacgaccactttgcacattaaaaacttcgatctgacacatgctagatcgtctcggcaatgcaaggagatcgtttaagacagctggatttccttctagaaagaaaaaatgcaaatgtagagcaagtttcttgagatttacagagttctctacaaagtaccttgcaactttcagtacaccatcatcaggtgggtgttcgttttttatctctacaaattcgagcgatgacagcaaacaccgaggcacaaacgagagtcttaattcttttttcggagtccaataacgtaaaccctgtaaaacacaaaacaaatgatattggtgttacatgaggcacaaacgagagtcttaattctcaactgtatgaaacctctaacgagtgaaagacattaccaagattagggacttgagatttggaaagctttcaagaaacgttggcagcgtttccagtgagggtaagaaaagttctacttccaaacaggacaagttgcaaaatttgggtgaaaatggcatggtattcatgatgaacaactactcacagaaaaaaaggaaattggtgagcaaataaaaattcatgaaagagcattatatattatatgattatgatttatgaattagtaaaacatgcatataccgcgaacgcttgggaagagattttcatatcgctgactcccgatatactggtgaaaaaattatgtactatatctcgcttttgtaagtcgacttcatcatcatcatcattattcttcatatgaaaatagccaagaagattgaccttggttaaagagccagagtttcttatggttttactctcatattgatcagcttcaagattcaaatacttgagtctaggggcatcaatcnnnnnnnnnnnnnnnnnnnnnnnnnnnnactcaacacaaccttctatattgagactggttaatgtctgagattgcactcgtaaaacgtttactttatcatatgccccactcacaaagctcaaatcttcaagaacaggacaagatgagataagagactctagatccgcctcgttagcatatatgttttgttctaaactcattgtcttgagacatggtaaagaaacagactcaaacttacccaagcatacatgattgagtcttaagtaaaggagtgactcacagctataaaggcttaagggtatcacttcaaaacactcacacctcgtaggaccaatctcaacatcaagatgcttaagtttaggcgtagccacaaaatctatccaacgtgtgacacaatcctgatcattctcacccttacgaatgcttagcttgagcttgtgcaagcataacttctgttccctagagaaacctaggaacttgtccacaaagctcacaaaagcattgtaatctgtaaagtcattagagatcaaaaccaacccgggagtcgaaagccatagacttctccatctcttggacaaaacactagtcgtaacagctttctttgtctgaagataaaagagtatctgagttatcaaagagtcaggtaactggcttatcaaatcctctttagcttttgaagaacatacagtacgttcgaggcatgttcgtttcactttcgtttcctccattgaatccgcagtgacagcttcgaatacttaagtgtaagtacgcatgtagcacgaaagtcagaaacagatcacgatgatctcagttttctagcggagaagatgagcagaactgatagggatgactcttttaagggttttgacgttttgagagcgttttaagaagatagagatgtcaagacaagagattgagatgggtcaaggcccaagagcaaaagtttcatctcaaagcccattagtcattcacgacaacagataagacaagaaagatggcttcagagaagggaagagacacaaagaattctcaacatcatccagaactagtagccaaaagctcacaaagacatcataatagagtgcaacaaaatgagaaatccaagtacaatttaagtaatcagctgggaatgctagattgctagtcttaatgctgatcacagccccacctttcaagccgtcaacaaactacgattcgacatgtgctagatcctctgggcaatgcaaggagatcctttaaaatgtaaaatccatcttcatgcgtggaacacctcaaatgcagaaaaagtttttggagaactccggagttttctaaaaagtaccttgctacttccattttagcaggccttccgttgaatttttttatctctacagactcgagtgacgaaaccaagtacggatgagaatattattggctcatcctcctcctgcagataaaattcctacatatagacaacattccaaacaaacaaacaaaaaggaatgaatataagataacacattcctcaaagtattttgagtaaaagctcaagggttgtgcgagtcatcaccaacaccatgacgagtgatttcagattgggacagctctcaagaatggttggcagaatttccagaaagtataaagaaatctcggcttttaaacgggaaaggttgcaaaactgtggcagtgggtcgaagtccttgtaataatagagaaactgcacaccaaaaaaaagaaacatgagttaagcaaaactttcatgaagaacgctagctacatgatatgtatatgtatacctccacaaaatgctgagagatcttcatatcgctaactcccgagataccggttaagaaattacggaccatatttcgtcttggtatgtcaacaacatcagcacaatcattctcattgaagacataaacaacattgaccttggctaaggagcccgaattggttatgattttactccccgatagatcatcttggaatttcaaatacttgagtcgaggtgcatcaatcaaaacccctgagacttttttatcaaaaccatcaacgaagtcatcaccctccccaaaattaaaatctatattaagactggttagtgtcagagagtgcactcgtaggacctttacgttatcttcaaacattctaagaatgatcaaatctttgagaactgggcaagacgagataagtgactctagaaccacatcattggcatatacattttcttctaaacgcatagtctttaaacaaggtaaagacacagcctcaaacttacccaacaatacccgatggagtcttagatttaccagtgtgtcacaaacataaagacttaaaggcatctcctctaaaaacttacgattcataagacactcaacatcaagatgtttaagtttacgcctaaccacaaagtctatccaccgcgtgacacaaggcagatcattcacagtcttccgactacttagcttaagcttgtccaagcatattttttcttccccagagaaatctatgaacttgttcataaaacccacaaaggcattgtaatcttggaactcttcagagtccaaatccaaccgaggaatcaaaagccagagacttttccacctactggacaaagaactagtcctaacaatatcctttattgggagatacaagagtatctgagttatcagagaatcaggtaatttgcttatcagatcctctctcgcatctgagaaacctctacaccgtttcacggattcctccatcacgcaaaatggaaccgaaaatctcacaagaaatttaagaaacagattatcaaagaaccttaaattagtagctctcgagtgaaatcacgtaaaggggattgggtggtagaagatgagaccgccgaaaagaagccaaggaagagtggtttaggtccatggggccaatgggtaatctccttcttcaggctttgtgattctcaaagtagtcttaatttttgtttttttgggccgaagggcccaataacttcataagagtttgacgtttaatcgtttggtaaaatatactctttatatatagcccacaaaacattatgccaatttataaaacgaaattgaaaacaataaaagctctttaaggtgatgtgttttgctctgttttttagtttaataagaattatatccatgaggatgaattttttgccatctccaagcaacttgaagactatcttgaagattagtgaatcgagcagtccaattcaaatctttcaaaatctttgttggatcactgtaaacctctgcgtaatctcccggtcgtcgaggcaagaaatctactttgatctcaactcctgtcgccttcttacatgcctcaacgaattctttaaccgatctccctgtttaaccaaaccacaaaacggttaatgtcagattgtaactcaaatcttgtgcaatgaattcaaattatggaagtagacaaatcagcttcttgatgactacatggaagctggatgttttggagattagtttggacttaagaatctttcggttataagaagaagtaaaacagagttattgtgtagtgaaaatgttaaaagtcaagaccttttccggttccaacattgtagataccgacttttcgatgctgagctttctcgagagccttcacgtgagcatccacgaggtcagtaacatctatatagtctctaatgcaagtaccgtcagatgttttgtaatctgttcctttcacctacacaaaccatatcatataaaggatgttgcaatatatgattataggttatagttttttttaataatggtttttacttgtagtccgggaatgaaaccacgagctgcatcgaaacaagcaccagaaatccttccttgctcgcgaagctcgggtcttggcgcttctcctaatctacctcctggatctgaaccaatcacattgaagtatctacaaaagtttataaggttcatcagcaatatttgcataattgtttcattgatcatagagtaagaacaaaaagtactcaatgaacagaaccaaaccaaaccttaagatcataaccgccatgtcagagttctttgagaaatccaagatcatatcctctgccatctttttagcttttccgtatggattaatcggtacctagatacattattttccattaaaaagacacggagaaaggggtttcatcactcgcgaattctaaggttatttacctgtggagtgtcttcagtaatcggcattttttcaggctctccatatgtagcacaagtgctagaatatattagtttctttactttatgtctagccatggcttcaagaactcctaatgtgtttgatgtaatgttatggtaatatctgcaataaacaaatatgtaaacaataagaccgaaaaaaactaaactcttgcagctatgtttagatatatagcacgaataagaactctactttagaggataaagagtgctttctccaacataagctaccgcagcaaaatgcattacagcgtcaaaagcattctccgagaagattttttcgacctgaaaatatattcaaaagaaaagtaaaaaaacagaaaccaaaacttttaaccttcaaaggatgaaaaatatcaaaaggttataaaaagataccgctaagggatctcctaggtcagcataaatgaattgaagtcttcctgtttgcgggaacaatcgctgtaaagtcttaaccgcaccaagatttccacgcgaaagattgtcctgttgcgataacaatagttaaattaatgtattcaaatttcatcaaatagttattgacaattttgaaagtagtctaagttaccacaatggttacgcggtatgaatctctaagaagtcttaaagccgcatgtgacccaatataaccagcaccaccagtgactaacacatgagtcactccttaaactctatgagaaaactaaaagcaaacacaacaaaaccgcataaaatattatgaaaatgtaaaagtttctaaggtgtt

SEQ ID NO: 37616 - DNA, 3985 bp, Arabidopsis thaliana landsberg
  unsure (1)..(3985): unsure at all n locations
cgggaaatcctggcgcggctacttttcgcctactttttttttaaactatcaacctctcaaacaacagcttgggtggttcaatacctcacgatatctttaccacttcgtctccttctctccgttacctcaacttaagcaacaacaacttttccggctccatccctcgaggctttcttccgaacctctacacgttagatctttccaacaacatgttcaccggtgaaatctacaacgacatcggggttttctctaaccttagagtccttgatctcggtggaaatgtcttaaccggccatgtaccgggctatcttggaaacctctcaagattagagttcttaacattggcttcaaaccagttaaccggaggtgtaccggtggaattagggaagatgaaaaacttgaaatggatatacttgggatacaacaatctctcaggagaaatcccttaccaatcggtgggttattctttctaaccaccctgatctcggctacacaatttttctggaccgatacctccttcactaggtgacttgaagaagcttgagtatatgtttctctatcaaaacaagctctccggtcagatcccaccgtccatcttctccctccaaaacctaatttctctcgactttagcgataactcgctctcgggagagatccctgagctcgtggctcagatgcaaagcttggagattctccatctcttctctaataacttaacaggaaaaattccagaaggagtaacttctttgccacgtctaaaagttcttcagctttggtcaaacagattttccggtggaattccggcaaatcttgggaaacataacaatctcactgttcttgatctttctaccaacaatctcaccggaaaactccctgacactctttgtgattctggccatctcactaagctcatcctcttctctaactctctagacagccaaatcccaccgagtttgggcatgtgtcagagcttagaacgcgtgaggcttcaaaacaatggcttttcacgcaagttacctcgaggtttcaccaagttgcaactcgttaactttttggacttatccaacaacaacctccaaggtaacatcaacacatgggacatgccacaacttgagatgttagacctcagtgtgaacaaattcttcggtgaattaccggatttttctagaagcaaaagactcaagaagctcgatttatcacggaacaaaatctctggagtggttccacaagggctcatgacgtttccggaaataatggatttggatttaagtgagaacgaaatcactggagtgatcccaagggagttgtcttcttgcaaaaatctagtgaatcttgacttgagccacaacaattttaccggagagatcccttcgagtttcgcagaattccaagttctcagcgatcttgatttgtcatgcaaccaattatcaggcgagattccgaagaatctaggaaacattgagtctcttgttcaagtcaacatctctcataatcttcttcacggaagcttacctttcaccggagcttttcttgccataaacgcaacagcagttgagggtaacatcgatctttgtagcgaaaattccgctagcggtttacgtccttgcaaggttgtaagaaagagaagtacgaagagttggtggttaatcatcacttcaacctttgcagctttcttggctgtcctagtctctggtttctttatcgttctcgtctttcaaagaacgcataacgttttggaggtcaagaaagtggaacaagaagatggtacaaagtgggaaactcaattcttcgattcaaaattcatgaaatcgtttacggtgaacacaattctatcgtctcttaaggaccaaaacgttcttgtggataaaaacggcgtgcatttcgttgttaaggaggtcaagaagtatgattctcttcccgagatgatatccgatatgaggaaactttctgaccacaaaaacattcttaagatagttgctacgtgccggtcggagactgtggcgtacttgatacatgaggacgtcgaagggaaacggctgagccaggttttaagtggtttgagttgggagagacggaggaagattatgaagggaatcgtcgaagctcttcggtttttacattgccggtgttctccagctgttgttgccggtaatttatcgccggagaatattgtcatcgacgtcaccgatgaaccaaggctttgtctcggttttccgggcttactttgcatggatgctgcttacatggccccaggtataatttacatctctgtgtcaaaacaaaaagaccaaattcaattattcaacttagaataatggctttccaggccaataatacgtcccatgttaaaaacaaatcggttttcacgttttggaaaatatactctaaaatcgatccaaaaattaattcagtttgatcttgattttttttttcctgcttccattgagatttggataaataatttgtataaaaatattaagaagttatgtaatattatagattttcagtataactcaatgtaccttttctatatacattgctaaaagatcaaattttcaatacaattttggttgattcagtttaattgcacaaaattcggatccggcttctaattgatgatcttaactttggttcccgtttgcgtgtccaccactaattaatctagaaaaaatggatgtcttaaaatgtttttgttttcatgttacatgttaaatggattttatttgtgtttctattttcctctaatgctagttcttcgttttgtaacgtagaaacgagagagcacaaggagatgacaagtaaaagtgacatctatggttttggaatcctcctccttcatctcctcaccggtaaatgttcctccagtaatgaggacatcgaatctggagttaacggaagtttggtcaagtgggctagatattcgtattcgaattctcatatcgacacgtggatcgactcatccattgacacatcagtgcatcagcgcgagattgtccatgttatgaacttggctttgaaannnnnnnnnnnnnnnnnnnnngagaggccatgcaccaataacgtgttacaagcattagagtctacctcatcgtcaagttcttcttgcactacttatttgtcaaagatactatcgttggcctgacaattctggcttcgtttgaccccattatatatatgtaattttatttgggttcttatttttgttttaaaatctcattttctttgtctttttttgttaggtttaataacccaaattaatatattgtctatcaagatggttttgtttatgcttgattgtttactgatgaatgtatatataatatataatgtgaagaatggtttgaacatcttctatgcatgtttttcttccgtggaccgggttgacgaatttgttctaaaatgtgactagactagcaatgattatgcaatgtagcgtctatattcatttcacaagtgacatgtagcgatgaagtgtctgttagttacttcacttcaaattgatcgggatggtacaagtaacaagttcactacataggccggtactggtccgattctggcttcgagaaaaggcaacctggtttgtctcggttcgggtctaagccatttttgtttccataatcctttaatccattatggtagaccaacccgttaaagaataagtaataagttggcactactgtcctcttcatctttatgaatcaactaagaaataatgataaaataattacaagagataactaaatgggaggatcgagtagataactttaataaaattgtacttaataacatgaaatttcgacaatgtggtcaaaagatattgaggaacaaaacgaatagccaataagaaaaggactcaacacttgcacccactttggtttttaagtttgtcatcattgttccttgtattctcttcttattatctactttccacaatttattttatgttttgtatgtgcatgtttgtctatatataaattcttttttc

SEQ ID NO: 37617 - DNA, 7091 bp, Arabidopsis thaliana landsberg
  unsure (1)..(7091): unsure at all n locations
taaacgatgatcgtataacactttggaatggtaaacggttagaatctttaaagctaaaaaatactacgattcgtttcatattaaaaatttcacttaactgaagatttgtaaaatgacattatccattatatttttatttttatttcacgaaaatagtgaaatcgtagaatgatgtggtattgtggtatgctgttattttttcacgagagcaacataatataattgatgtggctaaaaacggctcggctgagagggaaaacgcgaaaattaggagaagcacgtgttgaatgaccagtagacacgcacgggcctcaaccgtactctttgccctattttcagacatcgagatggttagttgatggtgcgtcactaaagtaacgggcttgtttcggaagtaaaaataattgagcttacgtgtaagcttctgattggtggatgggttttaattgccggactacctgattggttttcggcccggctgcgaaaatgtccggttttacaagaaaataccatatttttgataatatacatcaataattggtctgtgtccatcttttttcagtcacatgtgaaacatgttcatttttgtttcttagcaaagtcaaaatattcggtttcaaatatatttaatccttttttctgttggagtaaaaactccaaattcgttgacaaaaaataataatgaagaaaaaaggaatttatcaatgggcctttttatcaacagttagtggacttcttaggtaggcttaataatttctgagcttatctcacaacgatgccgtttgagtggagacgaaggcgtttccggttctcttctctcgtcggagttctgaggtaaaaaaagaataaggagaagaagaaaagcaaaagcataaaagagagtagcaaagactgagaatggaaagcttggacactaattttcctgtgcgccatagaaaggtctcgtttgaaagtaaggtaatttgagaatctctcgaattacttccatgggatttttctcaattggttttggtcggttcttaatagaaaatctcgttttgattggtccaaataatgtctactgtgctttgaaaattccatttgtgttaaacaattttatgttgtgaagataatcagatcgattaatttctagtgtttgtttaaaattttgtgtgaaagggaaacaagacagagattgtgatctgcagctatgaagatcatatccttgtgagtgtctttctgtgttagatattacttgttttgatgcttgtagtcatagttttgtctctctgaacctttacataactttgtttcagatcatagcaacacagattggtgccatgggaactatattgcacgcaaggtctctgattacataaatatatgtaactgttcatcattctactggttttctttttcttttgaagaggtatgcttaatgttgttattggctatgcttcttctaaggaatgatctcgagtggtcttgattcattctgtctgagaaaacctaaattgtgttggtctttgtatatcttttgnctgngatataattaggtattgttcatgcttctaagatatccctgaggaatgaaaattgcttgttcttgcttctttaggtctatcactttagcggtaatctatattggttaagaagatcaagttatatttgtttgaaaaacgagtgttacttgttgacaggaaggaagaagggatgtctgttgaaccaacatttagtgtttcagtgatattcggaaagcgagacgaggtaaaaatcttatcatagtacacattcataatttcatatagctaattcatacaaagtcgtactgaaatttatgtttcttgaagccaatgctgacagcaactgctcgaagactcattgaacacataaggtctctctttcaccttcaaattcttgaatctttgcttcttctcctccatttctttgtttttctattgtctgattaagatggaacactagaaagtgatcaaactgttataatttatgcaatctcttttgaattcttcagttctattgttccctcgaagcctctggttctctcacttggtctcaaagatcattcttcggtactctacattttcttataaaaaattatctgattctgaaaagtatgcaagaaatcaatgatacctctgtgtgtgtcctttttgtaggagacgttgaaggaaatagtagcgacagtgattgagaatcgcctttggtaatacatattgttgtccatgttaaaaggagaacgagaagatgttttatgttttagtcttggttgatataattagcatggagttgtggaatcttttcttgtttatactgaaaacattgtttttgagataaaagttaacaacaagtacacatttttttcacacagaaacataattaaacaatagtattttgtttacatagcatatcataaaacacaaataagtaaaaaaggaaagtggggaaaacttccccaaaaataagaaaatcactgtagtagttgtcacataatataaacctgtcaaacaaattacacccaatagaaatataaagcacacaaatcttctctatttcttctttttgccttgaaagggaattttgtgtttttttaactcaagatccccagttgtatctctcagccttgtctcgatggcttttgagactcaatcatttctgtgtgttaatgcgttcaactgattctccaactgcagattataagaaaaagatttccatttaggcatacgatgaaaatgtgaaggcttgtacctcaaaatctatttcattactgtgtacatgtttataagatctcaaaaatcgattgatagtaaatgaggttcacccattatctcatatgagaaaagacaaacctgcccatttttctgcttctgtttctttagttcttctgttaggctggaaaagcttcaagatcaaagatgaaaagaaaaaaagtaattcaatgttgatgttaagtaagaacaagatgcgttttagcttgagacattccgtatttaatttcatgattagtaatcaggatcttggtgaaagaaagagatggatatatgtatgtacctttgttgtagtagcatgacttgagactgaagttctctctctcgtgaggttgcaggaggcgtctacataaaaatatgatatcaaattcgggttagtgaatataccaagattacatatgattaccatttttgattcgatgaaaaatttgaaaacaattttctttcttttccttcttcttttacctgcaataggtcatcgacgttcgtctcaggcgatccaggttgcttggctatgatatgggacaaaacgtacaatatcagaacatttctgttgagttcttcaacaataaggaaaatataagatcctacagaaaatcaatctgtaggtgaagaggattatagtaccagaggtttgctccaagtatttgattagtctcaaaatctcttcctgccaagagaagagtatttaactaacgactttaaagtaatattccttatggtttaaaatatacccgttgcatagcattttgctgcaaaatcgactgaattgatgggaggattgaggcggttgtagcattgaggcaactagggctgcttgtaccaccactaaatggtgtgaatgtagagtttgtagatccctaattgtaccaaaagcagaaacacattttcagttttcaaaaacacaatttgaactattccgcacattgccctttcaagcatctatcatttctctggaaataccatatagcttcaatgaagattagtaagaaactgaaggttataaaatgcggtactttttataccttgggactcagatctgctgatgtgaccttaaaccgtcccttgtgctccacatgcgggacttctgacgtctcgtccactgcataaaaacatatttaaattgaagactgtatacaaattacatgtatacaaatgagtaggttactgtggagggttaccggaatctctcttggtgcggtataatgatccgctgtagctccgctctgtttgatatctacgctgttgaaactccctgcagaaatcagtcaggtggcttttaaaattaactcatcattcaagtgcatagagtacaagcttatatgtgaacgaagcatgttgagataggtagaaacgctaacataaagcactgagaatgctaacctatcagcatcagatgtgattctttttggagagaaagtactctctggtataattgaaccgctcaaatattttttctgttcagaaatgacatgacgtggtaaagaagtgttttgtgctgcagtgtcctcttctttcgtggtttcggccaaagatccaatggaagcctttgttaaaagctgttgtccagaatttacattagcatctttccaatcaggagtagttgcattatcctcgtcctcactgatatcaaagcagcctctgcatcatagcacatgtaagttcaatccttaaaattcagaaacatttacacagtttcaatttgatattatccatatatatgagttagatagtggaggtttaaataatgtgatgtactttagtgcttgaagaggtttgattggaaatgaggcgaaagaactctctaaatcatgaatatcgttcagttcgtcctgaaaagaaaaaggaaacaaaaaaaagataagttgagttgacaagaccacacttaaaactttataaagattcccaaaagcaggtagataagagtatagagaatcgttttaaataatacatcttgactaggagctgttgctgagctgctagccctttcaggggaaagagcagattcatcctgtctttcacattgcttttggttgaaatcgggctcttcagcatgtgaagtatcatcatctgaaatctataaggctaacaatattagttacctaccctttataattaactaaattagaaaactattaacttacaagggcagcttgagtttttaggtcctcgagattgaaattccaagcgcttattccccttatatactcttgctgcagagaaacaggaagtctcagttagatgtaaaaaataattcaaacacacaatcaaactacaataccagaagatatttcttgcaattctcaggctaaaaaatttgcagcttaaagacatattgcagggtactatcaagcagaaggttgaaatccttgcctgtgataagtgcgcttcatattcagatttgttttgcattaggagatcagcttccttcgactgaaacaaagaattcacatatcaatcaagatttttcagtaattttcttcccagcaagacacagaataagttcagaggatgggcttaagacctttatttgtctatagcgatcacctaatggaggaagaccatttagaattgttttaaccaggtaatcagctggacgtgcatgtttgaagaaagggtgtttcaaaagcttttctgaagttggacgcttctttgggtccttcaccaggcatgtacccaccatttccttgaaggcctgttaaggcaaggcaacaattaaggtagaaagaaaacacaataagctatatgatacaaccaaattgtgaccactcacgcactttcgagaatcttttgtctctctcgtagtcaagtccaggaggtgcattttgtaaggtcatcagcaaaacctatcaatgattaccagtaaaggaaaatacacaaattgagtagcatagagcagtaaagatcaatacagatcaaatgacatcatcataactttaccttcattggcggatatttggaaaatggggcatgaccatgtgccaattcaagtgctgttattccaaatgaccatacatctgctctgtgacagagaaatatattagacaaaacacctgcgtaacatggtggggaagtgatctttaagtgtaaatgcagaatttagaattttattagtatcagcttacttgaaatcatatccatgtagttgctgcatgacttcaggagccatcctgtggagaaacaagtattaatcagaaattttgtctaagacgtatctgcatatgcccagagaacatcgcataactaatgctgaaagaagtaccagcatggagtgccaacaaatgtatttctggaacgttgtctatctcccgtatcaaacatgcaagctgatactccaaagtctgctaacttaacggcaccattggaatccaataaaatgtttccagcctgccaaggaagccatgtgtattgataaaaatgataacacattcccaacactcaataggggagggcaataaaccaaaacggccttcatccagatataattgaggaaagtactatactaaaagggagataatgcacgtagataccttcacatccctgtggatatgcccatgagcatgaagatatacaagagctttcagagtctcacgaagtaaagtagcgataacaggttcctcaaatccatctggataggaagacttaattatatggagacaagatcctccagccatgtaaggcatcacaacccaaagctggtgtccggtggtaaatgagcaatgagcttgcaacacatttggatggttgatcagactcattgtttgcacctctctccggatcccatcctacaagcaattcagttcctattcattcagattaacagagacaagaattccatggtgttcaaaactgcatctgaatctttacatctagcttaagctcgtaaaactttaacatgaaaataaaaataaaaagagaagataagatagaaacatgcaactacaatttgacagactgatctggagttctctactttcaaaggcaattaaactacaattggactcgctattagtaaagcatgaagcaggaaaacaaaagtaagagaaaactaaacttctatctttgatgtaactccaggaaatagctagagactaggaataaggaagttgttctttcataattcagaataaaagttcctaccagatcgttgttgcacttttccagatcaagaaccttgatagcaactaccacattaagcggtatacacaaagctctatgcacagtcgcactgacaccatctccaatttcttcccataacttgtagtcttttgcattgagagggaactttttctctgaacccgattccataatttttactttataatc

SEQ ID NO: 37618 - DNA, 2646 bp, Arabidopsis thaliana landsberg
  unsure (1)..(2646): unsure at all n locations
ccaaagatagattctaatgtttaagcttgagtccaaagtgtctgtcaccaataatatgaaatacttaaaaagaaaaacaacccatataaaacctatctttagacattgaactaataatatatgacgatattttgactagcactcatatagaacctatctttgaacattgagctaatgatatatgacgttgttttgtactacactcatataaagcctatctttaaatttgtaggctttcgatttaaatagagacactcgtataggcccatgtaagcccataagataagaccgggatagaccggttcggttatctcaaaacttcctcagctggttattagtcaaaccgttcttcttacaaatcgaagctggaagcctggaactagccactgcgatcggagaagaaaaagctcgagagacgccatggaaatttcccaagctcgttcaagcttcgtttgtcttcttcttctgttactctccatgtttttcgttccctgcgtcttttccaaatctcctcgtcctatctccgtaagtttcccatatatctctgtgagctccgttgggaatatgctttactgattcttccggagaaatcgaatttgtaggatgtggagatcaggcagaagaagagcgaatgctacggtgatatagagaggtgagtccactgggaaatttctatacagcatctgcaatttctgttaatgtacttgcgatttggttcgagtagtctctcttggtgatttgatttcaaccattagggtatagacgtcagacacgatcaccggaattggttttatttgatatacttgtattgagaatttttcattattggttttgatccttacaaattgggaaagttttgtagcttggaagatattgtgaatcattgtaggattagttggctaaacttgttatggttagcaaattattggctctatcttcttctttactcacttttgtgtgttatgtgttgtggtaaattaaacagtgggttatggggttggcaatgcaaatcttctgcaatagcgaaagagaattgtgcgctgcgatgcctttctccggtttgctatcaactcatttatgagagtgatccggtgagggtttgtaaaaagatggttatgatgattgagttttctgtaaatttctgtctcttcttttttatgaatggcttgttttgtttgttgagcagcttgaagaaggtgaaaaagatttgattaggagccaagagtacaagtattgtatgtacaagtaaggttttaaatgataaatttctctcttaggttttactacctgtttttggaactttacaatcattgtagttctcagtagctgaggacaatatgaagggctggtgatgtgcaaagttcgcttagtcaatatgaatcatctatatatctatctattcttttcaggtcatcactcggggaaagctcagagggtgttcgaggcattttttgatggtatcaaataagactttctcagtgaagacatttgccaaaatctgagctaagctcttgaatttctgatcagtagtattctgctctgtcgcgtttgaagccatgtaaggcttcttttattataaacctcaatttttgggttaatgggtgtttatatgaaacgtttacgtttatgattggcaaatccactgaatcttgaaaccattgcacaaatcagtcttaatacgcacagattggtcccagttctcttgtcatgtatcggaagtccatattattgctggagtcttgccaatacaatttgacctatatatacatgcacgcagcataattacacgatatgggggagccacataaatctggatcttgataacaaatttgaatcattcatacttggaatggttactatatcttgtgtgatcaagtcactgttccgatgcttattccaaagaggacttgctttgaaaactctgtctgctgggagtcttttgtagctgtagagccaaatcatagctagactagtcaaagtttcgtctctgttaatcttaaaacatcattttaataggtgaaactcaagtttaagctctttaacttctcggtgcagtatgcgccaatattatcatcaagagcttgaggcgattcacacgggcagttagttgaatatgtttgcattttattgtttttgtcctaaatgtgtagcattagtgaaatatttggtcgatgagaaattttacctttagatttgatttggttaattgacagaagcaaaaagtgctgaaaagagttacaattcttgagatcaaaacatccaccctaaaatgatttctaacgaatacaactcatcacattcatggagttgaaccctttatcaagtgtggtcaactcaagacagttaaagacgctcaccttgctcacgagcaatagaagccgagaggattccaagatctcgattgagaacagttaatgcagcttcacagtcggatacgattctggttacagaggatggctctccagcaactgtccccgaggatccaatcgaaagtgctgcatgtgagtctcttaggttcttcaaagttccctaggaacgtgttgccaaagcgatttgtgtatcagcactcaaagtatcccattatatggactcaatgataaacgatacangcagaggtatacagatagaaggagancaatggggccc

SEQ ID NO: 37619 - DNA, 2486 bp, Arabidopsis thaliana landsberg
ggtcgttataaagaagaaaatggagaatccacgccctggcttggtaatatgataaaccttatacagtattgcattttatgacaatgatgttatttagatttaatacatttaattttatgatctgttccaaccacaggaaaaagttagacaacaaggagaccatgaatgtcttcaccgggacatgatagccggattcgcgacatgggaattcgacccgactgaattagaaaatccgtttgcggaaggcgaaggatcggtccacgtttggcaagggatggaagacagaatcattccatacgaaattaatcgatatatatcagagaagcttccatggattaagtaccatgaggtcttaggttatggacatcttctaaacgccgaggaggagaaatgcaaagacattatcaaggcacttcttgtcaactgatgatcatctctacacaagatgccacaaaaaatatagcatatttaatagattttatttatggattataatattatagcatattataagtttgtaagtaagatgaaaaccacttgaaagtcattaatttactataaaatacttgttatcttccactaatagtcattaaatcgaaccaaaaatgtcaaattggtcaaagccgtgtgaaactgagagagaatgatgacgtcatcaatctgtgtacataaatgttaatggacgtagcaaaattcgcccaaccaaaacaatccgactaaaagggaacttttttttttccgtctgatctaaaacaacaacaacgaaagcttgacctcgttgaaaatcttcgggtgagatatttttcaaagctttggtctttgtctgaattacgctttttggattctccgagcttaataatagctaaagttcgtttctttgggttcttctccgcgattctagggtttttccaatttctcgccggcgttgaggaattttagggttttcgtgttgtttgtctttgattcatggcttgggcttagatggaaaggtgagaatttctcgaaatcgttcttcaattcttgagaattgcgattttttggtctttaagaatccgttttactagtttcaaagttaacacctttattgctactatgtgcttcccttatatcgctcttgtggtgtgcgtaagagtgatgatgttactgtatttatggattaacgaaactctcgtttttttattgcaggtttgagttgcttttggagtgaagcaagtagaccaaagggcataatgctaggaactagctagaaacagagctatcctggtaggtctgtaagcaatcaacccaagacatacaacagctaaatgaggcatcaagttgatgtcagttagatccgagatcacacaaaagtgagtaaatatgcatgtagagatggaactatctcgattaaggctgccttgaccagtcaccgactcgatatcatcattgcatggctgtcgaacatgttcaactcgatatctgcgttttcaatttattctaattgtttataattttttgttgttaaaatgtgttcaatatacataaacgttcaaaatcttagttacatggtagtgcagattaaagaatatagtgactaacaaagaaaaaacttttttaatccagatttgcctttttctgtttggtaaaattatatatatttaggttttgatcaaagtggatgttgctcgtgtttattccgatatctaaagaaaatagataggttccggcgagaactccaaagagatatcatgcgaagaatttacggggatgaagagtttcatctagatatagggaaaatttctggacttgaaaacccgaatcggatcccgtccaaatttggaggtaccaaaccaaacagaaataggcctaaatgccagaatgggtataagacttcaatatccgaagaaccgttaccaaactcgatatggatattctaaagtatctaatatacaagtgtaaatctaaaaatattagtatatatattatatctctaacccatataccaaagcttacagttatacacaaaatttgaatatactatatatttttgataattgggatatttttgggtagattttagtaaaagtaatcaatgtttaaaaactttcagcggatatatttggatagatttgggcaaaaaaatcggactgcatttgatacgtatttggttttgattgcttctccatttaaataattgatccgaacccaaattaaaaatactaaaccaaactggaaccgaattttaaatataacggaaccctaacagaatcgattcgaatccgaacaggtacacaaatgcctagggttctaatatatagacctatatatatttatatataattatacgttcacatcgatcattaagttattatgttattattaaatgccaagtggtagaactatgttattattagtcaccttacggttaacgagttactaaactaataattaatttcatctcaaagaacttcaaaagaaaagactttccgtagttcatttcacgtttt

SEQ ID NO: 37620 - DNA, 3036 bp, Arabidopsis thaliana landsberg
  unsure (1)..(3036): unsure at all n locations
ccacacggtttgccctacctgttttctccccaggctcaacttgacatctatctcccaccttaacattggaatggttaaataaattagaagcatagcgagttgagaaagagcagaatcagagaggtcaggtctcacaaagttaacaaaaaaccatgatatttgcacagagatcttccatatacaaaaagaatgtttctgactaaccttgatatttgcgcagagatcttccatatagttctctttcgtctgttgaaaggataaaattggaagaagaaacataagaacatttgtattcttgaaagacttagtcttaccccaaatacttctccgcagtgactaagctaaaaacttcagtttcgctgaaagtttaacaagaagcaacatacaagtttggcttatattgatatatccgtttgtcataccttagcctcagcagcaaccggattttgagaaactctcttttctttgaatttcctaaaactgtctggaatttgaacacaagaacatacaaccatcaaacgaatccaacatatattcaaagtcacttgatagaaaaacttgtctcctttgagacaccgattacaggtagtagagaatttaccagttcgtttagcataatcctcctctgagatgttatacttctcaaccagtgacgtatcttcaagccagcctccagttgtgaccgaggaggggtcaagatctatgatgtgtaaccgaaacctattgaaagcagcagaaaagaacaatcagatgaaatgataaaacaagaagccatgtcatgtaattgaatgccatctatcaagattacagtgaacagagatctatttagtcaaactggctccaagttctctaaattagccaaccttttgcaatctctacgagatatgaagagaaacaaaagttacccatcaaaaggagagaagaaaccaagaggtctaaaatcatcactgagaactgcaacctttgagccagagtcatcgtagagctctaaagccatggaattaacagatgtaccacatttcttccatagcttttctttcacagcttctacactcatctacagaacaaaattcaaacaaaaaagcctttatagatagcactacattgaaaaacagttggaatcagtactgaatgtaaaacgagactcacttgcggagagaaacgagcgtccgcagagaagcttttaaggttggcgtgagtaatgtgtagatgtacagagtcatctccttccaactgtaaacgcgaagttgccattttttcacctctagacctgacaaaaaagctctgttaaatcacttatctcaatgaaatcaaaaaaaaattcgactttctcgaattgggtaacaaaagacgcttaccttcttagctatttctgggcaaagagtttgacttgtcagcagaaatcgaatcgaatctcgccggatcggagacgcaccgctgagaatgtagctgagaaacgagagagacgattaataaaacgacgtagttttctctagtgttcaaaaggtcattagactcgttagatttagccacgtgtatagtcgcacgttaaacactgtgtactcacccgcaggttagtataaatcctctaatccctggtctaaacaaaaaggacacgagagaatccgtgaggaggaggaatattccggtgatggctgaagatttttcggtggttgtgttggcttctgatctaggaattgacgctagacccttcttgacgagaagcgatgacgttgatgaacaagaaaactggcatgattgtccccaatacttaggagatgaagatttctctgatctcgatcttctccagttctttactctccagggcttggataggtccggtaaccggattttccgcatcgtcggaaagtatttccctggtaataactctctcttcttattagttgaaatgtgtcttaattaaaaatactgtgattttgggacaaagttgctacttgatcacaggacatgttgatgttctctgatttggcttattagattagcgttttggtatttcctgctgctttagataacgtctggtcatgtaatgtccacttcagtctcttctaattgtgtgtatgaaacgcagctcgtgtagtgagtgcggagcggctgaagaagtatatatcccagaagataagcaaccaatgtcctgagggacccttgtgcttggtttacatgcatagcacagtccaaaaggacgacaattcaccgggaattaccatcttacggtggatttacgaggaccttccttcagatatcaaagacaggcttcaacttgtttatttcatccaccctggtcttcgttcaagacttgtcattgccactcttggccgccttcttttaagtggagggtaatcatttcttttcatatgtatcagttgatttatatacaagttatttcaaacttgcataatcgaatattgaaccctaaagtttgaagctttcatgatctaataaactctggcgtctaggagtattgatcttcttttgagcttgtaacttgaaacggttatgggatctagattactttagaatcaacaactgtggacttaactgttttgtcaaaacaatatctctttcaacattgcagactgtannnnnnnnnnnnnnnnnnnnnnnnnnnnnnnnacctttgggaggacataaagaaaggcgaggtggaaattcccgactttgtgaagaaccatgacaatgtgctcgagcatagaccattaacggactatggaatcgaaccggatcctttccagttaagcgaggttcaatcttcatcgttctctctcaaccgctacgagaacagatgggtctcatagtacacatttgctctttgttgagctagaacctctatgtttttgtctgttgtatagagtaatctaatgtactaaacactcgtgtatcatcaatctgctttttgattgattttggaccgaaccagtaccagtattagatttgttttcaaaaccgggtcgaattttgctctttgttgagctagaatctctatgttttaaaaaggtgttaaaaatggaaagaaaaaac

SEQ ID NO: 37621 - DNA, 3083 bp, Arabidopsis thaliana landsberg
caactgaaagtgatgtgcagttttgttaaacatcagatgcgaagtaaaacacagatgaaatgagctgaaaagatctgaacttgtgatggaaacgaaagtttaaacctttctcttcttgcttcatcttcttttcttttggaacaaaagacccttcggctttagtaacataatctgactttgattttgcatattgtatccgctgcacccacagagatcacacatcacgatttgaataataatattgcatttagctttttctagtcttttacttagtaatcacttgtgtaatgatataccctcaacatctaatgtcgttgtacttccttcaattttatataacaacaagtatcagcaagtaaactcaattttccctccaagtaaatctctgcaactttctaagcttctagtctcacataacaagataaaatcatttttcggtagcgggatagataaacctggaacataagagaggaaaaaggtaccataggcttatcatagaaaggaaagttctgcatctgacggacagcgttgctagcagcggtgacttcagtaaaaacaacccatgcttgtccccggagcttaggagtctttaacgcaaccacatcaagtaatcttccaaactgagagaacaaacagtaaagagacctcttcagctctgaaaaaaacaagtggaaacattaaacaatgatctgcttgaacagcattactcttagacaaacaaaagcagcagctaaagaacttaaggtcattgacttcaatcaaacaatctaaacaaatttcatggcaaaagcaatcgcctttcctacttaattacttaaataaagcacctttgttagagtatctctagttcaggtctattaagattagacagaaattctaaatccctaatacttagaaagataactctaaatgcatctaatctaaccttcgtaaacatcaaattaagcaactttaaactcagacaactcattcaagagaagctcacacaagcattaccaagctacttaagcattgcaaaaactcttagaaaatcaccgatgcaattatatgaatttcgtaagcattaccttctttcttgatcttctcattgatatgttttatgtagattgactgatttggtggtatatcagccgttaacatctttcaactgagctccgcgaagacgacgatggtcgatggtcacagccctgagaaaatttagcgagccctaagagccaagaagagagaagaaatcgtggcgtttccaatttacacaaggcgtctaatttgtttttttatgtaaacatcttaccgttaccgaagagtaaaacaacacgtagttttataatattattaaaaaacgtctggacgttcgaaaggggattttgatgttttgttaggccctatctctttcccttttcttcgttcgcatctctatcttcttccgttgtctactttttttcgttaaaccctacgattcttctttttttcaacgactgctcggatctttctcagtagagggaaccatgaatccctcactcgtcaccgccattaacgctccaatttcaccttctcctcggtctcctcttctttctcacttcctacctactttacctcaccgtttctccaagtctgagtgtctatctcgccgtcgttatcgagtttcgttccctcgtagctcagctgcttcctccgaccaactatcagtatctacgcaggcgaagaatcccggtatccatgggaataagaaggagctcactggattgcaaccgattgttgagaaaatgacaccgccggtgaggctagcgacttcagctgttgttttagcggcgtctttagctactggttacggccttgggctccgtttagccggctccaggaatattgcctttggtggggctgctgttgctggagccgccggtggagctgtcgtatatgcgttgaactctgctgtaccggaggtagctgctatcagtttgcataattatgttgccgaattcgaagatcctgcctctgtgacgaaagatgatgtagaaaagatcgctgataggttagtgcttcatttaattgtcaatttgtgtctgggatttataaacaaaagtttgcttaaacgatccttcttatatgttgcaggtacggtgtcaacaaaggagacgaagcattccaggctgagatttgtgatatctattgccggtgagtcaacaaaggatactgtgttcatcttttctcttagtgtggggaattcattagtaatctttgcatcttaatcttgatttaggtatgtaacttccgtgcttccaactgaaggacagtctcttaaaggggatgaagtggcgaagatagtcaagttcaaaaatgctttagggatagacgaacctgatgcagctgccatgcacatggaggtgctttctagattcttaatcttcatttgaattagccgttagcctctttgtagttgatgcagaaggatcttgattgctgaatcaccaattccttggttttgtttagattggtcgcaggatttttaggcaaaggcttgagactggggagcgtgaaggtgatgcagaacagcgtcgggtgagtcgccagtccctagtatttgttaagtttattgtaggattgttcgaaagagagcacaagcgtgatcacaagttgtatgcttccagtgcaggcatttatgaggcttgtatatgtttcagctcttgtgtttggagatgcttcatccttccttctaccttggaagcgagtattgaaggtcacagatgctcaggtaggcatttccaatttttttcatacttctgattttgcgcaatagttgttttatggaagtttcattttggcaactcactccttcttggtaatctgaagttctgtgctaatgtcttgacctcatttctaggttgagattgctattcgtgaaaatgcaaagcagctgtatgccgaacggttaaaattagttggtagaggtaatgttgttcatgttttacattttgagatgggaagtaatgttacatttgtagaacgggtttgagtttgcttgacttggttatattgattattgtggcacttctttgtccattgggttttgtaatattagtttatca

SEQ ID NO: 37622 - DNA, 2858 bp, Arabidopsis thaliana landsberg
atgattagttattctagcttggatgttccattaatgacctttaatgacacttggttctgttttcatcatgtccaaggtgtatctggttcgatcgtattgagacatgggaggttgtctgacctaatagcccaacttcaagacttactcaatggtgctcaaggagttgaaagcactccttttaagtatgacggtgcactccttgctgctcaggtatttcattttcttttgctctgtaagcttatttttctcatcgatccaacataaacaatcggaatagaaaataattcatcactctttatcactaggccaatactggactcccctcttagtgacataatttttgttgtctcttgataaccagattcgacagcttgcaaacgagatcaaagaactaactatgaccaatccagttaccatctttaatggagattcaaactccagtggtatgtacaagtcttagtttctcataaaatatttatgtactacttttgataatgtaggaaatgtttcaaatatgtttattttttatgagaaacagagaatgatataatctttgcttttgctcttgtaggctatgcatcttacctggttccagcggctgccgttggagctatggggtactgctacatgtggtggaaggtgtttatctctttaaaatctgtctatttttctctatgtttcatgtgtcttttgttatagttttgtaacatgtggtttaccggtaaactatatatcattgacttctaaggtttacccacattgcagggctggtcgttttcagatgcaatgtttgtgacaaagaaaaatatggctgatgcggtagcctctgtttcgaaacaactagacgatttagaaaaacacattagcggtgaacaaataatttttttgagaccttcctctgttatatattctatttcattatgattttttgacctagtgcatttgtttacgcagtcaacaaggaaacatctttctcagaagctagcgaccttggattggaaggtggaagagcagaatgagacatctaaaatgatcttaagtgatgtaaggaacccgttttatttctcactttcttgtattgatgccttattttttccttagacttaagattaggatacttatacattcgtctgagagagatctcctcttgtacatttaacatcttagaagaatttaaaacacatttaggaattccaaaagattgtagagtatttatttattaacgtcctatctctttggccctgaactgtttttcttcacatgtacagtagagtcctttgtttctttcaaattacagcttgattctcatatctgcgatttactccatctatgcctttctttgatattcattttaatgctaatgctcacatggaatcttgcttcaattcaggttactgagatgagatcaagcatttcgcaaattgggtttgattttaagcaacttaatgaaatgatttctggaatagtaagtctcatcattgccctctaatatgcatcattgccctctaatatgcatattttaaaggggctaatatatctttactctcttatatgaaatttttacaggaagggaagattgaaagtcttgaaagcaaacaagtaatttgtctacaaccattagatactacaaaccacttcacgctatcaattttcttaaaactaattgatctcaaacagatattttttttgttaaaattttaggatgtgaccctctctggactatggcatctatgtcaagttgcaggcgttaaagacagcacaagtactaaagtatttcaggtgagtgttaacttacaaattaagtgaaacgttttcttacttatttttcacgtagttataggccttaatgaaaaaaatcttgtttctggctttgtggtttaggatgttggtgagagattacctattgatggaaaaccatccactaatacttctctctctgtaagaatgctactatacctttttccatcatataaatgtgcatttccattctgttgacgcaaaaaagttgcttatagtgaaaaaattcaacgagatggttgatcttgaatttgcatatattcaaggcaatctctcatcaagcttattcgaataaaaattggaacctgaaaatacttgtggtagtagctgttatttgatgatttcatgtcatgatgtttctttggctttctaaaactataaaactatggaaactccaaggtctgcggtttctgacggaaggcaaagaggatgcaaatgtaatacacaagccggttatggcgaaagaaattatggtgatgggggaaaaaacaaaagtcactgcagcgggaagaagcagtgttcatagagcgtttccaggtggaatatcttgggtacgggatgtttcaggactatcctaatattattttggttgatatacaaagaaattgcttgtattcgtcccaaattctgatactgggactggcaattattttttcatgtaaaaagaagaaaaatctacatatgttattgcatccaccaacaatttggtttgcccctaattatatttggtcttgatgtttgtaaagaaagagtgtgattaaggctttcacgtatgttgatgtcttcattgatttggacttttgtgctcctttttccttttgggtttggatcaattttgtttgtgtagaaaatagaaagaactaccacagaagacagaactactgtcttgaaacatttgtttcgtcctttctcgtaggattaattgtctttagttggcagagaaataaaatatttcgctcttattgcgccttggcccaaaatagatatagagacagcccaaatttaatttaacccgaatagtccaaccggtgaatttgacagcaattaaaaaacccggcccg

SEQ ID NO: 37623 - DNA, 1295 bp, Arabidopsis thaliana landsberg
ctgaattccttgaatgcttctttttcttactgaaagcctgaagaagagctccactagtaagcgacagatttttgctaggtaccgcatcaaaccccctctacatatgttgggtctagattcacagaggcattagtgacaacttcatgtgctagttgcattgccattcctggtcagagaagtaagttagcagacgagagatcttgattttcatcacaccaacctgagagatatgaaaattcaagcaaattaagatcttgtgaaattacctacacccatggatttgagttaggttgaagtgattgagtagagcttcatcctcaattttggcaattaacatatcctgaagtaactactcaccacagatgcagcatatggtaagagtttggctgcaaaatgaataaatacgaggatgatgtttagcttccacggcacagaaaatgtgttgtaacaatcatatggacaatgccttcctgcacatccaataccaatcattaatgacatgagcagaattagtgttggtcataacaattagcaggtctagtaagtaatgattctgctaaaagtaattcaaatagaggaactaatgcataactctacatgttaaacatctaaatcgaagtggtaaaacagtcatggcacaaaaccaataggaatgatgctaacttttacttttataattccaggttgacttcaagagtgttatggaataaaaataatcttcaaaccgaaagggcaccatctagaggacataatattactgaatcaaaagaaaaacttaaggcattcttaaatgtggcacttaccaatagtgcttctgaagaatcttcatccaataatttaatgataggcaggattagtttcgaagcgtgtgaaactgcatctttcttcgtattcgaaaatctagacagcctgattgaatatttaaaaaaagcatcttagatttccaaaagtcctagttacaaaaagcttgaaaggcaatcccaaggaaatgatatcaacataagagtggaaaaatgatgtgcaatatgacaaatctcattctacaaaaaccaaacagttaacaatagaagtaaaagaagctataaaattacagtctccgcagagtacatcattcatagctctaaacactaaatcaatctgatgtacatagacttcattatcaaacacgaaacagaggaaattgaagataacgaatagcaaaaaaaaatggaaaagccaagtagagcagacacaagtttgtccataccttgtaagtagatcagagattgaggtacatgaagccactcggacaattc

SEQ ID NO: 37624 - DNA, 2375 bp, Arabidopsis thaliana landsberg
atacttgtataagtcagggacctaatccaaatatattattttggtacgttgcttaaaacatcgcggagaaccgacccggctgaacaacgtcaagtgtttggacccgatcaaagatggatcaacccgacccgaaaaatggctctggtctgattctctccgccactgaaccgctgcgattgtttctcgctctcgcctccggtgatcgtcgtctctccgacgagctcagaggaattgcttccgatcttcgctcgaagaacaccattccgtacaaattgctccgcgctatatggaccggatccgatccgtcgaccagaccggatttgttgggacttttctccggctccaatttcgtcttcaccagtcccaaacccagagaaaaggtacacgaacctccatttctacatcaagtttctttgctggggaatttcgctatcaggctcatttaacctggaatccggcgaaattggacctaattagattctgtttctgctcactaatctgctgttaatagtttccactgaaagatagatgatactgaacttgcttgaacaatccagcaacaaaagagatttgtcttttggtatagtttagagaaatttatggaagatttctagttatctcttggtcaaaactagcacaaaattgtggtttcatagttttgtttgattcatattcaaatccaatatgcacaattctgttgaattgattggaaaagttgagcataatcgaagaaacgtcgccgcggttctattgagtgtaattcaaggatgcttctgggtttctttctttgaagttttccttatctatgtttaaacctcttcatgtctcgccatgtttgatttgatctgatttttcgattgatagagcgaagaactgaaactgagattagtgaagctcagagaaatagcagagaggaaggagtatgctgagcttgttaaagatataacaccaaagaaacaagtcgaagagcctttctcttcttacaaagaccagctcggttttggtaagcattgtcgctcggttactttgttcttggaaaagtattacacattactgaagattttgcttttcttgcaaactcgttttataggtttacatgttggtcttaccatgttcactggatatttggttggatacgcttccttcagagctttattcaaccgcaaccccgctctggtacactttgctgactaaaacttcaatctctagttaaaatattaaggccaaacatcaaatgtcatacaaatcatagtttttatacatatgatttcctcgcaaatttatcgatatttccggttcaacatgaaccgttgaggacgggacacagatctttttgcgcttattttcattagccaaactctagggtgtggccgaagactaatctatgatgtaaaagagaatagtagaaaaggttttcacattaattttatcaactgtaagaaaaaggtaaaaaaatgtttccttcttattccatggaaaacccaaaacacaaaagtgaaatgagaagaaactttttctttaggttagaaatgtggaaaatatttcctctagtgatcacttcccattttttactgttttattcctcttgtttttctttctttgattgcacccaatcaaacctttatatgattttatttaaattactgtagtacattcgacaaaagtgaaattgactatctagactctttagtcttaatacatcgagtgttatggagatttttcgtcatcttggaaagtgagtcaaactttggaatatccgtcaatagacaatggtcattctcattaatgttttggaacattgttgtagtcttaatttccgataacatattcaaatctgaacataccacatcattggctggagacgtactggtgaatcaaaagaaattttaaagaggtgtacaacttaatataactatttggtaaccatatagtgctaaactagtgtagaaatgcaattacaagtttaagcatcgatggtaaactagtttggttgtgacgacggcaaaaatgtctcttgggacgatatcgttttatcgacgtaatctatatttgttctgacctgtctcagtgtctcacctcctatgaagctaactgttaatatatatatggcatcgtcccccctagacctaccgagtcacagcgatactttcatgctaccacagacaccttgtcatgatcagattcaagacatgtgaacaatcaaaaataagattaaataaaaatgctggaaaattttaattttagtttctgattttatttttgcaatacaatagaaaataaaatacccaaaaatgctcgaaaaaaagttacaaacattccaagtttaatgaaggaaactactgaataataatgaaaatcaagaaggtggttaaaat

SEQ ID NO: 37625 - DNA, 3443 bp, Arabidopsis thaliana landsberg
gaaagcaccgaaaccagcctctgatttagctggagaaatcacagctgcgttgcagccgcctcaatcgcattcaaccgatttgatcctagatattctaaactattgctcgataatgctttaagaacttttgagtacgcagattcacatcgaggttcttacaccaataatcctgagactaaactagctgtctgcccattttattgtagtgtaaacggatatgaggtaatctctctatgatttcttgaataccttatgtaaaattagatatcggtctagattaatgtttttagttccatataaataatcatgttgtttcatataggatgaattattatggggagctgcatggctgagaagagcgaccggtaaagattcttacattaaatactttagtggagaatcgtcaatcttttgggtcaaattccaattacttcgagtttggatgggataacaaagttgggggcgtcaatgtcctcgttgcaaaggttggatccaattctctatgatttttaaaatgacgacatcatattcataatacaataaaactcatgatcgtaactcatttatactgaacatacaagtaggagaacttgggcatgcatatattattcttcttaaatagaaaaatgtatatattctggtataccggtcgagaataaaaccgcttaattctaaaccgttagagctgcttgttgtttatataggaagtatttgagaagaatgttgctgcgattgcaccgtataaggacacagcggaaaaattgatttgttcgttttttctggaaactccgggtgcacatatgagttactctcccggtggtcttctttacaaacccggaagcagccagctccaaaacaccgtcgcattgtcttttctccttctcacttacgccaattacctctccaaatcctctcaacaactccactgcggtagtctcaagatccagccgaattctctccgtcgcttggccaaacgacaggtatttaacacaacgcataggcgcatagcaaatatagttggttttgagaaagttcatgagttatcattttacaaattagtggtctatttaactaacttgatcggtttttatggtaacatataggtggattacattttgggagataatccgatgaaaatgtcatacatgatcggatacggtaaccgatattcacgacaaatccaccaccgcggtgcatcctcaccgtctatcactactcatcctaccccgatcaaatgctcagaaggatggaacattttctcgtcaccaaatccagaccccaacgttttagtaggtgcagtgatcgggggaccaaacatagatgacaaattcgttggaggtcggacaaatgcaagtgagactgagccgacgacctacatcaatgcaccttttgttggtctcttggcttattttaaggccaatccggtttgagacgattctgcctttttaagatttgacagaagaaagtaagttgtattaaacaacgaacagaatctttttttttttgtgtgcaaaacgaacagaatctaaaagtgagtatttttgtatcacttgattcatataatgaaagaaaaactaaaaaaagtattaacggatatataataagactctttttattttaaacaaattggggtataatgcaacttttgtcgatgtttaagctttctttaagaccaaccatatgttgaattttgactgtgtgttgatgaaataaaatgcagaaggacaaatacattaatgtctactgtcacacaatttgggatcacattgggccaataaaaagtatgaggcttttctgtaaatctaaaaatatttgggctattaataacaaaacaaaacaaaaaacaagtcaccacaaaaacggcatcgtacaagtttatccaaacaatttaacgtcgtttactcttcagtttctcagagatttcaaaattagttttttttcttcttcttcttctgaaaattagggttttttgggggattctcctgtggataaaggttagtcatttccttaattggttaattgaattgaagtacccagtaatccattggacttagtcatggatttaggtgtgctcagaagaattttcgttttcctgcttgcgtatttgacgtttatactctttgattcgattcgttatatatgtttattctgtgattcttgtgcattcgaaggtatttcactttttttgttgatgcttctaaatccaattcacatccatgtaaccctagttttgttataattagtgattgaaaatagtgtatttagtttcaagttggtattttaatccatcccgggatgtcttgtaaatgttatccctgagttctctaacatctatcataacttcaaatctctgctttgttgtagccatggctgaacgagaagacgcagcagaggtttctctttcagtgagaaacgaagaagatctttctcctgaatgtgtagcttgggctgattcttgcatcatcagttttccagatgattcagacaacaataattggggaactttaagagatgctttgacagaaatcatcgatatccatcccgagatgtttgttttttcatcaacaacgggaacaagaggtgtcatgtctccagacgaggttatgactgaatccgagactattgatctacggacatttgaaccagaagctgtttcagcgaacagtagaactaattcatccaatgaagaagttagcgagattatctctatgctaacttttgaatcagacccgtcaaagaattctttagaagattattattttccagagtctatagcagagaatggaaaccgtgaaccagcggacggttctaatacagatcttggagatgtaaaaagcatagaagaagatgggtcagtgagcaatggagaggctgaagtagaagaaccagcgtcagtatcgtctcgagtattcaaggatgatttcatgagcacatacgttgaagacaatgctgacgactgtaatgttacagaggatcctgtcaaagtaacttcacaagagattttcaaagtgtgggatctagaggttgtgggggacaatgatgaggaagatgggttggtgctgcagctgaagaaggccctcgatgagtcttccactgtccagccccttccacagccactgaatgataatcaagttgtatcagagaagagcaatatcgatgatctgatatctggaatatcggatctgtctcttgcagaaacttttaagtgaactatgtgtatgtgtttttttttgacatcagaaactctcttttgctttactactccttaaccgacacaaaccgggtttgagatttcgaaatctgctactagaccagaccgaaaggtttacagggtcaatttggtgcctacacatccacttggccacctgttgtgcaatggtgacgatgagattgcagtgtctctcgactgttgatgtagacttcacaatctcttaaaacgttag

SEQ ID NO: 37626 - DNA, 2621 bp, Arabidopsis thaliana landsberg
ttcatgaagttcttctcgctatgcatggaatgttggaaatattctaagccccaattcacaattcgattcaaaagttatatgaataatggactagttataaattttaaaaatctttccaaatcattagccattcgcaatcacacaaatcacaccccgttttgatggctataacttataattatcaattgaagtcaatgctcaaaagttgtctctcactcctcaagaagttgtcttaccctttctgttttctttaccgattcttgttccactttatatacataatattgtaacaccatacaaaacataagtgcattttagtgatataggtgaccaaatcaattctgttaaacttcttcgtatgtattaccatatttctaaaaccgaagtgttataattcatccccactaacaaatcacaatgtcctcgtttcacaccaaaattgtcacccccgatggtgtgagtcctcttatctctatacttgcatgggttcaactctgatacaatttgtaacgaccggaccgcccctaccaatgagcacccatgttcactcttggacatgtgggcccacctctgtccaacaatcacccatcctgaaattgctccggcttaagcacgcttaatcctgcagttctttcagaacgtttgacggaaaagatatttgcactttgctgacataggtgggtaaatttattctttttaaacctcttggcatggaccaccatattcctgaaaccgaggtgttacaaagaaagataactgtcattcttactttgtttaatttaccaaatatattatgtatcaactattgttataatttctctatatatcaactatcttaccatatttatataaatattattcagatatttaatatgttagcacgttatattcaatataacatgttattataattttaatttgattatttcatattaatttgtatgatatagtaaatggtttaatacgatatatataaatttatagtaatactatactagttaacatgttaattaaatagttatctacataaatcataaatgttttatgcaatctaatgataaatagtgttgtaaatttcggatgaatagtatcgtcaaacaattgatgaacaatatcatacatacagtatctgataataaatagtgttttgagataatgacattctggtaaataaatcaaaataaaaaggataattatggctttaattttttctctttcatgcttacctaatatttaactatctattgtaaatatctaattttcaagtttttgagacatatgtattaatatagccaaaaataattctaaactaaaaatatgtatcgcgttttacaattgcgctgcaaaattacaaatctgccattgtcggtggatcttcactccaactcactcaagcttcaatcactcgactcgggccaagcaaattcactgatggatacacaaatcctccagggtaactagaggtgggtcatcagatctctagggtgttctcattcttcattcccagatccgtagaatagaaaatgtttggccgacctgcgattcgtggaggaggattccgcgcagagaatctaggtcaaaacgcacttaccttaatcgagaacataggctggtcactcttcgtcttcggagtactaatcttcaccataatcgccgcaacttacgaaccagaagatcctctcttccacccatctgacaaaatcacaactttcctcacttccacatcaaacgctacacttagatccgatgactccgttgttaaaaccggtgaagatttcatgctcgctaaccaagccgcatttgcagagtttatcaacataaacgatgttgaagccagcaccaatgagactacttcagaggaagagggtaacaagttggaatgtgatgtgaatactccaattgattgcaaagatcagcaagtgtttcatcttatgatgagagctactattgacaagtttaaagatattcacttttataagtttggtaagcctgttactggcgaagaaggtgtgaattcttgtgatatggcgtggcgttataggcctagagatgggaagagtgctgctttttataaggattataggaggtttgttgttgctaagtctgagaattgtagtgtgagtgttgttgggattggtgagtatcattcgggtttgaatgcgaggaagaggaagaagaatcagaaagctgggtttgagaaaactggtgggaagaaagatgatttctctttgcctgttgttggtgaacttgtgaatgattctcttcctatggttgagtctgatagtgtgtttaagactggcaagtatttggtttatgttggtggtggagataggtgtaagagtatgaatcattttctgtggagtttcttgtgtgctcttggggaagctcagtatttgaataggactctagtgatggatttgaccttgtgtttgtcttctatctatacttcgtctggtcagaatgaggaaggcaaggatttcaggttttactttgatttcgagcatttgaaagaagctgcttctgtgttggatgaagctcagttttgggctcagtgggggaaattgcgtaagaagagaagaaatagattgaaccttcatctcgtggaggattttagggtcact

SEQ ID NO: 37627 - DNA, 2126 bp, Arabidopsis thaliana landsberg
acaaaaacactcctcaccggtcctggctaatgggcgtcgttctcccaactctcatcgtttatgctttccttctcttcttctcgtcgtcctccgccgcctctcttcaacgtcccagtaagaacccacttctttaaactcttttatctactatcatattttatctacatagcatagtttgtttgttttgaaaaaaaaatctatatggaaccgttttatctgtatagttatgtgtggaatacgaacctaaaagatcttaacttctaacaattgcatactcaactaagcaaaatgttttgttgcttaaacaaaagaataaatgaaggagaaaaagtgaaaaccccatttttttgtttcttttgcctatttactagtagtcatgaatttactctgtcgttaaaccaggtggagggcttgggcaggggaagaaggagatagctaggtcgggtttaccgggtcagattgtagatcagaagcgggtagggggacctggctcggtgcctccgacgtgtagatcgaagtgtgggaaatgtcagccgtgtaaaccggttcacgtaccaattcaacccggtttaagtatgccattggagtattaccctgaagcttggcggtgcaagtgtggcaacaagctcttcatgccctaaaaccaaaaacagatcttcatgacctaacttaattaattcttcaacaattagtgaactttttgttagctttttcttttcctcgggattaattttgtcctccttactaattggtttttactggttagctttgaggcaatattttgtttaaaagttataatatgatcataacagtttttaacacatggaaaaatatgatagtaatagttatatatagatatataaccttatcaaaaaaatgtatgatcattacaatacacatatcattccttattaagtgcgtttgtccccctattttcagaccaacccctcttgatttattagtcggctcatgtgtttcggacccataggttttaattggtccctcgagacccatttgccattagccattaggccattacttgtcgtgtgtagtagtttattaatccattatttagtctatttttctttcagacatgtcgaactcaaaattttggaaattctcttttaaattgtaatgttttttttttctggttgaactacggagaagatatacttttggctgtacacatatttctaatatcttgtacactataataacaactggagcagatttttgcatgaaacatatattcttttgggaaatgcttctagcaatcgtgtggtgttggtatgttacgtaatgcaatgggaaacaattttctaagttgtgcacataaaccaaggcgcaggcgtacgaaacacacgagttggtcttacacaacttaagcttttaatttatcttccaagtcaaagtcagttttttcacatgcaagcggggcctgtttctactatttgttcttgccagattaagtaattcattaaattgaacggaaacaaaattgaaagtaaatgtagtatatatgtacatttaatttcattcaagagataaggaaataaaggtgaaaaaaactgtgtatactgtataatgtgtgtagccatttggaatgtgtaggtgtagccatttggaatgtgtattcttctatgatttgctcctaacatgtcatacgtacgaacactaactcaaacacatgattgtttttaaaaccaatcacatgattggtttttaccacaaaaaaaatatatttattagctagttaaaatttaggtttaacttggagaaattttttggtagatttataatagataaccttacaaattaactgggccagcccaaatacacacccaatatagtccattgggcatatgaaaaatttcattatgaaaagatatacttattcgtttccaaaaacatgcattttaatattttcattgatatattatactagtcaaaagtcaacactataatcatcatgagcgttgccaacaccaaatgtggaccaatgaattctataacttcagcaaagccaatacattggatttcttctagaagcttgggtttgatgggtttcggacttactaatgttacatgagcgtcaattgtgaatccatatgcgatgattgtagcat
